United States Patent Application Publication US 2026/0191920 A1 - sequence listing, part 14

SEQ ID NO: 63885 - protein, 356 aa, unidentified
  source 1..356: note = Unknown
  REGION 1..356: note = tr|A0A0J8YHI3|A0A0J8YHI3_9GAMM S-adenosylmethionine:tRNA ribosyltransferase-isomerase; OS = bacteria symbiont BFo1 of Frankliniella occidentalis; OX = 1628855 GN=queA PE=3SV=1
MRVADFTFELPESLIAHYPQAQRSGCRLLSLNGPDGALSHGVFTDLLHKLNPGDLLVFNNTRVIPARIFGRKASGGKIEVLIERMLDDTRVLAHVRSSKAPKPGTALLLGDDESVQATMVARHDALFEIEFNDARPVLDILNAIGHMPLPPYIDRPDEDADRELYQTVYSQKPGAVAAPTAGLHFDEPLLEALREKGIETAFVTLHVGAGTFQPVRVDSIEDHIMHAEYAEVPQEVVDAVLACKARGNQVIAVGTTSVRSLESAAQAAENALIAPFFGDTKIFIYPGYHYQVIDALVTNFHLPESTLIMLVSAFAGYRHTMHAYQQAVAEQYRFFSYGDAMFITRNPEAYAEIPGQ

SEQ ID NO: 63886 - protein, 350 aa, unidentified
  source 1..350: note = Bacteriodetes bacterium
  REGION 1..350: note = tr|A0A522EVZ3|A0A522EVZ3_9BACT S-adenosylmethionine:tRNA ribosyltransferase-isomerase; OS = Bacteriodetes bacterium OX=2507565 GN=queA PE=3 SV=1
MKLSQFKFNLPKDLLAEYPSKHRDDARLMVIHRKTKKIEHKHFRDIINYFEPGDAMVVNNTQVFPARMYGNKEKTGARIEVFLLRELNRESRLWDVLVDPARKIRIGNKLYFGDNENSLVAEVIDNTTSRGRTLRFLFDGPYEEFKTLLTNLGQTPLPKYIKRKPEPLDVDRYQTVFAKHEGAVAAPTAGLHFSRELVRKLQIRGINFAELTLHVGLGTFRPIEVEDLTKHKMDSEEMEIPQSAVEVVNEAKNKGKKICVVGTTAMRAVETSVSTTQRLKPFKGWTNKFIFPPFNFNIADSMITNFHTPESSLLIMVCAFGGYDLIMKAYREAIKDKYKFFSYGDAMLIL

SEQ ID NO: 63887 - protein, 174 aa, unidentified
  source 1..174: note = Bacteriodetes bacterium
  REGION 1..174: note = tr|A0A521W7R7|A0A521W7R7_9BACT S-adenosylmethionine:tRNA ribosyltransferase-isomerase (Fragment) OS=Bacteriodetes bacterium OX=2507565; GN = EPO24_15250 PE=3 SV=1
FAKYIGSVAAPTASLHFSTRLLKQLEEKGVSISFLLLHLGLGSFRPVEVEDLSKHRMDSEFFEVPQSAVDAVNKSIDNKGNVFVCGTSTTRAIESAVTTTGHLKIARGWTDKFIFPPYDFKIVDKMITNFHLPESTMLMLVCAFAGRDLVMKAYKKAIKEKWRFYSYGDAMLII

SEQ ID NO: 63888 - protein, 351 aa, unidentified
  source 1..351: note = Bacterioplanes sanyensis
  REGION 1..351: note = tr|A0A222FL77|A0A222FL77_9GAMM S-adenosylmethionine:tRNA ribosyltransferase-isomerase; OS = Bacterioplanes sanyensis OX=1249553 GN=queA PE=3 SV=1
MKTSDFSFELPNELIASEPMSERSASRLLCLDGRDGQLQHRQFTDIEQLLEPGDLLVFNNTRVIPARLFGEKDSGGKLEALIERILPEQEVLAHVRSSRSPKAGQIITLGGERAEVLGREGSLFRLRFMMQRPVLELLDEVGHIPLPHYMEREDNQLDRERYQTVYAEKPGAVAAPTAGLHFDEPLLARLRERGVRFAYVTLHVGAGTFQPVKVENIADHQMHAEYIEVSDEVVAAVQATRAAGHRVVAVGTTSIRSLESASQSGDIAPFYGDSDIFIYPGYQFRSVDAVITNFHLPESTLIMLVSAFSGQENTLNAYRQAVQQRYRFFSYGDAMFLSHPHTPSQGADHDA

SEQ ID NO: 63889 - protein, 351 aa, Bacteriovorax sp.
  REGION 1..351: note = tr|T0C4X6|T0C4X6_9PROT S-adenosylmethionine:tRNA ribosyltransferase-isomerase OS=Bacteriovorax sp. BAL6_X; OX = 1201290 GN=queA PE=3 SV=1
MNQLNNVDLQLSSYDYDLPKEQIAERPIQGRHHSRLLVYNCETDTISHHKFNELINFLPCETTLVLNQSKVFPCRLKGHKESGGNAEVFFLTVEPNEMGQYRALVKARGKKKAGDKYIFANDLSISIVDNIEGEFLIAPSIVGNDLIDYLNANAFVPIPPYIRGGESDDQDKKDYQTVFANELGSVAAPTAGLHFSDELLEQIKGQGHDIAKVTLHVGLGTFAPVKVDNLEDHKMHSENYFVDQVNFEKIKNAKKRVAVGTTSLRTLETIWQNGVNDYTPGEMKDTSIFLHPGVDVKSIDGLVTNFHLPKSTLLMLVSALIGREKTLEIYNIAVKEGYRFFSYGDAMLILR

SEQ ID NO: 63890 - protein, 349 aa, Bacteriovorax sp.
  REGION 1..349: note = tr|T0RDZ6|T0RDZ6_9PROT S-adenosylmethionine:tRNA ribosyltransferase-isomerase OS=Bacteriovorax sp. BSW11_IV; OX = 1353529 GN=queA PE=3 SV=1
MMQNVNPEDLHLSNYDFDLPKNLIADRPVVGRHHSKLLIYNAKTNEIIHTNFLEIDKYLPSDSLLVANQSKVFPCRLLGQKTSGGKAEIFILSVVSSNNSYKALIKCRGKKNVGDQFILPHDVKATITSVQDGVFWLSFSVVDFTGYLEQVGKIPIPPYIRSGESDEKDKSDYQTVFAKNVGSVAAPTAGLHFTDEVFANLAKKNIERAFVTLHVGLGTFAPVKTDNLSDHVMHTEEYFIDAANLDKLNSKKKIIAVGTTSLRVLESSFHEGRFDVEAEKRYHTNIFLHPGKTVHSIDALITNFHLPKSTLLMLVSSLIGREKTLELYKEAITREYRFFSYGDAMLILR

SEQ ID NO: 63891 - protein, 345 aa, Bacteriovorax stolpii
  REGION 1..345: note = tr|A0A2K9NXH7|A0A2K9NXH7_9PROT S-adenosylmethionine:tRNA ribosyltransferase-isomerase; OS = Bacteriovorax stolpii OX=960 GN=queA PE=3 SV=1
MLLSSYHYDLPPELIAQRPVDGVNRHQSRLMVYNQKTDTVTHDYFYNLPKYLPADSLIVFNQSKVFPSRLLGNKKSGGKAELFFLSHETNQNGSYPALIKTRSKKNIGDEYTFAAEMKVEVSEIFSDGTFGVKVSLPAGFKNLLDYLETHALIPIPPYIRKGESDEEDKKNYQTVYSKHTGSVAAPTAGLHFTNDLLEKLKESNVERAFVTLHVGLGTFKPVTVAHLKDHVMHSEEYFVDEENLSKIRNAKNVFAVGTTSLRVLESSYGKDISPNEHYKTQIFLHPGVDVKSVSGLITNFHLPESTLLMLVSALIGRTKTLELYELAVKEKYRFFSYGDAMLILR

SEQ ID NO: 63892 - protein, 102 aa, unidentified
  source 1..102: note = Unknown
  REGION 1..102: note = tr|A0A496UTA4|A0A496UTA4_9BACT S-adenosylmethionine:tRNA ribosyltransferase-isomerase (Fragment) OS=bacterium OX=1869227 GN=DRQ50_06495 PE=3 SV=1
MTNNPYEFDLPAALIAQEPVARRGDSRLLLAEPGHGPVGERVFDELGEVLAAGDLLVLNESTVLPARLATRRVDTGGRVEILLIAPRGDDGAWSAMARPARR

SEQ ID NO: 63893 - protein, 232 aa, unidentified
  source 1..232: note = Unknown
  REGION 1..232: note = tr|A0A522WFP7|A0A522WFP7_9BACT S-adenosylmethionine:tRNA ribosyltransferase-isomerase (Fragment) OS=bacterium OX=1869227 GN=EPN16_03165 PE=3 SV=1
MNLSEFDYYLPKELIAQGPLGRRDSSRLMVVDRKRGSVSHKSFSGLAGYLQEDDVIALNDTKVIPARIIGHKKDTLGKVDALLCDRLSGRTFRALIKPNLRIGQEVIFGHGSVKAKLTKEKILEFNKELTLELMERIGVMPLPPYIKRIPSKADEERYQTVYAKSPGAIASPTAGLHFTKKLLQEIKDRSANIASVTLHVGIGTFKPVKCPDVRQHIMEKEAFSVPAQTVSA

SEQ ID NO: 63894 - protein, 343 aa, unidentified
  source 1..343: note = Unknown
  REGION 1..343: note = tr|A0A532UHT9|A0A532UHT9_9BACT S-adenosylmethionine:tRNA ribosyltransferase-isomerase; OS = bacterium (candidate division B38) B3_B38 OX=2012999; GN = queA PE=3 SV=1
MKVSEFDFHLPPELIAQYPSPRRGDSRLMVVDRQSGKVTHAHFSLFPQLLHAGDLLVLNNTMVFPARLLGHKEGKNGKVEVLLAKRLTQNCWEALVRPGRKLRPVDRVIFGDGELQATIKERGERGKRLLQFHYRGDFFQLLEKLANPPLPPYIKRAASAEDRLRYQTIFAEERGAIAAPTAGLHFTPETLSSLKNQGVEQVAITLHIGVGTFQPIEAKEVEEHKMEEEYYRITPQAATKLNGALEEGRRIIAVGTTTTRALESASSATKRIPSGEGWTNLFIYPGYQFELVKALLTNFHLPRSSPLMLVCAFAGRDLIMEAYQQAIVAGYHYYSYGDCMLIL

SEQ ID NO: 63895 - protein, 355 aa, unidentified
  source 1..355: note = Unknown
  REGION 1..355: note = tr|A0A2M7V0Y1|A0A2M7V0Y1_9BACT S-adenosylmethionine:tRNA ribosyltransferase-isomerase; OS = bacterium (Candidatus Moisslbacteria) CG_4_10_14_0_2_um_filter_36_61 OX=2014 283 GN=queA PE=3; SV = 1
MTDLSLFDYELKPELIAQEPKEPRDHSRLLILNRNGEIIHKKFYQILNFLDSGDVLVFNNTEVVNSRLFGKKFETSGKVEIFLLRPSNKAVFDETSWPAKWIIISRPKLKKSLKIKFSHSLSGEIEKENLIVFNKQGETLKKEISKLGQVPLPPYIKHPTSLSFKNYQTVYAKNKGSVAAPTAGFHFTEKLLDKIREKGTETEFLTLHVGLGTFEPIRVKEIEKHQMQPEYFSLSKETAFRLNEAKIKKKRIIAVGTTVTRALEHCVDKNGFLKPKKGWNSLFIYPGFKFKFVDSLITNFHLPQSTLLLLVSAFVESATADKRVFTGRELILKAYQEAIKEKYRFYSFGDAMFII

SEQ ID NO: 63896 - protein, 98 aa, unidentified
  source 1..98: note = Unknown
  REGION 1..98: note = tr|A0A2G9YCB1|A0A2G9YCB1_9BACT S-adenosylmethionine:tRNA ribosyltransferase-isomerase (Fragment) OS=bacterium (Candidatus Ratteibacteria) CG23_combo_of_CG06-09_8_20_ 14_all_48_7 OX=2014292; GN = COX46_02740 PE=3 SV=1
RKEGKKIVAVGTTTVRTLEGNYLQGCLFSGTGSVNIFIYPGYPFQMVDKLITNFHLSRTTTLLLTAAFAGKELLLKAYDYALKEGFRFGSYGDAMLIL

SEQ ID NO: 63897 - protein, 350 aa, unidentified
  source 1..350: note = Unknown
  REGION 1..350: note = tr|A0A3A9A5T4|A0A3A9A5T4_9BACT S-adenosylmethionine:tRNA ribosyltransferase-isomerase; OS = bacterium 0.1xD8-71 OX=2320099 GN=queA PE=3 SV=1
MTELKKSDFYFELPEELIAQDPLEDRSSSRLLVLDKVTGKTKHHVFKEILEYLRPGDCLVLNNTKVLPARLYGVKEDTGAAIEVLLLKRKENDVWETLVKPGKKARPGTRLLFGDGCLRAEVLEVVEEGNRLIRFSYEGIFEEILDRLGEMPLPPYITHKLQDKNRYQTVYAKYEGSAAAPTAGLHFTDQLLSQIADKGVETAYVTLHVGLGTFRPVKVDNLLEHHMHSEYYEVTQEAADKINRVKVAGGRIICVGTTSCRTVESAADEKGMVQAGCGNTEIFIYPGYQFKVLDCLITNFHLPESTLVMLVSALAGRENVLAAYQEAIRERYRFFSFGDAMFITDNCFIS

SEQ ID NO: 63898 - protein, 341 aa, unidentified
  source 1..341: note = Unknown
  REGION 1..341: note = tr|A0A3A9AU61|A0A3A9AU61_9BACT S-adenosylmethionine:tRNA ribosyltransferase-isomerase; OS = bacterium 0.1xD8-82 OX=2320100 GN=queA PE=3 SV=1
MKTSDFYFDLPGELIAQDPLEERTSSRLLILDKKTGDIKHQAFRNIIDYLNPGDCLVLNNTKVLPARLLGVKKDTGAGIEILLLRRREGNIWETLVKPGKKARPGTQLIFGDGLLQAEVLDVAAEGNRLVRFSYEGIFEEVLDSLGEMPLPPYITHKLKDKNRYQTVYAKYDGSAAAPTAGLHFTRELLEQIEAKGVKLAYVTLHVGLGTFRPVKAEHILEHHMHSEYYQVTAEAAQTINETKKSGKRVICVGTTSCRTVESAADEKGMLKECCGDTDIFIYPGYRFKVLDCLITNFHLPESTLLMLVSALAGRENVLKAYDRAVEERYRFFSFGDAMLVI

SEQ ID NO: 63899 - protein, 347 aa, unidentified
  source 1..347: note = Unknown
  REGION 1..347: note = tr|A0A3A8U207|A0A3A8U207_9BACT S-adenosylmethionine:tRNA ribosyltransferase-isomerase; OS = bacterium 1XD21-70 OX=2320103 GN=queA PE=3 SV=1
MNVKDFSFDLPQELIAQDPLEDRSASRLLVMDKHTGEIRHRIFRDITEYLKPGDCLVVNNTKVIPARLFGVKEDTGAKIEVLLLKRQEGDVWETLVKPGRKCRPGTKLVFGDGLLKGTVIEVAEEGNRLIRFLYDGIFEEVLDRLGQMPLPPYITHELKDKNRYQTVYAKHDGSAAAPTAGLHFTEGLLKKIQDKGVGIAHVTLHVGLGTFRPVKVENVLDHHMHSEFYVVEEGQAEKINRAKAAGGRVICVGTTSCRTLESAAAPDGTVKAGSGWTDIFIYPGYSFKAMDCLITNFHLPESTLVMLVSALAGREHVLHAYEEAVREKYRFFSFGDACFFTDLGSGQ

SEQ ID NO: 63900 - protein, 343 aa, unidentified
  source 1..343: note = Unknown
  REGION 1..343: note = tr|A0A3A9G5P9|A0A3A9G5P9_9BACT S-adenosylmethionine:tRNA ribosyltransferase-isomerase; OS = bacterium 1XD42-44 OX=2320106 GN=queA PE=3 SV=1
MNIEEFDFDLPEELIAQTPLKERTASRLLVLNKQTKEIAHRHFPDIKEYLQPGDCLVLNNTRVLPARLHGVKEETGASIEVLLLHQVEGDSWEILAKPAKKVKLGSVIRFGDGLLTATCTEIKEHGGRVVQFAYEGIFYEVLDQLGEMPLPPYIKEQLSEKERYQTVYAKEEGSAAAPTAGLHFTTELLNELKQMGVNIAFITLHVGLGTFRPVSAETVEDHKMHAEFYHMDQHTADTLNHVKQSAGRIISVGTTSTRTLETIARDNNGEFREASGWTDIFIYPPYQFQAIDGLITNFHLPKSTLIMLISAFAGKDIVMETYGKAVQERYRFFSFGDAMFIYA

SEQ ID NO: 63901 - protein, 342 aa, unidentified
  source 1..342: note = Unknown
  REGION 1..342: note = tr|A0A3A9FP11|A0A3A9FP11_9BACT S-adenosylmethionine:tRNA ribosyltransferase-isomerase; OS = bacterium 1XD42-54 OX=2320110 GN=queA PE=3 SV=1
MKTSDFYFNLPQELIAQDPLEDRSASRLLVLGKESGSITHRHFTDILDYLRPGDCLVLNNTKVIPARLYGVREGTGAVIEILLLKRREHDIWETLVKPGKKAKPGTKLIFGDGILQGEVLDIVEEGNRLIQFSYEGIFEEILDKLGQMPLPPYITHELKDKNRYQTVYAKHEGSAAAPTAGLHFTPKLLEQVRDQGIQIAEVTLHVGLGTFRPVKVEDVTQHHMHSEFYEVTEEAASLIRQTKASGGRVICVGTTSCRTIESVATRFDGNIRACSGWTEIFIYPGYQFQLMDGLITNFHLPESTLLMLVSALAGKEHILHAYEAAVKEEYRFFSFGDAMFIV

SEQ ID NO: 63902 - protein, 340 aa, unidentified
  source 1..340: note = Unknown
  REGION 1..340: note = tr|A0A3A8YV80|A0A3A8YV80_9BACT S-adenosylmethionine:tRNA ribosyltransferase-isomerase; OS = bacterium 1xD42-67 OX=2320107 GN=queA PE=3 SV=1
MKTSDFDFQLPEELIAQTPLERRDTSRLLTLDKHSGAVGHHYFYDLPAFLRPGDCLVLNDSRVLPARLIGRRPTGGTCEVLLLIDRGGDLWECLVRPGRKLRTGAQIIFGDGQLTASVEAELDDGKRAVRFHYQGIFLEILEQLGKMPLPPYIKAELQDQERYQTVYSRVVGSAAAPTAGLHFTPELLAQIQGMGIKVCYVTLHVGLGTFRPVKAEDIQDHEMHSEFCMIPQETADTINETKQSRGRVICVGTTSCRTVESFAAEDGTMSECSGWTNIFIYPGYRFKVLDALITNFHLPQSTLIMLVSALAGREHVLDAYETAVRERYRFFSFGDAMMIS

SEQ ID NO: 63903 - protein, 341 aa, unidentified
  source 1..341: note = Unknown
  REGION 1..341: note = tr|A0A3A9G1B8|A0A3A9G1B8_9BACT S-adenosylmethionine:tRNA ribosyltransferase-isomerase; OS = bacterium 1XD42-8 OX=2320102 GN=queA PE=3 SV=1
MKTSDFDFQLPQELIAQTPIEPRDHSRLLVLERATGEIAHRTFYDVIDYLNPGDTLVVNTSRVIPARLFGAKEHTGGSMQFLLLEQKERDIWEIMVRPGKKAKPGARFVFGNGSLVGEIIKVLEDGNRLVHFEYTGDFYTILENIGKMPLPPYITKELENGERYQTIYSHQLGSAAAPTAGLHFTEELMQKLREKGIRIAEVVLHVGVGTFKPVKAEDINQHHMHSEHYFLSAQTAEIINQTKAEGKRVIAVGTTSCRTLESVAAKLGHIAEDEGDTDIFIYPGYSFRVLDGLITNFHLPKSTLIMLVSAFAGYENIMHAYETAVQEKYRFFSFGDAMFIL

SEQ ID NO: 63904 - protein, 344 aa, unidentified
  source 1..344: note = Unknown
  REGION 1..344: note = tr|A0A3A9FFW2|A0A3A9FFW2_9BACT S-adenosylmethionine:tRNA ribosyltransferase-isomerase; OS = bacterium 1XD42-8 OX=2320102 GN=queA PE=3 SV=1
MESLKKGDFYFYLPEEQIAQDPLENRSDSRLLCLEKETGEIHHHFFYEIGKFLKKGDCLVLNDTKVLPARIMGVKEKTGTVIEVLLLKRKEKAVWETLVKPGKKAKPGTFLSFGDGILKGEVMEIIEGGNRLIRFDYEGIFEEKLEQLGEMPLPPYITHKLKDKNRYQTVYAKHSGSAAAPTAGLHFTKALLSQIKEKGVDIVSVTLHVGLGTFRPVKEENIRDHHMHEESYMILEEAAKTINKAKAEGRRIIAVGTTTCRTLEAASDEKGFVHPGQGETSIFIYPGYEFRVIDGLITNFHLPESTLLMLTSALAGREHVLEAYREAVLKKYRFFSFGDAMLIK

SEQ ID NO: 63905 - protein, 344 aa, unidentified
  source 1..344: note = Unknown
  REGION 1..344: note = tr|A0A3A9ACX0|A0A3A9ACX0_9BACT S-adenosylmethionine:tRNA ribosyltransferase-isomerase; OS = bacterium 1xD42-87 OX=2320113 GN=queA PE=3 SV=1
MTELKKSDFYFDLPQELIAQDPLEDRSASRLLVLDRKTGAVEHHTFREITNYVRSGDCLVLNNTKVIPARLMGVKEDTGAAIEVLLLKRRDNDVWETLVKPGKKARPGAKIVFGDGCLRAEVLDVVEEGNRLLRFDYEGIFEEVLDRLGEMPLPPYITHKLQDKNRYQTVYAKYEGSAAAPTAGLHFTEELLAQIEEMGVNIAYVTLHVGLGTFRPVKADNLSEHHMHSEHYEVTPETAELINRTKESGGRVICVGTTSCRTVESAADESGRVQPGCGDTEIFIYPGYRFKVLDCLITNFHLPESTLVMLVSALAGRENVLAAYREAVEERYRFFSFGDAMLVI

SEQ ID NO: 63906 - protein, 341 aa, unidentified
  source 1..341: note = Unknown
  REGION 1..341: note = tr|A0A3A8YHL8|A0A3A8YHL8_9BACT S-adenosylmethionine:tRNA ribosyltransferase-isomerase; OS = bacterium 1xD8-6 OX=2320116 GN=queA PE=3 SV=1
MKTSDFAYDLPEELIAQDPLADRASSRLLVLDKKTGERAHKNFHEIVHYLRRGDCLVINDTKVIPARLIGQKEGTGGKVEVLLLKRRENNIWETLVKPGKKARPGAEIVFGGGLLRAEVLEVVEEGNRLVKFSYEGIFEEILDQLGQMPLPPYITHELEDRNRYQTVYAAYEGSAAAPTAGLHFTKELLAEIEDMGVSIARVTLHVGLGTFRPVKVEDVAKHHMHTEYYRVTEEAANIINGTKKRGGRVICVGTTSCRTIESAAAADGTVVPGEGDTDIFIYPGYRFKVLDCLITNFHLPESTLLMLVSALAGREQVMAAYQEAVAERYRFFSFGDAMFIY

SEQ ID NO: 63907 - protein, 344 aa, unidentified
  source 1..344: note = Unknown
  REGION 1..344: note = tr|A0A3A9F1V5|A0A3A9F1V5_9BACT S-adenosylmethionine:tRNA ribosyltransferase-isomerase; OS = bacterium 1XD8-76 OX=2320115 GN=queA PE=3 SV=1
MQELKKSDFYFELPQELIAQDPLKDRASSRLLVLDKETGEIEHHVFRDILRCLVPGDCLVLNNTKVIPARLLGVKEETGAAVEVLLLKRKEKDIWETLVRPGKKMRPGAKLSFGGGLLGAEVLEVVEEGNRLIRFTYEGIFEEVLDRLGEMPLPPYITHKLQDKNRYQTVYAKYEGSAAAPTAGLHFTTELLQEIERMGVQIAYVTLHVGLGTFRPVKEENVLEHHMHSEYYEVSAEVAEKINRTKAEGKRVICVGTTSARTIESAADENGHLAACSGNTEIFIYPGYRFRVLDCLLTNFHLPESTLIMLVSALAGREKVLSAYEEAVREKYRFFSFGDAMFIY

SEQ ID NO: 63908 - protein, 341 aa, unidentified
  source 1..341: note = Unknown
  REGION 1..341: note = tr|A0A4Q2BSX2|A0A4Q2BSX2_9BACT S-adenosylmethionine:tRNA ribosyltransferase-isomerase; OS = bacterium 1XD8-92 OX=2320884 GN=queA PE=3 SV=1
MKTSDFYFELPQELIAQDPLEERSASRMLILDKNTGATRHENFKNIINYLKPGDCLVLNNTKVLPARLLGVKEDTGAAVEVLLLRRRSGDVWETLVKPGKKLRPGAKVSFGDGLLRAEILEIEAEGNRLVRFFYNGIFEEVLDRLGEMPLPPYITHKLQDKNRYQTVYARYDGSAAAPTAGLHFTEELLHEIEEKGVKLAYVTLHVGLGTFRPVKVENILEHHMHSEYYQITAEAAETINEAKRSGCRVICVGTTSCRTVESAADENGLLQACSGNTEIFIYPGYRFKVLDCLITNFHLPESTLVMLVSALAGREHVLEAYREAVEERYRFFSFGDVMLVK

SEQ ID NO: 63909 - protein, 344 aa, unidentified
  source 1..344: note = Unknown
  REGION 1..344: note = tr|A0A4Q2BNM7|A0A4Q2BNM7_9BACT S-adenosylmethionine:tRNA ribosyltransferase-isomerase; OS = bacterium 1XD8-92 OX=2320884 GN=queA PE=3 SV=1
MKEWKKSDFYFDLPEALIAQDPLEDRSASRLLVLNKRTGEREHHFFYEITDYLEPGDCLVLNNTKVIPARLTGIRETTGAAVELLLLKRREKDVWETLVKPGKKARPGTVICFGDGLLKGEILEVVEEGNRLVRFTYQGIFEEVLDRLGEMPLPPYITHKLEDKNRYQTVYAKYEGSAAAPTAGLHFTGELLKKIEEKGVSIAYVTLHVGLGTFRPVKAENILEHHMHSESYHVPEEAAEKINRAKCEGKRVICVGTTSCRTVESAVDENGMLRESSGDTDIFIYPGYHFKVMDALITNFHLPESTLVMLVAALAGRENVLDAYKEAVEEKYRFFSFGDVMLIQ

SEQ ID NO: 63910 - protein, 340 aa, unidentified
  source 1..340: note = Unknown
  REGION 1..340: note = tr|A0A0S4M2K9|A0A0S4M2K9_9BACT S-adenosylmethionine:tRNA ribosyltransferase-isomerase; OS = bacterium 2013Arg42i OX=1561003 GN=queA PE=3 SV=1
MDLTTSDFDFEMDHSYIAQHPEENREFAKLMNVSDGERIRHQFIYDLEEIITDEYIIVRNNTKVVCARLRCTKATGGKIEVFLERLVDNNTAIVQIRSHKKVKLPLSVFINTDNKITIRERFDDSFFIAESSNIMELFNQYGEVPIPHYLRRDPSNRDKHDYQTVFASIPGAVAAPTAGLHFSENLIEKLINKGVEFYDITLHVGAGTFNPIRTDNIMEHEMHEEYYRVPNETREAIESGKRNGKKTLAIGTTVVRALESFFIQEQKDDQWKPTRLFITPGFKFNAVDMLLTNFHLPKSSLIILVSSFAGKDLIKKCYLDAMKNNYRFFSYGDAMLLKRE

SEQ ID NO: 63911 - protein, 399 aa, unidentified
  source 1..399: note = Unknown
  REGION 1..399: note = tr|A0A0M9DRM7|A0A0M9DRM7_9BACT S-adenosylmethionine:tRNA ribosyltransferase-isomerase; OS = bacterium 336/3 OX=1664068 GN=queA PE=3 SV=1
MESFNLQDYIYDLPTHKIAQQPLAKRDDAKLLVYQHETIKDYTFHQIPDLLPADSFLFFNNTKVIPARLFFTKPTGATIEIFLLEAKEPSNIVAITMEAKKRCVWNCMIGNRKRFKEALHQELTIENQTLHLQVNLLEENEVEFVWDNDAISFAEILHYLGKLPLPPYIKREAQKSDEERYQTVFAEKEGAVAAPTASLHFTEEVLEKLQQKGILYDFLTLHVGAGTFQPVKETDDFRNHTMHAEQIVVSKKNIENILQNLDKTIVAVGTTGMRTLESIYWFGAKIIDQNITDTTIWVEKLLPYSIQSPASPKEALEAILDLMQKNNLEELRGQTEIFIFPSYRFKICKGLITNFHMPETTLILLVASFMGQNWRKVYEHALNNEYRFLSYGDSSLLLI

SEQ ID NO: 63912 - protein, 350 aa, unidentified
  source 1..350: note = Unknown
  REGION 1..350: note = tr|A0A0N0CZ99|A0A0N0CZ99_9BACT S-adenosylmethionine:tRNA ribosyltransferase-isomerase; OS = bacterium 336/3 OX=1664068 GN=queA PE=3 SV=1
MKLSDYAFDLPTNLIALYPNPNRDEAKLMVINRATQTIEHKLFKDVLDYFDDGDVMAVNDTKVFPARLYGNKEKTGADIEVFLLRELNKPAHLWDVLVDPARKIRVGNKLYFGDGELVAEVIDNTTNRGRTIRFLWDGEEEEFYKTVYGLGETPLPKIITKRRKTEKEDEDRFQSIFAKETGAVAAPMACLHFTKQLVKRLAIKGVDIQPLTLHVSLGTFKSVDVEDLTKHKTDSEQFKIPEATAERINQALDSKKRVCAVGSSVIRSLESSVSANGRVKPVDAWTDKFIFTPYEFKIANSYITNFHIPESTLLMAACAFGGYDLIMKAYEIAIQEEYRFHTYGDAMLII

SEQ ID NO: 63913 - protein, 312 aa, unidentified
  source 1..312: note = Unknown
  REGION 1..312: note = tr|A0A101EE90|A0A101EE90_9BACT S-adenosylmethionine:tRNA ribosyltransferase-isomerase; OS = bacterium 42_11 OX=1635281 GN=queA PE=3 SV=1
MVLNREKGTIEHAMFYMLPQFLKEGDLLVFNKSKVIKARLVGTKRNGGARVELLLIRRLDDTLWEVIARPAKRLKLGTEVVFADGLSCVVEEVLDEGFRIVRFSVGGERFLSILESIGEVPTPPYIKRKIKDPSLYQTIYAEVPGSVAAPTAGFHFTDRVLEELRKKGIKMTFLILHVGAATFLPVRGDIRKHKVPPEYYEVPEECALEVNSALREGRRVIAVGTTTTRVLESVCDDNGVISPKKGWTDLFILPGFKFRVLKGLITNFHLPRTTLLALVSAFAGEEFLKRAYEIAVKERYRLYSFGDAMLIL

SEQ ID NO: 63914 - protein, 349 aa, unidentified
  source 1..349: note = Unknown
  REGION 1..349: note = tr|A0A1H8G6M9|A0A1H8G6M9_9BACT S-adenosylmethionine:tRNA ribosyltransferase-isomerase; OS = bacterium A37T11 OX=1855384 GN=queA PE=3 SV=1
MKLSQFKFNLPESLIASEPTENRDESRLMVLHRKTGEIEHKIFKDMLGYFDDKDVMILNNTKVFPARLYGNKEKTGATIEVFLLRELNKELRLWDVLVDPARKIRVGNKLYFGENDLLVAEVVDNTTSRGRTIRFLFDGTDEEFRRNIEILGETPLPKYIKRRPTPEDKFRYQTIFAKHEGAVAAPTAGLHFSRELMKRLELKGIEFAEVTLHIGLGTFRQVEVEDLTKHKMDSEQFIIEQKDADLVNKALDEKRRVCAVGTTSMRSIESAVSANRRLKAANEWTSKFIFPPYDFSIANSMITNFHTPESTLLMMVSAFGGYEQVMHAYEVAVKEKYRFYSYGDAMLII

SEQ ID NO: 63915 - protein, 353 aa, unidentified
  source 1..353: note = Unknown
  REGION 1..353: note = tr|A0A1H9QI07|A0A1H9QI07_9BACT S-adenosylmethionine:tRNA ribosyltransferase-isomerase; OS = bacterium A52C2 OX=1855383 GN=queA PE=3 SV=1
MRVDDFDFELPEECIALRPAEPRDAAKLLVVRPEARLEDRIARDLPDLLSPGDILVFNNTRVISGQLSGTRERDGNVVAVSATLIERIDSRSWWSFAKPGRRLAPGDRIRFGEGERLSATVGEKLDDGRIRLDFDLSGPALDIAIAETGAPPLPPYIASKRAADERDRSDYQTVYAEKDGAVAAPTAGLHFTDDLLRRLEKAGIGHAFVTLHVGAGTFLPVKVDDTADHHMHTEIGTLDQATADRLNAARAAGHRVVAVGTTSMRLLESAAGEDDVIRPFSGGTDIFITPGYRFRAVDAMVTNFHLPRSTLFMLVSAFAGLETMKAAYGHAIASGYRFYSYGDGSLLFPDRKT

SEQ ID NO: 63916 - protein, 340 aa, unidentified
  source 1..340: note = Unknown
  REGION 1..340: note = tr|A0A1V6C5P4|A0A1V6C5P4_9BACT S-adenosylmethionine:tRNA ribosyltransferase-isomerase; OS = bacterium ADurb.Bin132 OX=1866923 GN=queA PE=3 SV=1
MLFSIMELKDFIYELPKELIAQKPSDVRDMSRLLVLDRSIGSLKEGIFRDVLSYFKKGDVLVLNDTKVIPARIFGKKPTGGNVEVFLLKWESPSTWKCLVKPGSRLKEGAEVIIDGHRAVIMERTSDGGRIVKFDMEDERILELGKIPFPPYVHNEKIDPGRYQTVYAKVPGAVAAPTAGLHFTEQLLQELSLNGVSIVKVTLHVGIGTFRPVKTNNIDEHKMEFEWYSVSEEAASTINSAKKTGGSIFACGTTVVRTLESSSGKDGLVVAGSGETNLFIKPGYSFKVVDHLITNFHLPGSTLLLLVSALASREKIFEAYEYAIEKRFRFYSFGDAMLIL

SEQ ID NO: 63917 - protein, 341 aa, unidentified
  source 1..341: note = Unknown
  REGION 1..341: note = tr|A0A1V6ADL2|A0A1V6ADL2_9BACT S-adenosylmethionine:tRNA ribosyltransferase-isomerase; OS = bacterium ADurb.Bin157 OX=1866935 GN=queA PE=3 SV=1
MKTELFDYFLPPELIAQVPADKRSESRLLVYERDKKKISHRQFSNIVDYFEPGDLLIVNSSKVIPARLYTKDKIEGSKECEVFFIKLLQDGRFEAMVKPGKKFKVGRKHTLPGNTVIEVEEILDSGLRIMKTTDGKDPVEVFRKYGEMPLPPYITSRESEPERYQTVYSKLEGSVAAPTAGLHFDENVFKALKDKGVKVAEVILHVGLGTFKPVEADDLDDHQMHEEVFFVPDETAKLFKETKERNNKVWACGTTSVRTLESAIRDDKTLKTGWQATTCFIKPGYKFLAIDHFITNFHLPKSTLIVLVSAFAGREEILNLYAEAIKEKYRFYSFGDSMVMI

SEQ ID NO: 63918 - protein, 370 aa, unidentified
  source 1..370: note = Unknown
  REGION 1..370: note = tr|A0A1V5WR59|A0A1V5WR59_9BACT S-adenosylmethionine:tRNA ribosyltransferase-isomerase; OS = bacterium ADurb.Bin212 OX=1866924 GN=queA PE=3 SV=1
MSSNLKDYNYALPEGLIATEPLVCRDQSKLMVLKRSSGQIENKKFSDILEYFHEGDLLVLNDTKVFPARLIGYNQNGAAVEILLCKPVADGIWQALGKNLKERDLVKFDSSKLQAEIVSKSGREILVRFNTVQNLLWDEIEKIGQMPLPPYISKKNTRHDSFHRERYQTVFAQKIGSVAAPTAGLHFTLEIIEKLQKKGVIVEHLTLHVGLGTFLPVESSDVSQHKMHSEYYHVSKELIDKIIHTKSAGGRVISVGTTVCRAIETVFSEPAIAELLLKNTRLIASNALQSSMESKLEEVSDIFGETDIFIYPPYKFKCVDGLITNFHLPKSTLLMLVSAMAGREYILEAYQHAVKNGYRFYSYGDAMYIE

SEQ ID NO: 63919 - protein, 373 aa, unidentified
  source 1..373: note = Unknown
  REGION 1..373: note = tr|A0A1V5UQX9|A0A1V5UQX9_9BACT S-adenosylmethionine:tRNA ribosyltransferase-isomerase; OS = bacterium ADurb.Bin243 OX=1866936 GN=queA PE=3 SV=1
MTNENTNHKFDITSYDFALDDSKIAVRPYLKRDEARLLVFDRSSGEMASKKFGDIVDYFNNGDMLILNETRVFKARLYGTKHESGARIELLLLRRSGDNVFSALVKPSRRIKPGVRVHIDGGLLDAVAIGRGETDGAWLFEFEKKEFAHLDLFDIVDMCGHVPLPPYIIKNKPAPVEEGGVFKDDQIDCEGYQTVYARESGSVAAPTAGFHFTPDLLSRLCEKGVAIEKITLHVGLGTFKLVEKNDIRDHVMHKELIKIEKDSYSRITGFIKNKNGKKLFCCGTTSVRTIESIDRVVYDPAANSYCAETDLFIYDGYKFKNADAMITNFHLPKSTLLMMVSAFMGNDKMKSAYDFAINNDFMFYSYGDAMLVI

SEQ ID NO: 63920 - protein, 346 aa, unidentified
  source 1..346: note = Unknown
  REGION 1..346: note = tr|A0A1V5T3U3|A0A1V5T3U3_9BACT S-adenosylmethionine:tRNA ribosyltransferase-isomerase; OS = bacterium ADurb.Bin270 OX=1866926 GN=queA PE=3 SV=1
MNLSDFDYEYPKELIAQHPLAARDESRMMVVHRSDSSFSHSGIKEIASFIEPGDIVVINETKVAPARIFGKRGNGEETEILLIEQTKTPNLWKALLKRAKKIRPGEKFFFGMQATATARGRDGIYLMLEFKGNSLKLAMEKHGVPPLPPYIERRGFEAYSQEDRERYQTVYARHTGSAAAPTAGLHLTPQIVRSIEDRKASVEKIVLHVGIDTFAPVRAEKLDDHKMHGERVIIQRETSKKIFDAKKLGRRIVAVGTTTTRALESAALRSETGEIAHDQWTTDLFIKPGFEFKVVDAMLTNFHQPKSTLLVMISAFAGREFILSCYEEAIKERYRLFSFGDCMLIL

SEQ ID NO: 63921 - protein, 338 aa, unidentified
  source 1..338: note = Unknown
  REGION 1..338: note = tr|A0A1V5PPA3|A0A1V5PPA3_9BACT S-adenosylmethionine:tRNA ribosyltransferase-isomerase; OS = bacterium ADurb.Bin363 OX=1866927 GN=queA PE=3 SV=1
MKLSDFDYYLPRKLIAQTPASKRENSRLLIFKEDKIYHQTFNKCINYINEGDVLVINDTRVFPARLYGEKIPTGGKVELLLVEEINKGFWKCLAKPSRRLKPGNNIIFSNCLKARVTGRENNGTRIISFTDPSYKEKIFEIGEIPLPPYIKTPLKEKERYQTIYSKEIGSIAAPTAGLHFTETLLENLQKKGVIIAKITLHVGLGTFRPVKTDEIELHKMEKEYMEITEETIEKINNARTRGGKIIAVGTTSVRTLETSSDERGILRAGNQKTNLFIYPGYKFKLVNGIITNFHLPKSTLFMLVCAFIGIERVQALYQEAIRLKYRFYSFGDACLFFK

SEQ ID NO: 63922 - protein, 352 aa, unidentified
  source 1..352: note = Unknown
  REGION 1..352: note = tr|A0A1V5NG99|A0A1V5NG99_9BACT S-adenosylmethionine:tRNA ribosyltransferase-isomerase; OS = bacterium ADurb.Bin400 OX=1866928 GN=queA PE=3 SV=1
MQLSDIDYHLPPELIADRAIEPRDQARLLVLDRQTGQIMHRRFSDIAEHLTPGDVLVMNNSKVIPARLIGRKEMTGGQVELLLEYEVEPGLWRVIGKKITQANRIIFDDSPLEAAVEDKRAGHYLVRFNMIGAHFMKEIDRIGQVPLPPYIVRKRRESATGLVQPSEHDKDNYQTVYASTPGSVAAPTAGLHFTERLLLDLKQKNIETVFLTLHVGYGTFAPIKDSIDQHVMHSEFYHVDASSLNTILRAKEAGRRIIAVGTTTTRVLEHLFAEMDKNPHAFALQGWTNIFITPGYNFKCIDGLITNFHLPKSTLLLLVSALAGHSNIMRAYKEAISKQYRFYSYGDAMLII

SEQ ID NO: 63923 - protein, 141 aa, unidentified
  source 1..141: note = Unknown
  REGION 1..141: note = tr|A0A1V5LRB5|A0A1V5LRB5_9BACT S-adenosylmethionine:tRNA ribosyltransferase-isomerase; OS = bacterium ADurb.Bin425 OX=1866929 GN=queA PE=3 SV=1
MRLTLHVGAGTFKPIEESVEDHTIEEELYTICEETAAAVNKAKEEGRRVIAVGTTSLRALESAVVNGKLQARENASTSLYVKPGYEFAVIDGMITNFHLSKSSLLVLVAALTGRDLIMKAYQEAIKERYRFYSYGDAMLIL

SEQ ID NO: 63924 - protein, 342 aa, unidentified
  source 1..342: note = Unknown
  REGION 1..342: note = tr|A0A1V5LMI7|A0A1V5LMI7_9BACT S-adenosylmethionine:tRNA ribosyltransferase-isomerase; OS = bacterium ADurb.Bin431 OX=1866931 GN=queA PE=3 SV=1
MKLSDFKYNLPDKLIAQYPSDERDQCRLMILNRESGTMEEGIFADVIDYMEKGDSLVINQTKVFPARLEGSKDKTDARVEVFLLRELEQGLWEVLVKPARKVRVGNRLTIGNELACDVIDNTVSGGRVVRFNYSGDFYEIVDRIGKSPLPPYIRREPEPSDKLRYQTVYARERGAVAAPTAGLHFTEPLLKKIKAKGIKIVPLTLHLGLGSFRAVVVEDLSRHKMDSEFFEISEEAAEAINETMRSKHKVVAVGTSVVRALEANVTSEGWAKAGHGWTDKFIYPPYEFRIVDRMITNFHLPQSTLLMLVSAFAGRDLVFKAYRKAIRDKFMFFSYGDSMLIL

SEQ ID NO: 63925 - protein, 154 aa, unidentified
  source 1..154: note = Unknown
  REGION 1..154: note = tr|A0A1V5KLV8|A0A1V5KLV8_9BACT S-adenosylmethionine:tRNA ribosyltransferase-isomerase; OS = bacterium ADurb.Bin478 OX=1866932 GN=queA PE=3 SV=1
MIDRIEKKGVTVVRIVLHLGLGSFRPVVVEDLSRHKMDSEFFDISDQAANQINAAKRNKKKVIAVGTSVVRALETSVTSEGWAKSGRGWTDKFIYPPYDFKIVDHMITNFHLPCSTLLMLVSAFASRDLILKAYRKAIRDKYMFYSYGDAMMIL

SEQ ID NO: 63926 - protein, 344 aa, unidentified
  source 1..344: note = Unknown
  REGION 1..344: note = tr|A0A4Z0J956|A0A4Z0J956_9BACT S-adenosylmethionine:tRNA ribosyltransferase-isomerase; OS = bacterium BCRC 81129 OX=2487722 GN=queA PE=3 SV=1
MGYTLDDFDYDLPHELIAQTPIKQRDTSRLLVLDHTAGTLADKHFYDILDELHAGDALVMNNSRVMPARLYGTKPDTGGHVEVLLLHNVAGDVWETLMKPAKRLRVGQQVVFGDGQLTATVTEERDDGIRLIEFHYDGIFMEILERLGETPLPPYIKEKLDDPDRYQTVYAKENGSAAAPTAGLHWTADLLAKVAAKGVKLVYVTLHVGLGTFRPVEEANIEDHTMHSEFYRLDADAAATLNEVRANGGRIIATGTTSIRTLETIGTKFNGQIRADSGWTDIFIKPGYHWQVVDAFITNFHLPKSTLVMLVAAFTGRDQILHAYHHAIEEKYRFFSFGDAMFIK

SEQ ID NO: 63927 - protein, 344 aa, unidentified
  source 1..344: note = Unknown
  REGION 1..344: note = tr|A0A4Z0JNQ3|A0A4Z0JNQ3_9BACT S-adenosylmethionine:tRNA ribosyltransferase-isomerase; OS = bacterium BCRC 81127 OX=2487723 GN=queA PE=3 SV=1
MTLTTEDFDYDLPEELIAQTPIKNRDQSRLLVLDHETGEYSDKHFYDILDYLNPGDALVMNNSRVLPARLYGTKEDTDGHEEVLLLNNIEGDKWEVLMKPARRAKVGTKVQFGDGQLEAEVLEDLEHGGKIIEFHYQGIFMEILEQLGEMPLPPYIKEKLDDPDRYQTVYAKENGSAAAPTAGLHWTKDLLKKVEDKGVKLVYVTLHVGLGTFRPVTESDISKHVMHSEFYRLDEESAKTLNDVKKNGGKIVATGTTSIRTLETIGTKFNGEIKADSGWTDIFIKPGYQWKVVDEFITNFHLPKSTLVMLVAAFTGRENILNAYQHAVEEKYRFFSFGDAMFIK

SEQ ID NO: 63928 - protein, 342 aa, unidentified
  source 1..342: note = Unknown
  REGION 1..342: note = tr|A0A2N5ZDT6|A0A2N5ZDT6_9BACT S-adenosylmethionine:tRNA ribosyltransferase-isomerase; OS = bacterium BM706 OX=2053465 GN=queA PE=3 SV=1
MKKELLLESYKYELPEELIAQEPLKDRSDSRMLVLEKETGEFYEKKFSQLPDLIDDKYLIVRNNTRVRKARLFGKKDTGAKVEIFLLDRKDENTWETLARPGRRLKPGAKMIFPEDLKATILKDLGEGKKLIRFETSLSEEYIEKYGETPLPPYIKKKVDNPERYQTVYSKKINSSAAPTAGLHFNDKVIKRLTEKGIGIVDVNLGVGLGTFRPLNNENIKENQLHKEYYYIGEDTAKKYNEHREKGGKILAIGTTSVRTLETNIKKYSIIKSDEGWTNIFIYPGYKFEAVDALLTNFHLPGSSLLVMISAFAGYENVIKAYEYAVKERFRFFSFGDCMLII

SEQ ID NO: 63929 - protein, 344 aa, unidentified
  source 1..344: note = Unknown
  REGION 1..344: note = tr|A0A2H6K3U7|A0A2H6K3U7_9BACT S-adenosylmethionine:tRNA ribosyltransferase-isomerase; OS = bacterium BMS3Abin01 OX=2005709 GN=queA PE=3 SV=1
MLTAQLDYELPPGLIAQHPVVPRDRSRLLIYDRHRDVVEHGGFPDLLARLRPADILVYNDSRVIRARVFAVKPTGGRVELLFLRRHRGEVWEALARPSARLRPEMLLRLEKGEAAGSARNVFQLMENLGGGRWLVKNLSGTSTEALLERVGEMPLPPYIHEELKEPEKYQTVYARAPGSAAAPTAGLHFTPELIGRIRGAGVALAPLTLDIGLDTFRPVEEDELELHRIHRERYRLLPESYQAIREARDRGGRVIAVGTTTVRVLETVFGEPRGPLEGETGLFITPGHEFRAVDVLLTNFHLPRSTLLALVMAFAGVPETRRLYQEAIRREYRFYSFGDAMMLL

SEQ ID NO: 63930 - protein, 344 aa, unidentified
  source 1..344: note = Unknown
  REGION 1..344: note = tr|A0A2H6EE90|A0A2H6EE90_9BACT S-adenosylmethionine:tRNA ribosyltransferase-isomerase; OS = bacterium BMS3Abin03 OX=2005711 GN=queA PE=3 SV=1
MKLSDFKYNLPKTVIAKYPISPRDKAKLMVVNRETQEIETKKFSDVSNYMSKGDVMVVNETRVFQARLFGKKEKTNAKIEVFLLRELNAEECIWDVIVDPARKVRIGNKIYFKDNLWCEVIDNTTSRGRTVRFNQPGNVFKAIEKIGQTPLPPYIKRDPEPSDRENYQTVYAKVDGAVAAPTAGLHFTNRLLTKIKNRGVTIVPVILHIGLGTFRPVEVEDLTKHRMDSEYFEISERSADRINKALDSKKNVFVVGTSSCRALETSTTAEGMVKANSGWTDKFIYPPYEFKITTKLITNFHAPESTLLMLVSAFAGADLITKAYKKALKEKYRFLSYGDAMLII

SEQ ID NO: 63931 - protein, 345 aa, unidentified
  source 1..345: note = Unknown
  REGION 1..345: note = tr|A0A2H6EPK4|A0A2H6EPK4_9BACT S-adenosylmethionine:tRNA ribosyltransferase-isomerase; OS = bacterium BMS3Abin04 OX=2005712 GN=queA PE=3 SV=1
MKLSDFKYNLPKNYIAKYPVHPRDKAKLMVLDRNTGEVEHKKFTDIVDYVSRGDILVVNETKVMQARLFGHKERTNAKIEVFVLRELNRDENIWDVIVDPARKVRIGNRIYFNDKLWCEVIDNTTSRGRTVRFNYDGTDIYKAIEEMGHTPLPPYITRDTVPEDREDYQTVFAKRDGSVAAPTAGLHFTKDLLKKIKKKGVKVESVLLHIGLGTFRPVEVEDLTKHRMDSEFFEISDKTAKNINDAKKAKKNIIVVGTSAVRALESSVTSEGFVKPNYGWTDKFIFPPYEFQIATKLITNFHQPESTLLMLASAFGGYDNVKKAYRKAMKEKYKFLSYGDAMLIK

SEQ ID NO: 63932 - protein, 342 aa, unidentified
  source 1..342: note = Unknown
  REGION 1..342: note = tr|A0A2H6EZ82|A0A2H6EZ82_9BACT S-adenosylmethionine:tRNA ribosyltransferase-isomerase; OS = bacterium BMS3Abin05 OX=2005713 GN=queA PE=3 SV=1
MKLSDFKYSVPEHLVAQYPPEERDRARMMVLHRNAQKIEQKMFYDVVDYLQEGDCLVVNETKVFPARLIAKKDKTDASVEVFLLRELENNLWEVLVKPARKVRVGNRLSVTDDLFCDVIDNTVSGGRVVRFNLNGNFYNIIEDIGKTPLPPYITRDPEPSDKKNYQTVYARVRGAVAAPTAGLHFTSKILDKIKAKGVKVVPIVLHVGLGSFRPVQVEDLSRHKMDSEYFEIYEETANTINETRDNNGRIIAVGTSTVRVLESSVTSDYYVKPLSGWTDKFIYPPYEFKVIDGLVTNFHLPGSTLIMLVSALAGKDFVFKAYRKAIKEKYNFYSYGDAMLIV

SEQ ID NO: 63933 - protein, 346 aa, unidentified
  source 1..346: note = Unknown
  REGION 1..346: note = tr|A0A2H6F641|A0A2H6F641_9BACT S-adenosylmethionine:tRNA ribosyltransferase-isomerase; OS = bacterium BMS3Abin06 OX=2005714 GN=queA PE=3 SV=1
MKLSAFDYHIPEDQIALHPLKERDSSKLFVLDRKSNKFEHRVFKDIIDYLAPGDLLVLNDTKVVPVRLCGVKPSGGKAEITLLKELDINTWDALVKGVHEGKIILTHGITADVSRLNGTVARVKFDLNSGLPDTERADIKFFLNEIGVMPLPVYIKRGALKSDSEQYQTVYAKKEGAVAAPTAGLHFTDSLLNSIKGKGIEIKAITLHVGHGTFKPLTVTDIRDHQMDEESYEIPEATAAAINSAGAEGRRVIAVGTTVTRALEASAGDGTETRIKPGAGKASIFIYPGFRFKIVDAIITNFHLPGSTPMMLASAFSGLGLLKKAYAEALKKEYRLFSYGDAMLIK

SEQ ID NO: 63934 - protein, 335 aa, unidentified
  source 1..335: note = Unknown
  REGION 1..335: note = tr|A0A2H6FF87|A0A2H6FF87_9BACT S-adenosylmethionine:tRNA ribosyltransferase-isomerase; OS = bacterium BMS3Abin07 OX=2005715 GN=queA PE=3 SV=1
MKTSSFDFDLPEELIAQIPYAERDKCRLMVLHGNGAIEHRNFPDIINYLSRGDLLILNDTRVLPARLTGYKHSGYILEILLVREIETNKWEILSKGSYTGRLKISGQISAYIYNGKTAVFTCDGNIKNKLWKYGEMPIPPYIKRKATASDRDWYQTVFAKKEGSIAAPTAGLHFSRQLIREINDIGVKIRYITLHIGTGTFLPIKTDEVEQHRMHSEYFEISSSLLNEIEENIGSGKRVLAVGTTATRAIEGFLSDKERYNKGNGGFSGYTDVFIYPGYDFKAVNALLTNFHLPNSTPILLSSAMAGRENLLKGYEEAVRMKYRFFSYGDAMLIL

SEQ ID NO: 63935 - protein, 343 aa, unidentified
  source 1..343: note = Unknown
  REGION 1..343: note = tr|A0A2H6FTW8|A0A2H6FTW8_9BACT S-adenosylmethionine:tRNA ribosyltransferase-isomerase; OS = bacterium BMS3Abin10 OX=2005718 GN=queA PE=3 SV=1
MKLSEFDYHLPKDLIAQYPADERDTSRLMVISRKTGDIQHKQFRNIIDYLKPGDVLVLNDAKVIPARLYGAKQSGGKVEILLLKELETNLWEALVKGLNTGTVKLSHGITASVSRSNGTARVKLEKDGRGSGGHDIKRSLHEIGVMPLPPYIKRPSGPSDPERYQTVYAKNEGAVAAPTAGLHFTGGLLKSIRDKAIEICMITLHVGYGTFRPVEAKNIEEHKMYEETYEIPAITAGAVNRARAEGRRVIAVGTTVTRALEASISDGTGSRIEDGTGSASIFIYPGYKFNAIDALITNFHLPGSTPLMLTSAFSGPELLLKAYQGAIQKAYRFYSYGDSMLII

SEQ ID NO: 63936 - protein, 346 aa, unidentified
  source 1..346: note = Unknown
  REGION 1..346: note = tr|A0A2H6G0P5|A0A2H6G0P5_9BACT S-adenosylmethionine:tRNA ribosyltransferase-isomerase; OS = bacterium BMS3Abin11 OX=2005719 GN=queA PE=3 SV=1
MQKSDFSFNLPEELIAQIPLPVRSASRLLVCHRNSLATEDRQFNEIASFLMAGDLLVFNNTRVIPARLYGKKDTGGRVEILLERILDESRFTAIMRCSKVPQVGQKILIADGLTVCYEGRKSDFFLFSYEEGGLQQLFAEHGRMPLPPYIQRDADAQDEERYQTIFAQKPGAVAAPTASLHFDEAILRSLQQKGINTAEITLHVGAGTFQPVRADDLNRHVMHAETFDLSVETVEKILQTKAAGGRVFAAGTTSLRALEAASEEGELKPMSGDTRLFITPGYHFKVVDGLITNFHLSESTLLMLVSAFTGVEEIQHIYRHAINERYRFFSYGDAMIILPEDNKREI

SEQ ID NO: 63937 - protein, 333 aa, unidentified
  source 1..333: note = Unknown
  REGION 1..333: note = tr|A0A2H6H480|A0A2H6H480_9BACT S-adenosylmethionine:tRNA ribosyltransferase-isomerase; OS = bacterium BMS3Bbin01 OX=2005724 GN=queA PE=3 SV=1
MRTSEFDYALPRGSIAQRPFAPRDAARLLDVRDLTDRSFRDLPALLMSGDLVVVNNTRVRAARLHGRKEETGGAVEALILTRLDDGRWEALVRPARRLHAGTRLRFGELRGRILEDPVRGKALLELEGDDVEALIAAHGEVPFPPYITAGPSDPEDYQTVFADKVGSAAAPTAGLHFSAPVLAELADRGVDVATVDLQVGLDTFRPIDAEYVEHHEMHTERFSIPVETAAAVSEARSRGGRVVAIGTTVVRALEAASVGNGVRSGEDSTDLFIRPGYDFTVVDALVTNFHIPRSSLIVLVAAFLGNRWRSVYARALERGYRFLSFGDAMYAER

SEQ ID NO: 63938 - protein, 338 aa, unidentified
  source 1..338: note = Unknown
  REGION 1..338: note = tr|A0A2H6HG73|A0A2H6HG73_9BACT S-adenosylmethionine:tRNA ribosyltransferase-isomerase; OS = bacterium BMS3Bbin02 OX=2005725 GN=queA PE=3 SV=1
MQASEFSYHLPEASIAQSAIEPRDAARLLVASTLSSHRFSDLPQLLREGDLLVVNRTRVRAARLHAVRHGTGGTVEVLLTKRVDETRWEALLRPARRMRAGVVLQADGVRIELLSHPVNGVASVGLTAGGDIEQAISVAGEIPLPPYFRGQLDDDERYQTIFAETTGSAAAPTSALHFTPQLVSELSQGGIRIVAVDLDIGLDTFRPMADGEVTGHVIHREEYAVPAETAAAIDAARANRDRIVAVGTTVVRTLETAVAPDATMRAGAGESDLFIVPGFKPRIVDAMITNFHAPQTTLIVMIAALLGDRWRTVYDRALAEDYRFLSFGDAMFIDEFAR

SEQ ID NO: 63939 - protein, 349 aa, unidentified
  source 1..349: note = Unknown
  REGION 1..349: note = tr|A0A2H6HU69|A0A2H6HU69_9BACT S-adenosylmethionine:tRNA ribosyltransferase-isomerase; OS = bacterium BMS3Bbin04 OX=2005727 GN=queA PE=3 SV=1
MDRRSDYLYHLPEELIAQQAIEPRDASRLLVLDRSAVKLQHSHFSQLPRYLNPGDTLVFNNTRVIPARLHGHRESGGQVELLLLEETADLTWDCLARPAKKIKSDTRIHFNGDMDAVVLEEGEAGRRTVRFEAANQAETTVEMFWDWLAKFGSVPLPPYIHREPITADEERYQTIYAKHDGSVAAPTAGLHFTPQLLQTLQDKGIQAAYVTLHVGIGTFRPVEVDNLADHKMDEERYFLNEETATILNRTRNNGGRIIAVGTTSVRTLESTIDQDGRFSAKSGRTDLFIRPPYKYKGVDALVTNFHLPGSTLMMLVSALADRESILSAYQQAVAEKYRFFSYGDAMLIL

SEQ ID NO: 63940 - protein, 222 aa, unidentified
  source 1..222: note = Unknown
  REGION 1..222: note = tr|A0A2H6IDI7|A0A2H6IDI7_9BACT S-adenosylmethionine:tRNA ribosyltransferase-isomerase; OS = bacterium BMS3Bbin07 OX=2005730 GN=queA PE=3 SV=1
MPLPPYIKRKPDKRDRSWYQTVYAAKEGSIAAPTAGLHFTEKLLKELGSMGVIIKKLTLHVGIGTFMPVKNPHIGNHRMEPEEFEVEPGLIDLIKKRRKAGGRIFAVGTTTTRTIESLMNGHYKDCRLKNAKPGPESGSGQALTGTGVQGSEKIRGTTDLFIYPGHRFRGVDCLITNFHLPKSTPLMLASAFADREKILTAYRKAIASGYRFFSYGDAMLIL

SEQ ID NO: 63941 - protein, 359 aa, unidentified
  source 1..359: note = Unknown
  REGION 1..359: note = tr|A0A2H6IRR6|A0A2H6IRR6_9BACT S-adenosylmethionine:tRNA ribosyltransferase-isomerase; OS = bacterium BMS3Bbin09 OX=2005732 GN=queA PE=3 SV=1
MKLSDFDYPLSTDLIAQHPLQERDSSRLLVLHRKTGDIEHRFFKDIVDYLNPGDLLILNNTRVIPSRLSGTKPSGGKAEITLLKELDKNTWEGLVKGVNEGTVIIKGRPACRQTGIRANVTRLERSLAKVVFEFANKPAGRQAQSRGPEPDIRDRLREIGEMPLPVYIKRESAATDKEAYQTVYAKEEGAVAAPTAGLHFTNTLLNALREKGVRIETVTLHVGYGTFKPVVIEEIEDHKMDEEYYEIPEATASAVNSARSDGRRVIAVGTTVTRTLESSAIAGGSDKVTAGKGKASIFIYPGYEFRIINTLITNFHLPKSTPMMLVSAFSGINLLKTTYCEAKKTGYRFFSYGDAMLMI

SEQ ID NO: 63942 - protein, 362 aa, unidentified
  source 1..362: note = Unknown
  REGION 1..362: note = tr|A0A2H6IZK8|A0A2H6IZK8_9BACT S-adenosylmethionine:tRNA ribosyltransferase-isomerase; OS = bacterium BMS3Bbin10 OX=2005733 GN=queA PE=3 SV=1
MRVDDFDFELPGERIALRPARPRDIARLLCVDPDAGEPFQDRAICDLPEILEPGDALVFNDTRVLAARLEGLRHRGAARAKVSLTLLKPLDSSKWTALARPAKRLRAGDRIEFGSRENVCLLGCLWGCIEGRGEDGEVTIAFDFHGAALDEAIAALGQMPLPPYIASRRPADAHDRDDYQTVYAREMGAVAAPTAGLHFTDELFTRLERRGIARHFVTLHVGAGTFLPVKADDTCDHVMHSEWGEVTRETADELNEVRRAGGRVIAVGSTALRLLESASDERGKIGAFRGETDIFITPGVRIRAVDAMLTNFHLPRSTLFMLVAAFSGLDVMQRAYAHAIGRGYRFYSYGDACLLTPAGRKE

SEQ ID NO: 63943 - protein, 346 aa, unidentified
  source 1..346: note = Unknown
  REGION 1..346: note = tr|A0A2H6JAL0|A0A2H6JAL0_9BACT S-adenosylmethionine:tRNA ribosyltransferase-isomerase; OS = bacterium BMS3Bbin12 OX=2005735 GN=queA PE=3 SV=1
MFRRDFEYRLPPDLIAQRPPDRRGDARLLCVDGAGGPPRDGTFRELPDLLRAGDLLVFNDTRVIPARLHARKPSGGRVELLVERILGTDRARARLRASKAPAPGTALTLEDGTRVVVGAREGDAYPLRFEGTRPASELLEAIGHVPLPPYIRRPDTGADRERYQTVYARNPGAIAAPTAGLHFDVTLLERLRDRGVDSAFVTLHVGAGTFQPVRVERVEEHRMHAERVEVGAGVCERVCAARARGGRVVAVGTTVVRGLEAAARAGSLAPFDGETDLFILPGFPFRVVDAVITNFHLPASTLLMLVCAFAGYRPVMDAYRHAVRERYRFYSYGDAMFVTRAPQAAA

SEQ ID NO: 63944 - protein, 379 aa, unidentified
  source 1..379: note = Unknown
  REGION 1..379: note = tr|A0A2H6JPV6|A0A2H6JPV6_9BACT S-adenosylmethionine:tRNA ribosyltransferase-isomerase; OS = bacterium BMS3Bbin14 OX=2005737 GN=queA PE=3 SV=1
MNDNLHAATTKQSMPNSFDLAAYDYDLPPENIAQHPAARRDQSRLAVLDCENETITHKRFADITDYLRPGDLLVVNDTRVFPARLPGRKATGGKAEVLLLHYPAPTQPDPGSAGWQSAAVLALIKSSKRPKPGSSIFFGEDLRATVQELFDGGKAGIILHFLAPEGKTLADLLDRYGRIPLPPYIRRPRGDTAEDARRYQTKYAVQTGSVAAPTAGLHFSAALLEDIRHRGINIAAVTLHVGYGTFAPVRTEDIREHRIHEEYIEVPAETAQMINQAKKSGHRIWAVGTTTVRTLEFAAAESGQVRAWRGLCGLYIYPGFQFRVVDNLITNFHLPRSSLLFLVSALAGRERIMHCYQEAIDHSYRFFSYGDAMALITRP

SEQ ID NO: 63945 - protein, 345 aa, unidentified
  source 1..345: note = Unknown
  REGION 1..345: note = tr|A0A101VZ76|A0A101VZ76_9BACT S-adenosylmethionine:tRNA ribosyltransferase-isomerase; OS = bacterium BRH_c32 OX=1734400 GN=queA PE=3 SV=1
MKLSDFKYNLPKTSIPKFPVEPRDSAKLLVLDKKTGEIEHKLFSDIADYMDKGDVIAVNQTKVMQARLYGKKERTNAKIEVFVLRELNKEEKIWDVIVDPARKVRIGNRIYFNDNLWCEVIDNTTSRGRTVRFNEDAGDIFKAIEKIGLTPLPPYIKRDAVPEDRDSYQTIFAEIDGSVAAPTAGLHFTPSLVKKITKKGIKIVPVILHIGLGTFRPVEVEDLTKHRMDSEYFEIPDETAKVINKALEDKKKVFVVGTSSTRALESSVTAEGFVKSNYGWTDKFIFPPYDFKIARRLITNFHAPESTLMMLAAAFGGYENLMKAYKKALKEGYRFLSYGDAMLIK

SEQ ID NO: 63946 - protein, 341 aa, unidentified
  source 1..341: note = Unknown
  REGION 1..341: note = tr|A0A3A9C9E4|A0A3A9C9E4_9BACT S-adenosylmethionine:tRNA ribosyltransferase-isomerase; OS = bacterium C-53 OX=2320109 GN=queA PE=3 SV=1
MKKSDFYFDLPERLIAQDPLEDRSSSRLLVLDKKSGAMQHHTFKEIVHYLRQGDCLVLNDTKVIPARLLGEREDTKAAVELLLLKRREADTWETLVRPGKKCRPGAEISFGGGLLKAEILDIVEEGNRLVKFRYDGIFEEVLDRLGEMPLPPYITHKLTDRNRYQTVYAKHEGSAAAPTAGLHFTHELLEQIRGMGVKIVYVTLHVGLGTFRPVKEDDILKHHMHSEYYTVSEETADTVNAVKKAGGRVVCVGTTSCRTVESASDENGVLRAGSGNTEIFIYPGYRFRVLDALITNFHLPESTLIMLVSALAGREHVLSAYEEAVREEYRFFSFGDAMFIC

SEQ ID NO: 63947 - protein, 353 aa, unidentified
  source 1..353: note = Unknown
  REGION 1..353: note = tr|A0A2M7US68|A0A2M7US68_9BACT S-adenosylmethionine:tRNA ribosyltransferase-isomerase; OS = bacterium CG_4_10_14_0_2_um_filter_48_144 OX=1975563; GN = queA PE=3 SV=1
MKVSLFKYHLPKNRIAQTPASPRDHARLFVLDKKAGRCAHKHIYDLPNLLRSGDILVLNNSKVIPARLYARKVLEVGGGGRVELFLLKHAGGRIWHVLLKGQNLRPQTRLTLLPTKTIFCTILRREQDGATLVEFSDSRAAVHAFYAAHGETPLPPYIKASGKSARVKSHYQTIFAKTSGSVAAPTAGLHFTKNLLRAIATKGVQIEYVTLHVGLGTFEPIRTAYIEDHAMHAEYAEIDRETLKRLLRAKTERRRMVAVGTTSARILEGLVAPYLSTPYPKKDKISAELTTYIYPPYAFKMVDALLTNFHLPQSSLLVLVAAFTGRSAILRAYQKAIRAGYRFYSFGDAMFIH

SEQ ID NO: 63948 - protein, 404 aa, unidentified
  source 1..404: note = Unknown
  REGION 1..404: note = tr|A0A2M7YUY5|A0A2M7YUY5_9BACT S-adenosylmethionine:tRNA ribosyltransferase-isomerase; OS = bacterium CG_4_9_14_3_um_filter_65_15 OX=1975567; GN = queA PE=3 SV=1
MNSVPEDTRAADFLFDLPPELIAQSPSAQRSQSRLLAVGPDGSVRDEHPFSALPDLLQRGDLVVLNDSRVLPARLETRRPDTGGRVEILLIEPGSGPNRWLAMARPARRLRTGVVLEILGAPDAEAGLEPTGDFLTVVENHGTGEVTVEGSVDPAVLASRRGVMPLPPYIRRDYGSAADRERMRRDRTRYQTVFATAGFDDGASVAAPTAGLHFDAAVLESLAAHGVAVERLRLHVGPGTFRPPDENQIRSRRLHAERFFLSADLWRKLADTRAAGGRIIAVGTTSLRVLETVARLDLERNDAAQREFPNTGDPVFSGSAWRRGEGWEVAGTTRLFLMPPEKVAAVDGLLTNFHLPGSSLLMLLAAFLQPGDWRPIYREAVTRRLGFYSYGDCMLSLKRERKGP

SEQ ID NO: 63949 - protein, 374 aa, unidentified
  source 1..374: note = Unknown
  REGION 1..374: note = tr|A0A1J4S827|A0A1J4S827_9BACT S-adenosylmethionine:tRNA ribosyltransferase-isomerase; OS = bacterium CG1_02_42_9 OX=1805399 GN=queA PE=3 SV=1
MQTKLFDYHLAKEYIAQKPIFPRDRSRLMVLDRKNKTITHSHFYDLPQFLKPTDVLVFNQTKVIPARLLGSKENGAKLEVLLLHQVDNVTWEALTKPGLKENQQGFFDNHLTGMILKVLPTGNRLIKFNQKGKSFKETLKQIGLMPTPPYIKERLKNPAWYQTVYAKIEGSVAAPTAGFHFTKKLIEKLDKLSIQKEFITLHIGLDTFRPIRTDRLEDHAIHSEWGEVDKKTADKLNEYKKEGRRIIAVGTTVVRTLESATSVILRTRRIPASPAGGGGDVRIPLECAYSYGITRYSRGNKTIKPFSGNTRLFIYPPYKFQFVDGVITNFHLPKSTLLALVSAFAGRKFVLEVYEEAKRKGYRFFSFGDGMLIM

SEQ ID NO: 63950 - protein, 340 aa, unidentified
  source 1..340: note = Unknown
  REGION 1..340: note = tr|A0A1J5CUH9|A0A1J5CUH9_9BACT S-adenosylmethionine:tRNA ribosyltransferase-isomerase; OS = bacterium CG2_30_54_10 OX=1805403 GN=queA PE=3 SV=1
MKTSVFDYDLPEELIAQVPSPTRSESRLLVLDRSNGSVSHRGFSDLTDLIPAGDLLVVNRSKVVPARLFTIPEKGRSAFEIFFIEDLGMGRFKAMVRPGKKFRPGDVRNLPGGIIAKVIETCEDGLRVMQIDGCNDILSIFRKFGEMPLPPYITSRESPPERYQTVFAREEGSVAAPTAGLHFDEALLNQLKEKGVIVREVVLHVGLGTFKPIETDEIEDHKMHAERFTIEKNLAESFAKVRTHGGKIWACGTTAVRSLESGIDGDGNLITGWRETRCFLKPGHVFRAVDRLVTNFHLPRSTLLVLVAAFAGLSRVLAAYREAVARRYRFFSFGDAMLIL

SEQ ID NO: 63951 - protein, 365 aa, unidentified
  source 1..365: note = Unknown
  REGION 1..365: note = tr|A0A3A9AYE1|A0A3A9AYE1_9BACT S-adenosylmethionine:tRNA ribosyltransferase-isomerase; OS = bacterium D16-34 OX=2320120 GN=queA PE=3 SV=1
MKTDDFDYDLPPELIAQTPAEIRDACNLLVMDRNTGDVEDRIFSDIIDYLRPGDLLVANETRVLPARLLGTKRNTGGAAEVFLLRETGGPEPRTNKLAYWEVLVRPGKRLKPGTGAVVDFTNKQGDVVLSAEIIDWAHNAQKGERVAKLTTDLPSLDEALHAVGHTPLPPYIRNYAGDEELYQTVYSKRESSAAAPTAGLHFTPELIERLQEKGVGWKTVELEVGLDTFRIVDEDDPTQHAIHTEYYTVSQETIDAINETHARNGRVIAVGTTSVRSLESAWDPAANNGKGALIPRDREATSLYILPGYEFKTVDALITNFHVPRSTLMMLVSAFSSREHIMAAYKHAIDKRYRLLSFGDAMFIH

SEQ ID NO: 63952 - protein, 344 aa, unidentified
  source 1..344: note = Unknown
  REGION 1..344: note = tr|A0A3A9D0C4|A0A3A9D0C4_9BACT S-adenosylmethionine:tRNA ribosyltransferase-isomerase; OS = bacterium D16-50 OX=2320112 GN=queA PE=3 SV=1
MTTLKKKDFYFDLPKELIAQDPLEDRASSRLLVLDKDTGAVSHHVFREVADYLRPGDCLVLNDTKVIPARLLGQREGTGAHVEVLLLKRLESDVWEALVRPGKKCRPGTGLTFGDGLLKAQVLETGEEGSRLIRFFYEGIFEEVLDRLGEMPLPPYITHKLEDKNRYQTVYAKYEGSAAAPTAGLHFTQELLEQIREKGVEIVSVTLHVGLGTFRPVKEENVLDHHMHSEHYQVSLEAAEKINRAREAGGRIICVGTTSCRTLESAADEEGKVRPGSGDTDIFIYPGYRFKVLDALITNFHLPESTLVMLVSALAGREQVLEAYEEAVRERYRFFSFGDAMIVV

SEQ ID NO: 63953 - protein, 359 aa, unidentified
  source 1..359: note = Unknown
  REGION 1..359: note = tr|A0A3A9BPP6|A0A3A9BPP6_9BACT S-adenosylmethionine:tRNA ribosyltransferase-isomerase; OS = bacterium D16-54 OX=2320104 GN=queA PE=3 SV=1
MNVKDFYFDLPQELIAQDPLEDRSASRLLVMDKNTGEIWHRVFRDITEYLHPGDCLVINDTKVIPARLMGVKEDTGAKIEVLLLIRKDKDIWETLVKPGRKCRPGTILSFGEGLLKGTVLDVMEEGNRLIRFEYEGIFEEVLDRLGQMPLPPYITHELKDKNRYQTVYAKHDGSAAAPTAGLHFTENLLKQIQGIGVEIAHVTLHVGLGTFRPVKVENVLEHHMHSEFYVVEESEAEKINRAKAAGGRIVCVGTTSCRTLESAAGEDGILKAGSGWTDIFIYPGYRFKILDCLITNFHLPESTLVMLVSALAGRDHVLHAYEEAIREKYRFFSFGDVCFFADLENEDTERENHGICPSE

SEQ ID NO: 63954 - protein, 345 aa, unidentified
  source 1..345: note = Unknown
  REGION 1..345: note = tr|A0A3A8WMJ6|A0A3A8WMJ6_9BACT S-adenosylmethionine:tRNA ribosyltransferase-isomerase; OS = bacterium D16-59 OX=2320098 GN=queA PE=3 SV=1
MKTSDFYYELPEELIAQDPLNDRASSRLLVLGKATGKREHTDFYHIIDYLRKGDCLVLNDTKVIPARLIGLKEDTGGKVELLLLKRKGNNIWETLVKPGKKARPGAKIVFGDGLLTAEVLEIAEEGNRLVQFSYEGIFEEILEQLGQMPLPPYITHELKDKGRYQTVYAKYEGSAAAPTAGLHFTEGLLQEIEKKGIEIARVTLHVGLGTFRPVKAEDVADHHMHTEYYRVGQEAADKINSAKAKGNRVICVGTTSCRTIESAAVNGVVQAGEGETDIFIYPGYQFRVLDCLITNFHLPESTLLMLVSALAGKENVMEAYKEAVAMKYRFFSFGDAMFITDSLMQ

SEQ ID NO: 63955 - protein, 490 aa, unidentified
  source 1..490: note = Unknown
  REGION 1..490: note = tr|A0A3A9AJV8|A0A3A9AJV8_9BACT S-adenosylmethionine:tRNA ribosyltransferase-isomerase (Fragment) OS=bacterium D16-63 OX=2320119 GN=queA PE=3 SV=1
AAEGEARRARCRACYRLRFAESARYAAAHGFDALGTTLSVSPYQYADVIAEELTRACAEAGVACLFEDYSPAYDEATRRSRDLGMYRQNYCGCRFSAAEAAAEREQRKAERKAAKRREQQARNDALMTADFDYDLPEELIAQEPAPIRDQCRLLTLNRSTGAMGDIVFRDILELLRPGDLLVANETRVMPARLLGAKRGTGGAAEVFLLREAGPRGQRTNQRAWWEVLVRPGKRLKPGSGAMVDFAGADGAVALSAAIVDWAPNAQKGERIAELTTTLPSLDEALHAVGNTPLPPYIKGYAGDAELYQTVYSRRESSAAAPTAGLHFTPELIGACKAKGVGWATVELEVGLDTFRVVDEEDPRRHAMHTERYTVPQATVDAIERCKAAGGRVIAVGTTSVRSLESAWDPTARSGEGALTARDRDATSLFLFPGSEFHVVDALITNFHVPRSTLMMLVSALAGRDRIMAAYRHAVKRRYRFLSFGDAMFIY

SEQ ID NO: 63956 - protein, 395 aa, unidentified
  source 1..395: note = Unknown
  REGION 1..395: note = tr|A0A2G6FZ32|A0A2G6FZ32_9BACT S-adenosylmethionine:tRNA ribosyltransferase-isomerase; OS = bacterium DOLZORAL124_64_63 OX=2044883 GN=queA PE=3 SV=1
MSADPRWHFPLPEELIAQDPPEERGDSRLLLVEPGGAVAGERVFRELPGILRPGDLLVLNDSRVLPARLRAIRRDTGGQVELLLVRPTGERTWLAMARPARRLREGIVLRLGQDSLTVVGKRPDGQVLVQGEKNPADLALAAGEMPLPPYIRRAAAEAEDPERLRRDKVRYQTVFNRPDPSGAGSVAAPTAGLHFSAAILAALEARGVGLARVQLHVGPGTFQPPTPQQIAGGRLHPEFFRYDAACAAAIARTRRLGGRVLAVGTTSLRVLETVARLDLPADGPDGPDGPDTVTFAPDATDDDPFFTGWARRRDGHWSVEGMTRLFIQPPDRVTAVDGLLTNFHLPGSSLLMLVAALAGEETWRAAYTFAVDAGLRFYSYGDCMLILPGLAGNQG

SEQ ID NO: 63957 - protein, 362 aa, unidentified
  source 1..362: note = Unknown
  REGION 1..362: note = tr|A0A202DIU9|A0A202DIU9_9BACT S-adenosylmethionine:tRNA ribosyltransferase-isomerase; OS = bacterium E08(2017) OX=1932693 GN=queA PE=3 SV=1
MKTSEYDYDLPEELIAQEPPEKRGTSRMMVVDRSSGAIEHRLISDIPEYLRQDDVLVVNNTKVINARVFGTRQDTGGRVELLLVEEVTPPISNFEFQVSTWDCFLKASNRPPVGAVFELGEGRLIARVKEVLGQRIVVEFESGQPLLDLLEEVGVPPVPPYIRRDYGPRTTDHGADKRVALDHERYQTVYAKHAGSVAAPTAGLHFTEELLGELAAMGVCQAEVTLNVGPGTFKPVEVDTVEEHAMEAEWSRVSQEAADSVNKAKEGFGRVVAVGSTSVRTLESACQGGKVVAGEKRTSLFIYPPYEFQVVDMFLTNFHLPKSSLIMMVSAFAGKDLTFKAYEEAVREGYRFYSYGDAMLIV

SEQ ID NO: 63958 - protein, 346 aa, Escarpia laminata
  REGION 1..346: note = tr|A0A497TD75|A0A497TD75_9BACT S-adenosylmethionine:tRNA ribosyltransferase-isomerase; OS = bacterium endosymbiont of Escarpia laminata OX=1221601; GN = queA PE=3 SV=1
MKLSDFSYDLPPELIAQFPEKERRGSRLLTLDGASGELNDQHFTDLPQLLRKGDLLVFNDTRVMQARLHGFKQSGGKVELLIERVLTPGRALAHVRASKSPKAGSRLYLGERKRAVEVVGRQESLFEIDLQEGDFFQLMEEQGHMPLPPYIDRSDDSSDRERYQTVYARRPGAVAAPTAGLHFDLEMLDELKERGVKSAQVTLHVGAGTFQPVRVDNLDEHIMHSEYVEVDESVCQKVRETRANGGRVVAVGTTSVRSLEAASASGEIVPFSGDTRLFIRPGYHFRSVDGMLTNFHLPESTLLMLVSAFSGYDHVMAAYRHAVSRRYRFFSYGDAMFLTPSLMQQA

SEQ ID NO: 63959 - protein, 346 aa, Escarpia laminata
  REGION 1..346: note = tr|A0A497UBH6|A0A497UBH6_9BACT S-adenosylmethionine:tRNA ribosyltransferase-isomerase; OS = bacterium endosymbiont of Escarpia laminata OX=1221601; GN = queA PE=3 SV=1
MKLSDFSYDLPPELIAQFPEKERRGSRLLTLDGASGELNDQHFTDLPQLLRKGDLLVFNDTRVMQARLHGFKQSGGKVELLIERVLAPGRALAHVRASKSPKTGSHLYLGERKREVEVVGRQESLFEIDLQEGDFFQLMEEQGHMPLPPYIDRLDESSDRERYQTVYARRPGAVAAPTAGLHFDLEMLDELGERGVKSAQVTLHVGAGTFQPVRVDNLDEHIMHSEYVEVDESVCQKVRETRANGGRVVAVGTTSVRSLEAASASGEIAPFSGDTRLFIRPGYHFRSVDGMLTNFHLPESTLLMLVSAFSGYDHVMAAYRHAVSRRYRFFSYGDAMFLTPSLMQQA

SEQ ID NO: 63960 - protein, 358 aa, unidentified
  source 1..358: note = Unknown
  REGION 1..358: note = tr|A0A132HYZ6|A0A132HYZ6_9BACT S-adenosylmethionine:tRNA ribosyltransferase-isomerase; OS = bacterium F083 OX=1768114 GN=F083_671 PE=3 SV=1
MKLSYFNFNLPKDLIADRPVNAEYEKLLDQKRDESRLMVLHRDDGKVEHRLFKDMIDYIDTDDVVVVNNTKVFPARLDGEKEKTGAHITVFLLRELNPEMRLWDVVVEPARKIRIGNKLYFGENESLLAEVIDNTTSRGRTVRFLYDGSHEEFISLIRSMGKTPIPDYILKNRDLEKFDENRYQTLYAKVEGSVAAPIAGLHFSPQLLKRLEIKEVKWAELTLHIGLGSSIEVEDLSKHRMSAEEMHLDDANCDLVNNARNDGHKICCVGATTLRALETAVTTPGKICPFDGWTNKFIFPPYNFTIADMAITSLHFPCSPQFIMMSAFAGPELMRDAYQTAIREKYRFGAYGDAMLII

SEQ ID NO: 63961 - protein, 404 aa, unidentified
  source 1..404: note = Unknown
  REGION 1..404: note = tr|A0A132HU98|A0A132HU98_9BACT S-adenosylmethionine:tRNA ribosyltransferase-isomerase; OS = bacterium F083 OX=1768114 GN=F083_1605 PE=3 SV=1
MLSDLQAIEIADYDYPLPDGRIAKFPLAQRDASKLLVYRQGEITESRFGRLAGHLPDDTLLVCNNTRVIHARLLFRKSTGTTIEIFCLEPYNMPVATAFEQRGTGSWVCLVGHNKRWKTDTLTRELTLDGRLITLSASRREKAGNGWIVDFCWDSDDTFASVIECAGLIPLPPYLHRDASDEDNRRYQTVYASEKGSVAAPTAGLHFTDAVFDSLRQAHIGCEFITLHVGAGTFKPVDSATIGGHEMHTEQVEIGRANIEHILQHFGKPIVAVGTTSVRTLESLYWFGLQLEHDASLERMCVEQWEPYVDETPAITPQQAYTNVLLWMQRRHIERLEGSTRLMIAPGYRYHIVDGLITNFHQPRSTLLLLVSALIGNEWRRCYRYALDRDFRFLSYGDSCLFLP

SEQ ID NO: 63962 - protein, 341 aa, unidentified
  source 1..341: note = Unknown
  REGION 1..341: note = tr|A0A202DNF5|A0A202DNF5_9BACT S-adenosylmethionine:tRNA ribosyltransferase-isomerase; OS = bacterium F11 OX=1932698 GN=queA PE=3 SV=1
MDPDTLDFELPENLIAQEPLPKRDHARLMVLDRVSGSLQHKKFFDLKNYLKKDDVVVINKARVNRAKFIGKKLTGGHVEIVLIAPEGDPLTWRSLVRPMLKPGTVFKLTNGVGVRLIGRNKEGENILVFDGGNPRDLMASMGAMPLPPYIKRKSDDPRRKKDFDDYQTVYGEVDGSLAAPTAGLHFTPELLADIKSMGVTIVEVILHVGWGTFRPIRESVENHHMLPEQYEISTENIGCLMESKKRNRRIISVGTTSTRVLESLEQFRPEGPIKGETNLFIKPGFSYKWITGLITNFHVPRSTPIALTAAFSGLSHLEKAYEEAIGQQYRFFSYGDAMLII

SEQ ID NO: 63963 - protein, 347 aa, unidentified
  source 1..347: note = Unknown
  REGION 1..347: note = tr|A0A2H5VKK2|A0A2H5VKK2_9BACT S-adenosylmethionine:tRNA ribosyltransferase-isomerase; OS = bacterium HR08 OX=2035403 GN=queA PE=3 SV=1
MRVSDFDYHLPEELIAQEPLPERDHSRLLVLDRRTGAYWDRYFYEFPEEVAPGSVLVLNNTRVFPARLFGRRKGFTGRVEVLLLRRRQGTRWEALVKPGRIARPGTELVFDEGRLEARILAAEAEGKHLIEFLCPEEDLDAHIDRIGVAPLPPYIKRSDPASFARDALRYQTIYAKHRGSVAAPTAGFHFTERIFAALRERGVHIVELTLHVGYGTFKPVRTEEVEKHRMDGEEFIIPPETAAAINDARRNGRPVIAVGTTTVRALESAADAEGFVRAGTGWTELFIYPGYRFKAIDGLVTNFHLPRSTLLMLVCAFAGRENVLRAYEHAVARRYRFYSYGDAMFIR

SEQ ID NO: 63964 - protein, 312 aa, unidentified
  source 1..312: note = Unknown
  REGION 1..312: note = tr|A0A2H5VTE5|A0A2H5VTE5_9BACT S-adenosylmethionine:tRNA ribosyltransferase-isomerase; OS = bacterium HR09 OX=2035404 GN=queA PE=3 SV=1
MLPRQGSPWEANIRDIPALLTPGDVLLLNDVRVIPARLFGRRPGGGVCELLLLRPAGEGVWEAMGRPAARLREGTVVSFPWGRGVIQGRQGEGKLLVAFEPPLDASALEALGEVPLPPYIEKKRKAQPEDRRRYQTVFARRGLAVAAPTAGLHLTAELLAACEARGVEVVSLTLHVGPGTFKPVKSEDPRQHRLDPELYEISRETAGALNRALASGRRIVAVGTTSVRALEDALKRGGGRVLPGVAHADTYILPGFVFRGTGALLTNFHLPRSTLLMLVAALAGRERVLAAYEMAKARKFGFYSYGDAMLIL

SEQ ID NO: 63965 - protein, 347 aa, unidentified
  source 1..347: note = Unknown
  REGION 1..347: note = tr|A0A2H5VXX5|A0A2H5VXX5_9BACT S-adenosylmethionine:tRNA ribosyltransferase-isomerase; OS = bacterium HR10 OX=2035405 GN=queA PE=3 SV=1
MRASDFDYDLPEELIAQEPLPERDHSRLLVLDRRTGTYWDRYFYEFPHEVTPGSVLVLNNTRVFPARLFGRRKGFTGHVEVLLLRRREGTRWEALIKPGRVARPGTELVFDEGRLEARILAAEAEGKRLIEFLCPEEDLDARIDRIGVAPLPPYIKRPDPASFARDVLRYQTIYAKHRGSVAAPTAGFHFTERVFAALRERGVHIVELTLHVGYGTFKPVRTEEVEKHRMDGEEFVIPSETAAAINDARRSGRPVIAVGTTTVRALESAADAEGFVRAGTGWTELFIYPGYRFKVIDGLVTNFHLPRSTLLMLVCAFAGRENVLRAYAHAVAQRYRFYSYGDAMFIR

SEQ ID NO: 63966 - protein, 356 aa, unidentified
  source 1..356: note = Unknown
  REGION 1..356: note = tr|A0A2H5W4Z2|A0A2H5W4Z2_9BACT S-adenosylmethionine:tRNA ribosyltransferase-isomerase; OS = bacterium HR11 OX=2035406 GN=queA PE=3 SV=1
MESCFSLSAYDYELPRELIAQTPVEPRDQARMMVLWLRQRRWEHRRFFELPAFLQEGDVVVVNNSRVIPARLYGRLARGDRERPVEVLLVRSLSSEAAAPERWHALLRPSRRIRPGDVLRFPADVRATVVERTPEGDWVLAFESPRPLQTMLDDIGWMPVPPYIVRRDPSLAERDRRWYQTVYAKVQGSIAAPTAGLHFTPRVIQALQEKGVVWCEVTLHVGPGTFRPVRTPDVRHHRMDPEWYEIPPDVWAAIETARRRGRRVLVVGTTTTRALESAARHDPPCLSGWADVFIYPGYEFRVVRDLLTNFHLPRSTLLMLVCALGGRDFILAAYREAVRERYRFYSYGDCMLLLDA

SEQ ID NO: 63967 - protein, 334 aa, unidentified
  source 1..334: note = Unknown
  REGION 1..334: note = tr|A0A2H5WH27|A0A2H5WH27_9BACT S-adenosylmethionine:tRNA ribosyltransferase-isomerase; OS = bacterium HR13 OX=2035408 GN=queA PE=3 SV=1
MRLEDFDFELPPELIAKYPLKERHMARLMVLNRKERSIKHDIFWNLPLYLEGGDLLVFNDTKVIPARLYGEKPTGGKVEVLLTDHVKDNLWYALVGGKNIKEGLSVQIAQDFRVKLLKHISEGKFLVELIAQDPIKALYTYGHIPIPPYLEREEEHIDRVYYQTVFAQKEGSVAAPTASLHFSEELLKRLDEYGIRKAFITLHVSYGTFKPIKVSDIKVHKVDKEYAEVPEETVELIKKVKQEGKRVVAVGTTVVRALETKPFSPFSGKTDLYIYPGYTFKVVDAMITNFHLPRSSLLLLVSAFADREFILSAYQIAIKERYRFYSYGDGMLIL

SEQ ID NO: 63968 - protein, 92 aa, unidentified
  source 1..92: note = Unknown
  REGION 1..92: note = tr|A0A2H5WPY6|A0A2H5WPY6_9BACT S-adenosylmethionine:tRNA ribosyltransferase-isomerase; OS = bacterium HR14 OX=2035409 GN=queA PE=3 SV=1
MAVGTTSVRTLESAAVGKRRVQAQTAETKLYITPGYEFKVVEGLITNFHLPRTTMLVLVSAFAGREKVLHAYREAVRLRYRFLSFGDAMLIL

SEQ ID NO: 63969 - protein, 334 aa, unidentified
  source 1..334: note = Unknown
  REGION 1..334: note = tr|A0A2H5WY70|A0A2H5WY70_9BACT S-adenosylmethionine:tRNA ribosyltransferase-isomerase; OS = bacterium HR15 OX=2035410 GN=queA PE=3 SV=1
MEASLFDYELPEELIAQEPVEPRDASRLLVVHRDTGQLEHRHFYDLPDYLRAGDTLVLNDTRVSARRLFGRKPTGGQVELLLLRPVGDGRWQALVRPGRRLPEGSLILLDEAHTAQIEARLEGGVRLVRFIPPDDSWLQQMGQVPLPPYIHRALTDPERYQTVFAREPGSAAAPTAGLHFTPALLEKLKAQGVQIVRVTLHVSLDTFRPLQSEQVEEHKMHGEWFTVSPEAAEAINRATGRIVAVGTTCVRTLESAAVSQRRVQPITGETRLYITPGYEFQVVDALITNFHAPRTTVLVLVCAFAGRELILRAYQEAIRLRYRFLSFGDAMLIL

SEQ ID NO: 63970 - protein, 344 aa, unidentified
  source 1..344: note = Unknown
  REGION 1..344: note = tr|A0A2H5X0I8|A0A2H5X0I8_9BACT S-adenosylmethionine:tRNA ribosyltransferase-isomerase; OS = bacterium HR16 OX=2035411 GN=queA PE=3 SV=1
MVEQTIEEAVRLLEEYRYDLPEERIAQQPVEPRDSSRLLVLRRDTGEREHRLFRDIVEYLRPGDTLVLNNTRVSARRLRGFKSTGAQVEALLLREVQPGVWEALVRPGRRLLVGSQVILEGHLKAEVIACLPQGMRLLRFEEPQSVHHQPLGEIPLPPYIRRKLENEERYQTVYAAVNGSAAAPTAGLHFTPELLQRIREMGVRIVTITLHVGIATFRHPEPEQLVQRRLHPEWYTISEQAAEAINSTPGRIVAVGTTCVRALESAAVDERRVEARHGSTDLFILPGFRFRVVEALVTNFHLPASTPLLLTCAFAGKEKVFEAYREALAMGYRFLSFGDAMLIL

SEQ ID NO: 63971 - protein, 347 aa, unidentified
  source 1..347: note = Unknown
  REGION 1..347: note = tr|A0A2H5XCR5|A0A2H5XCR5_9BACT S-adenosylmethionine:tRNA ribosyltransferase-isomerase; OS = bacterium HR17 OX=2035412 GN=queA PE=3 SV=1
MRLEELDYELPPELIAQEPIEPRDHARLMVLNRHTGAIAHRRFYELGDYLQPGDVLVINDTKVIRARLRGKRADTGGQVEVLLLRPDDHDDYVWRVLIKPGRRARTRGQFVFGCAPLQVTASVEERLPDGSFAVRFDRPRGELLQALDTIGEVPLPPYIKTPLTDDRPYQTVYAREPGSVAAPTAGLHFTERLLAELQARGVQIARITLHVGWSTFKPVTSEIVEQHDIGEEFYRVPPEAAEIINAAWQRGNKVVAVGTTATRTLETVAVDFHRVVPGEGWTSLFITVGHPFKAVDALVTNFHLPRSSNLLLVAAFCGGMALVRKAYEEAVRERYRFYSFGDAMLIL

SEQ ID NO: 63972 - protein, 348 aa, unidentified
  source 1..348: note = Unknown
  REGION 1..348: note = tr|A0A2H5XMI0|A0A2H5XMI0_9BACT S-adenosylmethionine:tRNA ribosyltransferase-isomerase; OS = bacterium HR18 OX=2035413 GN=queA PE=3 SV=1
MRLSDLHYDYPKNLIAKYPAEPRDSARLMVLDRKTQTIEHRIFRDIVDYFNEGDVLIVNDTKVFPARLFGYKEKTGARIEVFLLRELNSEGRLWDVLVDPARKIRVGNKIYFEGDLVAEVVDNTTSRGRTIRFLFDGSNEDLYRKIEEIGHTPLPPYIKREDEPEDRERYQTIFARHKGSVAAPTAGLHFTPELVESLRRKGVDIVPITLHVGLGTFRPVEVEDLTKHRMDSEYYVISEEAAERINRALLSPHHTVTAVGTTVVRAIESSISATGTLKAGSGWTDKFIYPPYDFKITERLITNFHMPRSTLLALVVAFAGYEFVMNAYRVAVQEKYRLFSFGDAMMIL

SEQ ID NO: 63973 - protein, 352 aa, unidentified
  source 1..352: note = Unknown
  REGION 1..352: note = tr|A0A2H5XXK8|A0A2H5XXK8_9BACT S-adenosylmethionine:tRNA ribosyltransferase-isomerase; OS = bacterium HR20 OX=2035415 GN=queA_1 PE=3 SV=1
MAPAPVKLSDLKVSVPVALVAQHPLPKRENARLLVVDRSSGDLRDEKFKNLPKYFQKGDVLVLNDTKAFPSHLIGTKEKGDTRIDVYLIRELQREERLWDIVVEPARKVRIGNRVYFDGGRVYCEIIENTTTRGRIARFSYEGDMTPLINRIGQMALPPYITREHTDEDRERFQTVFANPSKRFAIAPPTAGLHFTKEMLKAIAKQGVHIVYVTLHIGQCVLEPIELEDVSKYRMYSEYFDVGREVAETINKALKSQRNVYVVGSSTLRALESSVLTTNMLKPNRGWTDKYIFPPYDFKFKFRLLTNFHPPNSASLVLAGAVAGPELLVHSYRHAVKESYRFYAYGDAMLII

SEQ ID NO: 63974 - protein, 171 aa, unidentified
  source 1..171: note = Unknown
  REGION 1..171: note = tr|A0A2H5XYB9|A0A2H5XYB9_9BACT S-adenosylmethionine:tRNA ribosyltransferase-isomerase; OS = bacterium HR20 OX=2035415 GN=queA_2 PE=3 SV=1
MHAERILVERSTIARLRELVAERNRFCICVGTTSVRTVESLYWFGARLVVDPSVPPQHLTQEEPYLPKLLERTIPAEHALDALLDWLDRSGVSTLEASTQLYILPGYRYRIVDGMITNFHQPQSTLLLLVAAFIGPWWQIIYHEALSNNYRFLSYGDASLLIAPRTTAASR

SEQ ID NO: 63975 - protein, 415 aa, unidentified
  source 1..415: note = Unknown
  REGION 1..415: note = tr|A0A2H5Y0F7|A0A2H5Y0F7_9BACT S-adenosylmethionine:tRNA ribosyltransferase-isomerase; OS = bacterium HR21 OX=2035416 GN=queA_2 PE=3 SV=1
MEVLPPVRLEDFDYELPPERIAQHPLPERDRCRLLVADHRRRQLAHHIFAELPQLVPAPSLLVRNITRVVHARLFLRKPTGGLVELLLLAPTSGSADAAFGATPPVEWECLLRGRRLRPGTVLSVEADGLRLHAVLHEVSHGIARLRFEWDPPDMTLAELLEHLGHVPLPPYVRRSDQPADRQHYQTVYARIPGSVAAPTAGLHFTERLLRELEHAGIGFADVCLHIGLDTFKPVRAADARFHRMHSEALMVPRETLEILLHFLRSPERRWLVAIGTTSVRTLESLYWHGVRLLRREPSVWDSPHLQVGQWDAYRLQTTALPPAAEALEAIGEWLGHHRLGRIEGTTELMILPGYQYQLCDALITNFHQPRSTLLLLIAALIGDFWREVYAEALAQGYRFLSYGDASLLISERAR

SEQ ID NO: 63976 - protein, 360 aa, unidentified
  source 1..360: note = Unknown
  REGION 1..360: note = tr|A0A2H5Y062|A0A2H5Y062_9BACT S-adenosylmethionine:tRNA ribosyltransferase-isomerase; OS = bacterium HR21 OX=2035416 GN=queA_1 PE=3 SV=1
MCSELYCGEMLLRTKLSSFRYTYPKQAIAKFPADPRDSSRLLVVHRTSGELEHRTFRDIVDYFHRGDCLVVNDTWVYPALLIGKKERTHAPIEVILARELSREGNLWEVLVEPARKVRIGNKIYFDNNRFYAEIIDNTTSRGRIVRFSYSGDLYKVAERLGNMVLPPYMQRQPEEGDKEWYQTVFANPEKIGSLAPPTAGLHFTGELLEQLRQKGVHIVSITLHIGLGAFETIEVEDLSKHTMTSEYFEVSPQAADLINRALRNRKRVCAVGCSVVRALESSALTTGVVKPSRGWTDRFIYPPYEFRIVQSMITNFHPPNSPSLLVGAALAGPELITKVYRTAVKEGYRLFAYGDAMLIL

SEQ ID NO: 63977 - protein, 358 aa, unidentified
  source 1..358: note = Unknown
  REGION 1..358: note = tr|A0A2H5Y620|A0A2H5Y620_9BACT S-adenosylmethionine:tRNA ribosyltransferase-isomerase; OS = bacterium HR22 OX=2035417 GN=queA PE=3 SV=1
MEPKDLLSLEAYDYELPPDRIAQSPAEPRDAARLMVVHRATGRIEHRIFREIIDYLHPGDLLVFNDTRVIPARLFAVKPTGGRVELLLVRRVDPERWWTMVRGRHIRPGTRLQLLSGGQPVDLYAEVEAEGEGPLRLLRFSIPPEGWLERVGVIPLPPYIRRPLHDPERYQTVYARVPGSVAAPTAGLHFTPELLARLREHGVRFAFVTLHISLDTFRPIKASDVREHKLHREWCSLSADTAALINRTRLEGGRIIAVGTTVVRVLETAARYGLGCSPEAVCPWQVVGPFEGETDLFIYPGFEFRVVDALITNFHLPRSTLLLVVAAFMGYERMREAYQVAIAEGYRFYSFGDAMLIL

SEQ ID NO: 63978 - protein, 72 aa, unidentified
  source 1..72: note = Unknown
  REGION 1..72: note = tr|A0A2H5YEX8|A0A2H5YEX8_9BACT S-adenosylmethionine:tRNA ribosyltransferase-isomerase; OS = bacterium HR23 OX=2035418 GN=queA PE=3 SV=1
MRPASGWADLYILPGYPFKVVDALITNFHLPRTTLLMLVCAFAGKDLILRAYQEAIQHGYRFYSFGDAMFIR

SEQ ID NO: 63979 - protein, 350 aa, unidentified
  source 1..350: note = Unknown
  REGION 1..350: note = tr|A0A2H5YSA7|A0A2H5YSA7_9BACT S-adenosylmethionine:tRNA ribosyltransferase-isomerase; OS = bacterium HR26 OX=2035421 GN=queA PE=3 SV=1
MTMGEPIRLSDYDYELPPELIAQQPIEPRDAARLLVLDRRTGRIEHRIFREIGDYLQPGDLLVVNDSRVLPARLFGRRGTGGQVELLLLQARGDGNWEALARPARRLRPGEVLTILPRESGLAEPAPATILERLEEGRVLVQLPAQVLDALDRYGHVPLPPYIRQALRDPERYQTVYARELGSVAAPTAGLHFTPELLERLQRSGVGLARVTLHVGLGTFKPVQVEDARQHRMHAEWYHVPAETLSAIRSTREQGRRVVAVGTTSARSLESISDRLGEQGDLTGWTDLFIVPGHHWRVVDALITNFHLPRSTLLLLVCSFAGRELIFRAYREAVERGYRFYSFGDATLIL

SEQ ID NO: 63980 - protein, 359 aa, unidentified
  source 1..359: note = Unknown
  REGION 1..359: note = tr|A0A2H5Z8A2|A0A2H5Z8A2_9BACT S-adenosylmethionine:tRNA ribosyltransferase-isomerase; OS = bacterium HR28 OX=2035423 GN=queA PE=3 SV=1
METSLSPMPEEISLSLHEFDYELPEELIAQEPIEPRDAARLMVLRRATRTIEHRIFRELPSLLDPGDLLVVNDSRVLPARLFGQRRTGGKVEILLVQPLEGTTLWLALGRPARKLRPGETILVLPHEESFAPQPLRILERRARGQVVVELSPAIAEHLELFGHVPLPPYIRAPLRDPERYQTVYATHPGSVAAPTAGLHFTERLLTELRQRGITIAPLTLHVGIGTFKPIEVEDVRQHKMHAEWYRVPAETVALIQEARRAGRRIVAVGTTAARTLESIADSLDQGAVSELTGWTDLYIYPGYRWRVVNALITNFHLPRSTLILLVASFAGREFILEAYREAVRQRYRFYSFGDAMLIL

SEQ ID NO: 63981 - protein, 344 aa, unidentified
  source 1..344: note = Unknown
  REGION 1..344: note = tr|A0A2H5ZD03|A0A2H5ZD03_9BACT S-adenosylmethionine:tRNA ribosyltransferase-isomerase; OS = bacterium HR29 OX=2035424 GN=queA PE=3 SV=1
MCNEPLRTSDFDYQLPPDRIAQEPAEPRDSARLMVLRRGERRIEHRIFRDLPELLSPGDLLVMNDTRVMAARLFGVREDTGGRVELLLVRPAGPRRWVVLMRPLRSARPGRRFRFEARGGPLGATVVERLPDEAVLEFDREVDPSAEGQVPLPPYIRRFRGDPERYQTVYAREARSAAAPTAGLHFTPELLERVRAAGIETAFVTLDVGPGTFRPVTSEDPRQHRLDVERVTVPASTAEAIARTKARGGRVVAVGTTVVRTLEHVALDCGEVKPYEGWTGLLILPGHRFRTIDALITNFHLPRSSLLMLVAAFAGREFVLEAYRIAVAEGYRFYSFGDAMLILP

SEQ ID NO: 63982 - protein, 363 aa, unidentified
  source 1..363: note = Unknown
  REGION 1..363: note = tr|A0A2H5ZL99|A0A2H5ZL99_9BACT S-adenosylmethionine:tRNA ribosyltransferase-isomerase; OS = bacterium HR30 OX=2035425 GN=queA PE=3 SV=1
MEVRTKSGEQADSALRRSDYEFFLPPELIAQEPVDQRDRARLMVLDRRTRTVTHAHVADLPKFLAAGDLLVVNDTRVIPARVTTTTAGGGRVELLFIRPLPTPSNTAPMWVCMGKPARHFRPGRRILLPGDVGVQVIDRQAPGRYIVQWHGSLDVFTYLERHGQAPLPPYIRRPHGPSPRDRERYQTIFARVPGSIAAPTAGLHFTPALLEALQQAGVAIASVTLHVGPGTFQPVRVEDVRLHRMEPEWCQIPPETAAAIRAAKSRGKRVIAVGTTTTRALESSAAADGQTVMPGARWADQFILPGYRFRVIDALVTNFHLPGSTLLLLVAALVGRTWLLECYAEAVRRRYRFYSYGDAMLIL

SEQ ID NO: 63983 - protein, 357 aa, unidentified
  source 1..357: note = Unknown
  REGION 1..357: note = tr|A0A2H6A0P2|A0A2H6A0P2_9BACT S-adenosylmethionine:tRNA ribosyltransferase-isomerase; OS = bacterium HR33 OX=2035428 GN=queA PE=3 SV=1
MGESDRRYPVSAFDYPLPEDLIAQHPLPDRSASRLLVLHKSDGRIEHRSFRDFPSLIEPGDVVVVNASRVIPARLKGTRENGREAEILLVHPEPDGSWLAMVHPGGKLKPGRKVRFGRDAVAEVVEVLGGGMRRIKFCGAIDVRALMERYGSVPLPPYIRRPPEEADRERYQTIFARVEGSVAAPTAGLHFTPETVSAIEDRGGKIVEIVLHIGPGTFKPVEVDDPSRHVMHAEWYEIPEAAAEEINRAKIEGSRIWAIGTTAVRTLETAAVEDNPAVGDRRAAGVRSGSGWTDLFIYPPYEFKVVDALLTNFHLPRSTLLMLVAAFGGYERTMAAYREAVALRYRMYSYGDAMAIL

SEQ ID NO: 63984 - protein, 353 aa, unidentified
  source 1..353: note = Unknown
  REGION 1..353: note = tr|A0A2H6A955|A0A2H6A955_9BACT S-adenosylmethionine:tRNA ribosyltransferase-isomerase; OS = bacterium HR35 OX=2035430 GN=queA PE=3 SV=1
MVYDFSLYDYNLPEELIAKEPAKPRDFSRLFIYSVKEDKILFDKFFNLDKYLSKDCFLVFNNTKVLPSRIEMIKETGGKIKILFLINEIIYSRINKIRGIVDRKLEVGQKVYFPEKKKFLIAISQEKNIFTFEINFDFQEFLKLLNTYGEAPLPPYLKKTPLTKQEAKKKYQTIFAKKEGSVAAPTASFHFTQRVLNKLKKKKIKHFFVTLHVGLGTFSPVTEKNIKKKKLHQEYWEINEDVYQQILKLKKNKKLIAVGTTTTRLLETIARKKLKFKNKKAIGTTELFIFPPFEFKLVDGLITNFHLPKSSLMMLVEAFLQFKNSKRHLKELYEIAIKNKFRFYSFGDAMLII

SEQ ID NO: 63985 - protein, 358 aa, unidentified
  source 1..358: note = Unknown
  REGION 1..358: note = tr|A0A2H6ADQ6|A0A2H6ADQ6_9BACT S-adenosylmethionine:tRNA ribosyltransferase-isomerase; OS = bacterium HR36 OX=2035431 GN=queA PE=3 SV=1
MPETTSASLPLEWFDYDLPRELIAQEPLPERDEARLFVLYRQTGTWEHRHVYDLPELLCPGDLLVLNNTKVIPARLYGVRERTGGRWEGLFLRRLPSGQWELLAQTRGKPQLGELFIIEPNDAATKNGPLTLVLEGRTEEGHWLCRPQPEAPPEQLLSLYGHVPLPPYIRQGRDCPEDRERYQTIYAERPGSVAAPTAGLHFTPRLFTRLAERGIDTVFVTLHVGVGTFQPITVPDAARHQMHAEWCEISQETAQRIVQCRALGGRVVAVGTTTVRTLETVAQNGSIRAWCGQTNLYIRPPFAFRAVDILMTNFHLPRSSLLVLVSAFAGLDLIQRAYQEAVRQRYRFYSYGDAMLII

SEQ ID NO: 63986 - protein, 350 aa, unidentified
  source 1..350: note = Unknown
  REGION 1..350: note = tr|A0A2H6APV8|A0A2H6APV8_9BACT S-adenosylmethionine:tRNA ribosyltransferase-isomerase; OS = bacterium HR37 OX=2035432 GN=queA PE=3 SV=1
MSLKLSPDVGKIVFMKTSDFDYHLPPDLIALYPLSKREECRLMVVDRKTGTIEHRRFFELPYILKAGDLLVLNNTRVIPARLTGRVVSSNRRCEVLLTERISSCLWKGLMKKPKNGMLIEFEGGLKGRVFKDGREEWVFEFSEDVDDYLERFGKMPLPPYIQRDPEEDDKLFYQTVYASKKGSVAAPTAGLHFSEALMEEIKKRGVEIRFVTLHVGIGSFKPVKVESVEGHKMHPEYREITEDVAFSVNRAKSEGRRVIAVGTTVVRALESAVCEDGSIKPISGYTDLFIYPGFNFRVVDALITNFHLPRSTLLMLVAAFSGRELIMRAYEEAKKERYRFLSYGDAMLIL

SEQ ID NO: 63987 - protein, 352 aa, unidentified
  source 1..352: note = Unknown
  REGION 1..352: note = tr|A0A2H6B259|A0A2H6B259_9BACT S-adenosylmethionine:tRNA ribosyltransferase-isomerase; OS = bacterium HR40 OX=2035435 GN=queA PE=3 SV=1
MRLELFDYELPTERIAQHPVEPRDLARLLVVRHDRFEDRRVLDLPWHLAAGDLLVVNDTRVLPARFYARRGDGRLELTLTTAVDERRWRALAKGARRLRPGDLIELAPGFSATVEGRDREGEVVLAFDREGTALLEAIRQHGAMPVPPYIRRREPLARDRVDYQTLFARREGAIAAPTAGLHFTERLLRALEERGVRLATITLHVGLGTFKPVRTADLEAHDMHAEWFEVPATTAAAIAETRRQGGAVVAVGTTVVRTLESVAREDGTVVPGSGETALYILPGFRFRVVDRLLTNFHLPKSTLFAMVCAFAGFRRVHAAYRHAIAQGYRFFSYGDACLLDRQDGSDQPPEEA

SEQ ID NO: 63988 - protein, 349 aa, unidentified
  source 1..349: note = Unknown
  REGION 1..349: note = tr|A0A3L8A051|A0A3L8A051_9BACT S-adenosylmethionine:tRNA ribosyltransferase-isomerase; OS = bacterium J10(2018) OX=2320122 GN=queA PE=3 SV=1
MKLSQFKFKLPEDLIASHPCEVRDEARMMVIHRDTGEIEHLRFKDIINFFGDGDVFVFNDTKVFPALLYGNKEKTGARIEVFLLRELNEENKLWDVLVEPARKIRIGNKLYFGDDESMVAEVIDNTTSRGRTLRFLYDGSHEEFKDALYKLGQTPLPPYIKRAPEPEDAERYQCIFASNEGAVVAPSAGLHFSRELMKRLEIKGVEAGFLTVHSGLGNYREIDVEDLTKHRMDSEEMEVTPQLVDLVNNAKDNGKQVCAIGTSVLRGIESAVSMGGHMKTFTGWTNKFIFPPYDFTVASAMVSGFHMPYSTMLMMVAAFGGYDLVMHAYEEAVKEKYRFGAYGDAMLIL

SEQ ID NO: 63989 - protein, 405 aa, unidentified
  source 1..405: note = Unknown
  REGION 1..405: note = tr|A0A3L7ZYQ3|A0A3L7ZYQ3_9BACT S-adenosylmethionine:tRNA ribosyltransferase-isomerase; OS = bacterium J10(2018) OX=2320122 GN=queA PE=3 SV=1
MNSTPQSIKIQDFDYPLPDERIAKHPLARRDNCKLLVRRPDGTLDTRIFTELPSLLAADSMLVYNNTRVINARLRFRKSDAGAIIEIFCLEPVEPADYAVSFASTSCCSWLCFVGNSKRWKEGDLSLPLHIDGKELTLKASRTGREGNASIIRFSWDDPSVTFARIIESAGEIPIPPYLNRNTEDTDSTDYQTVYSHIDGSVAAPTAGLHFTPEVLAEIDRHGIERRELTLHVGAGTFQPVKTDTIGDHGMHSEFIAVSRSLISELSETSRSVIAVGTTSVRTLESLYHIGCLIGQRKWDGEVPQWYPYSDEHPRLSAKDALANIDRYLAENGTDTLIASTRIIIAPGYEFKIVDGIITNFHQPRSTLLLLVSAFVDGDWRAVYDYALDGDYRFLSYGDASLLLH

SEQ ID NO: 63990 - protein, 362 aa, unidentified
  source 1..362: note = Unknown
  REGION 1..362: note = tr|A0A4S1I6X6|A0A4S1I6X6_9BACT S-adenosylmethionine:tRNA ribosyltransferase-isomerase; OS = bacterium M00.F.Ca.ET.141.01.1.1 OX=2563898 GN=queA; PE = 3 SV=1
MRVDLFDFDLPEERIALRPAEPRDSAKMLVVKPGKGLEDRTVGNLPSLLRAGDVLVFNDTRVIPAQLKGIRRRGEAAAQVEATLHMRMAPDRWLAFMRPGKRIAAGDRIHFGHDGNSCFLGQLDATVIQKGEGGEALLGFDLSGPFLDEALHAVGHIPLPPYIASKRDDDERDRADYQTIYAREEGAVAAPTAGLHFTPELFAALDAKGIERRFVTLHVGAGTFLPVKADDTVDHKMHAEIGSVGEATANALNAAKVRGGRIIAVGTTSLRLLESAAREDGTVAPWSGPTDIFITPGYRFRTADMLMTNFHLPRSTLFMLVSAFSGLDTMRAAYAHAIANRYRFYSYGDASLLYRAEMSDGR

SEQ ID NO: 63991 - protein, 355 aa, unidentified
  source 1..355: note = Unknown
  REGION 1..355: note = tr|A0A4S1HYW3|A0A4S1HYW3_9BACT S-adenosylmethionine:tRNA ribosyltransferase-isomerase; OS = bacterium M00.F.Ca.ET.141.01.1.1 OX=2563898 GN=queA; PE = 3 SV=1
MRAIVDLLPPTALKKSDFHYDLPAELIAQAPLAERSASRLLLVPPAPAAFTDLQVRDLPSLLQPGDLLVFNDTRVIPARLFGQKASGGRVEILIERLLGGQQARAQVGASKSPKAGSRIALDAGGEAEVLGRDGEFYVLQFHVPESLEQWLLHAGRLPLPPYIQREPGVDDRERYQTVFAREVGAVAAPTAGLHFDEPLLAALKDKGVEFGHVTLHVGAGTFQPVRADDLKDHVMHREWLNVGAELVQQVRRTRAAGGRVIGVGTTVVRALESAMRDGELLPFAGETQIFITPGYRIRSVDAMVTNFHLPESTLLMMISAFAGKERVFEAYRHAIEQRYRFFSYGDAMLLFPQAG

SEQ ID NO: 63992 - protein, 362 aa, unidentified
  source 1..362: note = Unknown
  REGION 1..362: note = tr|A0A4S1B2T9|A0A4S1B2T9_9BACT S-adenosylmethionine:tRNA ribosyltransferase-isomerase; OS = bacterium M00.F.Ca.ET.146.01.1.1 OX=2563899 GN=queA; PE = 3 SV=1
MRVDLFDFDLPEERIALRPAEPRDSARLLVVKPGEMLQDRIVSELPSMLREGDVLVFNDTKVIPAQLKGMRKRGDAVAQVEATLHMRVAPDRWQAFMRPGKRVAAGDRIHFGHDQNSCFLGQLDARVLEKGEAGEALLGFDLSGPFLDEALHAVGHIPLPPYIASKRDDDERDRTDYQTIYAREEGAVAAPTAGLHFTPALFAALDAKGIERRFVTLHVGAGTFLPVKADDTADHKMHAETGSVSPETAAALNAAKARGGRIICVGTTSLRLLESAARDDGRIEPWSGPTDIFITPGYRFRTADMLMTNFHLPRSTLFMLVSAFSGLETMRSAYAHAIESRYRFYSYGDASLLYRAETCDGR

SEQ ID NO: 63993 - protein, 362 aa, unidentified
  source 1..362: note = Unknown
  REGION 1..362: note = tr|A0A4S1BJZ4|A0A4S1BJZ4_9BACT S-adenosylmethionine:tRNA ribosyltransferase-isomerase; OS = bacterium M00.F.Ca.ET.152.01.1.1 OX=2563900 GN=queA; PE = 3 SV=1
MRVDLFDFDLPEERIALRPAEPRDSARMLVVKSGEELEDQIVRDLPSLLRAGDVLVFNDTRVIPAQLKGIRRRGEAQAQVEATLHMRVAPDRWLAFMRPGKRIAAGDRIHFGHDGNSCFLGQLDATVITKGEGGEALLGFDLSGPFLDEALHAVGHIPLPPYIASKRDDDERDRADYQTIYAREEGAVAAPTAGLHFTPDLFAALDARGVERHFVTLHVGAGTFLPVKADDTADHKMHAEIGSVSRETADALNAARARGGRIIAVGTTSLRLLESAAREDGTVPAWSGPTDIFITPGYRFRTADMLMTNFHLPRSTLFMLVSAFSGLDTMRAAYAHAIANRYRFYSYGDASLLYRAEISDGR

SEQ ID NO: 63994 - protein, 98 aa, unidentified
  source 1..98: note = Unknown
  REGION 1..98: note = tr|A0A4S0XH49|A0A4S0XH49_9BACT S-adenosylmethionine:tRNA ribosyltransferase-isomerase (Fragment) OS=bacterium M00.F.Ca.ET.155.01.1.1 OX=2563901; GN = EN798_34400 PE=3 S V=1
DTADHKMHAETGSVSPETAAALNAAKARGGRIICVGTTSLRLLESAARDDGRIEPWSGPTDIFITPGYRFRTADMLMTNFHLPRSTLFMLVSAFSGLE

SEQ ID NO: 63995 - protein, 352 aa, unidentified
  source 1..352: note = Unknown
  REGION 1..352: note = tr|A0A4S0YCY7|A0A4S0YCY7_9BACT S-adenosylmethionine:tRNA ribosyltransferase-isomerase; OS = bacterium M00.F.Ca.ET.155.01.1.1 OX=2563901 GN=queA; PE = 3 SV=1
MLTLSDFDFDLPPELIAQVALPERSASRLLEVDNAPDADRAARLTDRRFSELPECINAGDLLVFNDTKVLKARFLGQKASGGKIEVLVERLVGERTALAQIRASKSPQPGTTIRLADAFDVTVGERVEPFYTLHFPADCLTLIEQYGRLPLPPYIEHDPDSTDETRYQTVYAQNPGAVAAPTAGLHFDDALFERLDARGVQRATLTLHVGAGTFQPVRVENLAEHKMHSEWYHLPQSLADKIAATRARGNRVIAVGTTSMRALEAAARDAEAAGRPLAAASTETDIFITPGYRFRVVDRLVTNFHLPKSTLLMLVSAFAGVETIRAAYRHAIEQRYRFFSYGDAMLLTRRDG

SEQ ID NO: 63996 - protein, 362 aa, unidentified
  source 1..362: note = Unknown
  REGION 1..362: note = tr|A0A4S0ZPQ7|A0A4S0ZPQ7_9BACT S-adenosylmethionine:tRNA ribosyltransferase-isomerase; OS = bacterium M00.F.Ca.ET.156.01.1.1 OX=2563902 GN=queA; PE = 3 SV=1
MRVDLFDFDLPEERIALRPAEPRDSAKMLVVEPGKGLEDRTVGDLPSLLRAGDVLVFNDTKVIPAQLKGIRRRGEAAAQVEATLHMRMAPDRWLAFMRPGKRIAAGDRIHFGHDGNSCFLGQLDATVIEKGEGGEALLGFDLSGPFLDEALHAVGHIPLPPYIASKRDDDERDHADYQTIYAREEGAVAAPTAGLHFTPELFAALDAKGIERRFVTLHVGAGTFLPVKADDTADHKMHAEIGSVSEATASALNAAKARGGRIIAVGTTSLRLLESAARDDGTVAPWSGPTDIFITPGYRFRTADMLMTNFHLPRSTLFMLVSAFSGLDTMRAAYAHAIANRYRFYSYGDASLLYRAEMSDGR

SEQ ID NO: 63997 - protein, 362 aa, unidentified; identical to SEQ ID NO: 63992
  source 1..362: note = Unknown
  REGION 1..362: note = tr|A0A4S0ZI74|A0A4S0ZI74_9BACT S-adenosylmethionine:tRNA ribosyltransferase-isomerase; OS = bacterium M00.F.Ca.ET.156.01.1.1 OX=2563902 GN=queA; PE = 3 SV=1

SEQ ID NO: 63998 - protein, 362 aa, unidentified
  source 1..362: note = Unknown
  REGION 1..362: note = tr|A0A4S0X3L7|A0A4S0X3L7_9BACT S-adenosylmethionine:tRNA ribosyltransferase-isomerase; OS = bacterium M00.F.Ca.ET.157.01.1.1 OX=2563903 GN=queA; PE = 3 SV=1
MRVDLFDFDLPEERIALRPAEPRDSARLLVVKPGEMLQDRIVSELPSMLREGDVLVFNDTKVIPAQLKGMRKRGDAVAQVEATLHMRVAPDRWQAFMRPGKRVAAGDRIHFGHDQNSCFLGQLDATVLEKGEAGEALLGFDLSGPFLDEALHAVGHIPLPPYIASKRDDDERDRTDYQTIYAREEGAVAAPTAGLHFTPALFAALDAKGIERRFVTLHVGAGTFLPVKADDTADHKMHAETGSVSSETAAALNAAKARGGRIICVGTTSLRLLESAARDDGRIEPWSGPTDIFITPGYRFRTADMLMTNFHLPRSTLFMLVSAFSGLETMRSAYAHAIESLYRYYSYGDASLLYRAETSDGR

SEQ ID NO: 63999 - protein, 362 aa, unidentified; identical to SEQ ID NO: 63998
  source 1..362: note = Unknown
  REGION 1..362: note = tr|A0A4S0W9Z1|A0A4S0W9Z1_9BACT S-adenosylmethionine:tRNA ribosyltransferase-isomerase; OS = bacterium M00.F.Ca.ET.159.01.1.1 OX=2563904 GN=queA; PE = 3 SV=1

SEQ ID NO: 64000 - protein, 362 aa, unidentified; identical to SEQ ID NO: 63993
  source 1..362: note = Unknown
  REGION 1..362: note = tr|A0A4V3S8J7|A0A4V3S8J7_9BACT S-adenosylmethionine:tRNA ribosyltransferase-isomerase; OS = bacterium M00.F.Ca.ET.162.01.1.1 OX=2563905 GN=queA; PE = 3 SV=1

SEQ ID NO: 64001 - protein, 362 aa, unidentified; identical to SEQ ID NO: 63992
  source 1..362: note = Unknown
  REGION 1..362: note = tr|A0A4S0YND5|A0A4S0YND5_9BACT S-adenosylmethionine:tRNA ribosyltransferase-isomerase; OS = bacterium M00.F.Ca.ET.163.01.1.1 OX=2563906 GN=queA; PE = 3 SV=1

SEQ ID NO: 64002 - protein, 355 aa, unidentified; identical to SEQ ID NO: 63991
  source 1..355: note = Unknown
  REGION 1..355: note = tr|A0A4S0Z2V9|A0A4S0Z2V9_9BACT S-adenosylmethionine:tRNA ribosyltransferase-isomerase; OS = bacterium M00.F.Ca.ET.163.01.1.1 OX=2563906 GN=queA; PE = 3 SV=1

SEQ ID NO: 64003 - protein, 360 aa, unidentified
  source 1..360: note = Unknown
  REGION 1..360: note = tr|A0A4S1HA84|A0A4S1HA84_9BACT S-adenosylmethionine:tRNA ribosyltransferase-isomerase; OS = bacterium M00.F.Ca.ET.168.01.1.1 OX=2563907 GN=queA; PE = 3 SV=1
MRVDLFDFDLPEENIALRPANPRDSARLLVVDPNENRMEDHRVFDLPSFLRAGDALVFNDTRVIPAQLEGVRLREGAPETAVSATLHMRADQSRWKAFARPGKRIKQGDRIRFGYERDNACGLAHLEATVEQKDEEGEITLLFDVSGPVLDEAIASVGHIPLPPYIAAKRPEDAQDQTDYQTIYAREKGAVAAPTAGLHFTPELFAALDKAGIERHFVTLHVGAGTFLPVKADDTDDHKMHFEIGHVSQETADRLNAVKARGGRIVCVGTTSLRLIESAAAEDGTIHPWSDATGIFITPGYRFRAVDMLMTNFHLPKSTLFMLVSAFCGLETMRDAYKHAIETGYRFYSYGDSSLLFRKN

SEQ ID NO: 64004 - protein, 362 aa, unidentified
  source 1..362: note = Unknown
  REGION 1..362: note = tr|A0A4S0QXG5|A0A4S0QXG5_9BACT S-adenosylmethionine:tRNA ribosyltransferase-isomerase; OS = bacterium M00.F.Ca.ET.177.01.1.1 OX=2563908 GN=queA; PE = 3 SV=1
MRVDLFDFDLPEERIALRPAEPRDSARMLVVRPGDGLEDRNVRDLPSLLKDGDVLVFNDTKVIPAQLKGIRRRGEAMAQVEATLHMRVAPDRWQAFMRPGKRIAAGDRIHFGHDQNSCFLGQLDATVIEKGEAGEVLLGFDLSGPFLDEAMHAVGHIPLPPYIASKRDDDERDRSDYQTIYAREEGAVAAPTAGLHFTPELFAALDAKGIERRFVTLHVGAGTFLPVKADDTADHKMHAETGSVSAETAQALNAARERGARIVAVGTTSLRLLESAAREDGRIEPWSGPTDIFITPGYRFRTADMLMTNFHLPRSTLFMLVSAFSGLETMRSAYAHATDNSYRFYSYGDASLLFRAETSDGR

SEQ ID NO: 64005 - protein, 392 aa, unidentified
  source 1..392: note = Unknown
  REGION 1..392: note = tr|A0A4S0Q2T6|A0A4S0Q2T6_9BACT S-adenosylmethionine:tRNA ribosyltransferase-isomerase; OS = bacterium M00.F.Ca.ET.177.01.1.1 OX=2563908; GN = EN820_53060 PE=3 SV=1
MIAADRRVRRAARLLVVEANGAMCDLPRAGLATLFNPGDLIVANDAATLPASLHGTHVPSGEAIEIRLAGWLSLPDPTRFVALAFGAGDHRTRTEDRLPPPPLSTGDRLRLGPLEAVVARLLDHPRLLELRFSGNRAAVIAGLAQHGRPIQYAHVPEPLALWDVWTKIAAGPVAFEAPSAGFALDWLTLQAWRRRDVGFATLTHAAGVSSTGDPALDSRLPFDESYRIPERTATQVARAKLRGSRIIVIGTSVVRALEAAANPDGSVRAGNGIATGRIVRGTRLRVVDAILTGVHQPGESHFELLRAFADDALLAKASVAFAACRYHTHEFGDSMLLNRQPLLPSSEQVRAEVLETKALLEACYDVGRIGGISDARRARKSEQCCSGPRVGI

SEQ ID NO: 64006 - protein, 360 aa, unidentified; identical to SEQ ID NO: 64003
  source 1..360: note = Unknown
  REGION 1..360: note = tr|A0A4S0MZJ6|A0A4S0MZJ6_9BACT S-adenosylmethionine:tRNA ribosyltransferase-isomerase; OS = bacterium M00.F.Ca.ET.179.01.1.1 OX=2563909 GN=queA; PE = 3 SV=1

SEQ ID NO: 64007 - protein, 341 aa, unidentified
  source 1..341: note = Unknown
  REGION 1..341: note = tr|A0A4S0M161|A0A4S0M161_9BACT S-adenosylmethionine:tRNA ribosyltransferase-isomerase; OS = bacterium M00.F.Ca.ET.180.01.1.1 OX=2563910 GN=queA; PE = 3 SV=1
MDIEAFDYHLPESLIAQTPLKNRDESRLLVLGRKTGNIEHKHFKNVIDYIESGDTLVLNDTRVMPARLFGLKEETGAKVEMLMLTQLEDNDWEVLLKPAKRIKVGDKLSFGEGKIVAECLETLDQGGRIMRLNYEGILQERLDELGEMPLPPYIKERLDDPDRYQTVYAKASGSAAAPTAGLHFTDELLEQLKAKGVNIAFITLHVGLGTFRPVSVENIDDHEMHSEYYQMNQETADLLNATKANGHRIFSVGTTSTRTLETIMQTHNNFVAESGWTDIFIYPGFDFKAIDGLITNFHLPKSTLVMLVSAFSSRDYILNAYQQAVKLEYRFFSFGDAMLIF

SEQ ID NO: 64008 - protein, 352 aa, unidentified; identical to SEQ ID NO: 63995
  source 1..352: note = Unknown
  REGION 1..352: note = tr|A0A4S0IWI8|A0A4S0IWI8_9BACT S-adenosylmethionine:tRNA ribosyltransferase-isomerase; OS = bacterium M00.F.Ca.ET.191.01.1.1 OX=2563911 GN=queA; PE = 3 SV=1

SEQ ID NO: 64009 - protein, 360 aa, unidentified; identical to SEQ ID NO: 64003
  source 1..360: note = Unknown
  REGION 1..360: note = tr|A0A4S0GZF8|A0A4S0GZF8_9BACT S-adenosylmethionine:tRNA ribosyltransferase-isomerase; OS = bacterium M00.F.Ca.ET.194.01.1.1 OX=2563912 GN=queA; PE = 3 SV=1

SEQ ID NO: 64010 - protein, 91 aa, unidentified
  source 1..91: note = Unknown
  REGION 1..91: note = tr|A0A4S0FZV0|A0A4S0FZV0_9BACT S-adenosylmethionine:tRNA ribosyltransferase-isomerase (Fragment) OS=bacterium M00.F.Ca.ET.194.01.1.1 OX=2563912; GN = EN837_28700 PE=3 S V=1
MRVDLFDFDLPEERIALRPAEPRDSAKMLVVEPGKGLEDRTVGDLPSLLRAGDVLVFNDTKVIPAQLKGIRRRGEAMAQVEATLHMRVAPD

SEQ ID NO: 64011 - protein, 355 aa, unidentified; identical to SEQ ID NO: 63991
  source 1..355: note = Unknown
  REGION 1..355: note = tr|A0A4S0FC12|A0A4S0FC12_9BACT S-adenosylmethionine:tRNA ribosyltransferase-isomerase; OS = bacterium M00.F.Ca.ET.199.01.1.1 OX=2563913 GN=queA; PE = 3 SV=1

SEQ ID NO: 64012 - protein, 362 aa, unidentified; identical to SEQ ID NO: 63996
  source 1..362: note = Unknown
  REGION 1..362: note = tr|A0A4S0EFI6|A0A4S0EFI6_9BACT S-adenosylmethionine:tRNA ribosyltransferase-isomerase; OS = bacterium M00.F.Ca.ET.199.01.1.1 OX=2563913 GN=queA; PE = 3 SV=1

SEQ ID NO: 64013 - protein, 362 aa, unidentified; identical to SEQ ID NO: 63993
  source 1..362: note = Unknown
  REGION 1..362: note = tr|A0A4R9ZK35|A0A4R9ZK35_9BACT S-adenosylmethionine:tRNA ribosyltransferase-isomerase; OS = bacterium M00.F.Ca.ET.205.01.1.1 OX=2563914 GN=queA; PE = 3 SV=1

SEQ ID NO: 64014 - protein, 362 aa, unidentified; identical to SEQ ID NO: 63992
  source 1..362: note = Unknown
  REGION 1..362: note = tr|A0A4R9UEL8|A0A4R9UEL8_9BACT S-adenosylmethionine:tRNA ribosyltransferase-isomerase; OS = bacterium M00.F.Ca.ET.221.01.1.1 OX=2563915 GN=queA; PE = 3 SV=1

SEQ ID NO: 64015 - protein, 362 aa, unidentified; identical to SEQ ID NO: 63992
  source 1..362: note = Unknown
  REGION 1..362: note = tr|A0A4R9V2K4|A0A4R9V2K4_9BACT S-adenosylmethionine:tRNA ribosyltransferase-isomerase; OS = bacterium M00.F.Ca.ET.222.01.1.1 OX=2563916 GN=queA; PE = 3 SV=1

SEQ ID NO: 64016 - protein, 362 aa, unidentified; identical to SEQ ID NO: 63992
  source 1..362: note = Unknown
  REGION 1..362: note = tr|A0A4R9TPS2|A0A4R9TPS2_9BACT S-adenosylmethionine:tRNA ribosyltransferase-isomerase; OS = bacterium M00.F.Ca.ET.227.01.1.1 OX=2563917 GN=queA; PE = 3 SV=1

SEQ ID NO: 64017 - protein, 352 aa, unidentified; identical to SEQ ID NO: 63995
  source 1..352: note = Unknown
  REGION 1..352: note = tr|A0A4R9RC51|A0A4R9RC51_9BACT S-adenosylmethionine:tRNA ribosyltransferase-isomerase; OS = bacterium M00.F.Ca.ET.228.01.1.1 OX=2563918 GN=queA; PE = 3 SV=1

SEQ ID NO: 64018 - protein, 341 aa, unidentified; identical to SEQ ID NO: 64007
  source 1..341: note = Unknown
  REGION 1..341: note = tr|A0A4R9SKS5|A0A4R9SKS5_9BACT S-adenosylmethionine:tRNA ribosyltransferase-isomerase; OS = bacterium M00.F.Ca.ET.229.01.1.1 OX=2563919 GN=queA; PE = 3 SV=1

SEQ ID NO: 64019 - protein, 362 aa, unidentified
  source 1..362: note = Unknown
  REGION 1..362: note = tr|A0A4R9S1V5|A0A4R9S1V5_9BACT S-adenosylmethionine:tRNA ribosyltransferase-isomerase; OS = bacterium M00.F.Ca.ET.230.01.1.1 OX=2563920 GN=queA; PE = 3 SV=1
MRVDLFDFDLPEERIALRPAEPRDSARLLVVKPGEMLQDRIVSELPSMLREGDVLVFNDTKVIPAQLKGMRKRGDAVAQVEATLHMRVAPDRWQAFMRPGKRVAAGDRIHFGHDQNSCFLGQLDATVLEKGEAGEALLGFDLSGPFLDEALHAVGHIPLPPYIASKRDDDERDRTDYQTIYAREEGAVAAPTAGLHFTPALFAALDAKGIERHFVTLHVGAGTFLPVKADDTADHKMHAETGSVSPETAAALNAAKARGGRIICVGTTSLRLLESAARDDGRIEPWSGPTDIFITPGYRFRTADMLMTNFHLPRSTLFMLVSAFSGLETMRSAYAHAIESLYRYYSYGDASLLYRAETSDGR

SEQ ID NO: 64020 - protein, 357 aa, unidentified
  source 1..357: note = Unknown
  REGION 1..357: note = tr|A0A4R9RUE5|A0A4R9RUE5_9BACT S-adenosylmethionine:tRNA ribosyltransferase-isomerase; OS = bacterium M00.F.Ca.ET.230.01.1.1 OX=2563920 GN=queA; PE = 3 SV=1
MPLTLDDFDYQLPDELIARYPLAVRSASRLLYLPAHGQPKDQQFVDLPELLNSGDLVVFNDTKVMKARLFGQKASGGAVEVLVERILPDDATSSQKHTALCHVRASRSPKEGQTLSLADGNIHATVMGREENLFLLAFDQPILPVLEHYGELPIPPYFERHADDNDETRYQTVFHDPAKLASVAAPTASLHFDDNVLAALKSKGINTAFVTLHVGAGTFAPVKTEDILRHKMHSEYAELPQATADLINQTKARGGQVIAVGTTVTRVLETAFQKTANFENPMLSAWSGDTDIFIYPSFRFGVIDKLITNFHLPKSTLLMLVSAFAGSEPIKQAYQHAIEQRYRFFSYGDAMLLEKMV

SEQ ID NO: 64021 - protein, 362 aa, unidentified
  source 1..362: note = Unknown
  REGION 1..362: note = tr|A0A5J4E2G5|A0A5J4E2G5_9BACT S-adenosylmethionine:tRNA ribosyltransferase-isomerase; OS = bacterium MnTg02 OX=2080452 GN=queA PE=4 SV=1
MRADEFDYELPPERIALRPCRPRDAARLLCVEPERNPPFTDRVVSELADVLSPGDALVINDTRVIRAALTGVRVRQGVEARIAVTLLKPLDANRWQALARPAKRLKSGDRIDFGADGRVCLQGTLSATVEERRGEGEVILAFDFHGAVLEDAIGTVGEMPLPPYIASRRPADERDDKDYQTVFAARDGAVAAPTAGLHFTQPLFDVLSARGISHHFVTLHVGAGTFLPMKAADTQDHKMHAEWGEVHADVADALNGVRAQGGRLVAIGTTALRLLESAADESGSIHPFAGETSLFITPGYRFRAVDRLFTNFHLPRSTLFMLVSAFSGLDVMKRAYAHAIEQNYRFYSYGDACLLSPKAETL

SEQ ID NO: 64022 - protein, 60 aa, unidentified
  source 1..60: note = Unknown
  REGION 1..60: note = tr|A0A5J4EC97|A0A5J4EC97_9BACT S-adenosylmethionine:tRNA ribosyltransferase-isomerase; OS = bacterium MnTg04 OX=2080454 GN=queA PE=4 SV=1
MLTNFHLPRSSLLMLVSAFAGRAAVLAAYRHAVDNRYRFFSYGDAMFLTPEPTTGHNHEI

SEQ ID NO: 64023 - protein, 349 aa, unidentified
  source 1..349: note = Unknown
  REGION 1..349: note = tr|A0A132H0W3|A0A132H0W3_9BACT S-adenosylmethionine:tRNA ribosyltransferase-isomerase; OS = bacterium P201 OX=1768112 GN=queA PE=3 SV=1
MKLSQFKFNLPSELIALQPTQNRDEARLMVVDRRTGKIEHRIFKDLVDYVKDGDVFVINNTKVFPAKLYGEKEKTGAKIEVLLLRELDHESRLWDVLVDPARKIRIGNKLYFGDGDELVAEVIDNTTSRGRTLRFLYDGTYDEFKKTLSSLGHTPIPKELNREERPEDAEDFQTIYAKVEGAVSAPTAGMHFSKILMKRLEIVGASFAELTLHPGMGNFRDIEVEDLTKHKPDSEEMYIDEECCTLVNEANARHNNVFAVGTTSLKALETAMTIGGKIKPYKGWTNKFIFPPYTFSVANCMITNFHLPKSPMMMEVAAFAGYDVLMKAYKEAIAQKYRFFTYGDAMLII

SEQ ID NO: 64024 - protein, 403 aa, unidentified
  source 1..403: note = Unknown
  REGION 1..403: note = tr|A0A132GXV3|A0A132GXV3_9BACT S-adenosylmethionine:tRNA ribosyltransferase-isomerase; OS = bacterium P201 OX=1768112 GN=queA PE=3 SV=1
MSAVKDISIEAYDYPLPEERIAKYPLAERDASKLLVLKDNEISESRFKHVGDFLPKDALLVFNETKVIRARLQFHKATGSRIEVFCLEPEKDYQVAFSASSPVRWKCLVGNAKRWKEGKLSMELSVKGEKVTLFADRIAHNDQYSEIEFSWTPEHLSFAAVLEAAGEIPLPPYLHRDAEPSDRDRYQTVFARYDGSVAAPTAGLHFTKPLMEDLHKQGFDFDEVTLHVGAGTFRPVATETIGEHAMHSETIIVRKSLIQNLVQRYGKPIIPVGTTSTRTLESLYWIGVMLKEQGDELRPLHVEQWFPYEDHEDISAVDALHAILEYLDKHGLTRLEASTALMIAPSYKMRVITGLITNFHQPKSTLLLLVSALIGERWKDCYRFALDHGFRFLSYGDSCLFLP

SEQ ID NO: 64025 - protein, 365 aa, unidentified
  source 1..365: note = Unknown
  REGION 1..365: note = tr|A0A4Q2RFD3|A0A4Q2RFD3_9BACT S-adenosylmethionine:tRNA ribosyltransferase-isomerase; OS = bacterium RmlP001 OX=2316527 GN=queA PE=3 SV=1
MLVDDFDFELPESAIALRPAAPRDSARLLTVDPADPARFGDRAVRDLPDLLQPGDALVVNDTRVVPARLFGLRRRGDAIARIEVTLHRRDAPDRWRAFIRPAKRLADGERLAFEADGAEVLAATASDKDGGEVSLSFDRSGEALDAAVARVGQMPLPPYIEHRRAGDAADAADYQTLFADRPGAVAAPTAGLHFTPDLVARLAAAGVALHRVTLHVGAGTFLPVKSDTTEGHRMHGEIGAVSPDTAAALTDVRRRGGRVVAVGTTSLRILESAAGADGVVRPFAGETSIFITPGYRFRAVDLLMTNFHLPRSTLFMLVSAFSGLDTMRAAYARAIASGYRFYSYGDACLLRPTAASAPPTPGPVP

SEQ ID NO: 64026 - protein, 364 aa, unidentified
  source 1..364: note = Unknown
  REGION 1..364: note = tr|A0A4Q2U9U8|A0A4Q2U9U8_9BACT S-adenosylmethionine:tRNA ribosyltransferase-isomerase; OS = bacterium RmlP026 OX=2316528 GN=queA PE=3 SV=1
MLVDAFDFTLPESAIALRPASPRDAARLLAVDPGAPRPLVDRAVRDLPTLLQPGDALVVNDTRVVPARLFGIRRRGGHVARIEVTLHRRDAADRWRAFVRPAKRLADGEALDFEAGGAVALSARASDKDGGEVSLTFDRAGDELDAATALVGRMPLPPYIEHRRAGDDADASDYQTLFAARPGAVAAPTAGLHFTPDLVDALRARGVALHRVTLHVGAGTFLPVKADTTEEHRMHGEIGTVSAETADALNAARRRGGRLVSVGTTSLRILESAAGEDGIIRPFAGETSIFITPGYRFRCVDRLMTNFHLPRSTLFMLVSAFSGLDAMQAAYAHAIGAGYRFYSYGDASLLAPAADSAAPRPDPA

SEQ ID NO: 64027 - protein, 290 aa, unidentified
  source 1..290: note = Unknown
  REGION 1..290: note = tr|A0A1E4EVK2|A0A1E4EVK2_9BACT S-adenosylmethionine:tRNA ribosyltransferase-isomerase; OS = bacterium SCN 62-11 OX=1660156 GN=ABS71_17170 PE=3 SV=1
MTPIPVQLRVSHAHQLEQMPFDRLGSVLQPGDLLVVNDSATLPASIDNRLHYSGQLEDGSWLVEPRQRQGLGTIPLSWRADQTIELPELGVRKLTAWPESNRLWRLENAPEPVAYLTRYGQPIRYAHTQRELPLQAYQSFFARVPGSAEMPSAGRPFSWEMVQGLDIASLTLHTGVSSLENHEMPYPEWFQVPEQTWRRVQAARRVIAVGTTVLRALETAATGQFHGWTRHIVTPENFRHSVDGLLTGMHDPTSTHRWMLQALLPAEELSRAYQGTFNAHEFGDMHLILK

SEQ ID NO: 64028 - protein, 135 aa, unidentified
  source 1..135: note = Unknown
  REGION 1..135: note = tr|A0A0S8I0A3|A0A0S8I0A3_9BACT S-adenosylmethionine:tRNA ribosyltransferase-isomerase (Fragment) OS=bacterium SM23_31 OX=1703762 GN=AMJ80_07850; PE = 3 SV=1
GLGSFRPVQVEDLTRHRMDSEYFEITKEAADKINKIKQKGGAVVCVGTTSVRSLETAITSDHLVKPYAGWTDKFIFPPYEFKVADRLITNFHLPCSTLLMLVSAFATRDLIFKAYRKAIKEKYRFYSYGDAMIII

SEQ ID NO: 64029 - protein, 350 aa, unidentified
  source 1..350: note = Unknown
  REGION 1..350: note = tr|A0A3R7V294|A0A3R7V294_9BACT S-adenosylmethionine:tRNA ribosyltransferase-isomerase; OS = bacterium TMED144 OX=1986778 GN=queA PE=3 SV=1
MIEKKKKWKLADFDYSLPEKYIAQYPTEKRDKSKLMVIHKESGEIEHKLFSDLPDYLRKNDLVITNNTKVFPARLYASKDRTDAKVEVFLLRELENDLWEVMVRPARKVRIGNKLMFTDNVFCDVIDNTISGGRVVRFEYDGDDIYDIIDKVGISPLPPYIKRKSEPSDKERYQTVFAEHRGAVAAPTAGLHFTKDLIDSIVKKGAKMEHTTLHIGLGTFRPVQVEDLNRHQMDSEYFEVSPKTALSINETKKKRRRVFAVGTSSVRSLETVAVSGFQVSPKRGWTDKFIYPPYDFKMVDAMITNFHQPKSTLLMMVSAFADPDLIMKAYKEAKKNNYRFLSYGDAMLIM

SEQ ID NO: 64030 - protein, 358 aa, unidentified
  source 1..358: note = Unknown
  REGION 1..358: note = tr|A0A1Z8MLG3|A0A1Z8MLG3_9BACT S-adenosylmethionine:tRNA ribosyltransferase-isomerase; OS = bacterium TMED15 OX=1986651 GN=queA PE=3 SV=1
  VARIANT 55: note = Xaa can be any naturally occurring amino acid
  VARIANT 62: note = Xaa can be any naturally occurring amino acid
  VARIANT 69: note = Xaa can be any naturally occurring amino acid
MEKLKETGDLLLDSYDYVLPENQIAQYPLENRDQSRLLVLDRKTRDYHHTTFDQXGHFLPRXSLLVTNXTKVIPARLIGYKARTKGKVEVFLLQQKASRIWEVLMKPGRRIRSKMQIVFENHPDNQSEFQLVGTVVAKTDIGSFVIRFDYDGDFFDCLHRVGQTPLPPYIKRPTSQKDLSRYQCVYAKKQGAVAAPTAGLHFTPSLFGRLESLGIRNTELTLHVGLGTFQPVKANNLLDHKMHTEFFEISPQTADSINQAKKIGQKIVAVGTTSVRSLESSAKDGWIQPQRGETDIFIYPGYQFEVVDALITNFHLPKSTLIMLVSAFADRQFVMDAYRQAITAGYRFYSYGDAMLIL

SEQ ID NO: 64031 - protein, 351 aa, unidentified
  source 1..351: note = Unknown
  REGION 1..351: note = tr|A0A1Z9L7B8|A0A1Z9L7B8_9BACT S-adenosylmethionine:tRNA ribosyltransferase-isomerase; OS = bacterium TMED190 OX=1986655 GN=queA PE=3 SV=1
MLFEKRVKLRLNDFDYKLPKSRIAQEPWPRRDHSKLMVLNKKDQTIEHKKFHNLPDYVKKNDLVILNETKVFPARLFAIKDRTDAKVEVFLLRELENDLWEVLVKPARKVRIGNKLHFTDNVHCDVIDNTVSGGRVVRFEYENEAFYNIIDRIGHAPLPPYIGREDTEKDKERYQTVFASNRGAVAAPTAGLHFTDSVIKKITDKGAKIGKIVLHIGLGTFRPVQVEDLTRHTMDSEYFHVPPETALMINETRERGKNIFAVGTSSVRALETVVVSGFQVTPKRGWTDKFIFPPYDFKMTDAIITNFHQPKSTLLMLLCAFTEREFLFNAYKEALKKDYRFLSYGDAMIIK

SEQ ID NO: 64032 - protein, 352 aa, unidentified
  source 1..352: note = Unknown
  REGION 1..352: note = tr|A0A1Z9M5D5|A0A1Z9M5D5_9BACT S-adenosylmethionine:tRNA ribosyltransferase-isomerase; OS = bacterium TMED198 OX=1986779 GN=queA PE=3 SV=1
MFFGSAEKPPRLSSFDLEVPNARVAQHPSEKRDQCKLMVLHTKDQTIEHTKFSKIVDYYEKGDVLVLNDTKVYPARLFAKKDKSEAKVEVFLLRELSSDLWEAMVRPARKVRIGNKLIFGKGIECDVIDNTISGGRVIRFENNTNNLYDFIEKNGHSPLPPYIKREATAKDKKDYQTVYAANRGSVAAPTAGLHLTKGLINKFDKKGIIVTKITLHIGLGTFRPIMVEDLTRHQMDSEYYEVSAETAEIINIARKKKRNICPVGTSTVRTLETVCVSGFKITAKSGWTDKFIYPPYEFKMCDKLITNFHQPQSTLMMMIAAKAKKDFALKAYEEAIKKKYNFYSYGDAMLII

SEQ ID NO: 64033 - protein, 335 aa, unidentified
  source 1..335: note = Unknown
  REGION 1..335: note = tr|A0A424SBI4|A0A424SBI4_9BACT S-adenosylmethionine:tRNA ribosyltransferase-isomerase; OS = bacterium TMED221 OX=1986656 GN=CBD81_001995 PE=3 SV=1
MHKTPTSDLEYVLDESCIAQYRYKDPSYSKLLIAETNEIVTFEKFLNELEDKSVFVFNKSTIHNVRIETTKSHTGGKIEFFILNILDPNTAEVMIKTSSNLKPSDIIDTPIGTVSILDKSEGIFTVDFKRDVRELIEKLGKVPLPPYINDDSSKYDDYKNEFSEGGFSVATSTAGLHFTLDMISELQNNGHKVFFLNLDINLGTFKQIHTKNIEDYEIHSEFYKVSKNEFNEILNLKDIGYKVVAVGTTVLRTLETVFTSGIYEGKTDLFITPGYKFNIPDFLITNFHAPRSSLLSIVQTIYGSEWKKLYKYAQKNNLKFLSFGDAVLFKIDEQS

SEQ ID NO: 64034 - protein, 350 aa, unidentified
  source 1..350: note = Unknown
  REGION 1..350: note = tr|A0A3R7W8G8|A0A3R7W8G8_9BACT S-adenosylmethionine:tRNA ribosyltransferase-isomerase; OS = bacterium TMED46 OX=1986782 GN=queA PE=3 SV=1
MIDKKKKYKLGDFNYQLPKAFIAQHPESRRDYAKLMVVHRDSGEIEHKKFYNITDYMRKNDLLVLNNTKVFPARLFATKDRTEAKVEVFLLRELSNDLWEVMVRPARKVRIGNKLVFTPKLMCDVIDNTVSGGRVVRFEYDGQDFDNVIDRIGTSPLPPYINRDADSSDKKRYQTVYASQRGAVAAPTAGLHFTDGLIKKVKDKGTKVENVTLHIGLGTFRPVQVEDLNRHQMDSEYFEVSPDTAMAINQARKRHRKIIAVGTSSVRALETIAISGFQVTPKRGWTDKFIYPPYEYKMVDKMITNFHTPQSTLLMMVSAFAGRKLIKKAYLEAKRNKYRFLSYGDAMLII

SEQ ID NO: 64035 - protein, 352 aa, unidentified
  source 1..352: note = Unknown
  REGION 1..352: note = tr|A0A1Z8KUM4|A0A1Z8KUM4_9BACT S-adenosylmethionine:tRNA ribosyltransferase-isomerase; OS = bacterium TMED6 OX=1986783 GN=queA PE=3 SV=1
MFFGSVEKPPRLSSFDLEVPDNLIADKPTKARENSKLMVLNRKDMSIEHKKFKDIVSYFKKGEVLVLNNTKVYPARLYAKKDKSDAQVEVFLLRELANNLWEAMVKPARKVRIGNKLILSDEITCDVIDNTVSGGRVLRFDHDEQSLYNFIDNHGLCPLPPYIKRDPVPSDKKRYQTVYASERGSVAAPTAGMHFSEQLIEDIKKVGVKTANITLHIGLGTFKPILVEDLTRHNMDSEYYYVPPETATLINEAKSKRKKVTVVGTSAVRTLETVVVSGFQITAKSGWTDKFIYPPYDFKMTDKLITNFHQPQSTLMMLVSAFANKDFVMDAYSEAIKKKYRFYSYGDAMLII

SEQ ID NO: 64036 - protein, 353 aa, unidentified
  source 1..353: note = Unknown
  REGION 1..353: note = tr|A0A1Z9AXM2|A0A1Z9AXM2_9BACT S-adenosylmethionine:tRNA ribosyltransferase-isomerase; OS = bacterium TMED88 OX=1986661 GN=queA PE=3 SV=1
MSAPQTPEDWAQYTFDLPDQLIAQQPLMRRDEARLMRVARGNGSVIGSEPSWRVRDLPRILREGDLLVMNQTRVLRARLRGRKITGGAAEALILRPEEQQPGYRALVRTNGRLREGLEFIFEGRGQSLPARITTLHPEDGVTLEFEGGLSPYEVGEAPLPPYIRRSSPDAQDEERYQTVYATTPGAVAAPTAGLHFTPDLLTRLDHAGIDRAHVVLHVGLGTFRPLRPEDLARDRLHQEWFDLPESTATAIDRTRSRGGRVIAVGTTSTRVLETQATGPGQVTPGQGYTDLFLHPGRPPQVVDGLLTNFHLPGSSLLMLVASLIGRDALLEAYRQAIESHYRFYSYGDAMLIL

SEQ ID NO: 64037 - protein, 371 aa, unidentified
  source 1..371: note = Unknown
  REGION 1..371: note = tr|A0A0A1PCU9|A0A0A1PCU9_9BACT S-adenosylmethionine:tRNA ribosyltransferase-isomerase; OS = bacterium YEK0313 OX=1522316 GN=queA PE=3 SV=1
MRVDLFDFELPPERIALRPASPRDSARLMVVPSGDAPCEDRLVRDLPDLLQPGDALVFNDTKVIPAQLEGLRRRGEATAAVSATLHRRLAPDRWLAFVRGAKKLQPGDRVAFGETAEACLLGALDATVVSKDDDGVVFAFDLYGVVLDEAIDRIGHIPLPPYIASKRPEDRADRSDYQTVYARDEGSVAAPTAGLHFTPDLLARLEARGIELHFVTLHVGAGTFLPVKAEDTSGHRMHPEYGEVSAEVAEALNAARARGGRIVAVGTTSLRLMESAAAEDGTIGPFAAETSIFITPGYRFRAVDALMTNFHLPRSTLFMLVSAFAGLERMQAAYARAIASGYRFYSYGDGSLLFRQSASLAEGPPSDVASS

SEQ ID NO: 64038 - protein, 409 aa, unidentified
  source 1..409: note = Bacteroidaceae bacterium
  REGION 1..409: note = tr|A0A5C6HQU0|A0A5C6HQU0_9BACT S-adenosylmethionine:tRNA ribosyltransferase-isomerase; OS = Bacteroidaceae bacterium HV4-6-C5C OX=2600309 GN=queA; PE = 3 SV=1
MNTDPKHIHISEFNYSLPDERIAKFPLLIRDNSKLLVYSHGEISEDYFFSLPSYFDPGSLLIFNNTKVIQARMHFRKETGALIEVFCLEPIKPNDYALNFQQTRHAAWLCMVGNLKKWKDGVLKRDMTIKGEEVTLTASRGESYGTSHWIDFNWDNPAITFADILEVFGELPIPPYLNRDTQESDKETYQTIYSKIKGSVAAPTAGLHFTSMVLTELREKNIDMEELTLHVGAGTFKPVKSEEIEGHEMHTEYISVARGTIEKLIAHNGKAIAVGTTSVRTLESLYHIGVTLLYNPNATEEELHVKQWQPYETEDKSRNISSVEALEAVIYYLDKHHLEALHTSTQIIIAPGYKYRIVNKMITNFHQPQSTLLLLVSAFVNGDWRRIYDYALDHDFRFLSYGDSSLLIP

SEQ ID NO: 64039 - protein, 353 aa, unidentified
  source 1..353: note = Bacteroidaceae bacterium
  REGION 1..353: note = tr|A0A5C6HH47|A0A5C6HH47_9BACT S-adenosylmethionine:tRNA ribosyltransferase-isomerase; OS = Bacteroidaceae bacterium HV4-6-C5C OX=2600309 GN=queA; PE = 3 SV=1
MKLSQFKFKLPEEKIALHPAKYRDESRLMVLHRKTGKIEHRMFKDILEYFDNEDVFIFNDTKVFPARLYGNKEKTGARIEVFLLRELNEELRLWDVLVDPARKIRIGNKLYFGDDDSMVAEVIDNTTSRGRTLRFLYDGPHDEFKKALYALGETPLPHSIINRPVEPEDSDRFQSIFARSEGAVTAPTANLHFSRELMKRMEIKGIDFSFITLHAGLGNFRDIDVEDLTKHKTDSEQMVVAEEAVRIVNRAKDLRKQVCAVGTTVMRAIESTVSTDGHLKPYEGWTNKFIFPPYEFTVANAMVSNFHMPLSTLLMIVAAFGGYDQVMEAYHIALKEDYRFGTYGDAMLITDRE

SEQ ID NO: 64040 - protein, 404 aa, unidentified
  source 1..404: note = Bacteroidales bacterium
  REGION 1..404: note = tr|U5Q552|U5Q552_9BACT S-adenosylmethionine:tRNA ribosyltransferase-isomerase OS=Bacteroidales bacterium CF; OX = 1400053 GN=queA PE=3 SV=1
MYPEISIKDYTYILPEEKIAKYPLPNREDSKILIFQDNKVLDSKFSNLDELLPNESLMVINNTKVVPARLFFRKESGAHIEIFCLEPHIPYEYNVSFASTESCSWICIIGNSKKWKDGYLYFDSNGHDSLDEYRLKAKLISKIEDKSIVEFSWEGAIPFSELMERCGKVPIPPYLNREAEESDTERYQTLYAQNRGSVAAPTAGLHFSENVLKKIKEKGIDINNVCLHVGAGTFLPVKSEYIRNHNMHYEPFSVSRDLIIKLINRGDKKLISVGTTSTRCLESLYYLGIHCIEEGNPTPVTQWEPYERDYKYTTAEALTALLEWMNKNGRDHIDTKTGIIIVPSFRFRIVDILITNFHQPNSTLLLLIAAFVGDYWKEIYQYALNNDFRFLSYGDSSILFRPSA

SEQ ID NO: 64041 - protein, 350 aa, unidentified
  source 1..350: note = Bacteroidales bacterium
  REGION 1..350: note = tr|A0A4V3WYN3|A0A4V3WYN3_9BACT S-adenosylmethionine:tRNA ribosyltransferase-isomerase; OS = Bacteroidales bacterium OX=2030927 GN=queA PE=3 SV=1
MKLSQFKFKLPENLIAQYPSENRDECRLMVVDSRTGEISHHIFKDILNYFDDGDVMIFNDTKVFPARLYGNKEKTGARIEVFLLRELNVENKFWDVLVEPARKIRIGNKLYFGDDDSMVAEVIDNTTSRGRTLRFLYDGPHDEFKQALYNLGETPLPEYITRKVEDWDADRYQCIFAKNEGAVMAPAAGLHFSRELLKRLEIKGVERGFLTLHSGRGNFKDIDVEDLTKHRMDSEEMFVNEELVEMVNAAKDRNANICAVGTSVLRAVASAVCMNGHLMTYEGWTNKFIFPPYDFTVCNSLVSNFHMPLSTMLMMVSAFGGFDLVMKAYDIAVKEKYHFGAYGDAMLILR

SEQ ID NO: 64042 - protein, 352 aa, Bacteroides acidifaciens
  REGION 1..352: note = tr|A0A3L7Z1H5|A0A3L7Z1H5_9BACE S-adenosylmethionine:tRNA ribosyltransferase-isomerase; OS = Bacteroides acidifaciens OX=85831 GN=queA PE=3 SV=1
MKLSQFKFKLPEDKIALHPMKYRDESRLMVLHRKTGKIEHKMFKEVLDYFDDKDVFIFNDTKVFPARLYGNKEKTGARIEVFLLRELNEELRLWDVLVDPARKIRIGNKLYFGPDDSMVAEVIDNTTSRGRTLRFLYDGPHDEFKKALYELGETPLPHSIINRPVEPEDAERFQSIFAKNEGAVTAPTASLHFSRELMKRLEIKGIDFAYITLHAGLGNFRDIDVEDLTKHKMDSEQMFVDEMAVKTVNRAKDNGKNVCAVGTTVMRAIESAVSTDGHLKEFEGWTNKFIFPPYEFTVANSMISNFHMPLSTLLMIVAAFGGYEQVMDAYHVALKEGYRFGTYGDAMLILDK

SEQ ID NO: 64043 - protein, 406 aa, Bacteroides acidifaciens
  REGION 1..406: note = tr|A0A3L8ABL3|A0A3L8ABL3_9BACE S-adenosylmethionine:tRNA ribosyltransferase-isomerase; OS = Bacteroides acidifaciens OX=85831 GN=queA PE=3 SV=1
MKEDPRHIHISEYNYPLPDERIAKFPLPTRDQSKLLIYRRGEVSEDVFTSLPEYLPQDSLMIFNNTKVIQARLHFRKETGALIEVFCLEPIQPNDYVLNFQQTAHAAWLCMIGNLKKWKDGRLKREMTVKGFPITLTVTRGECKGTSHWVDFAWDNPEVTFADILEVFGELPIPPYLNRDTEESDKETYQTVYSKIKGSVAAPTAGLHFTPRVLDALQEKGIDLEELTLHVGAGTFKPVKSEEIEGHEMHTEYISVNRSTIKKLIDHDGRAIAVGTTSVRTLESLYHIGVTLAENPYATEEELRVKQWQPYEKYDQIPPVVALQKILGYLDRNGLETLHTSTQIIIAPGYNYKIVKAMVTNFHQPQSTLLLLVSAFVKGNWRTIYDYALAHDFRFLSYGDSSLLIP

SEQ ID NO: 64044 - protein, 406 aa, Bacteroides caccae
  REGION 1..406: note = tr|A0A412FVM3|A0A412FVM3_9BACE S-adenosylmethionine:tRNA ribosyltransferase-isomerase; OS = Bacteroides caccae OX=47678 GN=DWY26_08255 PE=3 SV=1
MKENPKHIHISEYNYPLPDERIAKFPLPVRDQSKLLVYRHGEVTEDTFTSLPEYLPKGSLMIFNNTKVIQARLHFRKETGALIEVFCLEPIQPNDYVLNFQQTEHAAWLCMIGNLKKWKDGTLKREMTVKGFPITLTATRGECKGTSHWVDFAWNNPEVTFADILEVFGELPIPPYLNRNTEESDKETYQTVYSKIKGSVAAPTAGLHFTPRVLEALQEKGIDLEELTLHVGAGTFKPVKSEEIEGHEMHTEYISVNRNTIKKLIDHDGCAIAVGTTSVRTLESLYHIGVTLADHPDATEQKLHVRQWQPYEKYDQIPPVVALQKILGYLDRNGLEALHTSTQIIIAPGYQYKIVKAMVTNFHQPQSTLLLLVSAFLKGNWRTIYDYALSHDFRFLSYGDSSLLIP

SEQ ID NO: 64045 - protein, 352 aa, Bacteroides caccae
  REGION 1..352: note = tr|A0A174GEU0|A0A174GEU0_9BACE S-adenosylmethionine:tRNA ribosyltransferase-isomerase; OS = Bacteroides caccae OX=47678 GN=queA_1 PE=3 SV=1
MKLSQFKFKLPEDKIALHPTKYRDESRLMVLHRNTGKIEHRMFKDVLDYFDDKDVFIFNDTKVFPARLYGNKEKTGARIEVFLLRELNEELRLWDVLVDPARKIRIGNKLYFGPDDSMVAEVIDNTTSRGRTLRFLYDGPHDEFKKALYALGETPLPHSIINRPVEPEDAERFQSIFAKKEGAVTAPTASLHFSRELMKRLEIKGIDFAYITLHAGLGNFRDIDVEDLTKHKMDSEQMLVDEAAVKTVNRAKDTGRNVCAVGTTVMRAIESAVSTDGHLKEFEGWTNKFIFPPYEFTVANSMISNFHMPLSTLLMIVAAFGGYEQVMDAYHVALKEGYRFGTYGDAMLILDK

SEQ ID NO: 64046 - protein, 406 aa, unidentified; identical to SEQ ID NO: 64043
  source 1..406: note = Bacteroides caecimuri
  REGION 1..406: note = tr|A0A4S2DFS4|A0A4S2DFS4_9BACE S-adenosylmethionine:tRNA ribosyltransferase-isomerase; OS = Bacteroides caecimuri OX=2516958 GN=queA PE=3 SV=1

SEQ ID NO: 64047 - protein, 352 aa, unidentified
  source 1..352: note = Bacteroides caecimuri
  REGION 1..352: note = tr|A0A4S2DGU8|A0A4S2DGU8_9BACE S-adenosylmethionine:tRNA ribosyltransferase-isomerase; OS = Bacteroides caecimuri OX=2516958 GN=queA PE=3 SV=1
MKLSQFKFKLPEDKIALHPMKYRDESRLMVLHRKTGKIEHKMFKEVLDYFDDKDVFIFNDTKVFPARLYGNKEKTGARIEVFLLRELNEELRLWDVLVDPARKIRIGNKLYFGPDDSMVAEVIDNTTSRGRTLRFLYDGPHDEFKKALYELGETPLPHSIINRPVEPEDAERFQSIFAKNEGAVTAPTASLHFSRELMKRLEIKGIDFAYITLHAGLGNFRDIDVEDLTKHKMDSEQMFVDEMAVKTVNRAKDNGKNVCAVGTTVMRAIESAVSTDGHLKEFEGWTNKFIFPPYEFTVANAMISNFHMPLSTLLMIVAAFGGYEQVMDAYHVALKEGYRFGTYGDAMLILDK

SEQ ID NO: 64048 - protein, 352 aa, unidentified; identical to SEQ ID NO: 64047
  source 1..352: note = Bacteroides caecimuris
  REGION 1..352: note = tr|A0A1C7H6T8|A0A1C7H6T8_9BACE S-adenosylmethionine:tRNA ribosyltransferase-isomerase; OS = Bacteroides caecimuris OX=1796613 GN=queA PE=3 SV=1

SEQ ID NO: 64049 - protein, 365 aa, unidentified; identical to SEQ ID NO: 63951
  source 1..365: note = Bacteroides caecimuris
  REGION 1..365: note = tr|A0A3A9AZ41|A0A3A9AZ41_9BACE S-adenosylmethionine:tRNA ribosyltransferase-isomerase; OS = Bacteroides caecimuris OX=1796613 GN=queA PE=3 SV=1

SEQ ID NO: 64050 - protein, 352 aa, Bacteroides cellulosilyticus
  REGION 1..352: note = tr|R6KIB3|R6KIB3_9BACE S-adenosylmethionine:tRNA ribosyltransferase-isomerase OS=Bacteroides cellulosilyticus CAG:158 OX=1263038 GN=queA PE=3 SV=1
MKLSQFKFKLPEEKIALHPTKYRDESRLMVLHRKTGEIEHKEFKDVLNYFDDKDVFIFNDTKVFPARLYGNKEKTGARIEVFLLRELNEELRLWDVLVDPARKIRIGNKLYFGDDDSMVAEVIDNTTSRGRTLRFLYDGPHDEFKKALYALGETPLPHSIINRPVEAEDSERFQSIFARNEGAVTAPTASLHFSRELMKRLEIKGIDFAYITLHAGLGNFRDIDVEDLTKHKTDSEQMIVNEEAVGIVNRAKDLNRQVCAVGTTVMRAIESTVSTDGHLKAYEGWTNKFIFPPYDFTVANAMISNFHMPLSTLLMIVAAFGGYDQVMEAYNVALKEGYRFGTYGDAMLITDK

SEQ ID NO: 64051 - protein, 409 aa, Bacteroides cellulosilyticus
  REGION 1..409: note = tr|A0A4Q5JEN9|A0A4Q5JEN9_9BACE S-adenosylmethionine:tRNA ribosyltransferase-isomerase; OS = Bacteroides cellulosilyticus OX=246787 GN=queA PE=3 SV=1
MKEDPKHIRISEFNYPLPDERIAKFPLPVRDQSKLLVYRHGEVSEDRFTSLPSYLPTGSLMIFNNTKVIQARLHFRKETGALIEVFCLEPIEPNDYVLNFQQTEHAAWLCMIGNLKKWKEGTLKREMTVKEQPITLTATRGECHGTSHWVDFRWDNPEITFADILEVFGELPIPPYLNRDTQESDKETYQTVYSKIKGSVAAPTAGLHFTPRVLNALKEKGVDLEELTLHVGAGTFKPVKSAEIEGHEMHTEYISVSRGTIENLIVHNGKAIAVGTTSVRTLESLYHIGVTLLKNPNATEEELHVHQWQPYETAEETASITSVKALQAILDYLNRHDMEALHTSTQIIIAPGYDYKIVNTMVTNFHQPQSTLLLLVSAFVKGNWRNIYDFALNHDFRFLSYGDSSLLIP

SEQ ID NO: 64052 - protein, 409 aa, Bacteroides clarus
  REGION 1..409: note = tr|A0A1Y3YYG4|A0A1Y3YYG4_9BACE S-adenosylmethionine:tRNA ribosyltransferase-isomerase; OS = Bacteroides clarus OX=626929 GN=B5F97_00360 PE=3 SV=1
MKEDPRHIRISEFNYPLPDERIAKFPLPVRDQSKLLLYRHGEVSEDVFTSLPDYLPANSLMIFNNTKVIQARLHFHKKTGALIEVFCLEPIRPNDYALNFQQTEHAAWLCMIGNLKKWKEGTLKREMVVKGKPLTLTAERGACHGTSHWVDFRWNNPEITFADILEVFGELPIPPYLNRETQESDKETYQTVYSKIKGSVAAPTAGLHFTPRVLDALRGKGVEPEELTLHVGAGTFKPVKSEEIEGHEMHTEYISVNRSTLEKLVAHEGKAIAVGTTSVRTLESLYHIGVTLLNNPDATEEDLHVKQWQPYEMTPETAATPAVDALRAIIAYLDRHHMETLHTSTQIIIAPGYEYRIVKAMVTNFHQPQSTLLLLVSAFLHGDWRKIYDYALAHDFRFLSYGDSSLLIP

SEQ ID NO: 64053 - protein, 352 aa, Bacteroides clarus
  REGION 1..352: note = tr|A0A1Y4JXC3|A0A1Y4JXC3_9BACE S-adenosylmethionine:tRNA ribosyltransferase-isomerase; OS = Bacteroides clarus OX=626929 GN=queA PE=3 SV=1
MKLSQFKFKLPEEKIALHPTRYRDESRLMVLHRKTGEIEHRMFKDILEYFDDKDVFIFNDTKVFPARLYGNKEKTGARIEVFLLRELNEELRLWDVLVDPARKIRIGNKLYFGEDDSMVAEVIDNTTSRGRTLRFLYDGPHDEFKKALYALGETPLPHSIINRPVEPEDSERFQSIFARNEGAVTAPTASLHFSRELMKRMEIKGIDFAYITLHAGLGNFRDIDVEDLTKHKTDSEQMIVTEDAVKVVNRAKDLNRQVCAVGTTVMRAIESTVSTDGHLKEYEGWTNKFIFPPYDFTVANAMVSNFHMPLSTLLMIVAAFGGYEQVMEAYNVALKEDYRFGTYGDAMLITDK

SEQ ID NO: 64054 - protein, 405 aa, Bacteroides coprocola
  REGION 1..405: note = tr|A0A412GC95|A0A412GC95_9BACE S-adenosylmethionine:tRNA ribosyltransferase-isomerase; OS = Bacteroides coprocola OX=310298 GN=queA PE=3 SV=1
MTETKHIKISDYNYPLPDERIAKFPLPVRDQSKLLVYRHGEVSETVFTSLPDYMEPGMLMVFNNTKVIQARLHFRKETGALIEIFCLEPIQPNDYVLNFQQTHHAAWLCMIGNLKKWKEGPLHKEMTVKGKTITLTATRGECHGTSHWVDFTWDNPEVTFADILEVFGELPIPPYLNRETQESDKETYQTVYSKIKGSVAAPTAGLHFTERVLASLKEKGVDLEEVTLHVGAGTFKPVKSEEIEGHEMHTEYISVNKSTIEKLIAHRGEAVAVGTTSVRTLESLYYIGVTISQNPDASQEELHVKQWQPYESDVTLSTIESLQCILDYMNRHNLDALHTSTQIIIAPGYEYKIVKRMVTNFHQPQSTLLLLVSAFVKGDWHKIYDYALAHDFRFLSYGDSSLLIP

SEQ ID NO: 64055 - protein, 405 aa, Bacteroides coprocola; identical to SEQ ID NO: 64054
  REGION 1..405: note = tr|R6CLY3|R6CLY3_9BACE S-adenosylmethionine:tRNA ribosyltransferase-isomerase OS=Bacteroides coprocola CAG:162 OX=1263040 GN=queA PE=3 SV=1

SEQ ID NO: 64056 - protein, 351 aa, Bacteroides coprophilus
  REGION 1..351: note = tr|R6SFR7|R6SFR7_9BACE S-adenosylmethionine:tRNA ribosyltransferase-isomerase OS=Bacteroides coprophilus CAG:333 OX=1263041 GN=queA PE=3 SV=1
MKLSQFKFKLPEEKIALHPAKYRDESRLMVVHKSTGEIEHVMFKDILNYFDDKDVFIFNDTKVFPARLYGNKEKTGARIEVFLLRELNEELRLWDVLVDPARKIRIGNKLYFGDDDSMVAEVIDNTTSRGRTLRFLYDGPHDEFKKALYALGEPPLPPFIHRPAEPEDEERFQTIFAKNEGAVTVPAAGLHFSRELMKRMEIKGIDFAFITMHCGLGNFRDIDVEDLTKHKMDSEQMFVNAEACRIVNEAKDRGNKVCAVGTTVMRTIETAVGTDGHLKEFEGWTNKFIFPPYDFSVANAMVSNFQMPLSTMLMLKCAYGGYELIMDAYNIALKENYRFGTYGDAMLILDK

SEQ ID NO: 64057 - protein, 351 aa, Bacteroides coprophilus; identical to SEQ ID NO: 64056
  REGION 1..351: note = tr|S0F478|S0F478_9BACE S-adenosylmethionine:tRNA ribosyltransferase-isomerase OS=Bacteroides coprophilus DSM 18228 = JCM 13818 OX=547042 GN=queA PE=3 SV=1

SEQ ID NO: 64058 - protein, 360 aa, Bacteroides coprosuis
  REGION 1..360: note = tr|F3ZQS5|F3ZQS5_9BACE S-adenosylmethionine:tRNA ribosyltransferase-isomerase OS=Bacteroides coprosuis DSM 18011 OX=679937 GN=queA PE=3 SV=1
MKLSQFKFNLPKEKIALHPTKFRDDSRLMVLHKKTGEIEHKAFKDILDYFDDKDVFIFNNTKVFPARLYGNKEKTGARIEVFLLRELNAEQRLWDVLVDPARKIRIGNKLYFGEDESMVAEVIDNTTSRGRTLRFLYDGDESDDEETKHRKFKEELYALGETPLPREMIDREVEPEDEERFQSIFAEVEGAVTAPSANLHFSRELMKRMEIKGIEKAFITLHAGLGNFREIDVEDLTKHKVDSEQIIVAEPAVDIVNQAKETRNNICAIGTTVMRAIETTVTTDGLLKEYEGWTNKFIFPPYEFHVANHLVSNFHLPYSTQLMLVAAFGGYDFVMNAYQVAMDEGYRFGTYGDAMLIIDK

SEQ ID NO: 64059 - protein, 405 aa, Bacteroides dorei
  REGION 1..405: note = tr|A0A5C6LG30|A0A5C6LG30_9BACE S-adenosylmethionine:tRNA ribosyltransferase-isomerase; OS = Bacteroides dorei OX=357276 GN=queA PE=3 SV=1
MEDTKHIKISEFNYPLPDERIAKFPLATRDQSKLLVYRHGEVSEDIFTSLPHYLESGELMIFNNTKVIQARLHFRKETGALIEVFCLEPVQPNDYVLNFQQTRQCSWLCMIGNLKKWKEGTLSRIVNVKGKQIVLSATRGECKGTSHWIDFSWDDDTITFADLLEVAGELPIPPYLNRETQESDKETYQTVYSKIKGSVAAPTAGLHFTERVLAALDERGIDREELTLHVGAGTFKPVKSEEIEGHEMHTEYISVSKHTIEKLIAHHGEAIAVGTTSVRTLESLYYIGVLISHNPDATQDELHVQQWMPYEDKNDLTPVEALQQILDYLNRHEMEALHSSTQIIIAPGYTYKIVKKMVTNFHQPQSTLLLLVSAFVKGNWRRIYDYALGHDFRFLSYGDSSLLIP

SEQ ID NO: 64060 - protein, 351 aa, Bacteroides dorei
  REGION 1..351: note = tr|A0A412ZIX9|A0A412ZIX9_9BACE S-adenosylmethionine:tRNA ribosyltransferase-isomerase; OS = Bacteroides dorei OX=357276 GN=queA PE=3 SV=1
MKLSQFKFKLPEDKIALHPAKYRDESRLMVVHKSTGKIEHKVFKDILDYFDDKDVFIFNDTKVFPARLYGNKEKTGARIEVFLLRELNEELRLWDVLVDPARKIRIGNKLYFGDDDSMVAEVIDNTTSRGRTLRFLYDGSHDEFKKALYALGEAPLPSFIRRPVEEEDAERFQTIFAKNEGAVTAPTAGLHFSRELMKRMEIKGIDFAFVTMHAGLGNFREIDVEDLTKHKMDSEQMYVNADACRIVNNAKDEGKNICAVGTTVMRTIETAVGTDGHLKEFDGWTNKFIFPPYDFSVANSMVTNFHLPLSTLLMLVAAYGGYDLVMEAYHTALKEDYRFGTYGDAMLILDK

SEQ ID NO: 64061 - protein, 409 aa, Bacteroides eggerthii
  REGION 1..409: note = tr|A0A414MEE9|A0A414MEE9_9BACE S-adenosylmethionine:tRNA ribosyltransferase-isomerase; OS = Bacteroides eggerthii OX=28111 GN=DW701_07335 PE=3 SV=1
MKEDPRHIRISEFNYLLPDERIAKFPLPVRDQSKLLLYRHGEVFEDVFTSLPDYLPADSLMIFNNTKVIQARLHFHKETGALIEVFCLEPIRPNDYALNFQQTEHAAWLCMIGNLKKWKEGVLKREMVVKGKPLTLTAERGACHGTSHWVDFRWNNPEITFADILEVFGELPIPPYLNRETQESDKETYQTVYSKIKGSVAAPTAGLHFTPRVLDALRKKGVELEELTLHVGAGTFKPVKSEEIEGHEMHTEYISVSRNTLEKLIAHEGKAVAVGTTSVRTLESLYHIGVTLLNSPDATEEELHVKQWQPYELTPEMASVSPVDALQAIVAYLNRHNMETLHTSTQIIIAPGYEYKIVKAIVTNFHQPQSTLLLLVSAFLRGDWRKIYDYALAHDFRFLSYGDSSLLIP

SEQ ID NO: 64062 - protein, 352 aa, Bacteroides eggerthii
  REGION 1..352: note = tr|A0A380Z878|A0A380Z878_9BACE S-adenosylmethionine:tRNA ribosyltransferase-isomerase; OS = Bacteroides eggerthii OX=28111 GN=queA_2 PE=3 SV=1
MKLSQFKFKLPEEKIALHPTRYRDESRLMVLHRKTGEIEHRMFKDILEYFDDKDVFIFNDTKVFPARLYGNKEKTGARIEVFLLRELNEELRLWDVLVDPARKIRIGNKLYFGEDDSMVAEVIDNTTSRGRTLRFLYDGPHDEFKKALYALGETPLPHSIINRPVEPEDSERFQSIFARNEGAVTAPTASLHFSRELMKRMEIKGIDFAYITLHAGLGNFRDIDVEDLTKHKTDSEQMIVTEEAVKIVNRAKDVNRQVCAVGTTVMRAIESTVSTDGHLKEYEGWTNKFIFPPYDFTVANAMVSNFHMPLSTLLMIVAAFGGYEQVMEAYNVALKEDYRFGTYGDAMLITDK

SEQ ID NO: 64063 - protein, 352 aa, Bacteroides faecichinchillae
  REGION 1..352: note = tr|A0A1M5DE49|A0A1M5DE49_9BACE S-adenosylmethionine:tRNA ribosyltransferase-isomerase; OS = Bacteroides faecichinchillae OX=871325 GN=queA PE=3 SV=1
MKLSQFKFKLPEDKIALHPTKYRDESRLMVLHRRTGEIEHKMFKDVLNYFDDKDVFIFNDTKVFPARLYGNKEKTGARIEVFLLRELNEELRLWDVLVDPARKIRIGNKLYFGEDDSMVAEVIDNTTSRGRTLRFLYDGPHDEFKKALYALGETPLPHSIINRPVEPEDAERFQSIFAKNEGAVTAPTASLHFSRELLKRLEIKGIDFAYITLHAGLGNFRDIDVEDLTKHKMDSEQMLVDEKAVNMVNSAKDNGKSVCAVGTTVMRAIESAVSTDGHLKEFEGWTNKFIFPPYDFTVANSMISNFHMPLSTLLMIVAAFGGYDQVMDAYHVALKEGYRFGTYGDAMLILDK

SEQ ID NO: 64064 - protein, 415 aa, Bacteroides faecichinchillae
  REGION 1..415: note = tr|A0A1M4UV57|A0A1M4UV57_9BACE S-adenosylmethionine:tRNA ribosyltransferase-isomerase; OS = Bacteroides faecichinchillae OX=871325 GN=queA PE=3 SV=1
MQPFLATKKMKENPKHIRISEYNYPLPDKRIAKFPLPVRDQSKLLVYRHGEVSENTFTSLPDFLPQGSLMIFNNTKVIQARLHFRKETGALIEVFCLEPIEPNDYVLNFQQTEHVAWLCMIGNLKKWKDGALKRKMTVKGFPITLIATRGECKGTSHWINFSWDNPEVTFADILEVFGELPIPPYLNRDTQESDKETYQTVYSKIKGSVAAPTAGLHFTPHVLNALKEKGIELEELTLHVGAGTFKPVKSEEIEGHEMHTEYISVNRDTIKKLIEHNACAIAVGTTSVRTLESLYHIGVTLADNPDATEEELHVKQWQPYEKYNEIPAVVALQKILGYLDRHGMEALHSSTQIIIAPGYNYKIVKAIVTNFHQPQSTLLLLVSAFVKGDWRTIYDYALNHDFRFLSYGDSSLLIP

SEQ ID NO: 64065 - protein, 406 aa, Bacteroides faecis
  REGION 1..406: note = tr|A0A1H2QE07|A0A1H2QE07_9BACE S-adenosylmethionine:tRNA ribosyltransferase-isomerase; OS = Bacteroides faecis MAJ27 OX=1077285 GN=queA PE=3 SV=1
MKEDPRHIHISEYNYPLPDERIAKFPLTVRDQSKLLVYRHGEVTEDVFTSLPDYLPKGSLMVFNNTKVIQARLHFRKETGALIEVFCLEPIQPNDYVLNFQQTEHAAWLCMIGNLKKWKDGALKREMTVKGFTITLTATRGECRGTSHWIDFSWNNPEVTFADILEVFGELPIPPYLNRDTEESDKETYQTVYSKIKGSVAAPTAGLHFTPRVLEALQEKGIDLEELTLHVGAGTFKPVKSEEIEGHEMHTEYISVNRATIKKLIDHDGCAVAVGTTSVRTLESLYHIGVTLAENPDATEEELHVRQWQPYEKYDQIPPVVALQKILGYLDRNGLEALHSSTQIIIAPGYQYKIVKAMVTNFHQPQSTLLLLVSAFVKGNWRTIYDYALSHDFRFLSYGDSSLLIP

SEQ ID NO: 64066 - protein, 406 aa, Bacteroides faecis; identical to SEQ ID NO: 64065
  REGION 1..406: note = tr|R6VBF7|R6VBF7_9BACE S-adenosylmethionine:tRNA ribosyltransferase-isomerase OS=Bacteroides faecis CAG:32; OX = 1263044 GN=queA PE=3 SV=1

SEQ ID NO: 64067 - protein, 406 aa, Bacteroides finegoldii
  REGION 1..406: note = tr|C9KSU3|C9KSU3_9BACE S-adenosylmethionine:tRNA ribosyltransferase-isomerase OS=Bacteroides finegoldii DSM 17565 OX=483215 GN=queA PE=3 SV=1
MKEDPKHIRISEYNYPLPDERIAKFPLPVRDQSKLLIYRHGEVNEDIFTSLPDYLPKGSLMIFNNTKVIQARLHFRKETGALIEVFCLEPIQPNDYVLNFQQTEHAAWLCMIGNLKKWKDGELKREMTVKGFPITLTATRGECRGTSHWVDFTWNNAEVTFADILEVFGELPIPPYLNRNTEESDKETYQTVYSKIKGSVAAPTAGLHFTPQVLDALQEKGIELEELTLHVGAGTFKPVKSEEIEGHEMHTEYISVNRSTIKKLIDHDGCAVAVGTTSVRTLESLYHIGVTLAENPDATEEELHVRQWQPYEKYDQIPPVVALQKILGYLDRHGMETLHTSTQIIIAPGYDYKIVKAMVTNFHQPQSTLLLLVSAFVKGNWRTIYDYALSHDFRFLSYGDSSLLIP

SEQ ID NO: 64068 - protein, 406 aa, Bacteroides finegoldii
  REGION 1..406: note = tr|K5BSS7|K5BSS7_9BACE S-adenosylmethionine:tRNA ribosyltransferase-isomerase OS=Bacteroides finegoldii CL09T03C10 OX=997888 GN=queA PE=3 SV=1
MKEDPKHIRISEYNYPLPDERIAKFPLPVRDQSKLLIYRHGEVNEDIFTSLPDYLPKGSLMIFNNTKVIQARLHFRKETGALIEVFCLEPIQPNDYVLNFQQTEHAAWLCMIGNLKKWKDGELKREMTVKGFPITLTATRGECRGTSHWVDFTWNNAEVTFADILEVFGELPIPPYLNRDTEESDKETYQTVYSKIKGSVAAPTAGLHFTPQVLDALQEKGIELEELTLHVGAGTFKPVKSEEIEGHEMHTEYISVNRSTIKKLIDHDGCAVAVGTTSVRTLESLYHIGVTLAENPDATEEELHVRQWQPYEKYDQIPPVVALQKILGYLDRHGMETLHTSTQIIIAPGYDYKIVKAMVTNFHQPQSTLLLLVSAFVKGNWRTIYDYALSHDFRFLSYGDSSLLIP

SEQ ID NO: 64069 - protein, 352 aa, Bacteroides fluxus
  REGION 1..352: note = tr|F3PV14|F3PV14_9BACE S-adenosylmethionine:tRNA ribosyltransferase-isomerase OS=Bacteroides fluxus YIT 12057 OX=763034 GN=queA PE=3 SV=1
MKLSQFKFKLPEEKIALHPAKYRDESRLLVLHRKTGEIEHRMFKDILDYFDDKDVFVFNDTKVFPARLYGNKEKTGARIEVFLLRELNEELRLWDVLVDPARKIRIGNKLYFGDDDSMVAEVIDNTTSRGRTLRFLYDGPHDEFKKALYALGETPLPHSIVNRPVEPEDSERFQSIFARNEGAVTAPTASLHFSRELMKRMEIKGIDFAYITLHAGLGNFRDIDVEDLTKHKTDSEQMIVNSEAVKIVNHAKDINKQVCAVGTTVMRAIESTVSTDGHLKEYEGWTNKFIFPPYDFTVANAMVSNFHMPLSTLLMIVAAFGGYEQVMEAYNVALKEDYRFGTYGDAMLITDR

SEQ ID NO: 64070 - protein, 409 aa, Bacteroides fluxus
  REGION 1..409: note = tr|F3PNA3|F3PNA3_9BACE S-adenosylmethionine:tRNA ribosyltransferase-isomerase OS=Bacteroides fluxus YIT 12057 OX=763034 GN=queA PE=3 SV=1
MKQDPKHIHISEFNYPLPDKRIAKFPLPLRDQSKLLIYRHGEVSEDVFTSLPGYLSSGSLMIFNNTKVIQARLHFRKETGALIEVFCLEPIQPNDYVLNFQQTEHAAWLCMIGNLKKWKEGVLIREMTVKGKPLTLTAERGECRGTSHWVDFRWNNPEITFADILEVFGELPIPPYLNRETQESDKETYQTVYSKIKGSVAAPTAGLHFTPRVLDALKEKGVDLEELTLHVGAGTFKPVKSEEIEGHEMHTEYISVTRNTLKKLIAHEGKAIAVGTTSVRTLESLYHIGVTLYNTPDATEEELHVRQWQPYEMTGESTAIPATDALQAILRYLDRHGMETLHTSTQIIIAPGYEYRIVKAMVTNFHQPQSTLLLLVSAFVHGDWKKIYDYALGHDFRFLSYGDSSLLIP

SEQ ID NO: 64071 - protein, 407 aa, Bacteroides fragilis
  REGION 1..407: note = tr|I9ATJ1|I9ATJ1_BACFG S-adenosylmethionine:tRNA ribosyltransferase-isomerase OS=Bacteroides fragilis CL05T12C13 OX=997881 GN=HMPREF1080_03777 PE=3 SV=1
MMKENPKHIRISEYNYPLPDERIAKFPLPVRDQSKLLIYRHGEVSEDVFTSLPEYLPAGSLMIFNNTKVIQARLHFRKETGALIEVFCLEPIQPNDYVLNFQQTEHAAWLCMVGNLKKWKDGPLCREMTVKGFPITLTATRGECRGTSHWIDFRWDNPEVTFADILEVFGELPIPPYLNRDTEESDKETYQTVYSKIKGSVAAPTAGLHFTPRVLDALTEKGIDLEELTLHVGAGTFKPVKSEEIEGHEMHTEYISVSRSIIKKLIDHDACAIAVGTTSVRTLESLYHIGVTLANNPEATEEQLHVKQWQPYETECDVRPVVALQKILGYLDRHGMEALHTSTQIIIAPGYDYKIVKAMVTNFHQPQSTLLLLVSAFVKGNWHTIYDYALGHDFRFLSYGDSSLLIP

SEQ ID NO: 64072 - protein, 352 aa, Bacteroides fragilis
  REGION 1..352: note = sp|Q5LJ28|QUEA_BACFN S-adenosylmethionine:tRNA ribosyltransferase-isomerase OS=Bacteroides fragilis (strain ATCC 25285 / DSM 2151 / JCM 11019 / NCTC 9343); OX = 272559GN=queA PE=3 SV=1
MKLSQFKFKLPEEKIALHPTKYRDESRLMVLHKRTGEIEHKMFKDILNYFDDKDVFVFNDTKVFPARLYGNKEKTGARIEVFLLRELNEELRLWDVLVDPARKIRIGNKLYFGDDDSMVAEVIDNTTSRGRTLRFLYDGPHDEFKKALYALGETPLPHTILNRPVEEEDAERFQSIFAKNEGAVTAPTASLHFSRELMKRMEIKGIDFAYITLHAGLGNFRDIDVEDLTKHKMDSEQMFVTEEAVKIVNRAKDLGKNVCAVGTTVMRAIESTVSTDGHLKEYEGWTNKFIFPPYDFTVANAMVSNFHMPLSTLLMIVAAFGGYDQVMDAYHIALKEGYRFGTYGDAMLILDK

SEQ ID NO: 64073 - protein, 408 aa, Bacteroides graminisolvens
  REGION 1..408: note = tr|A0A069D1L3|A0A069D1L3_9BACE S-adenosylmethionine:tRNA ribosyltransferase-isomerase; OS = Bacteroides graminisolvens DSM 19988 = JCM 15093; OX = 1121097 GN=queA PE=3 SV= 1
MQENPKHIKISEYNYSLPEERIAKYPLTVRDESKLLIYNRGEITQDHFLSLPNYIDSNDLMIFNNTKVIQARLHFRKETGALIEIFCLEPISPNDYVLNFQQTEHAAWLCMIGNLKKWKEGVLHKTIIVKGTEMMLTATRGANHGTSHWVDFKWNNPGITFADILEEFGELPIPPYLNRETEEKDKETYQTVYSKIKGSVAAPTAGLHFTPRVFEALANKKIECEELTLHVGAGTFKPVKSEEIEGHEMHTEYISVSRTTLKKLIEHHGKAIAVGTTSVRTLESLYHIGVKLYNNPNAQEEELHVQQWQPYNKNSEENISATEALQCIVDYLDKHQMEALHSSTQIIIAPGYNYRIVKAMVTNFHQPQSTLLLLVSAFVKGNWKAIYNYALKNEFRFLSYGDSSLLIP

SEQ ID NO: 64074 - protein, 351 aa, Bacteroides graminisolvens
  REGION 1..351: note = tr|A0A351M532|A0A351M532_9BACE S-adenosylmethionine:tRNA ribosyltransferase-isomerase; OS = Bacteroides graminisolvens OX=477666 GN=queA PE=3 SV=1
MKLSQFKFKLPEEKIALYPAKYRDESRLMVLHKTTGEIEHKVFKDILGYFDDKDVFIFNDTKVFPARLYGNKEKTGARIEVFLLRELNEELRLWDVLVDPARKIRIGNKLYFGEDDSMVAEVIDNTTSRGRTLRFLYDGPHEEFKKALYALGETPLPHTIIKRPVEEEDAERFQSIFARKEGAVTAPTANLHFSRELMKRLEIKGIDFAFVTMHAGLGNFRDIDVEDLTKHKMDSEQMQVGEDAVSRVNRAKDEGRRVCAVGTTVMRAVESAVSTDGHLKVFEGWTNKFIFPPYDFTVANSMVSNFHMPLSTLLMIVAAFGGYDQVMEAYHVALKEDYRFGTYGDAMLIID

SEQ ID NO: 64075 - protein, 409 aa, Bacteroides helcogenes
  REGION 1..409: note = tr|E6SR65|E6SR65_BACT6 S-adenosylmethionine:tRNA ribosyltransferase-isomerase OS=Bacteroides helcogenes (strain ATCC 35417 / DSM 20613 / JCM 6297 / P 36-108); OX = 6939 79 GN=queA PE=3 SV=1
MEQNPKHIHISEFNYPLPDERIAKFPLSVRDQSKLLIYRHGNVSEDTFTSLPEYLTAGSLMIFNNTKVIQARLHFRKDTGALIEVFCLEPIEPNDYALNFQQTEHAAWLCMIGNLKKWKEGVLKREMEVKGKMITLTAERGECHGTSHWVDFRWDNPEVTFADILEVFGELPIPPYLNRETQESDKETYQTVYSKIKGSVAAPTAGLHFTPQVLDALRDKGIETEELTLHVGAGTFKPVKSEEIEGHEMHTEYISVSRNTLKRLIAHEGKAIAVGTTSVRTLESLYHIGVTLLNNPDAKETDLHVKQWQPYEIPAEATPILATDALQAIIRYLDRHDMETLHTSTQIIIAPGYEYRIVKAMVTNFHQPQSTLLLLVSAFVHGDWRKVYNYALEHNFRFLSYGDSSLLIP

SEQ ID NO: 64076 - protein, 352 aa, Bacteroides helcogenes
  REGION 1..352: note = tr|E6SNV5|E6SNV5_BACT6 S-adenosylmethionine:tRNA ribosyltransferase-isomerase OS=Bacteroides helcogenes (strain ATCC 35417 / DSM 20613 / JCM 6297 / P 36-108); OX = 6939 79 GN=queA PE=3 SV=1
MKLSQFKFKLPEEKIALHPTKYRDESRLMVLHRKTGEIEHRMFKDILDYFDDKDVFIFNDTKVFPARLYGNKEKTGARIEVFLLRELNEELRLWDVLVDPARKIRIGNKLYFGDDDSMVAEVIDNTTSRGRTLRFLYDGPHDEFKKALYALGETPLPHGIINRPVEAEDAERFQSIFARNEGAVTAPTASLHFSRELMKRMEIKGIDFAYVTLHAGLGNFRDIDVEDLTKHKTDSEQMTVSAEAVKVVNRAKDFNRQVCAVGTTVIRAIESTVSTDGHLKEYVGWTNKFIFPPYDFTVANAMVSNFHMPLSTLLMIVAAFGGYDQVMNAYDIALKEEYRFGTYGDAMLITDR

SEQ ID NO: 64077 - protein, 409 aa, unidentified
  source 1..409: note = Bacteroides heparinolyticus
  REGION 1..409: note = tr|A0A4R2LMQ8|A0A4R2LMQ8_9BACE S-adenosylmethionine:tRNA ribosyltransferase-isomerase; OS = Bacteroides heparinolyticus OX=28113 GN=queA PE=3 SV=1
MEQNPKHIHISEFNYVLPDDRIAKFPLPVRDRSKLLIYHHGEISEDTFTSLPDYLPTGSLMIFNNTKVIQARLHFRKETGALIEVFCLEPVQPNDYALNFQQTEHAAWLCMVGNLKKWKEGTLKREMTVKGKTIILTAERGECRGTSHWVDFRWNNPEVTFADILEVFGELPIPPYLNRETQESDKETYQTVYSKIKGSVAAPTAGLHFTPRVLYTLRNKGIETEELTLHVGAGTFKPVKSEEIEGHEMHTEYISVSRGTLEKLIAHGGKAIAVGTTSVRTLESLYHIGITLLNNPEATEEELHVKQWQPYEMSGATASIPATDALQALAAYLERHHMETLHTSTQIIIAPGYEYRIVKAMVTNFHQPQSTLLLLVSAFVHGDWHKIYDYALNHDFRFLSYGDSSLLIP

SEQ ID NO: 64078 - protein, 352 aa, unidentified
  source 1..352: note = Bacteroides heparinolyticus
  REGION 1..352: note = tr|A0A449I287|A0A449I287_9BACE S-adenosylmethionine:tRNA ribosyltransferase-isomerase; OS = Bacteroides heparinolyticus OX=28113 GN=queA_2 PE=3 SV=1
MKLSQFKFKLPEEKIALHPTKYRDESRLMVLHRKTGKIEHKTFKDILNYFDDKDVFVFNDTKVFPARLYGNKEKTGARIEVFLLRELNEELRLWDVLVDPARKIRIGNKLYFGEDDSMVAEVIDNTTSRGRTLRFLYDGPHDEFKKALYALGETPLPHSIINRPVEAEDAERFQSIFARNEGAVTAPTASLHFSRELMKRLEIKGIDFAYITLHAGLGNFRDIDVEDLTKHKTDSEQMIVNEEAVKTVNRAKDLNKQVCAVGTTVMRAIESTVSTDGHLKAYEGWTNKFIFPPYDFTVANAMVSNFHMPLSTLLMIVAAFGGYDQVMEAYDVALKEGYRFGTYGDAMLITDR

SEQ ID NO: 64079 - protein, 352 aa, Bacteroides intestinalis
  REGION 1..352: note = tr|R7DWM3|R7DWM3_9BACE S-adenosylmethionine:tRNA ribosyltransferase-isomerase OS=Bacteroides intestinalis CAG:315 OX=1263048 GN=queA PE=3 SV=1
MKLSQFKFKLPEEKIALHPTKYRDESRLMVLHRKTGEIEHKEFKDVLNYFDDKDVFIFNDTKVFPARLYGNKEKTGARIEVFLLRELNEELRLWDVLVDPARKIRIGNKLYFGDDDSMVAEVIDNTTSRGRTLRFLYDGPHDEFKKALYALGETPLPHSIINRPVEPDDSERFQSIFARNEGAVTAPTASLHFSRELMKRLEIKGIDFAYITLHAGLGNFRDIDVEDLTKHKTDSEQMIVNEEAVNVVNRAKDLNRQVCAVGTTVMRAIESTVSTDGHLKPYEGWTNKFIFPPYDFTVANAMISNFHMPLSTLLMIVAAFGGYDQVMEAYNVALKEGYRFGTYGDAMLITDK

SEQ ID NO: 64080 - protein, 352 aa, Bacteroides intestinalis
  REGION 1..352: note = tr|A0A3E4L303|A0A3E4L303_9BACE S-adenosylmethionine:tRNA ribosyltransferase-isomerase; OS = Bacteroides intestinalis OX=329854 GN=queA PE=3 SV=1
MKLSQFKFKLPEEKIALHPTKYRDESRLMVLHRKTGEIEHKEFKDVLNYFDDKDVFIFNDTKVFPARLYGNKEKTGARIEVFLLRELNEELRLWDVLVDPARKIRIGNKLYFGDDDSMVAEVIDNTTSRGRTLRFLYDGPHDEFKKALYALGETPLPHSIINRPVEPDDSERFQSIFARNEGAVTAPTASLHFSRELMKRLEIKGIDFAYITLHAGLGNFRDIDVEDLTKHKTDSEQMVVNEEAVSIVNRAKDMNRQVCAVGTTVMRAIESTVSTDGHLKPYEGWTNKFIFPPYDFTVANAMISNFHMPLSTLLMIVAAFGGYDQVMEAYNVALKEGYRFGTYGDAMLITDK

SEQ ID NO: 64081 - protein, 351 aa, unidentified
  source 1..351: note = Bacteroides luti
  REGION 1..351: note = tr|A0A1M4YVT7|A0A1M4YVT7_9BACE S-adenosylmethionine:tRNA ribosyltransferase-isomerase; OS = Bacteroides luti OX=1297750 GN=queA PE=3 SV=1
MKLSQFKFKLPEDKIALHPTRYRDESRLMVLHKKTGEIEHRVFKDILDYFDDKDVFIFNDTKVFPARLYGNKEKTGARIEVFLLRELNEELRLWDVLVDPARKIRIGNKLYFGEDDSMVAEVIDNTTSRGRTLRFLYDGPHEEFKKALYALGETPLPHTIINRPVEADDEERFQSIFAKNEGAVTAPTASLHFSRELMKRMEIKGIDFAFITMHAGLGNFRDIDVEDLTKHKMDSEQMFVSEKAVNIVNKAKDANRNICAVGTTVMRAIESTVSTDGHLKTFEGWTNKFIFPPYEFTVANSMISNFHMPLSTLLMIVAAFGGYDLVMDAYQVALKEGYRFGTYGDAMLIID

SEQ ID NO: 64082 - protein, 405 aa, unidentified
  source 1..405: note = Bacteroides luti
  REGION 1..405: note = tr|A0A1M4XIA2|A0A1M4XIA2_9BACE S-adenosylmethionine:tRNA ribosyltransferase-isomerase; OS = Bacteroides luti OX=1297750 GN=queA PE=3 SV=1
MEETKHIKISEFNYPLPDERIAKFPLPVRDQSKLLVYKHGNVSETIFTSLPELIPAGSLMIFNNTKVIQARLHFRKETGALIEVFCLEPIAPNDYVLSFQQTERCSWLCMIGNLKKWKEGSLTREIVVKGMPVVLKATRGECRGTSHWIYFSWNNKEVTFAEILEVVGELPIPPYLNRETQESDKETYQTVYSKIDGSVAAPTAGLHFTEGVMQDLEKRGVELEELTLHVGAGTFRPVKSEEIADHEMHTEFISVTRKTIERLIAHQGRAVAVGTTSVRTLESLYHMGVTLSRHPDATEKELHVNQWQPYKFLPDLTAVEALEHILAYMNRNGLEVLHSSTQIIIAPGYEYHIVKAIVTNFHQPQSTLLLLVSAFVHGDWKKIYDYALSHDFRFLSYGDSSLLIP

SEQ ID NO: 64083 - protein, 351 aa, Bacteroides massiliensis
  REGION 1..351: note = tr|U6R9K4|U6R9K4_9BACE S-adenosylmethionine:tRNA ribosyltransferase-isomerase OS=Bacteroides massiliensis B84634 = Timone 84634 = DSM 17679 = JCM 13223 OX=1121098; GN = queA PE=3 SV=1
MKLSQFKFKLPEEKIALHPAKYRDESRLMVVHKSTGQIEHKVFKDILEYFDDKDVFIFNDTKVFPARLYGNKEKTGARIEVFLLRELNEELRLWDVLVDPARKIRIGNKLYFGDDDSMVAEVIDNTTSRGRTLRFLYDGPHDEFKKALYALGEAPLPSFIRRPVEEEDAERFQTIFAKNEGAVTAPTAGLHFSRELMKRMEIKGIDFAYVTMHAGLGNFREIDVEDLTKHKMDSEQMFVDAKACNIVNQAKDENRRVCAVGTTVMRAIETAVGTDGHLKEFEGWTNKFIFPPYDFSVANSMVTNFHMPLSTLLMLVAAYGGYDLVMEAYNTALKEDYRFGTYGDAMLILDK

SEQ ID NO: 64084 - protein, 422 aa, Bacteroides massiliensis
  REGION 1..422: note = tr|U6RGY2|U6RGY2_9BACE S-adenosylmethionine:tRNA ribosyltransferase-isomerase OS=Bacteroides massiliensis B84634 = Timone 84634 = DSM 17679 = JCM 13223 OX=1121098; GN = queA PE=3 SV=1
MYRANIGTFAQIMKRNQMEDTKHIKISEYNYPLPDERIAKFPLAVRDQSKLLVYRHGEVSEDTFTALPEYLEQGELMIFNNTKVIQARLHFRKETGALIEVFCLEPIQPNDYVLSFQQTKKCSWLCMIGNLKKWKEGALSRMVDVKGKQVTLTATRGECRGTSHWVDFEWNDDSITFADLLEVVGELPIPPYLNRDTQESDKETYQTVYSKIKGSVAAPTAGLHFTERVLQALDAHGIDREELTLHVGAGTFKPVKSEEIEGHEMHTEYISVNKRTIEKLIAHGGHAIAVGTTSVRTLESLYYIGVAISRNPDANQEELHVQQWMPYEEKNGIGTIQALQHILDYLNRHHMETLHTSTQIIIAPGYEYKIVKKMVTNFHQPQSTLLLLVSAFVKGDWRKIYDYALEHDFRFLSYGDSSLLIP

SEQ ID NO: 64085 - protein, 351 aa, Bacteroides nordii
  REGION 1..351: note = tr|A0A413VSE0|A0A413VSE0_9BACE S-adenosylmethionine:tRNA ribosyltransferase-isomerase; OS = Bacteroides nordii OX=291645 GN=queA PE=3 SV=1
MKLSQFKFKLPEDKIALHPMKYRDESRLMVLHRKTGEIEHKMFKDVLNYFDDKDVFIFNDTKVFPARLYGNKEKTGARIEVFLLRELNEELRLWDVLVDPARKIRIGNKLYFGDDDSMVAEVIDNTTSRGRTLRFLYDGPHDEFKKALYALGETPLPHSIINRPVEEEDAVRFQSIFAKNEGAVTAPTASLHFSRELMKRMEIKGIDFAYITLHAGLGNFRDIDVEDLTKHKMDSEQMFVTGEAVKTVNRAKDLGRNVCAVGTTVMRAIESTVSTDGHLKEYEGWTNKFIFPPYEFTVANAMISNFHMPLSTLLMIVAAFGGYDQVMDAYHVAMKEGYRFGTYGDAMLIID

SEQ ID NO: 64086 - protein, 406 aa, Bacteroides nordii
  REGION 1..406: note = tr|A0A413VJV2|A0A413VJV2_9BACE S-adenosylmethionine:tRNA ribosyltransferase-isomerase; OS = Bacteroides nordii OX=291645 GN=queA PE=3 SV=1
MKENPKHIRISEYNYPLPDERIAKFPLPVRDHSKLLVYRHGEVTEDVFTSLPEYLTEGSLMVFNNTKVIQARLHFRKETGALIEVFCLEPIQPNDYALNFQQTRHAAWLCMIGNLKKWKEGVLRREMTVKGHTLTLTATRGECHGTSHWIDFSWDNPEVTFADILEVFGELPIPPYLNRETQESDKETYQTVYSKIKGSVAAPTAGLHFTPRVLDALSEKGIDLEELTLHVGAGTFKPVKSEEIEGHEMHTEYISVSRSTIKKLIDHNGCAIAVGTTSVRTLESLYHIGVTLAANPRATEEELHVRQWQPYEKYDEIPSTVALQKILGYLDRNGMEALHTSTQIIIAPGYNYKIVKAMITNFHQPQSTLLLLVSAFVKGNWRTIYDYALDHDFRFLSYGDSSLLIP

SEQ ID NO: 64087 - protein, 352 aa, Bacteroides oleiciplenus
  REGION 1..352: note = tr|A0A1Q6G6M2|A0A1Q6G6M2_9BACE S-adenosylmethionine:tRNA ribosyltransferase-isomerase; OS = Bacteroides oleiciplenus OX=626931 GN=queA PE=3 SV=1
MKLSQFKFKLPEEKIALHPTKYRDESRLMVLHRKTGEIEHKEFKDVLNYFDDKDVFIFNDTKVFPARLYGNKEKTGARIEVFLLRELNEELRLWDVLVDPARKIRIGNKLYFGDDDSMVAEVIDNTTSRGRTLRFLYDGPHDEFKRALYALGETPLPHSIINRPVEPDDAERFQSIFARNEGAVTAPTASLHFSRELLKRLEIKGIDFAYITLHAGLGNFRDIDVEDLTKHKTDSEQMVVNEEAVSVVNRAKDMNRQVCAVGTTVMRAIESTVSTDGHLKSYEGWTNKFIFPPYDFTVANAMISNFHMPLSTLLMIVAAFGGYDQVMEAYNVALKEGYRFGTYGDAMLITDK

SEQ ID NO: 64088 - protein, 352 aa, Bacteroides oleiciplenus
  REGION 1..352: note = tr|A0A3E5B3W9|A0A3E5B3W9_9BACE S-adenosylmethionine:tRNA ribosyltransferase-isomerase; OS = Bacteroides oleiciplenus OX=626931 GN=queA PE=3 SV=1
MKLSQFKFKLPEEKIALHPTKYRDESRLMVLHRKTGEIEHKEFKDVLNYFDDKDVFIFNDTKVFPARLYGNKEKTGARIEVFLLRELNEELRLWDVLVDPARKIRIGNKLYFGDDDSMVAEVIDNTTSRGRTLRFLYDGPHDEFKKALYALGETPLPHSIINRPVEPDDSERFQSIFARNEGAVTAPTASLHFSRELLKRLEIKGIDFAYITLHAGLGNFRDIDVEDLTKHKTDSEQMIVNEEAVSIVNRAKDMNRQVCAVGTTVMRAIESTVSTDGHLKSYEGWTNKFIFPPYDFTVANSMISNFHMPLSTLLMIVAAFGGYDQVMEAYNVALKEGYRFGTYGDAMLITDK

SEQ ID NO: 64089 - protein, 352 aa, Bacteroides ovatus
  REGION 1..352: note = tr|A7LYJ8|A7LYJ8_BACO1 S-adenosylmethionine:tRNA ribosyltransferase-isomerase OS=Bacteroides ovatus (strain ATCC 8483 / DSM 1896 / JCM 5824 / NCTC 11153) OX=411476 G; N = queA PE=3 SV=1
MKLSQFKFKLPEDKIALHPMKYRDESRLMVLHRNTGKIEHKMFKDVLDYFDDKDVFIFNDTKVFPARLYGNKEKTGARIEVFLLRELNEELRLWDVLVDPARKIRIGNKLYFGPDDSMVAEVIDNTTSRGRTLRFLYDGPHDEFKKALYSLGETPLPHSIINRPVEPEDAERFQSIFAKNEGAVTAPTASLHFSRELMKRLEIKGVDFAYITLHAGLGNFRDIDVEDLTKHKMDSEQMFVNEMAVKTVNRAKDNGRNVCAVGTTVMRAIESAVSTDGHLKEFEGWTNKFIFPPYEFTVANSMISNFHMPLSTLLMIVAAFGGYDQVMDAYHVALKEGYRFGTYGDAMLILDK

SEQ ID NO: 64090 - protein, 406 aa, Bacteroides ovatus
  REGION 1..406: note = tr|A0A3E5HWT7|A0A3E5HWT7_BACOV S-adenosylmethionine:tRNA ribosyltransferase-isomerase; OS = Bacteroides ovatus OX=28116 GN=DW206_16270 PE=3 SV=1
MKEDPRHIHISEYNYPLPDERIAKFPLPTRDQSKLLIYRRGEVSEDVFTSLPEYLPQGSLMIFNNTKVIQARLHFRKETGALIEVFCLEPIQPNDYVLNFQQTVHAAWLCMIGNLKKWKDGQLKREMTVKGFPITLTATRGECKGTSHWVDFAWNNPEVTFADILEVFGELPIPPYLNRNTEESDKETYQTVYSKIKGSVAAPTAGLHFTPRVLDALQEKGIDLEELTLHVGAGTFKPVKSEEIEGHEMHTEYISVNRSTIKKLIDHDGCAIAVGTTSVRTLESLYHIGVTLAENPYATEEELRVKQWQPYEKYDQIPPVVALQKILGYLDRNGLETLHTSTQIIIAPGYNYKIVKAMVTNFHQPQSTLLLLVSAFVKGNWRTIYDYALAHDFRFLSYGDSSLLIP

SEQ ID NO: 64091 - protein, 344 aa, Bacteroides pectinophilus
  REGION 1..344: note = tr|R7B1E9|R7B1E9_9BACE S-adenosylmethionine:tRNA ribosyltransferase-isomerase OS=Bacteroides pectinophilus CAG:437 OX=1263051 GN=queA PE=3 SV=1
MMELHDFYYDLPQELIAQDPLSDRSASRLMLLDKNTGEIEHKIFKDIIDYLNPGDCLVINDTKVIPARLIGERVGTGATIEVLLLKRKEDMKDVWEVLVKPGKKAKIGTKISFGDGRLVAEVIDIVEEGNRLIQFTYEGIFEEILDELGQMPLPPYITHKLQDKNRYQTVYAKHEGSAAAPTAGLHFTKELLERIQEKGVDIARVTLHVGLGTFRPVKVENIQEHHMHSEYYVVTQEAADKINNAKADGGRVICVGTTSCRTIESASDDDGRVKACSGWTEIFIYPGYKFKVLDALITNFHLPESTLLMLVSALAGREHILAAYKTAVEEKYRFFSFGDAMFIH

SEQ ID NO: 64092 - protein, 405 aa, Bacteroides plebeius
  REGION 1..405: note = tr|A0A1Q6GM25|A0A1Q6GM25_9BACE S-adenosylmethionine:tRNA ribosyltransferase-isomerase; OS = Bacteroides plebeius OX=310297 GN=queA PE=3 SV=1
MEETKHIKISDYNYPLPDERIAKFPLPVRDQSKLLVYQHGQISETHFTSLPDYLEPGTLMIFNNTKVIQARLHFRKETGALIEIFCLEPIEPNDYVLNFQQTQHAAWLCMIGNLKKWKEGPLHKEMTVKGKPLTLTATRGACHGTSHWIDFTWDNPEVTFADILEFFGELPIPPYLNRETQESDKETYQTVYSKIKGSVAAPTAGLHFTERVLNALKEKGVDLEEVTLHVGAGTFKPVKSEEIEGHEMHTEYISVNRGTIEKLLAHGGEAVAVGTTSVRTLESLYYIGVTLSQHPDASQQELHVQQWQPYETHPELSTTEALQQILDYMDRNQLDALHTSTQIIIAPGYNYHIVKKMVTNFHQPQSTLLLLVSAFVKGNWRPIYDYALAHDFRFLSYGDSSLLIP

SEQ ID NO: 64093 - protein, 351 aa, Bacteroides plebeius
  REGION 1..351: note = tr|A0A1Q6GIJ2|A0A1Q6GIJ2_9BACE S-adenosylmethionine:tRNA ribosyltransferase-isomerase; OS = Bacteroides plebeius OX=310297 GN=queA PE=3 SV=1
MKLSQFKFKLPEEKIALYPAKYRDESRLMVIHKSTGEIEHVNFKDILNYFDDKDVFIFNDTKVFPARLYGNKEKTGARIEVFLLRELNEELRLWDVLVDPARKIRIGNKLYFGDDDSMVAEVIDNTTSRGRTLRFLYDGPHDEFKKALYALGEPPLPPFIHRPAEPEDEERFQTIYAKNEGAVTVPAAGLHFSRELMKRMEIKGIDFSFITMHAGLGNFRDIDVEDLTKHKMDSEQMFVNAEACRIVNEAKDRGNKVCAIGTTVMRAIETAVGTDGHLKEFEGWTNKFIFPPYDFSVANAMVSNFHMPLSTMLMLVCAYGGYELIMDAYNIALKEDYRFGTYGDAMLILDK

SEQ ID NO: 64094 - protein, 324 aa, Bacteroides pyogenes
  REGION 1..324: note = tr|W4PCF8|W4PCF8_9BACE S-adenosylmethionine:tRNA ribosyltransferase-isomerase OS=Bacteroides pyogenes JCM 6292 OX=1235809 GN=JCM6292_3373 PE=3 SV=1
MVLHRHTGKIEHKLFKEVLDYFDDKDVFIFNDTKVFPARLYGNKEKTGARIEVFLLRELNQDLRLWDVLVDPARKIRIGNKLYFGEDDSMVAEVIDNTTSRGRTLRFLYDGSHEEFKKALYALGETPLPHTIINRPVEPEDAERFQSIFARNEGAVTAPTANLHFSRELMKRLEIKGIDFAYITLHAGLGNFRDIDVEDLTKHKMDSEQMFVNAEAVKTVNRAKDNNRNVCAVGTTVMRAIESAVSTDGHLKEFEGWTNKFIFPPYEFTVANSMISNFHMPLSTLLMIVAAFGGYEQVMGAYDVALKEGYRFGTYGDAMLILDK

SEQ ID NO: 64095 - protein, 352 aa, Bacteroides pyogenes
  REGION 1..352: note = tr|A0A5D3EWV8|A0A5D3EWV8_9BACE S-adenosylmethionine:tRNA ribosyltransferase-isomerase; OS = Bacteroides pyogenes OX=310300 GN=queA PE=3 SV=1
MKLSQFKFKLPEEKIALHPAKYRDESRLMVLHRHTGKIEHKLFKEVLDYFDDKDVFIFNDTKVFPARLYGNKEKTGARIEVFLLRELNQDLRLWDVLVDPARKIRIGNKLYFGEDDSMVAEVIDNTTSRGRTLRFLYDGSHEEFKKALYALGETPLPHTIINRPVEPEDAERFQSIFARNEGAVTAPTANLHFSRELMKRLEIKGIDFAYITLHAGLGNFRDIDVEDLTKHKMDSEQMFVNAEAVKTVNRAKDNNRNVCAVGTTVMRAIESAVSTDGHLKEFEGWTNKFIFPPYEFTVANSMISNFHMPLSTLLMIVAAFGGYEQVMGAYDVALKEGYRFGTYGDAMLILDK

SEQ ID NO: 64096 - protein, 324 aa, unidentified
  source 1..324: note = Bacteroides reticulotermitis
  REGION 1..324: note = tr|W4UZG2|W4UZG2_9BACE S-adenosylmethionine:tRNA ribosyltransferase-isomerase OS=Bacteroides reticulotermitis JCM 10512 OX=1445607 GN=JCM10512_4723; PE = 3 SV=1
MVLHRRTGEIEHKMFKDVLDYFDDKDVFIFNDTKVFPARLYGNKEKTGARIEVFLLRELNEELRLWDVLVDPARKIRIGNKLYFGEDDSMVAEVIDNTTSRGRTLRFLYDGPHDEFKKALYALGETPLPHSIIHRPVEPEDAERFQSIFAKHEGAVTAPTAGLHFSRELMKRMEIKGIDFAYVTLHAGLGNFRDIDVEDLTKHKMDSEQIAVTREAVQAVNNAKDTGRNVCAVGTTVMRAIESTVSTDGHLKEFAGWTNKFIFPPYEFTVANSLISNFHMPLSTLLMIVAAFGGYDQVMDAYNLALKEDYRFGTYGDAMLILDK

SEQ ID NO: 64097 - protein, 346 aa, unidentified
  source 1..346: note = Bacteroides reticulotermitis
  REGION 1..346: note = tr|W4ULR8|W4ULR8_9BACE S-adenosylmethionine:tRNA ribosyltransferase-isomerase OS=Bacteroides reticulotermitis JCM 10512 OX=1445607 GN=JCM10512_283 PE=3; SV = 1
MIFNNTKVIQARLHFRKETGALIEVFCLEPIQPNDYVLNFQQTQHAAWLCMIGNLKKWKEGALHREMEVKGFSITLTATRGECRGTSHWVDFSWDNPEVTFADILEVFGELPIPPYLNRDTQDSDKETYQTVYSKIKGSVAAPTAGLHFTPRVLEALGEKGIELEELTLHVGAGTFKPVKSEEIEGHEMHTEYISVNRETIRKLIAHDARAIAVGTTSVRTLESLYHIGVTLAENPHATEEELHVRQWQPYEEHDELPPVVALQKILGYLDRHGMEALHTSTQIIIAPGYKYKIVKAMVTNFHQPQSTLLLLVSAFVKGNWRTIYDYALNHDFRFLSYGDSSLLIP

SEQ ID NO: 64098 - protein, 351 aa, Bacteroides salanitronis
  REGION 1..351: note = tr|F0R6G7|F0R6G7_BACSH S-adenosylmethionine:tRNA ribosyltransferase-isomerase OS=Bacteroides salanitronis (strain DSM 18170 / JCM 13567 / BL78) OX=667015 GN=queA; PE = 3 SV=1
MKLSQFKFKLPEERIALHPVKYRDESRLMVVHKSTGEIEHVIFKDILNYFDDQDVFIFNDTKVFPARLYGNKEKTGARIEVFLLRELNEELRLWDVLVDPARKIRIGNKLYFGDDDSMVAEVIDNTTSRGRTLRFLYDGPHDEFKRALYALGEPPLPPFIRRPAEPEDTERFQTIFAKNEGAVTVPAAGLHFSRELMKRMEIKGINFAFITMHCGLGCFRDIDVEDLTKHKMDSEQMFINAEACKIVNTAKDNDHKVCAVGTSVMRAVETATGTDGHLKEYEGWTNKFIFPPYDFVLPDAMVTNFHMPLSTMLMLTCSYGGYELIMDAYQMALKEDYRFGTYGDAMLILNK

SEQ ID NO: 64099 - protein, 406 aa, Bacteroides salanitronis
  REGION 1..406: note = tr|F0R4G3|F0R4G3_BACSH S-adenosylmethionine:tRNA ribosyltransferase-isomerase OS=Bacteroides salanitronis (strain DSM 18170 / JCM 13567 / BL78) OX=667015 GN=queA; PE = 3 SV=1
MEDTKHIHISDYNYNLPDERIAKFPLPVRDQSKLLVYRNGDISETRFTSLPDYVEPGTLMIFNNTKVIQARLHFRKETGALIEIFCLEPIQPNDYALNFQQTEHAAWLCMIGNLKKWKEGTLTRRMTVKGQDITLAATRGEARGTSHWVDFTWDNPGVTFADILEMFGELPIPPYLNRETQESDKETYQTVYSKIKGSVAAPTAGLHFTQRVLDALRAKGADLEEVTLHVGAGTFKPVKSEEIEGHEMHTEYISVSKGSIEKLIAHEGKALAVGTTSVRTLESLYYIGVTLSQHPDAQEADLHVRQWQPYETHPTLSTTEALKHILHYMERHRLDALHTSTQIIIAPGYEYKVVKRMITNFHQPQSTLLLLVSAFVKGDWKRIYDYALSHDFRFLSYGDSSLLINE

SEQ ID NO: 64100 - protein, 406 aa, Bacteroides salyersiae
  REGION 1..406: note = tr|I8Y2Y1|I8Y2Y1_9BACE S-adenosylmethionine:tRNA ribosyltransferase-isomerase OS=Bacteroides salyersiae CL02T12C01 OX=997887 GN=HMPREF1071_04141 PE=3 SV=1
MKENPKHIRISEYNYPLPEERIAKFPLPVRDQSKLLVYRQGAVTEDVFTSLPKYLAKDSLMIFNNTKVIQARLHFRKETGALIEVFCLEPVQPNDYALNFQQTEHAAWLCMIGNLKKWKEGPLHRELTVKGHPLTLTATRGECRGTSHWVDFSWNNSEVTFADILEVFGELPIPPYLNRETQESDKETYQTVYSKIKGSVAAPTAGLHFTPRVLDTLRKKGVDLEELTLHVGAGTFKPVKSEEIEGHEMHTEYISVSRSTLRKLIGHNACAIAVGTTSVRTLESLYHIGVTLAANPQATEEELHVRQWQPYEKYDEIPPVVALQKILDYLDYNGMETLHTSTQIIIAPGYDYKIVKAMITNFHQPQSTLLLLVSAFVKGNWRTIYDYALSHDFRFLSYGDSSLLIP

SEQ ID NO: 64101 - protein, 351 aa, Bacteroides salyersiae
  REGION 1..351: note = tr|A0A4Q5FQA7|A0A4Q5FQA7_9BACE S-adenosylmethionine:tRNA ribosyltransferase-isomerase; OS = Bacteroides salyersiae OX=291644 GN=queA PE=3 SV=1
MKLSQFKFKLPEDKIALHPTKYRDESRLMVLHRKTGKIEHKMFKDILNYFDDKDVFIFNDTKVFPARLYGNKEKTGARIEVFLLRELNEELRLWDVLVDPARKIRIGNKLYFGDDDSMVAEVIDNTTSRGRTLRFLYDGPHDEFKKALYALGETPLPHSIINRPVEEEDAVRFQSIFAKNEGAVTAPTASLHFSRELMKRMEIKGIDFAYITLHAGLGNFRDIDVEDLTKHKMDSEQMFVTEEAVKTVNRAKDLGKNVCAVGTTVMRAIESTVSTDGHLKEFEGWTNKFIFPPYEFTVANAMISNFHMPLSTLLMIVAAFGGYDQVMDAYHVALKEGYRFGTYGDAMLIID

SEQ ID NO: 64102 - protein, 351 aa, Bacteroides sartorii
  REGION 1..351: note = tr|R9ICN8|R9ICN8_9BACE S-adenosylmethionine:tRNA ribosyltransferase-isomerase OS=Bacteroides sartorii; OX = 671267 GN=queA PE=3 SV=1
MKLSQFKFKLPEDKIALYPAKYRDESRLMVVHKSTGKIEHKVFKDILDYFDDKDVFIFNDTKVFPARLYGNKEKTGARIEVFLLRELNEEFHLWDVLVDPARKIRIGNKLYFGEDDSMVAEVIDNTTSRGRTLRFLYEGSHDEFKKALYALGEAPLPSFIRRPVEEEDAERFQTIFAKNEGAVTAPTAGLHFSRELMKRMEIKGIDFAFVTMHAGLGNFREIDVEDLTKHKMDSEQMYVNADACRIVNNAKDEGKNICAVGTTVMRTIETAVGTDGHLKEFDGWTNKFIFPPYDFSVANSMVTNFHLPLSTLLMLVAAYGGYDLVMEAYHTALKEDYRFGTYGDAMLILDK

SEQ ID NO: 64103 - protein, 405 aa, Bacteroides sartorii
  REGION 1..405: note = tr|A0A4S2FLS0|A0A4S2FLS0_9BACE S-adenosylmethionine:tRNA ribosyltransferase-isomerase; OS = Bacteroides sartorii OX=671267 GN=queA PE=3 SV=1
MEDTKHIKISEFNYPLPDERIAKFPLATRDQSKLLVYRHGEVSEDVFTSLPQYLESGELMIFNNTKVIQARLHFRKETGALIEVFCLEPVQPNDYVLNFQQTRQCGWLCMIGNLKKWKEGTLSRTVDVKGKQIVLSATRGECRGTSHWIDFSWDDDTITFADLLEVVGELPIPPYLNRETQESDKETYQTVYSKIKGSVAAPTAGLHFTERVLAALDERGIDREELTLHVGAGTFRPVKSEEIEGHEMHTEYISVSKSTIEKLIAHNGKAIAVGTTSVRTLESLYYIGVLINHNPDATQDELHVQQWMPYEDKNELTPVEALQQILDYLNRHEMEALHSSTQIIIAPGYTYKIVKKMVTNFHQPQSTLLLLVSAFVKGNWRKIYDYALGHYFRFLSYGDSSLLIP

SEQ ID NO: 64104 - protein, 356 aa, Bacteroides sp.
  REGION 1..356: note = tr|A0A1Q6FTV8|A0A1Q6FTV8_9BACE S-adenosylmethionine:tRNA ribosyltransferase-isomerase; OS = Bacteroides sp. CAG:1060_57_27 OX=1896975 GN=queA PE=3; SV = 1
MKLSQFNFDLPKDRIATELMPIVDGRIQWRDECRLMVLHKDSGEIEHRKFKDIIEYFSKGDRFVLNDTKVFPAKLLGKKEKTGADIMVFLLRELNREQRLWDVIVDPARKIRIGNKLYFGDDDSMVAEVIDNTTSRGRTLRFLYDGPYEEFKQALFALGKTPVPEWVKESPDEKDTEEFQTIFARNEGAVSAPAAGLHFSRELMNRMILADIEKSFITVHMGIGHFRTVDVEDLSKHKMDGERVIISDEAADEINGTKRAGHKICAVGVTVIRALETYVTTDREIRPLDTWTNKFIFPPYEFSVPDAIVSNFHLPQSTMLMTVAAFGGFDKVMEAYRCALEEGYKFGPYGDAMLII

SEQ ID NO: 64105 - protein, 351 aa, Bacteroides sp.
  REGION 1..351: note = tr|R6CMU0|R6CMU0_9BACE S-adenosylmethionine:tRNA ribosyltransferase-isomerase OS=Bacteroides sp. CAG:530; OX = 1262741 GN=queA PE=3 SV=1
MKLSQFKFKLPEEKIALYPAKYRDESRLMVLHKATGQIEHVMFKDILNYFDDKDIFIFNDTKVFPARLYGNKEKTGARIEVFLLRELNEELRLWDVLVDPARKIRIGNKLYFGDDDSMVAEVIDNTTSRGRTLRFLYDGPHDEFKKALYALGEPPLPPFIHRAAEPIDVERFQTIYAKNEGAVTVPAAGLHFSRELMKRMEIKGVDFSFITMHCGLGGFRDIDVEDLTKHKMDSEQMFVTAEACEKVNKAKAEGHKVCAVGTSVMRAIETAVGADGNLKEFEGWTNKFIFPPYEFSLPDAMISNFHMPLSTMLMLVCSYGGYEFVMDAYQTALKEDYRFGTYGDAMLILEK

SEQ ID NO: 64106 - protein, 352 aa, Bacteroides stercorirosoris
  REGION 1..352: note = tr|A0A1M6KL64|A0A1M6KL64_9BACE S-adenosylmethionine:tRNA ribosyltransferase-isomerase; OS = Bacteroides stercorirosoris OX=871324 GN=queA PE=3 SV=1
MKLSQFKFKLPEEKIALHPTKYRDESRLMVLHRKTGEIEHKEFKDVLNYFDDKDVFIFNDTKVFPARLYGNKEKTGARIEVFLLRELNEELRLWDVLVDPARKIRIGNKLYFGDDDSMVAEVIDNTTSRGRTLRFLYDGPHDEFKKALYALGETPLPHSIINRPVEPDDAERFQSIFARNEGAVTAPTASLHFSRELLKRLEIKGIDFAYITLHAGLGNFRDIDVEDLTKHKTDSEQMVVNEEAVSVVNRAKDMNRQVCAVGTTVMRAIESTVSTDGHLKSYEGWTNKFIFPPYDFTVANAMISNFHMPLSTLLMIVAAFGGYDQVMEAYNVALKEGYRFGTYGDAMLITDK

SEQ ID NO: 64107 - protein, 409 aa, Bacteroides stercorirosoris
  REGION 1..409: note = tr|A0A1M6E2B4|A0A1M6E2B4_9BACE S-adenosylmethionine:tRNA ribosyltransferase-isomerase; OS = Bacteroides stercorirosoris OX=871324 GN=queA PE=3 SV=1
MKEDPKHIRISEFNYPLPDERIAKFPLSVRDQSKLLVYRHGEVSEDRFISLPSYLPAGSLMIFNNTKVIQARLHFRKETGALIEVFCLEPIEPNDYVLNFQQTEHAAWLCMIGNLKKWKEGTLKREMVVKSQPITLTATRGECHGTSHWVDFRWNNSEITFADILEVFGELPIPPYLNRETQESDKETYQTVYSKIKGSVAAPTAGLHFTPRVLDALKEKGVELEELTLHVGAGTFKPVKSEKIEGHEMHTEYISVSRGTIEKLIAHNGKAIAVGTTSVRTLESLYHIGVTLLKNPDATEEELHVRQWQPYETAEETASITSTKSLQAILDYLSRHEMEALHTSTQIIIAPGYDYKIVSAMVTNFHQPQSTLLLLVSAFVKGNWRKIYDFALSHDFRFLSYGDSSLLIP

SEQ ID NO: 64108 - protein, 409 aa, Bacteroides stercoris
  REGION 1..409: note = tr|A0A413VAN0|A0A413VAN0_BACSE S-adenosylmethionine:tRNA ribosyltransferase-isomerase; OS = Bacteroides stercoris OX=46506 GN=queA PE=3 SV=1
MKEDPKHIRISEFNYPLPDERIAKFPLPVRDQSKLLLYRHGEVTEDIFTSLPDYLPANSLMIFNNTKVIQARLHFHKETGALIEVFCLEPVQPNDYALNFQQTEHAAWLCMIGNLKKWKEGVLKREITVKGKPLTLTAERGACHGTSHWVDFRWSNPEITFADILEVFGELPIPPYLNRETQESDKETYQTVYSKIKGSVAAPTAGLHFTPRVLDALREKGVALEELTLHVGAGTFKPVKSEEIEGHEMHTEYISVNRSTLEKLVAHEGKAIAVGTTSVRTLESLYHIGVTLLHNPNATEEDLHVKQWQPYETALETAATPAVDALQAIIAYLDLHHMETLHSSTQIIIAPGYEYRIVKAMVTNFHQPQSTLLLLVSAFLHGDWRKIYDYALAHDFRFLSYGDSSLLIP

SEQ ID NO: 64109 - protein, 409 aa, Bacteroides stercoris
  REGION 1..409: note = tr|B0NVW0|B0NVW0_BACSE S-adenosylmethionine:tRNA ribosyltransferase-isomerase OS=Bacteroides stercoris ATCC 43183 OX=449673 GN=queA PE=3 SV=1
MKEDPKHIRISEFNYPLPDERIAKFPLPVRDQSKLLLYRHGEVTEDIFTSLPDYLPANSLMIFNNTKVIQARLHFHKETGALIEVFCLEPIQPNDYALNFQQTEHAAWLCMIGNLKKWKEGALKREITVKGKPLTLTAERGACHGTSHWVDFRWNNPEITFADILEVFGELPIPPYLNRETQESDKETYQTVYSKIKGSVAAPTAGLHFTPRVLDALREKGVALEELTLHVGAGTFKPVKSEEIEGHEMHTEYISVNRSTLEKLVAHEGKAIAVGTTSVRTLESLYHIGVTLLHNPNATEEDLHVKQWQPYETALETAATPAVDALQAIIAYLDRHHMETLHSSTQIIIAPGYEYRIVKAMVTNFHQPQSTLLLLVSAFLHGDWRKIYDYALAHDFRFLSYGDSSLLIP

SEQ ID NO: 64110 - protein, 406 aa, Bacteroides thetaiotaomicron
  REGION 1..406: note = tr|R9H1C6|R9H1C6_BACT4 S-adenosylmethionine:tRNA ribosyltransferase-isomerase OS=Bacteroides thetaiotaomicron dnLKV9 OX=1235785 GN=queA PE=3 SV=1
MKEDPKHIHISEYNYPLPDERIAKFPLAVRDQSKLLVYRHGEVSEDVFTSLPDYLPKGSLMVFNNTKVIQARLHFRKETGALIEVFCLEPIQPNDYVLNFQQTEHAAWLCMIGNLKKWKDGALKREMTVKGFPITLTATRGECRGTSHWIDFSWDNPEVTFADILEVFGELPIPPYLNRDTEESDKETYQTVYSKIKGSVAAPTAGLHFTPRVLEALQEKGIDLEELTLHVGAGTFKPVKSEEIEGHEMHTEYISVNRATIKKLIDHDGCAVAVGTTSVRTLESLYHIGVTLAENPDATEEELHVKQWQPYEKYDQIPPVVALQKILGYLDRNGLEALHSSTQIIIAPGYQYKIVKAMVTNFHQPQSTLLLLVSAFVKGNWRTIYDYALAHDFRFLSYGDSSLLIP

SEQ ID NO: 64111 - protein, 406 aa, Bacteroides thetaiotaomicron
  REGION 1..406: note = tr|A0A1H7J7E4|A0A1H7J7E4_BACT4 S-adenosylmethionine:tRNA ribosyltransferase-isomerase; OS = Bacteroides thetaiotaomicron OX=818 GN=queA PE=3 SV=1
MKEDPKHIHISEYNYPLPDERIAKFPLAVRDQSKLLVYRHGEVSEDVFTSLPDYLPKGSLMVFNNTKVIQARLHFRKETGALIEVFCLEPIQPNDYVLNFQQTEHAAWLCMIGNLKKWKDGVLKREMTVKGFPITLTATRGECRGTSHWIDFSWDNPEVTFADILEVFGELPIPPYLNRDTEESDKETYQTVYSKIKGSVAAPTAGLHFTPRVLEALQEKGIDLEELTLHVGAGTFKPVKSEEIEGHEMHTEYISVNRATIKKLIDHDGCAVAVGTTSVRTLESLYHIGVTLAENPDATEEELHVKQWQPYEKYDQIPPVVALQKILGYLDRNGLEALHSSTQIIIAPGYQYKIVKAMVTNFHQPQSTLLLLVSAFVKGNWRTIYDYALAHDFRFLSYGDSSLLIP

SEQ ID NO: 64112 - protein, 352 aa, Bacteroides uniformis
  REGION 1..352: note = tr|A7UYZ5|A7UYZ5_BACUC S-adenosylmethionine:tRNA ribosyltransferase-isomerase OS=Bacteroides uniformis (strain ATCC 8492 / DSM 6597 / CIP 103695 / JCM 5828 / NCTC 13 054 / VPI 0061) OX=411479 GN=queA PE=3 SV=1
MKLSQFKFKLPEEKIALHPTKYRDESRLLVLHRKTGEIEHKMFKDVLDYFDDKDVFIFNDTKVFPARLYGNKEKTGARIEVFLLRELNEELRLWDVLVDPARKIRIGNKLYFGDDDSMVAEVIDNTTSRGRTLRFLYDGPHDEFKKALYALGETPLPHSIINRPVEPDDAERFQSIFARNEGAVTAPTASLHFSRELMKRMEIKGIDFAYITLHAGLGNFRDIDVEDLTKHKTDSEQMIVNEEAVRIVNHAKDLNRQVCAVGTTVMRAIESTVSTDGHLKEYEGWTNKFIFPPYDFTVANAMISNFHMPLSTLLMIVAAFGGYEQVMEAYNVALKEEYRFGTYGDAMLITDR

SEQ ID NO: 64113 - protein, 352 aa, Bacteroides uniformis; identical to SEQ ID NO: 64112
  REGION 1..352: note = tr|A0A078RX65|A0A078RX65_BACUN S-adenosylmethionine:tRNA ribosyltransferase-isomerase; OS = Bacteroides uniformis str. 3978 T3 ii OX=1339349; GN = queA PE=3 SV=1

SEQ ID NO: 64114 - protein, 351 aa, Bacteroides vulgatus; identical to SEQ ID NO: 64060
  REGION 1..351: note = sp|A6KZK0|QUEA_BACV8 S-adenosylmethionine:tRNA ribosyltransferase-isomerase OS=Bacteroides vulgatus (strain ATCC 8482 / DSM 1447 / JCM 5826 / NBRC 14291 / NCTC 11154 ) OX=435590 GN=queA PE=3 SV=1

SEQ ID NO: 64115 - protein, 351 aa, Bacteroides vulgatus
  REGION 1..351: note = tr|A0A415BG75|A0A415BG75_BACVU S-adenosylmethionine:tRNA ribosyltransferase-isomerase; OS = Bacteroides vulgatus OX=821 GN=queA PE=3 SV=1
MKLSQFKFKLPEDKIALHPAKYRDESRLMVVHKSTGKIEHKVFKDILDYFDDKDVFIFNDTKVFPARLYGNKEKTGARIEVFLLRELNEELRLWDVLVDPARKIRIGNKLYFGDDDSMVAEVIDNTTSRGRTLRFLYDGSHDEFKKALYALGEAPLPSFIRRPVEEEDTERFQTIFAKNEGAVTAPTAGLHFSRELMKRMEIKGIDFAFVTMHAGLGNFREIDVEDLTKHKMDSEQMYVNADACRIVNNAKDEGKNICAVGTTVMRTIETAVGTDGHLKEFDGWTNKFIFPPYDFSVANSMVTNFHLPLSTLLMLVAAYGGYDLVMEAYHTALKEDYRFGTYGDAMLILDK

SEQ ID NO: 64116 - protein, 406 aa, Bacteroides xylanisolvens
  REGION 1..406: note = tr|I9JNN0|I9JNN0_9BACE S-adenosylmethionine:tRNA ribosyltransferase-isomerase OS=Bacteroides xylanisolvens CL03T12C04 OX=997892 GN=HMPREF1074_00156 PE=3 SV=1
MKEDPRHIHISEYSYPLPDERIAKFPLPTRDQSKLLIYRRGEISEDVFTSLPEYLLQGSLMIFNNTKVIQARLHFRKETGALIEVFCLEPIQPNDYVLNFQQTAHAAWLCMIGNLKKWKDGQLKREMTVKGFPITLTATRGECKGTSHWVDFAWDNPEVTFADILEVFGELPIPPYLNRDTEESDKETYQTVYSKIKGSVAAPTAGLHFTPRVLDALQEKGIDLEELTLHVGAGTFKPVKSEEIEGHEMHTEYISVNRSTIKKLIDHDGCAIAVGTTSVRTLESLYHIGVTLAENPYATEEELRVKQWQPYEKYDQIPPVVALQKILGYLDRNGLETLHTSTQIIIAPGYNYKIVKAMVTNFHQPQSTLLLLVSAFVKGNWRTIYDYALAHDFRFLSYGDSSLLIP

SEQ ID NO: 64117 - protein, 352 aa, Bacteroides xylanisolvens; identical to SEQ ID NO: 64089
  REGION 1..352: note = tr|D6CZ17|D6CZ17_9BACE S-adenosylmethionine:tRNA ribosyltransferase-isomerase OS=Bacteroides xylanisolvens XB1A OX=657309 GN=queA PE=3 SV=1

SEQ ID NO: 64118 - protein, 350 aa, Bacteroides xylanolyticus
  REGION 1..350: note = tr|A0A2S6HV24|A0A2S6HV24_9BACE S-adenosylmethionine:tRNA ribosyltransferase-isomerase; OS = Bacteroides xylanolyticus OX=384636 GN=queA PE=3 SV=1
MNVRDFYFDLPQELIAQDPLEDRSASRLLVLDKHTGEIEHRHFKDILDYLKKGDCLVINDTKVIPARLFGVKEGTEAKIEILLLKRRENDIWETLVKPGKKAKVGTVISFGEGLLKGTVIDVVEEGNRLIQFSYEGIFEEILDQLGQMPLPPYITHQLQDKNRYQTVYAKNEGSAAAPTAGLHFTKELLKKIQEKGVEIAHVTLHVGLGTFRPVKVDEIEAHHMHSEFYIVEEEEAKKVNDAKRNGGRIVCVGTTSCRTVESASTEDGILKAGSGWTEIFIYPGYHFKILDCLITNFHLPESTLIMLVSALAGRDHVLHAYEEAVRERYRFFSFGDAMFLTDRKDQGTVN

SEQ ID NO: 64119 - protein, 409 aa, unidentified
  source 1..409: note = Bacteroides zoogleoformans
  REGION 1..409: note = tr|A0A562V030|A0A562V030_9BACE S-adenosylmethionine:tRNA ribosyltransferase-isomerase; OS = Bacteroides zoogleoformans OX=28119 GN=queA PE=3 SV=1
MEQNPKHIHISEFNYVLPDDRIAKFPLPVRDRSKLLIYHHGKISEDTFTSLPDYLPTGSLMIFNNTKVIQARLHFRKETGALIEVFCLEPVQPNDYALNFQQTEHTAWLCMVGNLKKWKEGTLKREMTVKSRAIVLTAERGECRGTSHWVDFRWNNSEVTFADILEVFGELPIPPYLNRETQESDKETYQTVYSKIKGSVAAPTAGLHFTPHVLEALRTKGIDTEELTLHVGAGTFKPVKSEEIAGHEMHTEYISVSRSTLEKLIMHGGKAIAVGTTSVRTLESLYHIGITLLNNPEATEEELHVRQWQPYEMQDAASAVPAIEALQAVLSYLERHSMDALHTSTQIILAPGYEYQIVKAMITNFHQPQSTLLLLVSAFVQGDWRRIYDYALSHDFRFLSYGDSSLLIP

SEQ ID NO: 64120 - protein, 370 aa, unidentified
  source 1..370: note = Bacteroides zoogleoformans
  REGION 1..370: note = tr|A0A562VJE3|A0A562VJE3_9BACE S-adenosylmethionine:tRNA ribosyltransferase-isomerase; OS = Bacteroides zoogleoformans OX=28119 GN=queA PE=3 SV=1
MAGVSIGTRSIPTPLYIIYNMKLSQFKFKLPEEKIALHPVKYRDESRLMVLHRKTGEIEHKTFKDILNYFDDKDVFVFNDTKVFPARLYGNKEKTGARIEVFLLRELNEELRLWDVLVDPARKIRIGNKLYFGEDDSMVAEVIDNTTSRGRTLRFLYDGPHDEFKKALYALGETPLPHSIINRPAEPEDAERFQSIFARNEGAVTAPTASLHFSRELMKRLEIKGIDFAYITLHAGLGNFRDIDVEDLTKHKTDSEQMIVNEETVQKVNCAKDLGKQVCAVGTTVMRAIESTVSTDGHLKTYDGWTNKFIFPPYDFTVANAMISNFHMPLSTMLMIVSAFGGYDQVMSAYEVAIKEDYRFGTYGDAMLII

SEQ ID NO: 64121 - protein, 494 aa, unidentified
  source 1..494: note = Bacteroidetes bacterium
  REGION 1..494: note = tr|A0A2M7PRW7|A0A2M7PRW7_9BACT S-adenosylmethionine:tRNA ribosyltransferase-isomerase (Fragment) OS=Bacteroidetes bacterium CG_4_10_14_3_um_filter_42_6 OX=1973920 GN =COZ08_05430; PE = 3 SV=1
WKTGLLSKLIKINGEDITLFAEKITDLSDAFLIRFSWQPEEISFHEIINLSGLVPLPPYLNREAQPDDTIRYQTVYAKHDGSVAAPTAGLHFTEEILNQLSAKGIENEKVTLHVGAGTFKPVSSATLAEHEMHVEKIVVPLSALKNLQKKLNQPVIPVGTTSMRTLESLFWLAVKLHQGDESMTVEQWDPYQLKVEEGFTSAKALNTIIDFLEKNQLKALHGQTRLMIAPGYQFRFANGLITNFHQPKSTLLLLVSALIGDSWKMAYNFALEHDFRFLSYGDSCLFLPLASQPKEIPCMSDQQNTEITGIVLSGGKSRRMGKEKGLCHFRGKALITFAIDTLKPLCKTLIISANNKIDQYDLLEYPVISDDIPDTGPIGGLYSCLKQSQSAINLVISCDTPFVTTEVYQELLKYIVDYQAVVPVHEDGLLEPITAVYHRSCLPVILQQIEKGEYKMMDLLARLNTKFVYFDTNMSDSKPSLFHNLNSPEDLLSC

SEQ ID NO: 64122 - protein, 342 aa, unidentified
  source 1..342: note = Bacteroidetes bacterium
  REGION 1..342: note = tr|A0A1F3N4I5|A0A1F3N4I5_9BACT S-adenosylmethionine:tRNA ribosyltransferase-isomerase; OS = Bacteroidetes bacterium RBG_13_42_15 OX=1797355; GN = A2Y71_04670 PE=3 SV=1
MIRARLLFRKKSGAQIEIFCLEPLSPPDYETSFASKSPVEWKCIIGNLKKWKTGVVSLKFRPGDTEYELCAEKICPEGEAWRIRFNWNSTRLSFSEVIETSGHIPLPPYISREDEKEDGSRYQTVYSSVKGSVAAPTAGLHFTQDLLDKLPKKGVKSVNVTLHVGAGTFQQVRARHISDHKMHCEHFSVTKETICELLENHGRIIAVGTTSVRTLESLYWLGVKTADGSISNLNDLQIDQWEPYHNDRGIAVEKALTALSDLMTRHNCQTISGSTKIIIIPGYKFRMITGMITNFHQPRSTLLLLISAWTGSDWHKIYSYALEKKFRFLSYGDSSLLFNSLC

SEQ ID NO: 64123 - protein, 351 aa, unidentified
  source 1..351: note = Bacteroidetes oral
  REGION 1..351: note = tr|D7JH09|D7JH09_9BACT S-adenosylmethionine:tRNA ribosyltransferase-isomerase OS=Bacteroidetes oral taxon 274 str. F0058 OX=575590 GN=HMPREF0156_01603 PE=3 SV=1
MKLSQFKFDLPEKSIAQYLPKNRDDCKLLVLHKKSEKVEHKKLIDILSYFDDKDLFVFNNTQVFPALMTGIKEKTEAVIEVFLLRELNPLTKLWDVLVDPARKIRVGNKLYFGEDQSLVAEVIDNTTSRGRTLRFLYDGTHEEFKKALFALGRTSLPAYIKRPVEDADTEAYQTVFASEEGAVVAPFTGIHFSRELMKKMQIKGIEAGFITLHCSLSMFRSIDVEDLQKHKLDSEQMEVKPEFAQLFNKKSAEGRKICAIGTSVLLTLETAATVPGKIKEYSGWTNKFIFPPYEFQTVGSLLSTFHLPYSTMLMNQASFAGYDLTMQTYNTAIKKGYKFGCFGDLLLILND

SEQ ID NO: 64124 - protein, 411 aa, unidentified
  source 1..411: note = Bacteroidetes oral
  REGION 1..411: note = tr|D7JD82|D7JD82_9BACT S-adenosylmethionine:tRNA ribosyltransferase-isomerase OS=Bacteroidetes oral taxon 274 str. F0058 OX=575590 GN=queA PE=3 SV=1
MTYIPHNIDINDYDYPLPSERIARYPLPERDASMLLFFDGKDIEKKGFADLPELLDSKDFLVFNNTKVIHARLRFVKSTGAEIEIFCLEPLLPSDYQLSLSSVNSCVWKVMVGNLRRWKSETLHQTADIDGKRCNIEVRYRNPLNNMAHEVEFAWDNSDITFAQILAHLGELPIPPYLNRKTESADSLTYQTTYSKVLGSVAAPTAGLHFTDRILQRLTSKGIDSTEITLHIGAGTFQPVKTDNIAEHQMHTEVFAVGLSSLELIADNIDSIVAVGTTSVRTLESLYYIGCHIAKNEPSPVFEVSQWEAYENNGCEMSPRKSIETIIEYMRDNKLDFIVAKTQIMIVPGFKFRIVNKLITNFHQPRSTLLLLVSAFVGDDNRRKIYDFALGHNFRFLSYGDSSLLTNNSTQ

SEQ ID NO: 64125 - protein, 405 aa, unidentified
  source 1..405: note = Bacteroidetes sp.
  REGION 1..405: note = tr|A0A3N0ZW60|A0A3N0ZW60_9BACT S-adenosylmethionine:tRNA ribosyltransferase-isomerase; OS = Bacteroidetes/Chlorobi group bacterium ChocPot_Mid; OX = 2382230 GN=queA PE=3 S V=1
MLDINIEEYNFSLPQEKIALFPLSNRAESKLLLVNKNNQSISHHCFQEIPDLLPENSTIFLNNSKVIAARLLMKKSSGGLAEILCVEPINPSNDPQIAMSAKGKCTWKCIVGGKRINIGSILSEDTLFNFRATILEKEGQDAIVEFNWDNEKITFSEVIDKLGKVPLPPYIKRDVEAEDKIRYQTVYAEYDGSVAAPTAGLHFTNEILNLIKEKGIGIYELTLHVGTGTFKPIGSNNILNHRMHSELIIVSKSLLANILKSINDSKYIVATGTTSLRTLETLYWVGAKLINKELNYSEGEFELGQWDAYRMDKEIDVKDSIEMIINFLDKNNLSEIRGRTELFVIPGYNFKIVKGLITNYHLPKSTLILLVAAFLGKELWKKVYSEALNNNYRFLSYGDSSLLLS

SEQ ID NO: 64126 - protein, 407 aa, unidentified
  source 1..407: note = Bacteroidetes sp.
  REGION 1..407: note = tr|A0A3N0ZH75|A0A3N0ZH75_9BACT S-adenosylmethionine:tRNA ribosyltransferase-isomerase; OS = Bacteroidetes/Chlorobi group bacterium Naka2016; OX = 2382229 GN=queA PE=3 SV=1
MVEFSLNQFDYNLPEEKIAQYPLEKRDESNLLVYHKNRTISHHKFYELPNFIPEGSLLLRNVTKVIPARIFVEKPNGGTVEVLLLSNKKQQANVFEALIKGRKIKPNVRLSKQFSKENLVLYVDVISKNQDCYTVSLDWKEISNNSSSKLTFEEVLDRIAKTPLPPYIKREAEELDRTRYQTIYGWQPGSVAAPTAGFHFTDDVIQNLKSKSIDFADVTLHISLGTFQPIRVENIFAHNMHSEEFLVYYDNIKKIHKFFQTRGKEQLFVAIGTTSVRTLESLYWFAQDVYSNSLKPNLNNALIDQYIWRRVEEKLSIENALDFLLGLMDKEGKKEIIGNTSLYITPDYKIRFFDAIVTNFHQPKSTLLLLVYAFVGEDWKQIYNEALEKNYRFLSYGDSSLLFKTNG

SEQ ID NO: 64127 - protein, 350 aa, unidentified
  source 1..350: note = Bacteroidia bacterium
  REGION 1..350: note = tr|A0A1Q3QE76|A0A1Q3QE76_9BACT S-adenosylmethionine:tRNA ribosyltransferase-isomerase; OS = Bacteroidia bacterium 43-41 OX=1895720 GN=queA PE=3 SV=1
MKLSQFKFNLPDELIARYPSKHRDESRLLVVHKDSDKIEHLIFKDILNYFDAHDFFVFNDTKVFPARLFGNKEKTGAKIEVFLLRELNPAQHLWDVLVNPARKIRIGNKLYFGENEELVAEVIDNTTSRGRTLRFLYDGPYDEFKDLLFSIGETPIPEYMERPAVPEDADRYQNIFANNEGAVVVPAAGLHFSRELIKRMEIKNIDYGFLTLHHGLGAYRDIDVEDLTKHKIDSEQMIITQELCDRVNTAKDSGYKICAVGTSVLRAIETTISTDGHIKPREGWTNKFIFPPYDFTLPDALVTNFHLPFSTLLMITTAFGGYERIMDVYQTAIKEKYEFGAYGDAMLIIP

SEQ ID NO: 64128 - protein, 409 aa, unidentified
  source 1..409: note = Bacteroidia bacterium
  REGION 1..409: note = tr|A0A1Q3QE00|A0A1Q3QE00_9BACT S-adenosylmethionine:tRNA ribosyltransferase-isomerase; OS = Bacteroidia bacterium 43-41 OX=1895720 GN=BGO33_04895; PE = 3 SV=1
MKKCDVEKIRIADYNYTLPDEKIAKYPLQKRDASKLLLFENNKISTVHFSGIAAQIPEDSLMIFNDTRVIHARLIFEKNTGAFIEVFCLSPFAPKDYSINFQQRATCSWCCMIGNAKRWKDDVLQMQVSIEGEEVLLSAKKTVKTGSNVIVEFSWNNPDFTFSELLEVAGKLPIPPYLNRASEAKDDETYQTVYSAVEGSVAAPTAGLHFTPEVMESLRKKGVKPAHVTLHVGAGTFKPVKSETIGNHDMHTEFISVSRETVQALYENENSLIVVGTTSMRTVESLYYVGKKILQQPDIDPAELVVFQWEPYDEENPILPKLALKSIIDYLDKNSLDQLLALTQIMIVPGYEFHYPQAMITNFHQPQSTLLLLIASFIGENWLQVYEYALQNDYRFLSYGDSSLLWRIL

SEQ ID NO: 64129 - protein, 345 aa, unidentified
  source 1..345: note = Baia soyae
  REGION 1..345: note = tr|A0A4R2RNN2|A0A4R2RNN2_9BACL S-adenosylmethionine:tRNA ribosyltransferase-isomerase; OS = Baia soyae OX=1544746 GN=queA PE=3 SV=1
MNVADFSFELPKELIAQTPLTDRTASRLMIVNRNSGELTHTQFPEIVSYLEAGDVLVLNDSRVRPARLIGTKADTGAKIELLLLQPMGGDRWEALVKPAKRVKPGSVIQFGNGGELRAVAEESTEVAGGRVFRLEYQVDDIETLFTRLGEMPLPPYIHEQLDDPERYQTVFSRSIGSAAAPTAGLHFTDEILTAIREKGVQVSFVTLHVGLGTFRPVTVENIEEHQMHAEYYEMNEETASTIREAKKAGKRVIAVGTTSIRTLETIAGRFASEVQACSGWTDIFIYPGYEFQVVDGLLTNFHLPQSTLLMLGSAFSSRDILLHAYEVAVQERYRFFSFGDAMLLI

SEQ ID NO: 64130 - protein, 344 aa, unidentified
  source 1..344: note = Baia soyae
  REGION 1..344: note = tr|A0A4R2SCP0|A0A4R2SCP0_9BACL S-adenosylmethionine:tRNA ribosyltransferase-isomerase; OS = Baia soyae OX=1544746 GN=EDD57_101129 PE=3 SV=1
MTAPLSFYLPDSLHASLPPERRGIRRDHVKCMVLNRQTGETTHTQFQHIDSYLEKDDLLVLNASRTIPAVFQVDWKRNGTLLQTQVEIRLARRIDSTNWEALIVAAGVNLGDEFIFSSYLQAQVISLSEASIVTLQFSQSGNHLLESFYALGEPIRYEYIDHPWDLDYYQTVYGTVPGSVEMPSAGRAFSWELLLKLQKKGVRIAYIQLHTGLSYLLDDQAYLDPKKHAEEYLVPVSTVQEIKKAKKHGKRVIAVGTTIVRALETSIDGDGELIPQTGWTSLHITANTKLLVVDGLITGFHEPEASHLDLLSSLINPEHLLHAYQEAIEHQYYWHEFGDMNLIL

SEQ ID NO: 64131 - protein, 343 aa, Balnearium lithotrophicum
  REGION 1..343: note = tr|A0A521BZA4|A0A521BZA4_9BACT S-adenosylmethionine:tRNA ribosyltransferase-isomerase; OS = Balnearium lithotrophicum OX=223788 GN=queA PE=3 SV=1
MKVSEFDYELPKELIAKFPAEPRDSSRLMVLHRKTGEIKHRVFRDIINYLEEGDLLVINDTKVIPARLFGRLDTGGKVELLLIRQIEPDLWEVMARPARKLKEGKRLIFDDELSGVVRGYSGEGKRLVEFELVGDKTFMEKLEEIGHVPLPPYIEREERREDREKYQTVFAKREGAVAAPTAGLHFTKELLEKLKEKGIIIKPVTLHVGPGTFKPVKVENVEEHRMDYETYFVPEETAKAVEETKRKGKRVIAVGTTVVRTLESASDEFGNVKPGEGVTNLFIYPGYKFKVIDALITNFHLPRSTLLMLVSAFAGKEKVLNAYREAVKEGYRFYSYGDAMFIV

SEQ ID NO: 64132 - protein, 341 aa, Balneola sp.
  REGION 1..341: note = tr|A0A2E6N2A9|A0A2E6N2A9_9BACT S-adenosylmethionine:tRNA ribosyltransferase-isomerase; OS = Balneola sp. OX=2024824 GN=queA PE=3 SV=1
MSLGLHDFDFELPERLIAQYPVHPRDHAKLLVYDRVTQSIQDCFFYELDNLLNPDTTLVLNNTRVEKCRLLFEDGKMEVFVLETIDPYCVQALVRPGKKFKVGKTISLAPSLRAQVLSISEGGLRTLRLSHTYDDPIFESFKHTPLPPYIVQNEALSEEYQTIYAKYGGSKAAPTAGLHFTPDLMQRIAKSGVAIEELTLHVGMGTFAPVKTERIQEHIMHEENYLLTEKVASRLAKSRHITAVGTTSVRVLESVVAINSVNVSHAFRKFNTGSGSTDIFITPGYRYQAVDALITNFHLPKSTLLMLVAAFVGLEEMHRIYAHAIASEYRFYSFGDAMLLR

SEQ ID NO: 64133 - protein, 351 aa, Balneola sp.
  REGION 1..351: note = tr|A0A350PKW8|A0A350PKW8_9BACT S-adenosylmethionine:tRNA ribosyltransferase-isomerase; OS = Balneola sp. OX=2024824 GN=queA PE=3 SV=1
MKLTDFRYELEGLNVPEEPLEKRDDARLMVLNRAEETIEHKKFSDIHEYLNEGDVVIYNNTKVFPARLNGKKEKTEADIEVFLLRELQPENMLWDVLVEPARKIRIGNKLYFGEEDDELMAEVVDNTTSRGRTIRFLFDGGYDELYERLDALGKMPLPPYIEREPVDEDKERYQTVYATERGAVAAPTAGMHFTEDLIKKIEKKGVEMLPITLHIGWGTFRNVEVEDLTKHRMDSENYFLSKETSDKINVALSSKKNKVVAIGTSAVRAIETSVMASGMSKMGTGWTDKFIYPPYQFKITEGLITNFHRPESTLLMLAAAFGGYDFIMKAYEEAKKENYRLFSFGDAMLIL

SEQ ID NO: 64134 - protein, 110 aa, unidentified
  source 1..110: note = Balneolaceae bacterium
  REGION 1..110: note = tr|A0A359E6W0|A0A359E6W0_9BACT S-adenosylmethionine:tRNA ribosyltransferase-isomerase (Fragment) OS=Balneolaceae bacterium OX=2053516; GN = DEG32_11515 PE=3 SV=1
MKLTDFKFETDDLNIPEEPLKKRDSAKLMVLNRAERTIEHTTFDKIHEYLNKDDIMIYNNTKVFPARLNGKKEKTEADIEVFLLRELMPENMLWDVLVEPARKIRIGNKL

SEQ ID NO: 64135 - protein, 351 aa, unidentified
  source 1..351: note = Balneolaceae bacterium
  REGION 1..351: note = tr|A0A3D1G864|A0A3D1G864_9BACT S-adenosylmethionine:tRNA ribosyltransferase-isomerase; OS = Balneolaceae bacterium OX=2053516 GN=queA PE=3 SV=1
MKLTDFRYEIEGLNIPEAPLAQRDSARLMVLNRAEQTIEHRQFSDIHEYLNEGDVVIYNNTKVFPARLNGKKEKTEADIEVFLLRELQPENMLWDVLVEPARKIRIGNKLYFGEGDDELMAEVVDNTTSRGRTIRFLYDGPNTELYEKLDALGKMPLPPYIEREPVDEDKERYQTVFATERGAVAAPTAGMHFTQELIEKIEAKGVEFLPVTLHIGWGTFRNVEVEDLTKHRMDSENYFISKDTSDKINDALRKKKNKVVAVGTSVVRAIETSVMASGMSKQGTGWTDKFIYPPYQFKITEALITNFHRPESTLLMLGAAFAGYDFLMKAYEEAKEKDYRLFSFGDAMLVI

SEQ ID NO: 64136 - protein, 349 aa, Barnesiella intestinihominis
  REGION 1..349: note = tr|K0WUK7|K0WUK7_9BACT S-adenosylmethionine:tRNA ribosyltransferase-isomerase OS=Barnesiella intestinihominis YIT 11860 OX=742726 GN=queA PE=3 SV=1
MKLSQFKFKLPEEQIAQYPAKNRDESRLMVIDRKTGKIEHRIFKEIIEYFDEKDVFVFNDTKVFPARLYGNKEKTGAKIEVFLLRELNEENRLWDVLVEPARKIRIGNKLYFGDDDSMVAEVIDNTTSRGRTLRFLYDGSHDEFKEALYKLGEMPLPSYIARPVEEMDADRYQNIFARNEGAVVTPAAGLHFSRELLKRMEIKGIDYGFLTLHSGLGNFREIDVEDLTKHKMDSEQMRVTPELVELVNHAKDEGRKVCAVGTSVMRGIESAVSTGGHMKTYDGWTNKFIFPPYDFTVATNLVTNFHMPLSTMLMMVAAFGGYDIVLEAYESALKEGYRFGAYGDAMLIL

SEQ ID NO: 64137 - protein, 405 aa, Barnesiella intestinihominis
  REGION 1..405: note = tr|K0XNH6|K0XNH6_9BACT S-adenosylmethionine:tRNA ribosyltransferase-isomerase OS=Barnesiella intestinihominis YIT 11860 OX=742726 GN=queA PE=3 SV=1
MQKTQNIRIEDFNYPLPDERIAKFPLSKRDDSKLLVYRKGEIEEHRFHELPKVLPADSLLVFNNTRVIQARLHFRKETGALIEVFCLEPLEPHEYSLSFQSTGSCSWLCLVGNLKKWKNGVLTQSVNIDGKTVNFRAERGLPHGNAHEVHFSWDDSDVTFATLLDHAGELPIPPYLNRETEESDKTTYQTVYSKIEGSVAAPTAGLHFTPEVLNKLKEKNIPTLELTLHVGAGTFKPVKSETLEGHEMHTEYISVSRNLIDELSRTDRRVIAVGTTSVRTLESLYYIGKMLEHNPNILPDSLSVGQWQPYDGSEEIDSRQSLRNIVEYLDRRNMDRLVTATQIIIAPGYRYHIVQGMITNFHQPQSTLLLLVSAFVNGRWREIYDYALSHDFRFLSYGDSSLLLP

SEQ ID NO: 64138 - protein, 349 aa, Barnesiella sp.
  REGION 1..349: note = tr|A0A1Y3WKY5|A0A1Y3WKY5_9BACT S-adenosylmethionine:tRNA ribosyltransferase-isomerase; OS = Barnesiella sp. An55 OX=1965646 GN=queA PE=3 SV=1
MKLSQFKFKLPEAQIAQYPAKNRDESRLMVIDRKTGKIEHRIFKEIIDYFDEKDVFVFNDTKVFPARLYGNKEKTGAKIEVFLLRELNEENRLWDVLVEPARKIRIGNKLYFGDDDSMVAEVIDNTTSRGRTLRFLYDGSHDEFKEALYKLGEMPLPAYITRPVEELDTERYQNIFARHEGAVVTPAAGLHFSRELLKRMEIKGIDYGFLTLHSGLGNFREIDVEDLTKHKMDSEQLIVTPELVELVNHAKDGGHKVCAVGTSVMRGIESAVSTGGHMKTYDGWTNKFIFPPYDFTVATSLVTNFHMPLSTMLMMVAAFGGYEIVLSAYDAALKEGYRFGAYGDAMLIL

SEQ ID NO: 64139 - protein, 405 aa, Barnesiella sp.
  REGION 1..405: note = tr|A0A4Y9IWQ7|A0A4Y9IWQ7_9BACT S-adenosylmethionine:tRNA ribosyltransferase-isomerase; OS = Barnesiella sp. WM24 OX=2558278 GN=queA PE=3 SV=1
MIDKVSDILIEDYDYPLPDERIARHPLAERDRCKLLVRRPDGTLETRVFCELPELLPPGSLLIYNNTRVINARLRFRKPGGGALIEIFCLEPVMPADYAVNFASDHKCSWLCFVGNSKRWKDGSLSMELDIDGVTVTLTATRESREGNASVVMFEWDNSGITFSQIISAAGEIPIPPYLNRDTEPSDSSDYQTVFSHIDGSVAAPTAGLHFTDDVLRRVDEAGMSRRELTLHVGAGTFQPVKSDSIGDHDMHSEFIAVRRELIAELADTSRPVIAVGTTSVRTLESLYHIGCLIAAGEWQGEVPQWYPYGDGHPRLSRQEALSAIVGYLDAKGSPALLASTRIIIAPGYGFKVVDGMVTNFHQPKSTLLLLVSAFIGGGWREMYDYALAGDYRFLSYGDASLLLR

SEQ ID NO: 64140 - protein, 405 aa, Barnesiella viscericola
  REGION 1..405: note = tr|W0ETF9|W0ETF9_9BACT S-adenosylmethionine:tRNA ribosyltransferase-isomerase OS=Barnesiella viscericola DSM 18177 OX=880074 GN=queA PE=3 SV=1
MIKTQNIRIEDFNYPLPDERIAKFPLARRDQSKLLVYRQGQIEEHHFYDLPDVLPADSLLVFNNTRVIQARLHFRKETGALIEVFCLEPLDPHEYALSFQSTRSCSWLCLIGNAKKWKSGPLTQEVEIDGKTVRFTAERGVPHGNACEVRFSWDNPEVTFAALLDHAGELPIPPYLNRETEESDKTTYQTVYSKIEGSVAAPTAGLHFTPEVLAALRDKGIPELELTLHVGAGTFKPVKSETLEGHEMHTEYISVNRDLIDTLARTDRRVVAVGTTSVRTLESLYYIGKMLATNPDAEPHDLVVSQWQPYDGSPDIDPREALAHIVDYLDRHGMTRLVTATQIIIAPGYRYHIVQGMITNFHQPQSTLLLLVSAFVDGRWREIYDYALAHGFRFLSYGDSSLLLP

SEQ ID NO: 64141 - protein, 349 aa, Barnesiella viscericola
  REGION 1..349: note = tr|W0EU31|W0EU31_9BACT S-adenosylmethionine:tRNA ribosyltransferase-isomerase OS=Barnesiella viscericola DSM 18177 OX=880074 GN=queA PE=3 SV=1
MKLSQFKFKLPEAQIAQYPAKNRDESRLMVIDRKTGNIEHRIFKEIIDYFNEKDVFVFNDTKVFPARLYGNKEKTGAKIEVFLLRELNEENRLWDVLVEPARKIRIGNKLYFGDDDSMVAEVIDNTTSRGRTLRFLYDGSHDEFKEALYKLGEMPLPSYITRPVEELDAERYQNIFARHEGAVVTPAAGLHFSRELLKRMEIKGIDYGFLTLHSGLGNFREIDVEDLTKHKMDSEQLLVTPELVNLVNHAKDEGRQVCAVGTSVMRGIESAVSTGGHMKTYDGWTNKFIFPPYDFTVATSLVTNFHMPLSTMLMMVAAFGGYEIVLSAYDTALKEGYRFGAYGDAMLIL

SEQ ID NO: 64142 - protein, 364 aa, unidentified
  source 1..364: note = Barrientosiimonas humi
  REGION 1..364: note = tr|A0A542XGE7|A0A542XGE7_9MICO S-adenosylmethionine:tRNA ribosyltransferase-isomerase; OS = Barrientosiimonas humi OX=999931 GN=FB554_3057 PE=3 SV=1
MTTPAAHAATPLPAAGHAPGAGLAATGPPEQRGLRRDEVRLLVASGDGVTHTRFTRIADHLQPGDLVVVNNSATVAGQLDAVSDRRGAVVVHLATPLDDGAWVVELRSAPDAERPVLDAEAGERLRIADVTLTLVSGYPQDGSSPTGSGNRLWRAEVDGDLASRAERSGRPIAYGYLDRRYPLSTYQNVFSTVPGSAEMPSAGRPFTGGVLADLVGRGVATATVTLHTGVSSQEAGEGPQPERFEVPEVTARMVNATRAGGGRVVAVGTTVTRALESAVTPGGRVEATRGWTERLVTPSDPPRVVTGLVTGWHDPEASHLLLVEAVAGAELTERAYAAATSGGYLWHEFGDSALLLPSLVLPPP

SEQ ID NO: 64143 - protein, 358 aa, unidentified
  source 1..358: note = Bartonella apis
  REGION 1..358: note = tr|A0A1R0F6S8|A0A1R0F6S8_9RHIZ S-adenosylmethionine:tRNA ribosyltransferase-isomerase; OS = Bartonella apis OX=1686310 GN=queA PE=3 SV=1
MQVDLFDFELPEKQIALRPAVPRESARLLHVGKGGSLEDLHVRDLPSLLRKGDALVFNDTKVIKAQLQGERRRDAAIAHIGATLHKRVSPNEWLAFVRPAKRLKIGETIVFNKKDRSLADDDKLVAMVREKGENGEMLLEFDKSGAELDREIALIGHMPLPPYIALKRGEDKRDETDYQTVYAREEGAVAAPTAGLHFTKDLMQQIKDRGVEEYFVTLHVGAGTFLPVKVDDTKDHKMHSEIGHIDQQTADALMAVKKRGNRVIAVGTTAMRLLESAADEKGQLDAWAGSTDIFITPGYHFRFVDCLMTNFHLPRSTLFMLVSAFSGLDEMKHAYHHAIETGYRFYSYGDTSFLERKD

SEQ ID NO: 64144 - protein, 358 aa, unidentified
  source 1..358: note = Bartonella apis
  REGION 1..358: note = tr|A0A1U9MC25|A0A1U9MC25_9RHIZ S-adenosylmethionine:tRNA ribosyltransferase-isomerase; OS = Bartonella apis OX=1686310 GN=queA PE=3 SV=1
MQVDLFDFELPEKQIALRPAVPRESARLLHVGKGGCLEDLHVRDLPSLLKKGDALVFNDTKVIKAQLQGERRRGAAIAHIGATLHKRVSPNEWLAFVRPAKRLKIGETIVFNKQDRSLGDDNKLVATVREKGENGEMLLEFDKSGAELDREIALIGHMPLPPYIALKRGEDKRDETDYQTVYAREEGAVAAPTAGLHFTKDLMQQIKDRGVEEYFVTLHVGAGTFLPVKVDDTKDHKMHSEIGHIDQQTADALMAVKKRGNRVIAVGTTAMRLLESAADENGQLDAWAGSTDIFITPGYHFRFVDCLMTNFHLPRSTLFMLVSAFSGLDEMKHAYQHAIETGYRFYSYGDTSFLERKD

SEQ ID NO: 64145 - protein, 355 aa, unidentified
  source 1..355: note = Bartonella tamiae
  REGION 1..355: note = tr|J0ZKR7|J0ZKR7_9RHIZ S-adenosylmethionine:tRNA ribosyltransferase-isomerase OS=Bartonella tamiae Th239; OX = 1094558 GN=queA PE=3 SV=1
MNVDLFDFELPEDCIALRPFVPRERGKLLHVAQDGSLKDFYVRDLIMLLREGDALVFNDTRVIKAQLMGLRQRNGTIAKIGVTLHMRVTENKWWAFARPAKRLKLGDEIIFSSSTPLGNTNLIAHVLEKGDEGDVLLEFETAGHNLHQLIAQIGHMPLPPYIALKRGEDLQDEKDYQTIYAKEEGAVAAPTAGLHFTQSLMDDLTKHGIEKHFVTLHVGAGTFLPVKVENTDDHKMHSEMGHIDTKTAAALMSVKKRGNRIVAVGTTALRLLESATDEKGQIQAWSGATNIFITPGYQWRCVDCLMTNFHLPKSTLFMLVSAFSGMKKMREAYNHAIKNGYRFYSYGDTSFLERN

SEQ ID NO: 64146 - protein, 351 aa, unidentified
  source 1..351: note = Basilea psittacipulmonis
  REGION 1..351: note = tr|A0A077DCB4|A0A077DCB4_9BURK S-adenosylmethionine:tRNA ribosyltransferase-isomerase; OS = Basilea psittacipulmonis DSM 24701 OX=1072685 GN=queA; PE = 3 SV=1
MSINPQLKLSDFDYPLPEALIAQHPASERKGSRLLWIDSKRECHDQQFSDLLKLLKPHDLLVFNNTKVIKARLFGQKESGGKVECLVERILTENRVLAHLKASKAPKTGTQLIFESEIKALVLGRQDSLFELQFPDQVLGLLDRYGHLPLPPYITHQADAHDDQRYQTVYAQKLGAVAAPTAGLHFDTEMIQALSSRGIQHTFVTLHVGAGTFQPVRVNDIKDHVMHSEWYEVSKEAQDAVLTCRQNGGRVIAVGTTSVRALESAATQGGVIEGKRCPIAHCDDTRLFITPGYEFKVIDGLITNFHLPQSTLLMLVSALMGIDTMKQAYAHAIEKQYRFFSYGDAMFIEPK

SEQ ID NO: 64147 - protein, 342 aa, unidentified
  source 1..342: note = Bathymodiolus azoricus
  REGION 1..342: note = tr|A0A1H6KMZ3|A0A1H6KMZ3_9GAMM S-adenosylmethionine:tRNA ribosyltransferase-isomerase; OS = Bathymodiolus azoricus thioautotrophic gill symbiont; OX = 235205 GN=queA PE=3SV=1
MQLSDFDFDLPKSLIAQHPSKNRTDSRLLIGQSNLIDAQFHQIGDFIQSGDLLVMNNTKVIPARLFGHKDSGGKVEIMIERLLNDKQVLAMIRASRAPQIGSKITLENSEKATVLNKQDGFYTLEFATDSLLALLDNVGHIPLPPYIERTDDEQDLSRYQTVYAKHDGAVAAPTAGLHFDDALLNALKDKGINSAFVTLHVGAGTFQPVKTDNIKDHTMHSEYYEISQDTVDKIHQTKKSGGRVIAIGTTAVRSLESAAKSGTLEATREETDIFIYPGYEFKVVDMMVTNFHLPKSSLLMLVSAFIGRERMMEIYQHAIEQQYRFFSYGDAMLLTAKNSNGK

SEQ ID NO: 64148 - protein, 337 aa, unidentified
  source 1..337: note = Bathymodiolus brooksi
  REGION 1..337: note = tr|A0A482YJN6|A0A482YJN6_9BACT S-adenosylmethionine:tRNA ribosyltransferase-isomerase; OS = Bathymodiolus brooksi thiotrophic gill symbiont; OX = 1052209 GN=queA PE=3 SV=1
MQLKAFDFNLPTELIAQNPPKNRTDSRLLIGQSSIIDAQFNQIADFIQSGDLLVMNNTKVIPARLFGAKATGGKVEIMIERLLDENQALAMIRASRAPQMGSKITLENGETATVLNKQGSFYTLEFATDSLLTLLENVGHIPLPPYIERTDNQQDLDRYQTVYAQKDGAVAAPTAGLHFDDKLLTKLKNKGINHAFVTLHVGAGTFVPVKTDNIKDHTMHSEIFEINQSTVDKINQTKANGGRIIAIGTTTVRVLESSLKNGKLIAQQGETNIFIYPGYQFQIIDSLITNFHLPKSSLLMLVSALIGHTKMMEIYQHAIKERYRFFSYGDAMLLERV

SEQ ID NO: 64149 - protein, 337 aa, unidentified
  source 1..337: note = Bathymodiolus heckerae
  REGION 1..337: note = tr|A0A482Z2U8|A0A482Z2U8_9BACT S-adenosylmethionine:tRNA ribosyltransferase-isomerase; OS = Bathymodiolus heckerae thiotrophic gill symbiont; OX = 1052212 GN=queA PE=3 SV= 1
MLLSDFDFDLPKRLIAQNPPQNRTDSRLLVANKPIVDAHFHQIMDFIKPGDLLVMNNTKVIPARLFGHKASGGKVEIMIERLLNEKQVLAMIRASRAPKIGSCITLENGDIAQVISKENGFYTLDFVTDSLLDLLNKVGHIPLPPYIERSDEEDDLERYQTVFAQREGAVAAPTAGLHFDDELIDQLKKQGVDHVFVTLHVGAGTFQPVKAETISEHKMHSEYYEVDQVTVDKINQIKANNGRVIAIGTTAIRSIESAAKSGELKAVKEETDIFIYPGYEFKVIDMLITNFHLPKSSLLMLVAAFIGQQRMMDIYQHAIDNEYRFFSYGDVMLLDRI

SEQ ID NO: 64150 - protein, 337 aa, unidentified
  source 1..337: note = Bathymodiolus heckerae
  REGION 1..337: note = tr|A0A483A9J7|A0A483A9J7_9BACT S-adenosylmethionine:tRNA ribosyltransferase-isomerase; OS = Bathymodiolus heckerae thiotrophic gill symbiont; OX = 1052212 GN=queA PE=3 SV= 1
MQLKDFDFDLPKPLIAQLPPKNRTDSRLLVAQSRIIDTKFNNIADFLQSGDLLVMNNTKVIPARLFGHKDSGGKVEIMIERLLDESQVLAMIRASRAPQIDSKITLENGETATILNKKDGFYTLEFATNSLLALLEDIGHIPLPPYIERADDEQDLDRYQTVYAQRDGAVAAPTAGLHFDNELLTSLQNQGINSAFVTLHVGAGTFQPVKTDNITDHIMHSECYDISQTTIDKINQTKANGGRIIAIGTTTVRVLESSIKNGKLIAQQSETDIFIYPSYQFQIVDGLITNFHLPKSSLLMLVSAFIGRERMMEIYQHAIKERYRFFSYGDAMLLDRI

SEQ ID NO: 64151 - protein, 341 aa, unidentified
  source 1..341: note = Bathymodiolus platifrons
  REGION 1..341: note = tr|A0A1Z5H879|A0A1Z5H879_9GAMM S-adenosylmethionine:tRNA ribosyltransferase-isomerase; OS = Bathymodiolus platifrons methanotrophic gill symbiont; OX = 113268 GN=queA PE=3SV=1
MKKSDFYYELPDELIAQQPLAERSASRLLCLDKNSDGIEDRHFTDLLALLNKDDLLVLNNTKVIPARLFGHKQSGGKVEILIERVLNEREVLAHMRSSKSPKAGALIRLDAGFQCLVLGRVDDLFHLQFQGELALADILEHIGHMPLPPYIERADNINDQTRYQTVFAQKSGAVAAPTAGLHFDDAMMDKIRAKGGGIAFVTLHVASGTFRPVKVENLAEHVMHKEYFEVPQETVAAVQQTKSQGGRVIAIGTTAMRSLESASRTGELHACQGDTDLFITPGYQFKTVDAMLTNFHLPESTLLMLVSAFSGYERIKKVYQHAIAQKYRFFSYGDAMFIQRE

SEQ ID NO: 64152 - protein, 340 aa, unidentified
  source 1..340: note = Bathymodiolus thermophilus
  REGION 1..340: note = tr|A0A1J5UHJ0|A0A1J5UHJ0_9GAMM S-adenosylmethionine:tRNA ribosyltransferase-isomerase; OS = Bathymodiolus thermophilus thioautotrophic gill symbiont OX=2360 GN=queA PE= 3 SV=1
MQLKAFDFNLPSELIAQNPPKNRTDSRLLVGQSSIIDAQFNQIADFLQSGDLLVMNNTKVIPARLFGVKATGGKVEIMIERLLDENQALAMIRASRAPQINSKITLENGETATILNKQGSFYTLEFSTDSLLTLLDNVGHIPLPPYIERTDNQQDLDRYQTVYAQKDGAVAAPTAGLHFDDKLLTKLKNKGIDHAFVTLHVGAGTFVPVKTDNIEDHTMHSEIFEINPATVDKINQTKANGGRIIAIGTTTVRVLESSIKNGKLIAQQGETDIFIYPGYQFQIVDSLITNFHLPKSSLLMLVSAFIGYTQMMAIYQHAIKERYRFFSYGDAMLLNKQNKQ

SEQ ID NO: 64153 - protein, 360 aa, Bauldia litoralis
  REGION 1..360: note = tr|A0A1G6B4Y2|A0A1G6B4Y2_9RHIZ S-adenosylmethionine:tRNA ribosyltransferase-isomerase; OS = Bauldia litoralis OX=665467 GN=queA PE=3 SV=1
MRVDLFDFELPETSIALRPANPRDAARLLVVKPGVALDDRHVSDLPDLLRPGDVLVVNDTKVIPAELRGERIRGEHVTPVSVTLYERSGPARWRAFARPARRLSPGDRLRFGATVDNACLAAGLDATVEEKGEGGDVLIRFDLSGPVLDEAVHAIGHMPLPPYIAAKRGEDASDRADYQTIYAREEGAVAAPTAGLHFTDGLFERLSAAGIGLQRVTLHVGPGTFLPVKAEDTADHRMHAEWGTVSADVADALNRARAAGGRIVAVGTTSLRLLESAATDDGLVAPFSDETSIFITPGYRFKAVDILMTNFHLPRSTLFMLVSAFSGRETMVAAYRHAIDSGYRFYSYGDASLLFPEIRP

SEQ ID NO: 64154 - protein, 353 aa, unidentified
  source 1..353: note = Baumannia cicadellinicola
  REGION 1..353: note = sp|Q1LSP1|QUEA_BAUCH S-adenosylmethionine:tRNA ribosyltransferase-isomerase OS=Baumannia cicadellinicola subsp. Homalodisca coagulata OX=374463 GN=queA PE=3 SV=1
MHVADFSFNLPKNLIARYPLPERSTCRLLSLDGHSGAIKHNVFTDILDQLSLGDLLVFNNTRVIPARLFGRKISGGKVEVLVERVLDNQRVLAHIRASKTPKIDTLLLLGDNENIRAIIVARHQIWFELLFDDQRDILTILNDAGHIPLPYYLDRPDYSLDRELYQTVYSQHPGAIAAPTAGLHFDQQLLSALRVKGVEMVFITLHVGTGTFQPIKVKKIEHHHMYSEYTEVPHTVVDAVIACKSRGNRVVAVGTTSVRSLESAIVSVSNSKHTMLAPFCGETSIFIYPGYRFRVIDALITNFHLPQSTPIMLVSAFAGYQHTFNAYREAVNLAYRFLSYGDAMFITNNNSVF

SEQ ID NO: 64155 - protein, 345 aa, Bavariicoccus seileri
  REGION 1..345: note = tr|A0A3D4S309|A0A3D4S309_9ENTE S-adenosylmethionine:tRNA ribosyltransferase-isomerase; OS = Bavariicoccus seileri OX=549685 GN=queA PE=3 SV=1
MPLTVNDFDFNLPENLIAQVPLKDRSASRLLHLNVTDHTMTDESFKDIVSILKSGDVLVMNNTKVLPARLFGTKEDTGGHLEVLLLHQENDDVWETLVKPAKRAKVGTVISFGDGQLTGEVIEVLEHGGRRVKFSYQGVFLEILDQLGEMPLPPYIKEKLRDKNRYQTVYAKEEGSAAAPTAGLHFTTEILEALKAKGVKLCYVTLHVGLGTFRPVSAVNISDHHMHSEYYHIDQQTCDVINSARSENRRIVAVGTTSIRTLESVTKDRTTPLEPMSGWTSIFISPGFQFKAVDAFITNFHLPKSTLVMLVAAYAGRSFILEAYDHAIKEKYRFFSFGDAMFLEK

SEQ ID NO: 64156 - protein, 346 aa, Bdellovibrio bacteriovorus
  REGION 1..346: note = tr|Q6MKY9|Q6MKY9_BDEBA S-adenosylmethionine:tRNA ribosyltransferase-isomerase OS=Bdellovibrio bacteriovorus (strain ATCC 15356 / DSM 50701 / NCIB 9529 / HD100) OX=26 4462 GN=queA PE=3 SV=1
MKLTDLDFSYPEELIATSPVRPSRVMWVEGELEPQEISLQDLLSRIPAGDVLVVNNTRVLKRRVFSGDVEILFLKQINATDWEVLFPSKKFKIGSVLELPLGVQMTLQQKGRPQTVRLSQEVSEDYFQKVAELPLPPYIQKAREQRHTVDADESWYQTAWNKNPGSFAAPTASLHFSAEDIEGLKSRGVKVLEVTLHVGLGTFLPVTAEDLNDHDMHEEYVEISAATWSAVQKAKAEGRKIWSLGTTTSRSLESAAQGLLGAMSETGFSGFTKLLIQPGYQYKVVDCLMTNFHQPQSTLVALVAGFSSLNRVKACYQWAIERKFRLFSYGDLTVWVAAAKSAVHEG

SEQ ID NO: 64157 - protein, 339 aa, Bdellovibrio bacteriovorus
  REGION 1..339: note = tr|A0A150WDK1|A0A150WDK1_BDEBC S-adenosylmethionine:tRNA ribosyltransferase-isomerase; OS = Bdellovibrio bacteriovorus OX=959 GN=AZI85_08770 PE=3; SV = 1
MKLADLDFSFPEELIATSPQRPSRVMWVEGGVPQEITLQELMARIPAGDVLVVNNTRVLKRRVFAGDVEILFLKQTSAMDWEVLFPSKKYKVGASLELPLGVTMTLVEKGRPQKVRLNQEVSEDYFQKVAELPLPPYIQKAREQRHTVDADESWYQTAWAKTPGSFAAPTASLHFSAQDMEALKAKGVALCEVTLHVGLGTFLPVTAEDLNDHDMHEEYVEVSAATWAVVNNARKNGHKIWSLGTTTTRSLESVGNGLLQGNPEEGFRGFTKLLIQPGYQFRVVNRLLTNFHQPQSTLLALVAGFSSLETVKACYHWAIERKFRLFSYGDLSCWTETKQ

SEQ ID NO: 64158 - protein, 335 aa, unidentified
  source 1..335: note = Bdellovibrio exovorus
  REGION 1..335: note = tr|M4VAY9|M4VAY9_9PROT S-adenosylmethionine:tRNA ribosyltransferase-isomerase OS=Bdellovibrio exovorus JSS; OX = 1184267 GN=A11Q_1424 PE=3 SV=1
MKLADLQFDFPEELIATSPVRPTRVMWVEPSQVPVEITIPELLQKIPAGDVLVVNNTKVLKRRVFSEENIEILFLDRVEQKANSNLWKVLFPSKKYKIGDELKLPQGFTMKLVEKGRPQIVEVFPAISDLDFATIAELPLPPYIQKARQERHNVEADESWYQTAWASQAGSMAAPTASLHFNRQDLQSLASRGVHVIELTLHVGLGTFLPVTAEDLSQHQMHSEQYEISEDSWLKIQKAKQESSKVWALGTTTTRVLESVSRTGVLAGSTDILLQEGSEFQIVDRLLTNFHQPESTLLALVAGFSSLDRVKESYKWAIQHKFRLFSYGDLSVWLK

SEQ ID NO: 64159 - protein, 336 aa, Bdellovibrio sp.
  REGION 1..336: note = tr|A0A514XHU5|A0A514XHU5_9PROT S-adenosylmethionine:tRNA ribosyltransferase-isomerase; OS = Bdellovibrio sp. ZAP7 OX=2231053 GN=queA PE=3 SV=1
MKITDLVFTYPEELVATSPQRPSRVMWVENNQPREISLVELLGKMSAGDVLVVNNTRVLKRRVFSGDVEILFLKQNSELEWEVLFPSKKYKIGQSLELPLGVTMTLKEKGRPQTVTLNQAVTEDYFQKVAELPLPPYIQKARNERHTVDADESWYQTAWAKEPGSFAAPTASLHFSKSDMDQLRAQGVQIVEVTLHVGLGTFLPVTAEDLNDHDMHEEYVEISAQSWQAIQAAREAGNLIWSLGTTTTRSLESAAGGLLQGSATEGFRGFTKLLIQPGYKFKVVQRLLTNFHQPESTLLALVSGFSSLETVKTCYLWAIERKFRLFSYGDLTVWVD

SEQ ID NO: 64160 - protein, 343 aa, Bdellovibrio sp.
  REGION 1..343: note = tr|A0A317JK83|A0A317JK83_9PROT S-adenosylmethionine:tRNA ribosyltransferase-isomerase; OS = Bdellovibrio sp. OX=28201 GN=C5B49_02900 PE=3 SV=1
MQRRELCFDFPESLIATEPRRPSRVMWVEGPAASPIELDLETLKSQLHPGDVVVVNDTRVVKRRVFTHEGLEILFLREIEPRQWQVLFPSRELKVGAQIFLPGGVKLTLLRKGRPQLVLVNADLQESYFERFGELPLPPYIQKARGERHHRGNDGSKDGKLEEKWYQTAWNAKPGSLAAPTASLHWTRQDLEDLRRRDVGVEQLTLHVGLGTFLPVTADRLQDHAMHEEWVEIPAATWERTRQCRGRVWALGTTVARALESAARGQLSKDQQGFFGGTNLFLYPGQEWLLVKGLLTNFHQPESTLLALVASFCDLPTVKAAYQWAIKNRFRLFSYGDLTAWKR

SEQ ID NO: 64161 - protein, 373 aa, unidentified
  source 1..373: note = Bdellovibrionaceae bacterium
  REGION 1..373: note = tr|A0A2E8I5N9|A0A2E8I5N9_9PROT S-adenosylmethionine:tRNA ribosyltransferase-isomerase; OS = Bdellovibrionaceae bacterium OX=2026715 GN=queA PE=3; SV = 1
MKSKIHLQLSDFIYDLPEHAIAQEPLEKRDSAKLLVKHADGKISHKTIKELASCIPSHALLIVNETKVIPSRLFGYTDQGGRIEIMLLEQDAADQNQWYIIGKPMKKFKTGFKINFDKSCIGSIVEGPTSHGDQPAVAKIKFTADIPFDQWLSMNGYIPLPPYIKREHAKTASSSPDRERYQTVYAAEEYPGSAAAPTAGLHFTQEVFESLQERNIDIAKVTLHVGAGTFLPVKSENIDLHKMHCERYLINRQEWSKIKSAQSKNRPIIAVGTTTFRCIESFQLMLNQSGDSSEKHLDQWQQTDLFIRPKFASDIYQPLTINGIMTNFHQPGSTLLMLISSLLGYGTTQSIYKSAIEKKYRFLSYGDSSLLFL

SEQ ID NO: 64162 - protein, 402 aa, unidentified
  source 1..402: note = Bdellovibrionaceae bacterium
  REGION 1..402: note = tr|A0A2E3UVW6|A0A2E3UVW6_9PROT S-adenosylmethionine:tRNA ribosyltransferase-isomerase; OS = Bdellovibrionaceae bacterium OX=2026715 GN=queA PE=3; SV = 1
MITNFIKKNSKFMSLIKMEEVNKGKQLNLNDFSFHVPDDQVAHFPAKKRDSSKLLFYKGKSEIKNFDFKSLPDILPQGTLLIFNNTKVFPCRLQAQKDTGAQLEVFLLSLPNEKNPNCQAIVKPIKRIKTGTKLYFQEGVIAEVGDFNNNGSIPTVSLKFFSPPGVSDFHCWIDRFGQTPLPPYIKRQTDDSKNAEIDKKRYQTVYARCEGSTAAPTAGLHFTKDLLEELERSGIKSSCVTLHVGLGTFAPVRNNDIKTHKMHKEFYFIPSETFEAIKENIRSKNPIVAVGTTSLRAVESLFYHDCKSFENLSSYVDAWNETDLFIYPKTKNDFFSPRVLDGLITNFHQPQSTLYMLISALLGFDEAKRVYDYAVKNKFRFFSYGDSSLLWFKKKEMDDLKS

SEQ ID NO: 64163 - protein, 362 aa, unidentified
  source 1..362: note = Bdellovibrionales bacterium
  REGION 1..362: note = tr|A0A1F3SGM1|A0A1F3SGM1_9PROT S-adenosylmethionine:tRNA ribosyltransferase-isomerase; OS = Bdellovibrionales bacterium GWA2_49_15 OX=1797384; GN = queA PE=3 SV=1
MNDFLLKSYAYPLPQDLVADRPLAERDQSRLLVYDASLGQSTHTFFHKLSQHLPPQCLLVFNNTKVFPCRLQGKKRSGGKAELFVLSLRPNEEGLYECLIGSNARKDPGDQFIFGTNSGTNSGTRSELLVTIVKRSENETFLVNFDGPDITALLQREGQVPIPPYIRRGVSDGRDREDYQTVYARNLGATAAPTAGLHFTGPGMQALLEHGHEQAFVTLHVGPGTFRPVSAENILEHKMHSENFFIEQQSWRKIVQARATGRPIVAVGTTSLRALESAHGIKDFQADQVYPTKIFLYPGRPIHSIDGLITNFHLPESTLLMLVSALVGREKILALYNQAIEQRYRFFSYGDAMFITGIQHAK

SEQ ID NO: 64164 - protein, 339 aa, unidentified
  source 1..339: note = Bdellovibrionales bacterium
  REGION 1..339: note = tr|A0A1F3SYC4|A0A1F3SYC4_9PROT S-adenosylmethionine:tRNA ribosyltransferase-isomerase; OS = Bdellovibrionales bacterium RBG_16_40_8 OX=1797388; GN = A2Z20_04760 PE=3 SV=1
MLTADFYYNFPEHLVATKPHENFRTMWLGANDSLPSEIAKNELLLRLNPGDVLAINDTRVLRRRVTALNGLEILFLKQISANNWEVLCPASKLRNGEEFCLPNDINARLEARGLPQKLWVSKPFDENYFVKHGELALPPYIQKARGNRKNYPEEEKWYQTAWAEKLGSQAAPTASLHFTNSDLDFLRGRGVQIAPLTLHVGMGTFLPIKSKSLEEHHMHNESTQVPLSTIKIISHAKSKNKKVWALGTTVTRALESWGHGLLREDANRDFIGDTELFIRPGFRFEVVDGLFTNFHQPCSTLLALVSAFAGRDRVISSYEWAISQNFRLFSYGDLTAWTR

SEQ ID NO: 64165 - protein, 345 aa, Beggiatoa alba
  REGION 1..345: note = tr|I3CGV7|I3CGV7_9GAMM S-adenosylmethionine:tRNA ribosyltransferase-isomerase OS=Beggiatoa alba B18LD; OX = 395493 GN=queA PE=3 SV=1
MMMRRSDFNYELPPELIAQYPSPTRTGSRLLFVDTRKQQLTNHTFKEFPQFLDEKDLLIFNNTKVIPARLFGQKTTGGRVEILVERVLDQHRFLGQMRASKPPKPETAIQLEGGITVIVIGKIDNFFELRFEDERPVYEILEAIGHIPLPPYIDRQDDNIDQSRYQTVYAQNLGAVAAPTAGLHFDQTLLDEISAKGIQQTFVTLHVGAGTFSPIRVDDLSQHVMHSEWVSVSESVCEQIRATRARGGRVVAIGTTAVRALETASQSGEIQPYEGETRLFITPSYVFKSVDALLTNFHLPESTLLMLVSAFAGTEFTLQAYRYAVQEKYRFFSYGDAMWINHRAG

SEQ ID NO: 64166 - protein, 345 aa, unidentified
  source 1..345: note = Beggiatoa leptomitoformis
  REGION 1..345: note = tr|A0A2N9YJR1|A0A2N9YJR1_9GAMM S-adenosylmethionine:tRNA ribosyltransferase-isomerase; OS = Beggiatoa leptomitoformis OX=288004 GN=queA PE=3 SV=1
MRRSDFYYDLPPHLIAQKPSLTRTSSRLLHIDTQTQRLTNHIFKDFPHCLEPNDLLVFNNTKVIPARLFGQKATGGRVEILVERILDDHRILGQMRASKPPKPNTPILLEGGITVVVLGKIDNFFELRFADERSVYDILQAIGHIPLPPYIVRDDDNIDQERYQTVYAQNLGAVAAPTAGLHFDKQLLAEISAKGIQQTFVTLHVGAGTFSPIREEDLSLHVMHSEWVSVSTEVCEQIRATRARGGRVIAIGTTAVRALETASQSGEIQPYQGETRLFITPGYVFKSVDALLTNFHLPESTLLMLVSAFAGTDLTLQAYRYAVQQQYRFFSYGDAMWINHKVTTI

SEQ ID NO: 64167 - protein, 95 aa, Beggiatoa sp.
  REGION 1..95: note = tr|A7C647|A7C647_9GAMM S-adenosylmethionine:tRNA ribosyltransferase-isomerase OS=Beggiatoa sp. PS OX=422289; GN = BGP_5753 PE=3 SV=1
MRALETASTSGVIKPYEGETRLFITPGYHFQTVDALLTNFHLPESTLLMLVCAFAGQAQVLDAYRHAVAQHYRFFSYGDAMFVENGNREWVMGNG

SEQ ID NO: 64168 - protein, 356 aa, Beggiatoa sp.
  REGION 1..356: note = tr|A0A1W9WD32|A0A1W9WD32_9GAMM S-adenosylmethionine:tRNA ribosyltransferase-isomerase; OS = Beggiatoa sp. 4572_84 OX=1972449 GN=queA PE=3 SV=1
MQRTDFFYDLPKHLIAQHPLDSRTGSRLLYIDPHTGQFQDRHFVDFPSLLAPGDLLVFNDTRVIPARLFGHKASGGKVEVLVERVLDDNRVLAQLRTSKAPKPNTRLYFEGDVNVTVVQRVENFFELQFDDSRPVYDILQAIGHIPLPPYIQRTDTQLDSAHYQTVYARQPGAVAAPTAGLHFDEAMLEQIDAMGVERAFITLHVGAGTFASVRVDDIRQHTMHTERLHVCAQVCEQVAATRARGGRVIAIGTTTVRALETAWAEGVIKPYDGETRLFITPGYRFRSVDALLTNFHLPESTLLMLVCAFAGQSQVLAAYRHAVAQQYRFFSYGDAMFVTDTAVQSGKRRPNWSTKL

SEQ ID NO: 64169 - protein, 367 aa, Beijerinckia indica
  REGION 1..367: note = sp|B2IHG4|QUEA_BEII9 S-adenosylmethionine:tRNA ribosyltransferase-isomerase OS=Beijerinckia indica subsp. indica (strain ATCC 9039 / DSM 1715 / NCIB 8712); OX = 395963GN=queA PE=3 SV=1
MRVDLFDFDLPPERIALRPVEPRDASRLLVVRPDSGDMTDHGMRELPDFLRAGDVLVVNDTRVIPARLHGFRSRGESRAKIEATLHKREGEALWRAFVKPAKKLRVGETICFARQEPGTEVESLEAEVLEKGAEGEVVLGFNRAGAALDAALDLLGEMPLPPYIAGKRAPDSQDSLDYQTLFANRSGAVAAPTASLHFTPRLIAAIEARGVTICKVTLHVGAGTFLPVKAEDTDAHRMHAEWGEVSAEVAAFLNKVHAAGGRIIAAGTTSLRLLESAVDEDGLIQPFQGETSIFMTPGFRFRAVDILLTNFHLPRSTLFMLVCAFAGLETMRRAYAHAIAASYRFYSYGDACLLFRATRNTSTGAAL

SEQ ID NO: 64170 - protein, 367 aa, Beijerinckia sp.
  REGION 1..367: note = tr|A0A1H4QQY6|A0A1H4QQY6_9RHIZ S-adenosylmethionine:tRNA ribosyltransferase-isomerase; OS = Beijerinckia sp. 28-YEA-48 OX=1882748 GN=queA PE=3 SV=1
MRVDLFDFDLPEDRIALRPAEPRDSARMLVVEPDAPLRDHIVGDLPTFLRPGDVVVVNDTKVIPARLSGVRVRGEAVARIEATLHKREGDSRWRAFVRPAKKLNVGERIRFGDSSESMACLLASLDAEVIEKGEGGEALLEFALTGAALDDAIVNLGSMPLPPYIASKRGEDTHDASDYQTLFARESGAVAAPTAGLHFTPELVASLEARGVAIHKVTLHVGAGTFLPMKVDNTDEHRMHAEFGVISPEVADALNRARRAGGRLLAIGTTSLRILETAVDEQGVIHPIAKDTSIFITPGYRFRAIDMLLTNFHLPRSTLFMLVSAFGGLTAMKAAYAHAIAKDYRFYSYGDCCLLTRAADPTKTMDS

SEQ ID NO: 64171 - protein, 353 aa, unidentified
  source 1..353: note = Beijerinckiaceae bacterium
  REGION 1..353: note = tr|A0A5E4NYY6|A0A5E4NYY6_9RHIZ S-adenosylmethionine:tRNA ribosyltransferase-isomerase; OS = Beijerinckiaceae bacterium RH AL1 OX=2572036 GN=queA; PE = 3 SV=1
MRVDLFDFTLPPDRIALRPAEPRESARLLDIAPDAPLADRRIADLPTLLRPGDVLVVNDTRVIPARLSGLRRRAGTEARIEATLIRRTAPDTWRAFLKPAKKVADGEAIAFGRDDDALDAVCLEHVGEGEVALRFSCAGAAIDDALARHGTMPLPPYIAGKRAVDAQDDADYQTIFAREPGAVAAPTASLHFTPALLDAIRARSVEIATLTLHVGAGTFLPVKAEDTDDHHMHAEWGTIDAATAALLNEARAKGGRLVAAGTTSLRLLESAAREDGTLQPFHGETSIFIAPGYRFRAVDCLLTNFHLPRSTLFMLVAAFAGLERMQAAYAHAIAAHYRFYSYGDACFLHRAPA

SEQ ID NO: 64172 - protein, 358 aa, unidentified
  source 1..358: note = Beijerinckiaceae bacterium
  REGION 1..358: note = tr|A0A522GHG3|A0A522GHG3_9RHIZ S-adenosylmethionine:tRNA ribosyltransferase-isomerase; OS = Beijerinckiaceae bacterium OX=1978229 GN=queA PE=3 SV=1
MRVDLFDFDLPPERIALRPVVPRDASRMLVVDPRATQPLEDRKIRDLPSLLQPGDVLVVNDTRVIPARLEAMRKRGDHSAKIEILLHRRETENVWRAFARPAKKLKPGDTVHFIKSGAEPIEAEVCGEHSDGEVRLAFALSGTALDQAIETLGEMPLPPYIAGKRATDARDSEDYQTLFAKRSGAVAAPTASLHFTPELVEAIRARGVAIAPVTLHVGAGTFLPVKATDTNAHRMHAEWGMLSEEAAAAMNTARVNGGRIVSAGTTPLRLIETAAQANGMIQPFSGETDIFITPGYRFKGVDLLLTNFHLPKSTLFMLVSAFSGLETMRAAYRHAIDESYRFYSYGDACLLHRASTQP

SEQ ID NO: 64173 - protein, 349 aa, Belliella baltica
  REGION 1..349: note = tr|I3Z0E3|I3Z0E3_BELBD S-adenosylmethionine:tRNA ribosyltransferase-isomerase OS=Belliella baltica (strain DSM 15883 / CIP 108006 / LMG 21964 / BA134) OX=866536 GN=q ueA PE=3 SV=1
MKLSDFKFEVPKKLIALHPADNRDESRLMVVHRKTGEIEHRLFKDITDYFGEGDVFVMNNTKVFPARLYGNKEKTGAKIEVFLLRELNQELKLWDVLVDPARKIRVGNKLYFGDSDLVAEVIDNTTSRGRTIRFLFDGSEEEFYKTIDTLGETPILKEFIDRKVEPEDRERYQTIFAEHVGAVAAPTAGLHFTPHLLRRLELKGVEVSPITLHVGLGTFRQVDVEDLTKHKMDSENYDIPQKTVDLVNESLDNKKRVVAVGTTVLKTIESSVTANNRLKVSSGWTDKFIIPPYDFKIANTLITNFHLPESTLLMTASAFGGYDLIMKAYKEAIKEKYRFFSYGDAMLIL

SEQ ID NO: 64174 - protein, 408 aa, Belliella baltica
  REGION 1..408: note = tr|I3Z8Q6|I3Z8Q6_BELBD S-adenosylmethionine:tRNA ribosyltransferase-isomerase OS=Belliella baltica (strain DSM 15883 / CIP 108006 / LMG 21964 / BA134) OX=866536 GN=q ueA PE=3 SV=1
MNLSTAIAELKLSDYEYTLPEEKIAKFPLEKRDASKLLHFKDGKIEHLQFAQLPDLVPVGSLMVFNNTKVIPARLIFQRSTGAKIEIFLLKPIAPTTVINEVMIKTETVSWECMIGNLKKWKTDEILSGEVIYQNKIIKLNASLIDQENRIVKFTWDAEVPFVSIVEASGEVPLPPYLNRKPTEEDRPRYQTVYSKNEGAVAAPTAGLHFTDKVLQKLAANKVKEEFLTLHVGAGTFQPIKTETITAHNMHSEQVVVSISTIQNITEHTQQLIAVGTTSMRSLESLYWFGVKLLREEGHEFLIPKLYPYQDFDQLPTRKESFETILTFMKKNNLSEITGSTEIFIMPGYNFKVCDGLVTNFHQPGSTLILLIAAFTKKYWKQIYKEALENDYRFLSYGDSSLLWCEKG

SEQ ID NO: 64175 - protein, 405 aa, unidentified
  source 1..405: note = Belliella buryatensis
  REGION 1..405: note = tr|A0A239CZR5|A0A239CZR5_9BACT S-adenosylmethionine:tRNA ribosyltransferase-isomerase; OS = Belliella buryatensis OX=1500549 GN=queA PE=3 SV=1
MSSNTLDQLKLSDYEYTLPEEKIAKFPLEKRDASKLLQYKNGLINHLAFSQLPDLIPSGSLMVFNNTKVIPARLIFQRETGAKVEIFLLKPLLPTTVINEVMINTVSVTWETMIGNQKKWKDGEVLSGEVIYQGTRIQLKAHLEDRARRIVKFTWTGNAPFVSIVEASGEVPLPPYLNRKATEVDKPRYQTVYSKKEGAVAAPTAGLHFTEEVLGKLSRNEVKEAFLTLHVGAGTFQPIKAEKITDHAMHSEQVVVSKSTITSLANHNDKLIAVGTTSMRSLESLYWYGVKLINEGHVPFLIPKLYPYEFHMPLPSRQESFAAILKMMILENLDEITGSTEIFIMPGYDFKVCDGLVTNFHQPGSTLILLVAAFTNGNWKEIYKQALEMEYRFLSYGDSSLLWKS

SEQ ID NO: 64176 - protein, 349 aa, unidentified
  source 1..349: note = Belliella buryatensis
  REGION 1..349: note = tr|A0A239GA39|A0A239GA39_9BACT S-adenosylmethionine:tRNA ribosyltransferase-isomerase; OS = Belliella buryatensis OX=1500549 GN=queA PE=3 SV=1
MKLSDFKFEVPRKLISLYPAENRDESRLMVVHKKTGEIEHRMFKEITDYFGEGDVFVMNNTKVFPARLYGNKEKTGAKIEVFLLRELNQELRLWDVLVDPARKIRVGNKLYFGDSDLVAEVIDNTTSRGRTIRFLFDGTDEEFYKTIDTLGETPLLKEFIDRKIEPEDRERYQTIFAQHVGAVAAPTAGLHFTPHLLKRLELKGVEVSPITLHVGLGTFRQVDVEDLTKHKMDSENYDIPQRTVDLVNDALDNKKRVVAVGTTTLKTVESSVTANNRLKVSDGWTDKFIIPPYDFKIANALITNFHLPESTLLMTASAFGGYDLIMKAYQEAIKEKYRFFSYGDAMLII

SEQ ID NO: 64177 - protein, 405 aa, Belliella pelovolcani
  REGION 1..405: note = tr|A0A1N7MQ65|A0A1N7MQ65_9BACT S-adenosylmethionine:tRNA ribosyltransferase-isomerase; OS = Belliella pelovolcani OX=529505 GN=queA PE=3 SV=1
MSSNTLDQLKLSDYEYTLPEEKIAKFPLEKRDASKLLHYKDGLINHLAFSQLPDLIPSGSLMVFNNTKVIPARLIFQRETGAKVEIFLLKPLLPTTVINEVMINTESVTWETMIGNQKKWKDGEILSGEVIYQGTRIQLKAHLEDRTNRIVKFTWTGNAPFVSIVEASGEVPLPPYLNRKATEEDKPRYQTVYSKKEGAVAAPTAGLHFTEEVLAKLADKNVKEEFLTLHVGAGTFQPIKAEKITEHAMHSEQVVVTKSTIATLSNHSEKLIAVGTTSMRSLESLYWYGVKLIQEGHVPFLIPKLYPYQSHNMLPSRQESFAAILKMMESEHLEEITGSTEIFIMPSYDFKVCDGLVTNFHQPGSTLILLVAAFTNGGWKEIYDQALKMEYRFLSYGDSSLLWRS

SEQ ID NO: 64178 - protein, 349 aa, Belliella pelovolcani
  REGION 1..349: note = tr|A0A1N7PQ72|A0A1N7PQ72_9BACT S-adenosylmethionine:tRNA ribosyltransferase-isomerase; OS = Belliella pelovolcani OX=529505 GN=queA PE=3 SV=1
MKLSDFKFEVPKKLISLYPAENRDESRLMVVHKKTGEIEHRMFKEITDYFGDGDVFVMNNTKVFPARLYGNKEKTGAKIEVFLLRELNQELRLWDVLVDPARKIRVGNKLYFGDSDLVAEVIDNTTSRGRTIRFLFDGTDEEFYKTIDTLGETPLLKEYIDRKIEPEDRERYQTIFAEHVGAVAAPTAGLHFTPHLLKRLELKGVEVSPITLHVGLGTFRQVDVEDLTKHKMDSENYDIPQRTVDLVNEALDNKKRVVAVGTTTLKTIESSVTANNRLKVSNGWTDKFIIPPYDFKIANALITNFHLPESTLLMTASAFGGYDLVMKAYQEAIKEKYRFFSYGDAMLII

SEQ ID NO: 64179 - protein, 339 aa, Bellilinea caldifistulae
  REGION 1..339: note = tr|A0A0P6XPX8|A0A0P6XPX8_9CHLR S-adenosylmethionine:tRNA ribosyltransferase-isomerase; OS = Bellilinea caldifistulae OX=360411 GN=queA PE=3 SV=1
MRTSDFDYYLPPERIAQHPIEPRHNARLLVYDRKTGKMDHRIFYDLPEYLNAGDVLVINQTRVIPARIFGFKPSGGKVEILLLKRESDLVWEALVGGKKIREGTILQLVEGPLAVVEQVLDGARRLIRFETEIEPYLEKQGQMPLPPYIHEKLEDPERYQTVFARQPGSAAAPTAGLHFTPELIQLLEQKGILFGRVTLHVGLDTFAPVTEEDPRQHAIHSEWCELDEETASLINSARAKGGRIIAVGTTSVRTLESAGVNAQSGQVVAPFHGSTRLYILPGFTFKAVDAMITNFHLPRSTLLMLVSAFAGREQILRVYEEAIRREYRFYSFGDAMLIL

SEQ ID NO: 64180 - protein, 348 aa, Belnapia rosea
  REGION 1..348: note = tr|A0A1G6KLG3|A0A1G6KLG3_9PROT S-adenosylmethionine:tRNA ribosyltransferase-isomerase; OS = Belnapia rosea OX=938405 GN=queA PE=3 SV=1
MRTEDFDFDLPERLIAQAPARPRDAARLLVVGRDGAGDRGMRDLPGLLRPGDIMVVNDTRVIPARLRGQRGDAAVEIMLNRAEGGGLWEALVRNARRLRPGDTVAIEGAPALAPRVVERREGGMVLLDFGPDQAALAMALEAAGEVPLPPYIARPEGPRPEDREDYQTIFAARPGAVAAPTASLHFTPALLAAIAARGVGQAVVTLHVGAGTFLPMRAEDPREHKLHPEWGEVTEQAAAAINAARAAGGRVVAIGTTALRLLETAAQADGRIAPFRGLTDIFLLPGHRFRGADLLLTNFHLPRSTLFMLVSAFAGTARMRAAYAHAIAEGYRFYSYGDGSLLSREDAA

SEQ ID NO: 64181 - protein, 345 aa, Bergeriella denitrificans
  REGION 1..345: note = tr|A0A378UDJ6|A0A378UDJ6_BERDE S-adenosylmethionine:tRNA ribosyltransferase-isomerase; OS = Bergeriella denitrificans OX=494 GN=queA PE=3 SV=1
MIMDISDFDFTLPDALIAQHPPEERGSSRLLTALPDAPLQDGTFADIANLIASGDVLVFNNTKVMKARLFGQKASGGKIEALIERVSDPHTALAHIRSSKSPKPGTELIFDGGIRAIMTERAGELFCLQFQDSRNVYELLEQYGKLPLPPYIERAADDSDDSRYQTVYAKHQGAVAAPTAGLHFTDGLLAALRAKGVHTVEVTLHVGAGTFQPVRVDNIAEHKMHSEWFDVPPETVALIEAAHARGNKVWAVGTTSMRALESAARSGRLQAGQGDTDIFITPGYRFRVADRLITNFHLPKSTLLMLVSAFSGMEHIRRVYRHAVEQQYRFFSYGDAMVLGRQETE

SEQ ID NO: 64182 - protein, 349 aa, Bergeyella zoohelcum
  REGION 1..349: note = tr|A0A380ZVH0|A0A380ZVH0_9FLAO S-adenosylmethionine:tRNA ribosyltransferase-isomerase; OS = Bergeyella zoohelcum OX=1015 GN=queA PE=3 SV=1
MKTSDFNFHLPDELLAEHPSEHRDEARLMVLNRKNETIEHRLFKDVIDYFDDGDLFVFNNTKVFPARLYGNKEKTGAKIEVFLLRELDAETRVWDVLVDPARKIRIGNKLFFTEDESLVAEVIDNTTSRGRTLRFLFDGSYEEFRAKLKELGETPLPKYIKRAVEPEDAERYQTIYAKVEGAVAAPTAGLHFSKHLMKRLEIKGIDFAEVTLHVGLGTFNPIEVEDLSKHKMESEEAIIDLVNAEKINAASEAGKRICAVGTTTMRALETSVSSNRKISAYSGWTNKFIYPPHEFGVANAMITNFHTPKSTLIMMIAAFAGKDFVMHAYEEAIKEKYKFYSYGDAMLIL

SEQ ID NO: 64183 - protein, 349 aa, Bergeyella zoohelcum; identical to SEQ ID NO: 64182
  REGION 1..349: note = tr|K1LRH6|K1LRH6_9FLAO S-adenosylmethionine:tRNA ribosyltransferase-isomerase OS=Bergeyella zoohelcum ATCC 43767 OX=883096 GN=queA PE=3 SV=1

SEQ ID NO: 64184 - protein, 353 aa, Bermanella marisrubri
  REGION 1..353: note = tr|Q1MY63|Q1MY63_9GAMM S-adenosylmethionine:tRNA ribosyltransferase-isomerase OS=Bermanella marisrubri; OX = 207949 GN=queA PE=3 SV=1
MKTSDFHFELPQELIAQYPPKERTSSRLLCVNSESGRADIQHKVFKDILAEVQPGDLMVFNNTRVIPARLFGEKESGGKLEVLIERMTGTDTALVHMKSSRSPKPGSTITLEGLKVSVEGRQDALFELKFHLAPDQDLVHWLEQVGHMPLPPYMEREDEDSDRERYQTVYNEKPGAVAAPTAGLHFDDALLNALKDKGVGIAFVTLHVGAGTFQPVKVDDVNEHKMHSEYLEVSEETCEAIRKTKALGKKVIAVGTTSVRSLETASQSGEIQPYQGDTEIFIYPGYQFKTVDRLLTNFHLPESTLIMLVSAFVGRGPILNAYDEAVREQYRFFSYGDAMLLDKNPNAEALWEK

SEQ ID NO: 64185 - protein, 355 aa, Bermanella sp.
  REGION 1..355: note = tr|A0A1Y5DML0|A0A1Y5DML0_9GAMM S-adenosylmethionine:tRNA ribosyltransferase-isomerase; OS = Bermanella sp. 47_1433_sub80_T6 OX=1856278 GN=queA PE=3; SV = 1
MKTSDFTFELPDELIARYPLEARSSSRLLCLRDSQLEHKKFTDLLELVEPGDLMVFNNTRVIPARLFGQKQSGGKLEALIERVTGDNTALSHIRCSRSPKVGTTIILEGMEVEISGRQDALFELTFKLSPGQNLVNWLEEVGHMPLPPYMDREDELSDRERYQTVYNKTPGAVAAPTAGLHFDSELMAALTNKGVNFAYVTLHVGAGTFQPVKVDDVLNHEMHSEYLEVEQDTVDAINATRANGKRVVAVGTTSVRSLESASMVTEQNPKGELQPFMGDTQIFIYPGYEFKNVDALVTNFHLPESTLIMLVSAFAGRGPVLNAYTEAVKNDYRFFSYGDAMFLTRNLAAKDLWEQ

SEQ ID NO: 64186 - protein, 355 aa, Bermanella sp.
  REGION 1..355: note = tr|A0A2D4RZF7|A0A2D4RZF7_9GAMM S-adenosylmethionine:tRNA ribosyltransferase-isomerase; OS = Bermanella sp. OX=2024825 GN=queA PE=3 SV=1
MKTSDFTFDLPDELIARYPQEVRSSSRLLCLQDSELSHQQFTDLLDLVEPGDLMVFNNTRVIPARLFGQKESGGKLEALIERVTSDTTALSHIKCSRAPKADTIILLEGLEVEVTGRQDALFELRFKLPEGTTLVDWLEQVGHMPLPPYMEREDELSDRERYQTVYNEKPGAVAAPTAGLHFDDAFLGALKDKGVNMAFVTLHVGAGTFQPVKVDDVHSHKMHSEWLEVGQETCDAIEQTKAAGKRVIAVGTTSVRSLESASHTPEALAAGKILPYTGETEIFIFPGFEFKTVDALVTNFHLPESTLIMLVSAFAGRGPVLNAYHEAVSNHYRFFSYGDAMFLTKNLAAKDLWDQ

SEQ ID NO: 64187 - protein, 419 aa, unidentified
  source 1..419: note = Bernardetia litoralis
  REGION 1..419: note = tr|I4AHY5|I4AHY5_BERLS S-adenosylmethionine:tRNA ribosyltransferase-isomerase OS=Bernardetia litoralis (strain ATCC 23117 / DSM 6794 / NBRC 15988 / NCIMB 1366 / Sio- 4) OX=880071 GN=queA PE=3 SV=1
MEKINLEDYTYNLPNERIAQNPLEKRDTSKFLVYKKGAISHHHFTEITDFLNEDYTLYFNNTKVIPARLLFEKKATQRGQNGKGATIEIFLLHPILPTADVSEAMLTTGKCTWKCVVGNLKRWKEGLILERELEIDNQTILIQAKIADRKELLIELEWKNINSDKNNTEIPFVDIVGKLGVMPLPPYIKRNAEKKDAATYQTIYSKAAGAVAAPTAGLHFTETVLQNLAKKNIQTNELTLHVGAGTFQPVKKENAGDVVTHTMHCEQIVVTKENIKSIIDSKKVASVGTTSMRTLESLYWYGTKILLKQDTAFFVEKLEPYSYDAHSKLPSKKESFEAILKYMDDSNQDKLTGETEIFILPSYTFHVCDALVTNFHMPETTLILLVAAFIGNDWKKIYQTALDNDYRFLSYGDSSLLFL

SEQ ID NO: 64188 - protein, 320 aa, unidentified
  source 1..320: note = Bernardetia litoralis
  REGION 1..320: note = tr|I4AQK3|I4AQK3_BERLS S-adenosylmethionine:tRNA ribosyltransferase-isomerase OS=Bernardetia litoralis (strain ATCC 23117 / DSM 6794 / NBRC 15988 / NCIMB 1366 / Sio- 4) OX=880071 GN=Fleli_3935 PE=3 SV=1
MVVHRDTGVIEHKMFKDVLNYFGEGDKMVVNDTMVFPARLYGYKEKTNAKIEVFLLRELNPTSHLWDVLVDPARKIRVGNKLFFGEGELVAEVIDNTTSRGRTIRFLYDGEPEEFYKTLEELGETPLPREIGREAEESDKERYQTIFASQKGAVAAPTAGLHFTPQLQKKLQLQGTSFHPITLHLGLGMFRQVEVEDLTKHKMDSENFDVPQGTVTAVNEAIDAKKRICAVGTTSLRALESSVSANEHLKPNGGWTDKFIFPPYEFKICNALISNFHYPQSTLLMMNCAFGGYDLVMEAYELAIKEKYRFFSYGDAMLII

SEQ ID NO: 64189 - protein, 366 aa, unidentified
  source 1..366: note = Unknown
  REGION 1..366: note = tr|A0A0N1ARB3|A0A0N1ARB3_9PROT S-adenosylmethionine:tRNA ribosyltransferase-isomerase; OS = beta proteobacterium AAP51 OX=1523421 GN=queA PE=3 SV=1
MSPSAPPSPASPPAPSPAYTLHDFDFVLPPELIAQHPAAERSASRLLDGRQPGQPPLDRVFRELPGLLQAGDLLVFNDTRVIKARLLGEKPTGGAVEALVERILPDTGTHEVWAHLRASKSPKAGSVVRFADAFDAEVLGRAGPEEALFHLRFPADPLQLLERHGHVPLPPYITHDDTAEDAARYQTVFAAHPGAVAAPTAALHFDDAVLAELAARGVQRAAITLHVGAGTFQPVRVENIAEHRMHSEWFEVNEATVAAINATKAAGGRVLAVGTTTLRALESAARAGGGALQPYRGDTDIFITPGFDFRVVDLMLTNFHLPKSTLMMLVSAFAGHAHIQALYRHAVESRYRFFSYGDSMLLQLAR

SEQ ID NO: 64190 - protein, 348 aa, unidentified
  source 1..348: note = Unknown
  REGION 1..348: note = tr|M1SXU5|M1SXU5_9PROT S-adenosylmethionine:tRNA ribosyltransferase-isomerase OS=beta proteobacterium CB; OX = 543913 GN=queA PE=3 SV=1
MQLSDFNYDLPPQLIAQHPLANRTDSRLLEVKAEGGDIAQLIDRKFPDILNLIKPGDLLVFNDTKVIPARLHGKKETGGNVELLIERISGDQQAWVQIRASKVPKTGSIVHVHNKAGETFPVEMLGYDGRFYEVRFPENVFSLLERFGELPLPPYIEHQPDQEDANRYQTVVAKNPGAVAAPTAGLHFDEAILKKLNELGVKQAVVTLHVGAGTFTPVREEDLSKHKMHYEWFSVPAETIEAIKATHKAGSRVIAVGTTSLRALESQAQTQQTSGETNLFITPGYTFKTVDCLLTNFHLPKSTLLMLVSAFAGVDNIRNAYQHAIQNEYRFFSYGDAMFLSRPNQTSS

SEQ ID NO: 64191 - protein, 329 aa, unidentified
  source 1..329: note = Betaproteobacteria bacterium
  REGION 1..329: note = tr|A0A1F4CQA9|A0A1F4CQA9_9PROT S-adenosylmethionine:tRNA ribosyltransferase-isomerase; OS = Betaproteobacteria bacterium RIFCSPLOWO2_12_FULL_68_19; OX = 1797504 GN=queA PE =3 SV=1
MRVSEFDYELPAELIAQHPAAQRSASRLLHLDAASGSLQDLKFDDLSNFLDQRDVLVLNDTRVVKARLAGRKASGGKIELFVERALGSREALALIRASHPPSAGTKLEIDAVRVRVLAREGELYRVRFSQDIEAVLERHGAVPLPPYIRHAPRREDAERYQTVYAAVPGAVAAPTAGLHFDRGMLKAIEARGTRLAKITLHVGFGTFQPVRVDEVEAHRMQREHYAIPDETVKLIQARRVLAVGTTSLRALETFALTGEREGETELFVYPGFQFQVVERLLTNFHLPKSTLLMLACAFAGRDNIFKAYRHAIERRYRFFSYGDAMLIER

SEQ ID NO: 64192 - protein, 328 aa, unidentified
  source 1..328: note = Betaproteobacteria bacterium
  REGION 1..328: note = tr|A0A536Y168|A0A536Y168_9PROT S-adenosylmethionine:tRNA ribosyltransferase-isomerase; OS = Betaproteobacteria bacterium OX=1891241 GN=queA PE=3; SV = 1
MRVSEFDYELPAELIAQHPAPQRSASRLLHLEPGGRLHDLAFNDLPQLVDERDTLVLNDTRVIKARLFGRKPSGGQVEVLVERIVAPRIALALMRAGHAPKAGTEVLIGDVQASVESREGELYRVRFSEDVERVLERHGSVPLPPYITHPPGGEDLERYQTVYAARPGAVAAPTAGLHFDEQMLDRLRSRGARIAMLTLHVGFGTFQPVRTDSVEAHRMHRERYSVPDETLQAIAGRRVLAVGTTSLRALEAAAATGETSGETDLFIYPGYEFQVVDRLLTNFHLPKSTLLMLACAFAGRDHILRAYQHAVEQRYRFFSYGDAMLIER

SEQ ID NO: 64193 - protein, 350 aa, unidentified
  source 1..350: note = Bhargavaea beijingensis
  REGION 1..350: note = tr|A0A1G7CK77|A0A1G7CK77_9BACL S-adenosylmethionine:tRNA ribosyltransferase-isomerase; OS = Bhargavaea beijingensis OX=426756 GN=queA PE=3 SV=1
MNVEDFDFHLPEELIAQTPLKDRTASRLLVVDRRTGSFEDRKFSDILEYFEPGDCLVLNDTKVLPARLMGIKEETGATIEVLLLTDKGEDEWETLVKPAKRVKPGTVVTFGDGLLKAECTGVGDHGGRTFKFSYEGIFYEVLDRLGEMPLPPYIHEKLDDRDRYQTVFAKERGSAAAPTAGLHFTEELLERIRERGVEIVFITLHVGLGTFRPVSVDTIESHEMHSEYYSVSEEAASAIRKTKEAGGRVIAVGTTSTRTLETIASENNGNIVAAGGWTSIFIYPGYEYKAIDGLITNFHLPKSTLIMLVSAFSSREIILNAYRHAVDGRYRFFSFGDAMFLKPPKKGRIK

SEQ ID NO: 64194 - protein, 350 aa, Bhargavaea cecembensis
  REGION 1..350: note = tr|A0A163GC58|A0A163GC58_9BACL S-adenosylmethionine:tRNA ribosyltransferase-isomerase; OS = Bhargavaea cecembensis OX=394098 GN=queA PE=3 SV=1
MNVEDFDFHLPEELIAQTPLKERTASRLLVVDRETGNFEDRKFSDILGYFEPGDCLVLNDTKVLPARLLGTKEETGATIEVLLLTDKGGDEWETLVKPAKRVKPGTVVTFGDGLLKAECTGLGDHGGRTFKFTYEGIFYEVLDRLGEMPLPPYIHEKLDDRDRYQTVFAKERGSAAAPTAGLHFTEELLGKIRDKGVEIVFITLHVGLGTFRPVSVDTIESHEMHSEYYSVSEEAAAAIRKTKEAGGRVIAVGTTSTRTLETIATEHGGEIVAAGGWTSIFIYPGYEYKAIDGLITNFHLPKSTLIMLVSAFSSRDIILNAYRHAVDERYRFFSFGDAMFLKPPKKGRSE

SEQ ID NO: 64195 - protein, 351 aa, Bhargavaea cecembensis
  REGION 1..351: note = tr|M7NW15|M7NW15_9BACL S-adenosylmethionine:tRNA ribosyltransferase-isomerase OS=Bhargavaea cecembensis DSE10 OX=1235279 GN=queA PE=3 SV=1
MMNVEDFDFHLPEDLIAQTPLKERTASRLLVVDRETGGLEDRKFSDILGYFEPGDCLVLNDTKVLPARLLGTKEETGATIEVLLLTDKGGDEWETLVKPAKRVKPGTVVTFGDGLLKAECTGVGDHGGRTFKFSYEGIFYEVLDRLGEMPLPPYIHEKLDDRDRYQTVFAKERGSAAAPTAGLHFTEELLAEIREKGVEIVFITLHVGLGTFRPVSVDTIENHEMHSEYYSVSEEAAATIRKTKEAGGRVIAVGTTSTRTLETIASEHGGEVVAAGGWTSIFIFPGYEYKAIDGLITNFHLPKSTLIMLVSAFSSREIILNAYRHAVDGRYRFFSFGDAMFLKPPKKGRSK

SEQ ID NO: 64196 - protein, 350 aa, unidentified
  source 1..350: note = Bhargavaea ginsengi
  REGION 1..350: note = tr|A0A1H6X4R0|A0A1H6X4R0_9BACL S-adenosylmethionine:tRNA ribosyltransferase-isomerase; OS = Bhargavaea ginsengi OX=426757 GN=queA PE=3 SV=1
MNVEDFDFHLPEELIAQTPLKDRTASRLLVVDRETGSMDDRNFSDILEYFELGDCLVLNDTKVLPARLMGTKEETGATIEVLLLTDKGGDEWETLVKPAKRVKPGTVVTFGDGLLKAECTGVGDHGGRTFKFSYEGIFYEVLDRLGEMPLPPYIHEKLDDRDRYQTVFAKERGSAAAPTAGLHFTEELLDRIREKGVKIVFITLHVGLGTFRPVSVDTIESHEMHSEYYSVSEESAAAIRKTKETGGRVIAVGTTSTRTLETIASENGGEIVAAGGWTSIFIYPGYEYKAIDGLITNFHLPKSTLIMLVSAFSSREIILNAYRHAVDGRYRFFSFGDAMFLMPPKKGRNE

SEQ ID NO: 64197 - protein, 362 aa, Bibersteinia trehalosi
  REGION 1..362: note = tr|A0A426FJ11|A0A426FJ11_BIBTR S-adenosylmethionine:tRNA ribosyltransferase-isomerase; OS = Bibersteinia trehalosi OX=47735 GN=queA PE=3 SV=1
MLVSDFHFDLPDNLIARYPTQERTASRLLYLNGETGEYQDQQFADLLQHIQQGDLLIFNNTRVIPARLYGKKASGGKLEVLVERVLDEHRCLAHIRASKAPKEGSEIILGEDKLGEGNGLHAVMTARHDALFELHFNANVPLFDLLQQAGHMPLPPYIDRPDEDTDQERYQTVYSKVLGAVAAPTAGLHFDNAMLEKLREKGVNTAFVTLHVGAGTFQPVRVEKLADHKMHSEYAEVSQEVVDLILKTKAAGKRVICVGTTSVRSIESAAQAAEKEGKLIAPFYSDTAIFIHPGKKFRIVDALVTNFHLPESTLIMLVSAFAGYKNCMNAYAHAVKAQYRFFSYGDAMFITQNPHAEKDIPA

SEQ ID NO: 64198 - protein, 374 aa, Bibersteinia trehalosi
  REGION 1..374: note = tr|A0A4V7I9F3|A0A4V7I9F3_BIBTR S-adenosylmethionine:tRNA ribosyltransferase-isomerase; OS = Bibersteinia trehalosi USDA-ARS-USMARC-188 OX=1263829; GN = queA PE=3 SV=1
MFFLYFFTKELIVLVSDFHFDLPDNLIARYPTQERTASRLLYLNGETGEYQDQQFADLLQHIQQGDLLIFNNTRVIPARLYGKKASGGKLEVLVERVLDEHRCLAHIRASKAPKEGSEIILGEDKLGEGNGLHAVMTARHDALFELHFNANAPLFDLLQQAGHMPLPPYIDRPDEDTDQERYQTVYSKVLGAVAAPTAGLHFDNAMLEKLREKGVNTAFVTLHVGAGTFQPVRVEKLADHKMHSEYAEVSQEVVDLILKTKAAGKRVICVGTTSVRSIESAAQAAEKEGKLIAPFYSDTAIFIHPGKKFRIVDALVTNFHLPESTLIMLVSAFAGYKNCMNAYAHAVKAQYRFFSYGDAMFITQNPHAEKDIPA

SEQ ID NO: 64199 - protein, 365 aa, Bilophila sp.
  REGION 1..365: note = tr|G1V2L5|G1V2L5_9DELT S-adenosylmethionine:tRNA ribosyltransferase-isomerase OS=Bilophila sp. 4_1_30; OX = 693988 GN=queA PE=3 SV=1
MYSIQQSEADFLLSSYRYELPPERIAQHPGERGASRLLVLDRETGKRIHSHFSHLLEYLPKGTLLIANNSRVVPARMIGQRPSGGKMEFLLLTPMPLLEQHGEGDGWHCAEADGLIKPAKNARIGDHLVFGDDLRVEVLAKGEFGRHRVRLHWTGDIRALFESRGHLPLPPYIKREDTKDDRGTYQTVYARDDKAGSVAAPTAGLHFTPELRAQMASAGVEWAEVTLHVGYGTFSPVRCEDIREHVMHEEFVEVPQATVDAIGKAKAEGRPVIAVGTTSARTLEGVAGAHGGELTAHQGWINCFIWPGYRFHVLDGLITNFHLPESTLLMFVSALTGRERMLETYTEAVKMEYRFFSYGDAMLIR

SEQ ID NO: 64200 - protein, 365 aa, Bilophila wadsworthia
  REGION 1..365: note = tr|E5Y7Z7|E5Y7Z7_BILWA S-adenosylmethionine:tRNA ribosyltransferase-isomerase OS=Bilophila wadsworthia 3_1_6 OX=563192 GN=queA PE=3 SV=1
MYSIQQSEADFLLSSYRYELPPERIAQHPGERGASRLLVLDRETGKRIHSHFSHLLEYLPKGTLLIANNSRVVPARMIGQRPSGGKMEFLLLTPMPLLEQHGEGDGWHCAEADGLIKPAKNARIGDYLVFGDDLRVEVLAKGEFGRHRVRLHWTGDIRALFESRGHLPLPPYIKREDTKDDRGTYQTVYARDDKAGSVAAPTAGLHFTPELRAQMASAGVEWAEVTLHVGYGTFSPVRCEDIREHVMHEEFVEVPQATVDAIGKAKAEGRPVIAVGTTSARTLEGVAGAHGGELTAHQGWINCFIWPGYRFHVLDGLITNFHLPESTLLMLVSALTGRERMLETYTEAVKMEYRFFSYGDAMLIR

SEQ ID NO: 64201 - protein, 357 aa, Biostraticola sp.
  REGION 1..357: note = tr|A0A4U2UJW6|A0A4U2UJW6_9ENTR S-adenosylmethionine:tRNA ribosyltransferase-isomerase; OS = Biostraticola sp. BGMRC 2031 OX=2575567 GN=queA PE=3; SV = 1
MRVADFSFDLPEQLIARYPRTQRSACRLLGLDGPTGALSHGVFTDLLDQLAAGDLLVFNNTRVIPARLYGRKASGGKIEVLVDRILDDHRVLALVRASKAPKPGAVLLLGDDESLSATMLARHDQLFELGFDDPRDVLTLLNAAGHMPLPPYIDRPDDAADRELYQTVYGERPGAVAAPTAGLHFDQPLLDALRDKGIEMAFVTLHVGAGTFKPVRVDNVEEHVMHSEYAEVPQSVVDAVLACKQRGNRVVAVGTTSVRSLESAARAAGDQGISPFFGDTDIFIFPGYRFRIVDALITNFHLPESTLIMLVSAFAGYGHTMAAYREAVAREYRFFSYGDAMYITRNDRAGEDQVGRP

SEQ ID NO: 64202 - protein, 357 aa, Biostraticola tofi
  REGION 1..357: note = tr|A0A4R3YPR2|A0A4R3YPR2_9ENTR S-adenosylmethionine:tRNA ribosyltransferase-isomerase; OS = Biostraticola tofi OX=466109 GN=queA PE=3 SV=1
MRVADFSFDLPEELIAHYPQPERSACRLLSLDGPSGEISHNVFTDLLDKLAPGDLLVFNNTRVIPARLFGRKVSGGKIEVLVERVLDSHRVLAHVRASKAPKAGAELLLGDREDISATMLARHDALFELRINDERDVLTVLNDVGHIPLPPYIDRPDEASDRELYQTVYSERPGAVAAPTAGLHFDQPLLDALRAKGVEMAFVTLHVGAGTFQPVRVDAIEDHVMHAEYAEVPAQVTQAVLACKQRGNRVIAVGTTSVRSLESAAQAATDSLIAPFFGDTSIFIYPGYRFRIIDALVTNFHLPESTLIMLVSAFAGYHHTMKAYQTAVAEQYRFFSYGDAMFITRNNQADKDRIGDA

SEQ ID NO: 64203 - protein, 231 aa, unidentified
  source 1..231: note = Bisgaard taxon
  REGION 1..231: note = tr|A0A3A1YML6|A0A3A1YML6_9PAST S-adenosylmethionine:tRNA ribosyltransferase-isomerase; OS = Bisgaard taxon 44 str. EEAB3T1 OX=2028574; GN = CKF59_00375 PE=3 SV=1
MVQFSINQYINSLDQDLASTQEIKLRRQNLVYRDLLDKISLKRIKELNQEAQIKELIAPREICHTINSLNLDTFSQLTLELDNHLTLITELWQFLQNLTQIDTSKFSATNQETLALIRHLTAEENNKNYSFTNHYINTSCELGTQIPLLPYTGNTEIFIHPGHKVHLVDYIITNFHLPKSTLIMLVAGFVGFKYCLSAYEHAIAHKYRFYSYGDSCFIPNLKQPQDLELLF

SEQ ID NO: 64204 - protein, 363 aa, Bisgaardia hudsonensis
  REGION 1..363: note = tr|A0A4R2N3E5|A0A4R2N3E5_9PAST S-adenosylmethionine:tRNA ribosyltransferase-isomerase; OS = Bisgaardia hudsonensis OX=109472 GN=queA PE=3 SV=1
MLLSDFYFNLPDELIARYPTPNRRASRLLQLNGENGEISHRTFSDVVDLINEGDLVIFNNTRVIPARMFGRKASGGKIEVLVERVLTDTRFLAHIRSSKAPKEKAELFLGEDKLGENNGVKMIMVARHDNLFELEIAEKTTPLLDVLQKIGHMPLPPYIDRPDEEADQERYQTVYNKVPGAVAAPTAGLHFDDELLEQLKNKGVNFAFVTLHVGAGTFQPVRVKNIENHKMHAEYVEVSQNVVDAILATKAKGKRVIAVGTTSVRSIESAALETENKGNGNLIEPYFSDTSIFIYPGKKFRIIDCLITNFHLPESTLIMLVSAFAGYSHTMNAYKSAVENHYRFFSYGDAMFITKNDNVKGLE

SEQ ID NO: 64205 - protein, 349 aa, Bizionia algoritergicola
  REGION 1..349: note = tr|A0A5D0R3Q9|A0A5D0R3Q9_9FLAO S-adenosylmethionine:tRNA ribosyltransferase-isomerase; OS = Bizionia algoritergicola OX=291187 GN=queA PE=3 SV=1
MKLSHFNFELPEELLAEYPSENRDESRLMVLNRKDQTIEHKMFKDIIDYFEEDDVMILNDTKVFPARLYGNKEKTGARIEVFLLRELNEEQRLWDVLVDPARKIRIGNKLYFGEGESLVAEVIDNTTSRGRTLRFLYDGSYRDFRVKLTELGETPLPKYIKREVEPEDEERYQTIFAKNEGAVAAPTAGLHFSRHLLKRLEIKGVKFADVTLHVGLGTFNPVEVEDLSKHKMDSEEIIIKKPTTEIINKAIKEKRRICAVGTTAMRSVESAVSSSGTLNEFDGWSNKFIFPPYDFSIANCMITNFHTPKSTLLMMASAFAGHEFIKKAYDEAVKEKYKFYSYGDAMLII

SEQ ID NO: 64206 - protein, 349 aa, Bizionia argentinensis
  REGION 1..349: note = tr|G2EDJ4|G2EDJ4_9FLAO S-adenosylmethionine:tRNA ribosyltransferase-isomerase OS=Bizionia argentinensis JUB59 OX=1046627 GN=queA PE=3 SV=1
MKLSHFHFELPEELLAEYPSENRDESRLMVLNRKEQTIEHKMFKDIIDYFDEDDVMILNDTKVFPARLYGNKEKTGARIEVFLLRELNEEQRLWDVLVDPARKIRIGNKLYFGEGESLVAEVIDNTTSRGRTLRFLYDGSYRDFRVKLTELGETPLPKYIKREVEPEDQERYQTIFAKNEGAVAAPTAGLHFSKHLLKRLEIKGVKFADVTLHVGLGTFNPVEVEDLSKHKMDSEEIIIKKPTTDIINNAIKNKRRICAVGTTAMRSVESAVSSSGTLNEFDGWSNKFIFPPYDFSIANCMITNFHTPKSTLLMMASAFAGHEFIKKAYDEAVKEKYKFYSYGDAMLII

SEQ ID NO: 64207 - protein, 349 aa, Bizionia echini
  REGION 1..349: note = tr|A0A1I4ZXG5|A0A1I4ZXG5_9FLAO S-adenosylmethionine:tRNA ribosyltransferase-isomerase; OS = Bizionia echini OX=649333 GN=queA PE=3 SV=1
MKLSHFNFELPEELLAEYPSENRDESRLMVLNRKDQTIEHKMFKDVIDYFDEDDVMILNDTKVFPARLYGNKEKTGARIEVFLLRELNEEQRLWDVLVDPARKIRIGNKLYFGEGESLVAEVIDNTTSRGRTLRFLYDGSYRDFRAKLNELGETPLPKYIKRDVEPEDQERYQTIFAKNEGAVAAPTAGLHFSKHLLKRLEIKGVKFAEVTLHVGLGTFNPVEVEDLSKHKMDSEEIIIKKPAVDTINTALKNKKRVCAVGTTAMRSVESSVSSSGTLNEFDGWSNKFIFPPYDFSIANCMITNFHTPKSTLLMMASAFAGHDFIKRAYEEAVKEKYKFYSYGDAMLII

SEQ ID NO: 64208 - protein, 349 aa, Bizionia myxarmorum
  REGION 1..349: note = tr|A0A5D0R9R6|A0A5D0R9R6_9FLAO S-adenosylmethionine:tRNA ribosyltransferase-isomerase; OS = Bizionia myxarmorum OX=291186 GN=queA PE=3 SV=1
MKLSHFNFELPEELLAEYPSENRDESRLMVLNRKDQTIEHKMFKDIIDYFDEDDVMILNDTKVFPARLYGNKEKTGARIEVFLLRELNEEQRLWDVLVDPARKIRIGNKLYFGEGESLVAEVIDNTTSRGRTLRFLYDGSYRDFRVKLTELGETPLPKYIKREVEPEDEERYQTIFAKNEGAVAAPTAGLHFSKHLLKRLEIKGVKFAEVTLHVGLGTFNPVEVEDLSKHKMDSEEIIIKKPTTEIINNAIKNKRRICAVGTTAMRSVESAVSSSGTLNEFDGWSNKFIFPPYDFSIANCMITNFHTPKSTLLMMASAFAGHEFIKKAYDEAVKEKYKFYSYGDAMLII

SEQ ID NO: 64209 - protein, 349 aa, Bizionia paragorgiae
  REGION 1..349: note = tr|A0A1H4CV01|A0A1H4CV01_9FLAO S-adenosylmethionine:tRNA ribosyltransferase-isomerase; OS = Bizionia paragorgiae OX=283786 GN=queA PE=3 SV=1
MKLSHFGFELPEELLAEYPSENRDESRLMVLNRKEQTIEHKMFKDIIDYFDEEDVMILNDTKVFPARLFGNKEKTGARIEVFLLRELNEEQRLWDVLVDPARKIRIGNKLYFGEDESLVAEVIDNTTSRGRTLRFLYDGSYEEFRKKLHELGETPLPKYIKREVEPEDEERYQTIFAKTEGAVAAPTAGLHFSKHLLKRLEIKGVDFAEVTLHVGLGTFNPVEVEDLSKHKMDSEEVFIGPQTVERINRALKERKRICAVGTTAMRAVESSVSSSGTLNEINGWTNKFIFPPYDFSIANCMITNFHTPKSTLLMMASAFAGHDFIKKAYEEAVKEKYKFYSYGDAMLII

SEQ ID NO: 64210 - protein, 349 aa, Bizionia saleffrena
  REGION 1..349: note = tr|A0A5D0R911|A0A5D0R911_9FLAO S-adenosylmethionine:tRNA ribosyltransferase-isomerase; OS = Bizionia saleffrena OX=291189 GN=queA PE=3 SV=1
MKLSHFGFELPEELLAEYPSENRDESRLMVLNRKEQTIEHKMFKDIIDYFDEEDVMILNDTKVFPARLFGNKEKTGARIEVFLLRELNEEQRLWDVLVDPARKIRIGNKLYFGEDESLVAEVIDNTTSRGRTLRFLYDGSYEEFRKKLHELGETPLPKYIKRDVEPQDEERYQTIFAKTEGAVAAPTAGLHFSKHLLKRLEIKGVDFAEVTLHVGLGTFNPVEVEDLSKHKMDSEEVFIGPETVERINRALKERKRICAVGTTAMRAVESAVSSSATLNEINGWTNKFIFPPYEFSIANCMITNFHTPKSTLLMMASAFGGYDFVKKAYEEAVKEKYNFYSYGDAMLII

SEQ ID NO: 64211 - protein, 68 aa, unidentified
  source 1..68: note = Blastocatellia bacterium
  REGION 1..68: note = tr|A0A3B9LN76|A0A3B9LN76_9BACT S-adenosylmethionine:tRNA ribosyltransferase-isomerase (Fragment) OS=Blastocatellia bacterium OX=2052146; GN = DCK99_01235 PE=3 SV=1
MHLSDFDYDLPEELIAQQPLERRDASRMLVLDRAEQTWQDSKFERLSDYVRAADVIVINNTRVFPARL

SEQ ID NO: 64212 - protein, 270 aa, unidentified
  source 1..270: note = Blastocatellia bacterium
  REGION 1..270: note = tr|A0A3B9LN27|A0A3B9LN27_9BACT S-adenosylmethionine:tRNA ribosyltransferase-isomerase (Fragment) OS=Blastocatellia bacterium OX=2052146; GN = DCK99_01230 PE=3 SV=1
GGRVEVLLIRELESSTWEALVRPAHRLRQGARLRFGNSNLRAEVAECADKRFRHLKFAGDMPLDEVMNELGQTPLPPYIKRPSGTTVQDDERYQTVYAREKGAIAAPTAGLHFTAPAIQSLLAREAKVVEITLHVGYGTFEPVRVDNIEQHHVASESFNISDDAARVINATRAEGGRVIAVGTTTTRALESAVNIEGRTEPGRRATELTIKPGFQFRVVDALLTNFHLPRSSLLLLVCAFAGRDFTLNAYRHAVAARFRFYSYGDCMLVF

SEQ ID NO: 64213 - protein, 359 aa, Blastochloris sp.
  REGION 1..359: note = tr|A0A348G0W8|A0A348G0W8_9RHIZ S-adenosylmethionine:tRNA ribosyltransferase-isomerase; OS = Blastochloris sp. GI OX=2233851 GN=queA PE=3 SV=1
MRLSDFDYDLPEGRIALRPAEPRDSARLLVVRPGAGLEDRVVRDLPDLLKPGDALVFNDTRVIPAELVGLRVRGEAAATVHFNLHKRIAEDRWLAFARPAKRLKVGERVRFGPASESIACELAAFDAEVAAKGEGGEVELRFALSGVALDEAIARHGHVPLPPYIAARRADDARDRADYQTVFARFDGSVAAPTAGLHFTPDLLGRLAAKGISQHFVTLHVGAGTFLPVKTEDVRAHRMHAEWGEVSAATVEALDAARAGGGRVVAVGTTSARLLETAARDGALKPFAGETDIFITPGYRFRAVDVLMSNFHLPKSTLFMLVSAFSGLETMRAAYAHAIQSGYRFYSYGDASLLFPDRA

SEQ ID NO: 64214 - protein, 359 aa, Blastochloris viridis
  REGION 1..359: note = tr|A0A182D4Q4|A0A182D4Q4_BLAVI S-adenosylmethionine:tRNA ribosyltransferase-isomerase; OS = Blastochloris viridis OX=1079 GN=queA PE=3 SV=1
MQLAEFDYDLPEGRIALRPAEPRDAARLLVVRPGSGLEDRAVRDLTELLRPGDALVFNDTKVIPAELVGVRVRSEAVATVHFNLHKRIAPDRWLAFARPAKRLKIGDHVRFGTVSEAIVCEMAGLDAEVATKGDGGEVELRFAFSGVALDEAIARHGHVPLPPYIASKRSEDARDRADYQTVFARHDGSVAAPTAGLHFTPELLARLDARGISQHFVTLHVGAGTFLPVKTEDVHAHRMHAEWGEVSAATAEALAATRARGGRIIAVGTTSARLLETAARSGTLQPFAGETDIFITPGYRFRAVDALMSNFHLPKSTLFMLVSAFSGLATMRAAYAHAIDTGYRFYSYGDASLLFPARA

SEQ ID NO: 64215 - protein, 343 aa, Blastochloris viridis
  REGION 1..343: note = tr|A0A0S4Q1G8|A0A0S4Q1G8_BLAVI S-adenosylmethionine:tRNA ribosyltransferase-isomerase; OS = Blastochloris viridis OX=1079 GN=queA PE=3 SV=1
MRPAEPRDAARLLVVRPGSGLEDRAVRDLTELLRPGDALVFNDTKVIPAELVGVRVRSEAVATVHFNLHKRIAPDRWLAFARPAKRLKIGDHVRFGTVSEAIVCEMAGLDAEVATKGDGGEVELRFAFSGVALDEAIARHGHVPLPPYIASKRSEDARDRADYQTVFARHDGSVAAPTAGLHFTPELLARLDARGISQHFVTLHVGAGTFLPVKTEDVHAHRMHAEWGEVSAATAEALAATRARGGRIIAVGTTSARLLETAARSGTLQPFAGETDIFITPGYRFRAVDALMSNFHLPKSTLFMLVSAFSGLATMRAAYAHAIDTGYRFYSYGDASLLFPARA

SEQ ID NO: 64216 - protein, 342 aa, unidentified
  source 1..342: note = Blastococcus endophyticus
  REGION 1..342: note = tr|A0A1H8WBD7|A0A1H8WBD7_9ACTN S-adenosylmethionine:tRNA ribosyltransferase-isomerase; OS = Blastococcus endophyticus OX=673521; GN = SAMN05660991_04249 PE=3 SV=1
MTARFALPPDAEATAPPERRGLARDGVRLMTVRPGGVTSAVFRDLPDLLSPGDLLVVNTSATLPARLDVRRRDGVLVPLHVSPPLDDGDWVVELRRPDNDGPDLGVEPGSTVDLPGGGTLRLLAGHPHPGRGSRLWRARPEPPAEVRTVLTGHGRPITYGYLRGRVTLADAQNVYATEPGSAENASAGRPFTDRLLVRLMARGVPVVPLVLHAGVSSPEVHEPPLPERFAVPEVTARLVTATRRAGGRVVAVGTTVTRALESATGEDGATRPAAGWTDLVLGPERPARVVTGLLTGLHAPEASHLRLLEAVAGADLVDRGYAAAVAERYLWHEYGDSMLFLP

SEQ ID NO: 64217 - protein, 342 aa, Blastococcus sp.
  REGION 1..342: note = tr|A0A366ZU29|A0A366ZU29_9ACTN S-adenosylmethionine:tRNA ribosyltransferase-isomerase; OS = Blastococcus sp. TF02A-26 OX=2250577 GN=DQ240_21795; PE = 3 SV=1
MTATFAVPPGSEATAPPERRGLTRDGVRLMTVRPDGVTHSTFRDLPDLLTPGDLLVVNTSATLPARLDVRRRDGVLVPLHVSTTLDDGDWVVELRRPDNDGPDLGAEPGCTVQLPDGRALRLVSGHPHPGRGSRLWRARAEPPVPARTVLALHGRPITYGYLRGPVRLADAQNVYATHPGSAENASAGRPFTDRLLVRLMARGVPVVPVVLHAGVSSPELHEPPAPERFAVPEVTARLVTATRAGGGRVVAVGTTVTRALESATGGDGVTRPVVGWTGLVLGPERPARAVTGLVTGLHAPEASHLRLLEAVAGPELVARGYEEAVAEHYLWHEYGDSMLLLP

SEQ ID NO: 64218 - protein, 342 aa, Blastococcus sp.
  REGION 1..342: note = tr|A0A4Y9QEC8|A0A4Y9QEC8_9ACTN S-adenosylmethionine:tRNA ribosyltransferase-isomerase; OS = Blastococcus sp. CT_GayMR16 OX=2559607 GN=E4P38_03540; PE = 3 SV=1
MTATFALPADAEATAPPEWHGLGRDEVRLMAVRPGRTTSVLFRDLPELLEPGDLVVVNTSGTLPGRLPARRADGVLVPLHWSTALDDGEWVVELRRPDNSGPDLGVEPGTVLELPGGVTMTLLAGHPDPSRPSRLWRATTTPAVPATAYLLEHGTPIGYGYLRGDFPLAAFQTVYAGEPGSAEMASAGRPFTEEVLVALMTRGVPVVPLTLHTGVSSPELHEPPSPERFAVPEVTARLVNSTRRAGGRVVAVGTTVTRALESATDDDGVTRAAHGWTDLVLGPDRPARAVTGLITGLHEPEASHLQLLEAVAGTELVTAAYDRAVAEHYLWHEFGDSMVFLP

SEQ ID NO: 64219 - protein, 343 aa, unidentified
  source 1..343: note = Blastomonas fulva
  REGION 1..343: note = tr|A0A222WWM7|A0A222WWM7_9SPHN S-adenosylmethionine:tRNA ribosyltransferase-isomerase; OS = Blastomonas fulva OX=1550728 GN=queA PE=3 SV=1
MRVDDFDFELPPERIALRPVRPRDAAKMLCVYGSAMRDAQVRDLPGLLNPGDCLVFNDTRVIPAQLEGVKLGGQARIGATLHKRIDLRRWQAFVRNSRRLRLGDVIDFGADVFATVEARGADGSITLAFEGTEPVELLLERAGTMPLPPYIAAKRDIDEADREDYQTRFAREDGAVAAPTASLHFTDELMAALAAAGIEHAMLTLHVGAGTFLPVKADDTNDHQMHAEWGRIDAATADRLNAVRARGNRVIAVGTTVLRLIESAAREDGVIAPFEGDTAIFITPGYRFRGIDGLMTNFHLPRSTLFMLVSALMGLDVMRAAYAHAIAHDYRFYSYGDSSLLLP

SEQ ID NO: 64220 - protein, 343 aa, Blastomonas natatoria
  REGION 1..343: note = tr|A0A2V3VCB5|A0A2V3VCB5_9SPHN S-adenosylmethionine:tRNA ribosyltransferase-isomerase; OS = Blastomonas natatoria OX=34015 GN=queA PE=3 SV=1
MRVDEFDFELPQERIALRPVRPRDAARMLHVLGSTMADATVRDLPRLLNPGDCLVFNDTRVIPAQLEGVKLGGQARVGATLHKRIDLRRWQAFVRNAKRLREGDVVHFGAGVLADVEARGEDGSVTFAFQGDEPVEILLERAGTMPLPPYIASKREIDEADREDYQTRFAEKDGAVAAPTASLHFTDRLMADLAEAGIEHAMLTLHVGAGTFLPVKADDTNDHQMHAEWGRIDAETADRLNAIRGRGNRVVAVGTTVLRLIESAAGQDNIIRPFEGDTSIFITPGYRFKGIDGLMTNFHLPRSTLFMLVSALMGIDVMKAAYAHAIASEYRFYSYGDSSLLLP

SEQ ID NO: 64221 - protein, 209 aa, Blastomonas sp.
  REGION 1..209: note = tr|W9BXN8|W9BXN8_9SPHN S-adenosylmethionine:tRNA ribosyltransferase-isomerase (Fragment) OS=Blastomonas sp. CACIA14H2 OX=1419876 GN=Q27BB25_09995 PE=3 SV=1
MRVDEFDFDLPQERIALRPVRPRDAARMLHVQGRAMADATVRDLPRLLSPGDCLVFNDTRVIPAQLEGVKLGGEARIGATLHKRIDLRRWQAFVRNAKRLREGDVVHFGAGVMADVESKADDGSIVFAFQGDEPVELLLERAGTMPLPPYIASKRAIDEADREDYQTRFAQKDGAVAAPTASLHFTDRLMAELGEAGIEHAMLTLHVGA

SEQ ID NO: 64222 - protein, 348 aa, Blastomonas sp.
  REGION 1..348: note = tr|A0A2D6H149|A0A2D6H149_9SPHN S-adenosylmethionine:tRNA ribosyltransferase-isomerase; OS = Blastomonas sp. OX=1909299 GN=queA PE=3 SV=1
MRVDEFDFDLPQERIALRPVRPRDAAKMLHVQGSSMTDATVRDLPRLLNPGDCLVFNDTRVIPAQLEGVKLGSQARIGATLHKRIDLRRWQAFVRNAKRLREGDVVHFGAGVMAGVESKAEDGSIVFAFQGDEPVEILLERAGTMPLPPYIASKREIDEADREDYQTRFAQKDGAVAAPTASLHFTDRLMAELGEAGIEHAMLTLHVGAGTFLPVKADDTNDHQMHAEWGRIDAETADRLNAIRARGNRVIAVGTTVLRLIESAAGDDNIIRPFEGDTSIFITPGYRFKGIDGLMTNFHLPRSTLFMLVSALMGLDVMKAVYAHAIANEYRFYSYGDSSLLLPGDTIS

SEQ ID NO: 64223 - protein, 348 aa, unidentified
  source 1..348: note = Blastopirellula cremea
  REGION 1..348: note = tr|A0A368KVG9|A0A368KVG9_9PLAN S-adenosylmethionine:tRNA ribosyltransferase-isomerase; OS = Blastopirellula cremea OX=1031537 GN=queA PE=3 SV=1
MTNIDQYDYHLPSDLIAQQPLEKRSDSRLLVVNRQTQEISHQHIRDLPELLGAGDCLVLNNTKVVPARLMGRRSMTGGRWQGLFIETDANGNWLILAKTRGKIQPGERVVLENREALEDVELELLANLGGGQWAVKPLSEESPFDILERVGRVPLPNYIRGGEMMPEDWKQYQTVFAENPGAVAAPTAGLHFTHELLNKMAAQGVERQFVTLHVGMGTFRPIGVDDIEQHDMHYEYGEITQETVDKLAAVKAKGGRVVSVGTTATRVLETAAADGTLKPWSGKTNLFIRPPYEFKAVDVLLTNFHLPKSTLLILVRTFGGDELIRQAYREAINEEYRFYSYGDAMLIL

SEQ ID NO: 64224 - protein, 348 aa, Blastopirellula marina
  REGION 1..348: note = tr|A3ZW50|A3ZW50_9PLAN S-adenosylmethionine:tRNA ribosyltransferase-isomerase OS=Blastopirellula marina DSM 3645 OX=314230 GN=queA PE=3 SV=1
MTSIEQYDYRLPKELIAQEPLEKRADARLLVVDRKSGQIEHRYIRDLPEILQPTDHLVLNNTKVVPARLVGRRTLTGGRWQGLYLESDINGHWLVLAKTRGKIAAGEMVTLENRETKEDISLRLVASLGVGMWAVEPESSESTLEILERVGRVPLPHYIREGEMMPDDWKRYQTVFAEQPGAVAAPTAGLHFSTELLKKLTNNDLLVDYVTLHVGIGTFRPVSVDQLDEHVMHKEWGEIREEAVERILETKAAGGRNIAVGTTVARVMETAARSGELQPWRGQTDLFIRPPFEFHAVDALLTNFHLPKSTLLILVRTFGGEELMREAYAEAIREEYRFYSYGDAMLIL

SEQ ID NO: 64225 - protein, 348 aa, Blastopirellula marina
  REGION 1..348: note = tr|A0A2S8G126|A0A2S8G126_9PLAN S-adenosylmethionine:tRNA ribosyltransferase-isomerase; OS = Blastopirellula marina OX=124 GN=queA PE=3 SV=1
MTNIDQYDYHLPSDLIAQQPLEKRTDSRLLVVNRQTQEISHQHIRDLPELLGAGDCLVLNNTKVVPARLMGRRSMTGGRWQGLFIETDANGNWLILAKTRGKIQPGERVVLENREAREDIELELLANLGGGQWAVKPLSEESPFDILERVGRVPLPHYIRGGEMMPEDWKQYQTVFAENPGAVAAPTAGLHFTHELLNKMAAKGVERQFVTLHVGMGTFRPIGVDDIEQHEMHYEFGEITQETVDKLAAVKASGGRLVSVGTTATRVLETAAADGELKPWSGKTNLFIRPPYEFKAVDVLLTNFHLPKSTLLILVRTFGGDDLIRRAYREAIKEEYRFYSYGDAMLIL

SEQ ID NO: 64226 - protein, 348 aa, Blastopirellula sp.
  REGION 1..348: note = tr|A0A2G2KHH1|A0A2G2KHH1_9PLAN S-adenosylmethionine:tRNA ribosyltransferase-isomerase; OS = Blastopirellula sp. OX=2024826 GN=queA PE=3 SV=1
MTRIDTYDYTLPKELIAQQPLKKRPDARLLVVNRTAQSIEHRHIRDLPEILRPTDHLISNDTRVVPARIVGKRTDTGGRWQGLYLESDSDGNWKILSKTRGKLTPGETVTLQDREANNDVKLKLLIKLDNGMWIAKPESMEGPLDILERVGRIPLPHYIRDGEMLPDDWVDYQTVFARQPGAVAAPTAGLHFTKTLLAELEALGIQRDSVTLHVGIGTFKPVAVETLEEHNMHTEWGDLSESVANKIQATKAAGGRIISVGTTSARVLETAAKDGSIAAWQGDTNLFIRPGFEFHAIDGLLTNFHLPKSTLLVLVRTFGGDDLIKEAYQEAIREEYRFFSYGDAMLIL

SEQ ID NO: 64227 - protein, 348 aa, Blastopirellula sp.
  REGION 1..348: note = tr|A0A2E0B3L8|A0A2E0B3L8_9PLAN S-adenosylmethionine:tRNA ribosyltransferase-isomerase; OS = Blastopirellula sp. OX=2024826 GN=queA PE=3 SV=1
MSEIDQYDFDLPRELIAQFPLACRSDARLLVVDRANGTLEHAHIRDLPGYLSPADCLVVNDTRVVPARLLGHRTSTGGRWTGLYLDHDDQGVWRILSKTRGKLQAGESITLEDRHARPGITLTLLAPLEGGMWAARPEASGTAEEILEDMGRVPIPPYIRGGQMVDADVTSYQTVYADRAGAVAAPTAGLHFTPELLQTIGDAGTSISRITLHVGVGTFRPVTADRLDEHDMHFEWGQVDQQTVATISEKQQQGGRVVAVGTTVVRVLETAAASGALQPWEGETNLFIKPGYAFRAVDGLLTNFHLPKSTLLVLVRTFGGDELIQRAYAVAVEEGYRFYSYGDAMLII

SEQ ID NO: 64228 - protein, 347 aa, Blattabacterium cuenoti
  REGION 1..347: note = tr|M5ADN2|M5ADN2_9FLAO S-adenosylmethionine:tRNA ribosyltransferase-isomerase OS=Blattabacterium cuenoti BPAA OX=1229512 GN=queA PE=3 SV=1
MKTSDFDFESPTNLLAKFPSQERDESKLMVIHRKNQKIEHKIFKNLHEYFEEGDILILNNTKVFPARLFGNKEKTEAKIEVFLLRELDPKDRTWDVLVDPARKVRVGNKLSFGSELTGEVIDNTTSRGRILQLNFNGSHEGLINKIKELGKTPLPKYINRQPEKNDEKRYQTVYAKKEGSVAAPTAGLHFSKHLLKKLEIKGIHLVEVTLHLGLGSFLPVDVEDISKHKMDSEKCFINENTCKIVNFAIQRKKRICAVGTSSMRAIESSVSSSKKLNPFYGWTNKFIFPPYNFNIANSMITNFHMPKSTLLMMTTAFTGFDLIMKAYQIAIEKEYRFYSYGDAMLIL

SEQ ID NO: 64229 - protein, 347 aa, Blattabacterium cuenoti
  REGION 1..347: note = tr|A0A224AK86|A0A224AK86_9FLAO S-adenosylmethionine:tRNA ribosyltransferase-isomerase; OS = Blattabacterium cuenoti STAT OX=1457030 GN=queA PE=3; SV = 1
MKTSDFDFKYPINLLAKFPTQERDESKLMIIHRKNKKIEHKFFKNLHEYFEEGDTLILNNTKVFPARLFGNKEKTEAKIEVFLLRELDPKDRTWDVLVDPARKVRVGNKLNFGNELTGEVIDNTTSRGRILQLNFNGSHKKLIKKIKELGKTPLPKYINRKPEKNDKIRYQTIYAKEEGSVAAPTAGLHFSKHLLKKLEIKGINLVEVTLHLGLGSFLPVDVEDISKHKMDSEKCFINENTCKIVNFAIQRKKKICAVGTSSMRAIESSVSSKKKLNPFYGWTNKFIFPPYNFNIANSMITNFHMPKSTLLMMTAAFANFDLIKKAYQIAIEKKYRFYSYGDAMLIL

SEQ ID NO: 64230 - protein, 347 aa, unidentified
  source 1..347: note = Blattabacterium punctulatus
  REGION 1..347: note = tr|A0A2U9QA15|A0A2U9QA15_9FLAO S-adenosylmethionine:tRNA ribosyltransferase-isomerase; OS = Blattabacterium punctulatus OX=164514 GN=queA PE=3 SV=1
MRTSDFNFEFPLNLLSYQPTQERDESRLMIIHRKNKNIEHKLFKDLYQYFEEGDTIILNNTKVFPARLFGNKEKTEAKIEVFLLRELDIIDRTWDVLVDPARKVRVGNKLNFGSGLTGEVIDNTTSRGRILQLHFNGSHEELIKKIKELGKTPLPKYIKRLPEKNDEKRYQTIYAKIEGSVSAPTAGFHFSKHLLKILEIKGINLVEITLHLGLGSFLPVEVEDISKHKMDSEKCFIEKNVCSIINKTMKQKKRVCVVGTSSMRAIESSVSSSKYLNPFSGWTNKFIFPPYNFSIANSMITNFHMPKSTLLMMTAAFSGYELIMKAYKIAIKKKYRFYSYGDAMLIL

SEQ ID NO: 64231 - protein, 347 aa, unidentified
  source 1..347: note = Blattabacterium punctulatus
  REGION 1..347: note = tr|A0A2U9QBC4|A0A2U9QBC4_9FLAO S-adenosylmethionine:tRNA ribosyltransferase-isomerase; OS = Blattabacterium punctulatus OX=164514 GN=queA PE=3 SV=1
MRTSDFNFEFPLNLLSYQPTQERDESRLMIIHRKNKNIEHKLFKDLYQYFEEGDTMIFNNTKVFPAKLFGNKEKTEAKIEVFLLRELDIIDRTWDVLVDPARKVRVGNKLNFGSGLTGEVIDNTTSRGRILQLHFNGSHEELIKKIKELGKTPLPKYIKRLPEKSDEKRYQTIYAKIEGSVSAPTAGFHFSKHLLKILEIKGINLVEITLHLGLGSFLPVEVEDISKHKMDSEKCFIEKNVCSIINKTIKQKKRVCVIGTSSMRAIESSVSSSKYLNPFSGWTNKFIFPPYNFSIANSMITNFHMPKSTLLMMTAAFSGYELIMKAYKIAIKEKYRFYSYGDAMLIL

SEQ ID NO: 64232 - protein, 347 aa, Blattabacterium sp.
  REGION 1..347: note = tr|D0J9D4|D0J9D4_BLASP S-adenosylmethionine:tRNA ribosyltransferase-isomerase OS=Blattabacterium sp. subsp. Periplaneta americana (strain BPLAN) OX=600809 GN=queA PE =3 SV=1
MRTSDFDFGLPLDLLANQPTEERDESRLMIINRKSNGIKHEIFKDLHQYFEEGDTIIFNNTKVFPARLFGNKEKTEAKIEVFLLRELDPIDRTWDVLVDPARKVRVGNKLNFGYGLTGEVIDNTTSRGRILQLHFSGTHKELIKKIKELGKTPLPKYIKRLPDKNDEERYQTIYAKEEGSVAAPTAGLHFSKHLLKKLEIKGINLVEITLHLGLGSFLPVEVEDISKHKMDSEKCFIKKETCDIVNKSIQQKKRICAVGTSSMRAIESSVSPNKYLNPFYGWTNKFIFPPYNFSIANSMITNFHMPKSTLLMMTVAFTGYDLLMKAYKIATKEKYRFYSYGDSMLIL

SEQ ID NO: 64233 - protein, 347 aa, Blattabacterium sp.
  REGION 1..347: note = tr|G7SQ08|G7SQ08_9FLAO S-adenosylmethionine:tRNA ribosyltransferase-isomerase OS=Blattabacterium sp. (Mastotermes darwiniensis) str. MADAR OX=1074889 GN=queA; PE = 3 SV =1
MRTSDFNFSFPSDFIAYYPTKERDESRLMVIHRKKNSIEHRLFKDLYEYFENGDTIILNNTKVFPARLFGNKEKTEAKIEVFLLRELDPIDRIWDVLVDPARKVRVGNKLNFGNGLTGEVIDNTTSRGRILQLHFCGSHEGLIKKIKELGKTPLPKYIQRSPEKSDEQRYQTIYAKKEGSVAAPTAGLHFSKHLLKKLEIKGINLVEITLHLGLGSFLPVEVEDISKHKMDSEKCFITKDVCNIVNQTIKQKKRICAVGTSSMRAIESSVSSSKNLNHFSGWTNKFIFPPYNFNIANSMITNFHMPKSTLLMMTVAFAGYDLIMKAYQIAIEKKYRFYSYGDAMLIL

SEQ ID NO: 64234 - protein, 341 aa, Blautia coccoides
  REGION 1..341: note = tr|A0A4V2S7X4|A0A4V2S7X4_9FIRM S-adenosylmethionine:tRNA ribosyltransferase-isomerase; OS = Blautia coccoides OX=1532 GN=queA PE=3 SV=1
MKTSDFYYDLPEELIAQDPLADRSASRLLHLDRETGEIQHTDFKHITRYLNPGDCLVINDTKVIPARLYGSKVGTDAGIEILLLKRKGDNVWETLVKPGKKAKPGTVISFGDGLLTGEVIDVVEEGNRLIRFHYEGIFEEILDKLGEMPLPPYITHKLEDKNRYQTVYAKNEGSAAAPTAGLHFTEELLEEIRQMGVNIAHVTLHVGLGTFRPVKVDDVEKHHMHSEFYVVEEDQAKLINDTKKNGGRIISVGTTSCRTLESAADEDGNLQAKSGWTEIFIYPGYQFKIIDGLITNFHLPESTLLMLVSALAGKENIMKAYEEAVRERYRFFSFGDAMLIQ

SEQ ID NO: 64235 - protein, 355 aa, Blautia hansenii
  REGION 1..355: note = tr|C9L6D0|C9L6D0_BLAHA S-adenosylmethionine:tRNA ribosyltransferase-isomerase OS=Blautia hansenii DSM 20583; OX = 537007 GN=queA PE=3 SV=1
MRQPPFVREQKGETMRTADFYYDLPEELIAQDPLLDRSSSRLMHLDKQTGEICHTDFKHIIDYLNPEDCLVINDTRVIPARLYGSKVGTDAGIEILLLKRRENNIWETLVKPGKKAKPGTKISFGDGLLIGEVLDIVEEGNRLIQFQYEGIFEEILDKLGEMPLPPYITHKLQDKERYQTVYAKNEGSAAAPTAGLHFTKELLKEIEEKGVKIAHVTLHVGLGTFRPVKVDDVESHHMHSEFYVVEEEQAKIINETKAKGGRVISVGTTSCRTLESATDENGILQAKSGWTDIFIYPGYQFKMIDALITNFHLPESTLLMLVSALAGKEKIMNAYEEAVKERYRFFSFGDAMIIE

SEQ ID NO: 64236 - protein, 341 aa, Blautia hydrogenotrophica
  REGION 1..341: note = tr|C0CLS5|C0CLS5_BLAHS S-adenosylmethionine:tRNA ribosyltransferase-isomerase OS=Blautia hydrogenotrophica (strain DSM 10507 / JCM 14656 / S5a33) OX=476272 GN=queA P; E = 3 SV=1
MKTSDFYYELPQELIAQDPLEDRSSSRLLHLDRRTGEISHGTFQDILTYLKPGDCLVINDTKVIPARLFGRKEDTGAVIELLLLKRRENDVWETLVKPGKKAKVGTKLIFGDGILCGEILDVVEEGNRLIQFQYEGIFEEILDQLGEMPLPPYITHKLKDKNRYQTVYAKHEGSAAAPTAGLHFTPELLQRVKEMGVKIAHVTLHVGLGTFRPVKVEDVAEHHMHSEFYVVEQEQAALVNETKRNGGRVICVGTTSCRTLESATDEEGKLQAGSGWTEIFIYPGYQFKIMDGLITNFHLPESTLLMLVSAFAGKEKIMAAYKEAVRERYRFFSFGDAMFIV

SEQ ID NO: 64237 - protein, 341 aa, Blautia hydrogenotrophica; identical to SEQ ID NO: 64236
  REGION 1..341: note = tr|A0A173RE20|A0A173RE20_9FIRM S-adenosylmethionine:tRNA ribosyltransferase-isomerase; OS = Blautia hydrogenotrophica OX=53443 GN=queA PE=3 SV=1

SEQ ID NO: 64238 - protein, 341 aa, Blautia luti
  REGION 1..341: note = tr|A0A564W7G9|A0A564W7G9_9FIRM S-adenosylmethionine:tRNA ribosyltransferase-isomerase; OS = Blautia luti OX=89014 GN=queA PE=3 SV=1
MKTSDFYYDLPQELIAQDPLEDRSSSRLMHLSLKDGSIEHRHFTDILDYLHKGDCLVINDTKVIPARLYGHKEETGALIEILLLKRRENDIWECLVKPGKKARPGAKITFGDGILKGEILDIVDEGNRLIQFHYEGIFEEILDQLGEMPLPPYITHKLKDKNRYQTVYAKNEGSAAAPTAGLHFTPELLEKVKEKGVNIAHVTLHVGLGTFRPVKVDDVEKHHMHSEFYIVEEDQAKLINDTKKNGGRVISVGTTSCRTLESAAGEDGIVKAGSGWTEIFIYPGYKFKAIDGLITNFHLPESTLLMLVSALAGKEHIMAAYEEAVKERYRFFSFGDAMMIE

SEQ ID NO: 64239 - protein, 341 aa, unidentified
  source 1..341: note = Blautia obeum
  REGION 1..341: note = tr|A5ZPU9|A5ZPU9_9FIRM S-adenosylmethionine:tRNA ribosyltransferase-isomerase OS=Blautia obeum ATCC 29174; OX = 411459 GN=queA PE=3 SV=1
MKTSDFYYDLPKELIAQDPLEDRSSSRLLHLSMQDGSFEHRHFTDILDYLHKGDCLVINDTKVIPARLYGHKEETGAVIEILLLKRRENDIWECLVKPGKKARPGAKITFGDGILKGEIIDVVDEGNRLIQFHYDGIFEEILDQLGEMPLPPYITHKLKDKNRYQTVYAKNDGSAAAPTAGLHFTRELLKQVEDMGVKIAHVTLHVGLGTFRPVKVDDVEQHHMHSEFYMVEEDQAKLINDTKKNGGRVISVGTTSCRTLESATDENGILQAGSGWTEIFIYPGYHFKMIDGLITNFHLPESTLLMLVSALAGKEHIMAAYEEAVKERYRFFSFGDAMLII

SEQ ID NO: 64240 - protein, 341 aa, unidentified
  source 1..341: note = Blautia obeum
  REGION 1..341: note = tr|A0A414J382|A0A414J382_9FIRM S-adenosylmethionine:tRNA ribosyltransferase-isomerase; OS = Blautia obeum OX=40520 GN=queA PE=3 SV=1
MKTSDFYYDLPKELIAQDPLEDRSSSRLLHLSMEDGSFEHRHFTDILDYLKEGDCLVINDTRVIPARLYGHKEETGALIEILLLKRKENDIWECLVKPGKKARPGAKITFGDGILTGEIIDIVDEGNRLIQFHYDGIFEEILDQLGEMPLPPYITHKLKDKNRYQTVYAKNDGSAAAPTAGLHFTKELMKQVEEKGVKIAHVTLHVGLGTFRPVKVDNVESHHMHSEFYMVEEDQAKLINDTKKNGGRVISVGTTSCRTLESATDENGILHAGSGWTEIFIYPGYKFKMIDGLITNFHLPESTLLMLVSALAGKEYIMAAYEEAVKERYRFFSFGDAMLIL

SEQ ID NO: 64241 - protein, 341 aa, Blautia producta
  REGION 1..341: note = tr|A0A4P6LZB0|A0A4P6LZB0_9FIRM S-adenosylmethionine:tRNA ribosyltransferase-isomerase; OS = Blautia producta OX=33035 GN=queA PE=3 SV=1
MKTSDFYYNLPEELIAQDPLADRSASRLLHLDRETGEIQHTDFKHITRYLNPGDCLVINDTKVIPARLYGSKVGTDAGIEILLLKRKGDNVWETLVKPGKKAKPGTVISFGDGLLTGEVIDVVEEGNRLIRFHYEGIFEEILDKLGEMPLPPYITHKLEDKNRYQTVYAKNEGSAAAPTAGLHFTEELLEEIRQMGVKIAHVTLHVGLGTFRPVKVDDVEKHHMHSEFYVVEEDQAKLINDTKKNGGRIISVGTTSCRTLESAADEDGNLQAKSGWTEIFIYPGYQFKIIDGLITNFHLPESTLLMLVSALAGKENIMKAYEEAVRERYRFFSFGDAMLIV

SEQ ID NO: 64242 - protein, 341 aa, Blautia producta
  REGION 1..341: note = tr|A0A2S4GQY0|A0A2S4GQY0_9FIRM S-adenosylmethionine:tRNA ribosyltransferase-isomerase; OS = Blautia producta OX=33035 GN=queA PE=3 SV=1
MKTSDFYYDLPEELIAQDPLADRSASRLLHLDRETGEIEHTDFKHITRYLNPGDCLVINDTKVIPARLYGSKVGTDAGIEILLLKRKGDNVWETLVKPGKKAKPGTVIRFGDGLLTGEVIDVVEEGNRLIKFSYEGIFEEILDKLGEMPLPPYITHKLEDKNRYQTVYAKKEGSAAAPTAGLHFTEELLEEIRQMGVNIAHVTLHVGLGTFRPVKVDDVEKHHMHSEFYVVEEDQAELINETRKNGGRIISVGTTSCRTLESAADENGNLQAKSGWTEIFIYPGYQFKIIDGLITNFHLPESTLLMLVSALAGKENIMRAYEEAVEERYRFFSFGDAMFIG

SEQ ID NO: 64243 - protein, 341 aa, Blautia sp.
  REGION 1..341: note = tr|A0A417CIF8|A0A417CIF8_9FIRM S-adenosylmethionine:tRNA ribosyltransferase-isomerase; OS = Blautia sp. AM42-2 OX=2292976 GN=queA PE=3 SV=1
MKTSDFYYDLPKELIAQDPLEDRSASRLMHLNKETGEYEHGHFRDILKYLKPGDCLVINDTKVIPARLYGSKVGTDAAIEILLLKRRENDIWETLVKPGKKCKVGTVISFGDGILTGEVVDIVDEGNRLIQFHYDGIFEEILDQLGEMPLPPYITHKLQDKNRYQTVYAKHEGSAAAPTAGLHFTKELLQQVQDAGVKIAHVTLHVGLGTFRPVKVEDVTQHHMHSEFYVVEEDQAKLINDTKAAGGRVIAVGTTSCRTLESATGEDGILKAGSGWTEIFIYPGYRFKMIDGLITNFHLPESTLVMLVSALAGKEHIMAAYEEAVREKYRFFSFGDAMMIE

SEQ ID NO: 64244 - protein, 341 aa, Blautia sp.
  REGION 1..341: note = tr|A0A1Y4F8P1|A0A1Y4F8P1_9FIRM S-adenosylmethionine:tRNA ribosyltransferase-isomerase; OS = Blautia sp. An249 OX=1965603 GN=queA PE=3 SV=1
MKTSDFYYDLPQELIAQDPLEDRSSSRLLHLDRNSGKIDHGVFSDILSYLNPGDCLVINDTKVIPARLYGHKEDTGALIEILLLKRRENNIWETLVKPGKKARPGAKIVFGNGILKGEVLDIVEEGNRLIQFTYEGIFEEILDQLGEMPLPPYITHKLKDKNRYQTVYAKHEGSAAAPTAGLHFTKELLEKVEAMGVKIAHVTLHVGLGTFRPVKVEDVEKHHMHSELYIVEEDQAEMINETKKAGGRIICVGTTSCRTLESAAQKDGYLKAGSGWTDIFIYPGYQFKIMDGLITNFHLPESTLLMLVSAFADKEKIMHAYEEAVKERYRFFSFGDAMFIG

SEQ ID NO: 64245 - protein, 341 aa, Blautia wexlerae
  REGION 1..341: note = tr|A0A174DWL6|A0A174DWL6_9FIRM S-adenosylmethionine:tRNA ribosyltransferase-isomerase; OS = Blautia wexlerae OX=418240 GN=queA PE=3 SV=1
MKTSDFYYDLPQELIAQDPLEDRSSSRLMHLSLKDGSIEHRHFTDVLDYMEEGDCLVINDTKVIPARLYGHKEGTGALIEILLLKRRENDIWECLVKPGKKARPGAKITFGNGILKGEIIDVVDEGNRLIQFHYEGIFEEILDQLGEMPLPPYITHKLKDKNRYQTVYAKNEGSAAAPTAGLHFTKELLEKVKEKGVNIAHVTLHVGLGTFRPVKVDDVESHHMHSEFYIVEEDQAKLINDTKKAGKRVIAVGTTSCRTLESATGEDGILKSGSGWTEIFIYPGYHFKMIDALITNFHLPESTLVMLVSALAGKENIMHAYETAVQEKYRFFSFGDAMIII

SEQ ID NO: 64246 - protein, 341 aa, Blautia wexlerae
  REGION 1..341: note = tr|A0A564WY41|A0A564WY41_9FIRM S-adenosylmethionine:tRNA ribosyltransferase-isomerase; OS = Blautia wexlerae OX=418240 GN=queA PE=3 SV=1
MKTSDFYYDLPQELIAQDPLEDRSSSRLMHLSLKDGSIEHRHFTDVLDYMEEGDCLVINDTKVIPARLYGHKEETGALIEILLLKRRENDIWECLVKPGKKARPGAKITFGNGILKGEIIDVVDEGNRLIQFHYEGIFEEILDQLGEMPLPPYITHKLKDKNRYQTVYAKNEGSAAAPTAGLHFTKELLEKVKEKGVNIAHVTLHVGLGTFRPVKVDDVESHHMHSEFYIVEEDQAKLINDTKKAGKRVIAVGTTSCRTLESATGEDGILKSGSGWTEIFIYPGYHFKMIDALITNFHLPESTLVMLVSALAGKENIMHAYEVAVQEKYRFFSFGDAMIII

SEQ ID NO: 64247 - protein, 353 aa, unidentified
  source 1..353: note = Blochmannia floridanus
  REGION 1..353: note = sp|Q7VQB2|QUEA_BLOFL S-adenosylmethionine:tRNA ribosyltransferase-isomerase OS=Blochmannia floridanus; OX = 203907 GN=queA PE=3 SV=1
MRTSDFKFQLPKKLISRYPNLKRSECRLLVFDRLTTKITHHFFSDLPEILNPGDLLIFNDTRVIPARLYGYSVTGKKVEILIERILNDYQAVAHIYSSELVQLGEKFILGSNLNIYIYVIKIYYSYKLFKIYFDNINYNNVLSLLNDIGHIPIPPYFHRLDEIIDYELYQTVYGSKLGSIAAPTAGLHFDTLLINRLLNLGIEISFITLHIGSATFQPVRVTLIEHHVMHDEYIEVSQSTIESILRCKERKNRVIAVGTTVVKALETAAMNTKSLSIIESFSGYSRIFIFPGYRFKIVDSLITNFHLPESTLIMLVAAFAGYRNILRVYNAAIDLNYKFLSYGDSMFITCRSE

SEQ ID NO: 64248 - protein, 356 aa, unidentified
  source 1..356: note = Unknown
  REGION 1..356: note = tr|A0A1U9VKX9|A0A1U9VKX9_9RALS S-adenosylmethionine:tRNA ribosyltransferase-isomerase; OS = blood disease bacterium A2-HR MARDI OX=1944648 GN=queA; PE = 3 SV=1
MSAPPFMLTLSDFDFDLPPELIAQTALPDRTASRLLAVRRDAQGPHFDDRQFADLVDYLRPGDLLIFNDTRVIKARFFGHKASGGKIEVLVERLLDEYTVLAQIRSSKSPVAGSTLRLADAFDVTVGPRHEPFFTLRFPQPALELIEQYGRLPLPPYIEHTPDSFDETRYQTVYARNPGAVAAPTAGLHFDDALFARLDAMGVRRGFLTLHVGAGTFSPVRVENIAEHRMHSEWYAISPALAEAIRATRAAGGRIIAVGTTSMRALESAARPDGTLTAGSGETDIFITPGYRFRLVDALVTNFHLPKSTLLMLVSAFAGLETIRAAYRHAIAQRYRFFSYGDAMFLTRAEPDTQSA

SEQ ID NO: 64249 - protein, 350 aa, unidentified
  source 1..350: note = Unknown
  REGION 1..350: note = tr|G2ZRD3|G2ZRD3_9RALS S-adenosylmethionine:tRNA ribosyltransferase-isomerase OS=blood disease bacterium R229 OX=741978 GN=queA PE=3 SV=1
MLTLSDFDFDLPPELIAQTALPDRTASRLLAVRRDAQGPHFDDRQFADLVDYLRPGDLLIFNDTRVIKARFFGHKASGGKIEVLVERLLDEYTVLAQIRSSKSPVAGSTLRLADAFDVTVGPRHEPFFTLRFPQPALELIEQYGRLPLPPYIEHTPDSFDETRYQTVYARNPGAVAAPTAGLHFDDALFARLDAMGVRRGFLTLHVGAGTFSPVRVENIAEHRMHSEWYAISPALAEAIRATRAAGGRIIAVGTTSMRALESAARPDGTLTAGSGETDIFITPGYRFRLVDALVTNFHLPKSTLLMLVSAFAGLETIRAAYRHAIAQRYRFFSYGDAMFLTRAEPDTQSA

SEQ ID NO: 64250 - protein, 354 aa, unidentified
  source 1..354: note = Bombella intestini
  REGION 1..354: note = tr|A0A1S8GQG3|A0A1S8GQG3_9PROT S-adenosylmethionine:tRNA ribosyltransferase-isomerase; OS = Bombella intestini OX=1539051 GN=queA PE=3 SV=1
MTDDLALFDFTLPRDHIATEPARPRDMAQLLHVVPPALAGTDEASLSLHRIRNLPDLLKDGDLLIANDTEVIRAKMEARRGEAKIGITLDRILPEGQWHALARNARKLRPGDQLRFEDDPVTAEVLTNEGDGAVTIRFSVEGDEFDAFLERRAALALPPYIARPHGPTEADNSDYRTIFSRFRGAVAAPTAGLHFTEDLLKALASKGIRKQTLTLHVGAGTFLPVRSTIAEHKMHAEWGHIDEETARLINETRANGGRVVAVGTTSLRLLESAADEKGIVHPWTGETSIFIKPGYRFRAVDALLTNFHLPRSTLFMLVCAFAGTQTMRHAYHHAIAEGLRFYSYGDACLLERAP

SEQ ID NO: 64251 - protein, 373 aa, unidentified
  source 1..373: note = Bordetella ansorpii
  REGION 1..373: note = tr|A0A157S5N0|A0A157S5N0_9BORD S-adenosylmethionine:tRNA ribosyltransferase-isomerase; OS = Bordetella ansorpii OX=288768 GN=queA PE=3 SV=1
MPRHSFSAVPRVSAPLTLSDFDYELPPELIAQHPAAQRGGSRLLHLDAASQLHDRQFPDLAHLLRAGDLLVFNDTRVIKARLAGHKAGSGGKVEVLVERLVEPTRALAHVRASKSPGPGTVLRLADAFDAEVLGREGELFDLRFPAPVLDLLDAHGATPLPPYITHAAEETDDSRYQTVYAREPGAVAAPTAGLHFDEPMLQKLAGLGIERAFVTLHVGAGTFQPVRVENLAEHVMHAEWYTVPQATADAVAATRARGGRVVAVGTTSVRALESAAARTDAAAGAAPGAARPGRDRPLEASQGDTRLFITPGYRYRAVDALLTNFHLPQSTLLMLISALAGMDPIRRAYAHAVAQRYRFFSYGDAMFIETPRP

SEQ ID NO: 64252 - protein, 358 aa, unidentified
  source 1..358: note = Bordetella ansorpii
  REGION 1..358: note = tr|A0A157LJV7|A0A157LJV7_9BORD S-adenosylmethionine:tRNA ribosyltransferase-isomerase; OS = Bordetella ansorpii OX=288768 GN=queA PE=3 SV=1
MSAPLTLSDFDYELPPELIAQHPAAQRGGSRLLHLDAASQLHDRQFPDLADLLRAGDLLVFNDTRVIKARLAGHKAGSGGKVEVLVERLVEPTRALAHVRASKSPGPGTVLRLADAFDVEVLGREGELFDLRFPAPALDLLDAHGATPLPPYITHAAEETDDSRYQTVYAREPGAVAAPTAGLHFDDPMLQKLAGLGIERAFVTLHVGAGTFQPVRVENLSEHVMHAEWYTVPQATADAVAATRARGGRVVAVGTTSVRALESAAAKTETAASAARPGRDRPIEAAQGDTRLFITPGYRYRAVDALLTNFHLPQSTLLMLISALAGMDPIRRAYAHAVAQRYRFFSYGDAMFIETPRP

SEQ ID NO: 64253 - protein, 346 aa, Bordetella avium
  REGION 1..346: note = tr|Q2KWB8|Q2KWB8_BORA1 S-adenosylmethionine:tRNA ribosyltransferase-isomerase (Fragment) OS=Bordetella avium (strain 197N) OX=360910 GN=queA PE=3 SV=1
VPTFTLSDFDYDLPPELIAQTPAAQRGGSRLLHLDAGSQLHDRQFADLLALLRPNDLLVFNDTRVIKARLTGQKATGGKVEVLVERITEPDRALAHVRASKSPGPGMRLELAGGAVRAEVLGRQGELFDLRFAGPVLDLLEAHGATPLPPYITHSAESEDNERYQTVYAREPGAVAAPTAGLHFDQDMLARIEALGVARAFVTLHVGAGTFQPVRVEKIDEHIMHAEWYTVPEATVQAIARARAAGGRVIAVGTTSVRALESAAAAGDGPLAAAQGDTRLFITPGYRYRVVDALITNFHLPQSTLLMLVSALAGIEPIRRAYAHAVAGRYRFFSYGDAMFIESPQP

SEQ ID NO: 64254 - protein, 352 aa, unidentified
  source 1..352: note = Bordetella bronchialis
  REGION 1..352: note = tr|A0A193FQ61|A0A193FQ61_9BORD S-adenosylmethionine:tRNA ribosyltransferase-isomerase; OS = Bordetella bronchialis OX=463025 GN=queA PE=3 SV=1
MSLSQPSSHRVSDFDYELPPELIAQHPSAERGGSRLLHLDAQGGLHDRRFPDIATLLRPGDLLVFNDTRVIKARLTGHKASGGKVEVLVERITAPRRALAHVRASKSPGPGTVLRLADAFEVQVEGRAGELFDISFPDDVLALLDAHGATPLPPYIAHAADAQDETRYQTVYAREPGAVAAPTAGLHFDQAMLDRLGAAGVERAFVTLHVGAGTFQPVRVENVADHVMHAEWYTVPQATADAIAQAKARGSRVVAVGTTSARALESAAGQHLPLCATQGDTRLFITPGYRFQVLDALVTNFHLPQSTLLMMVSALAGMEPIRRAYAHAVAQRYRFFSYGDAMFIEAAAGLAP

SEQ ID NO: 64255 - protein, 347 aa, Bordetella bronchiseptica
  REGION 1..347: note = sp|Q7WMM7|QUEA_BORBR S-adenosylmethionine:tRNA ribosyltransferase-isomerase OS=Bordetella bronchiseptica (strain ATCC BAA-588 / NCTC 13252 / RB50) OX=257310; GN = queAPE=3 SV=2
MPTPLTLADFDYHLPPELIAQSPAAERGGSRLLHLDAASRLHDRRFPDLAGLLRPHDLLVFNDTRVIKARLTGQKATGGKVEVLVERITAPDRALVHVRASKSPGPGMRLRLAEAFEAEVLGREGELFDLRFPAPVLDLLDAHGATPLPPYITHAADATDERRYQTVYAREPGAVAAPTAGLHFDQPMLEQLAAQGVQRAFVTLHVGAGTFQPVRVQNLAEHIMHAEWYTVPEATVAAIARARAHGGRIVAVGTTSVRALESAAAQAQDGPLAAAQGDTRLFITPGYRYRIVDALLTNFHLPQSTLLMLVSALAGVAPIRRAYAHAVAERYRFFSYGDAMFIETPAP

SEQ ID NO: 64256 - protein, 347 aa, Bordetella bronchiseptica
  REGION 1..347: note = tr|A0A4U9RGU8|A0A4U9RGU8_BORBO S-adenosylmethionine:tRNA ribosyltransferase-isomerase; OS = Bordetella bronchiseptica OX=518 GN=queA PE=3 SV=1
MPTPLTLADFDYHLPPELIAQSPAAERGGSRLLHLDAASRLHDRRFPDLAGLLRPHDLLVFNDTRVIKARLTGRKATGGKVEVLVERITAPDRALAHVRASKSPGPGMRLRLAEAFEAEVLGREGELFDLRFPAPVLDLLDAHGATPLPPYITHAADAADERRYQTVYAREPGAVAAPTAGLHFDQPMLEQLAAQGVQRAFVTLHVGAGTFQPVRVQNLAEHIMHAEWYTVPEATVAAIARARAHGGRIVAVGTTSVRALESAAAQAQDGPLAAAQGDTRLFITPGYRYRIVDALLTNFHLPQSTLLMLVSALAGVEPIRRAYAHAVAGRYRFFSYGDAMFIETPAP

SEQ ID NO: 64257 - protein, 354 aa, unidentified
  source 1..354: note = Bordetella flabilis
  REGION 1..354: note = tr|A0A193GMJ7|A0A193GMJ7_9BORD S-adenosylmethionine:tRNA ribosyltransferase-isomerase; OS = Bordetella flabilis OX=463014 GN=queA PE=3 SV=1
MASRVRVSTSHPSYSLSDFDYELPPELIAQHPSAERGGSRLLHLDAHGGLHDRHFGDIAALLRPGDLLVFNDTRVIKARLAGRKASGGKIEVLVERIVGPRQALAHVRASKSPGPGTVLHLADAFDAVVAGREGELFDLRFPDDVLKLLDAHGATPLPPYITHAADAEDEARYQTVYAREPGAVAAPTAGLHFDLPMLDRLQAAGVARAFVTLHVGAGTFQPVRVENIADHVMHAEWYTVPQATVDAIAGARAAGGRVIAVGTTSARALESAAAQRMPLQASQGDTRLFITPGYRFQVLDGLITNFHLPQSTLLMMVSALAGMDPIRRAYAHAVAQRYRFFSYGDAMLIEAAAA

SEQ ID NO: 64258 - protein, 362 aa, unidentified
  source 1..362: note = Bordetella genomosp.
  REGION 1..362: note = tr|A0A261S239|A0A261S239_9BORD S-adenosylmethionine:tRNA ribosyltransferase-isomerase; OS = Bordetella genomosp. 10 OX=1416804 GN=queA PE=3 SV=1
MSSPLTVADFDYALPPELIAQHPSPERGGSRLLHLDAQGRLHDRVFADLAGLLRPNDLLVFNDTRVIKARLTGHKASGGKVEVLVERIVEADRALAHVRASKSPGPGTVLRLADRFEATVLGREGALFDLRFPGDVLELLQAHGATPLPPYITHAAGAEDDERYQTVYARAPGAVAAPTAGLHFDDAMMRRLDEAGVARAFVTLHVGAGTFKPVQVEKLSDHVMHAEWYTVPQATADAVARARAAGGRVIAVGTTSARALESAAAQALPLRATQGDTQLFITPGYRFQVLDGLVTNFHLPQSTLLMMISALAGMEPIRRAYAHAVAERYRFFSYGDAMLIESPLAPASLASSHPAASGPAAV

SEQ ID NO: 64259 - protein, 354 aa, unidentified
  source 1..354: note = Bordetella genomosp.
  REGION 1..354: note = tr|A0A261RWP5|A0A261RWP5_9BORD S-adenosylmethionine:tRNA ribosyltransferase-isomerase; OS = Bordetella genomosp. 1 OX=1395607 GN=queA PE=3 SV=1
MSQTYTVADFDYVLPDELIAQTPAAERGGSRLLHLDRASQLHDRQFPDLAGLLRPHDLLVFNDTRVIKARLTGQKATGGKVEVLVERITDTDRALAHVRASKSPGAGMTLRLADDAFEAEVLGRQGELFELRFPAPVLDLLDAHGATPLPPYITHAADQEDDTRYQTVYAREPGAVAAPTAGLHFDEPMLARLAAQGVERAFVTLHVGAGTFQPVRVDNLSDHIMHSEWYTVPPETVAAIERARQAGGRVIAVGTTSVRALESAAAHSAGQGTAGPAGLGAASGDTRLFITPGYTYRVVDALLTNFHLPQSTLLMLVSALAGMDPIRRAYAHAVAQRYRFFSYGDAMFIETPQP

SEQ ID NO: 64260 - protein, 347 aa, Bordetella hinzii
  REGION 1..347: note = tr|A0A0H4WVU7|A0A0H4WVU7_9BORD S-adenosylmethionine:tRNA ribosyltransferase-isomerase; OS = Bordetella hinzii OX=103855 GN=queA PE=3 SV=1
MSTFTLSDFDYDLPPELIAQTPAAERAGSRLLHLDGQGRLHDRHFPDLLALLRPHDLLVFNDTRVIKARLAGQKATGGKVEVLVERITEPTRALAHVRASKSPGRGMRLALAGGAVTAEVLGRQGELFDLRFAGPVLDLLEAHGATPLPPYITHAAEHEDEERYQTVYAREPGAVAAPTAGLHFDQAMLERLAAGGVQRAFVTLHVGAGTFQPVRVQNLAEHVMHAEWYTVPEATVQAIHAARQAGGRVIAVGTTSVRALESAAAQAAGGPLAACQGDTRLFITPGYRYRVVDALVTNFHLPQSTLLMLVSALAGIDPIRRAYAHAVASRYRFFSYGDAMFIESAQP

SEQ ID NO: 64261 - protein, 369 aa, Bordetella holmesii
  REGION 1..369: note = tr|A0A158M2B8|A0A158M2B8_9BORD S-adenosylmethionine:tRNA ribosyltransferase-isomerase; OS = Bordetella holmesii CDC-H585-BH OX=1331206 GN=queA PE=3; SV = 1
MRTAYLHCADPFFPVLSGRDDTVSTFTVSDFDYNLPAELIAQTPAAERGGSRLLHLDGQGRLHDRQFCDLLSLLRPHDLLIFNDTRVIKARLAGQKATGGKVEVLVERITEPTRALAHVRASKSPGPGMRLELAGGAITADVLGRAGELFDLRFAAPVLDLLEAHGATPLPPYITHAAEQEDDARYQTVYAREPGAVAAPTAGLHFDQAMLQRLADQDVQRAFVTLHVGAGTFQPVRVQKLEDHIMHSEWYTVPEATVAAVARARQAGGRVIAVGTTSVRALESAAAQSADGELRAAQGDTRLFITPGSRFRVVDALVTNFHLPQSTLLMLVSALAGIEPIRRAYAHAVAGRYRFFSYGDAMFIESAQP

SEQ ID NO: 64262 - protein, 347 aa, Bordetella parapertussis
  REGION 1..347: note = sp|Q7WB60|QUEA_BORPA S-adenosylmethionine:tRNA ribosyltransferase-isomerase OS=Bordetella parapertussis (strain 12822 / ATCC BAA-587 / NCTC 13253) OX=257311; GN = queAPE=3 SV=2
MPTPLTLADFDYHLPPELIAQSPAAERGGSRLLHLDAASRLHDRRFPDLAGLLRPHDLLVFNDTRVIKARLTGQKATGGKVEVLVERITAPDRALAHVRASKSPGPGMRLRLAEAFEAEVLGREGELFDLRFPAPVLDLLDAHGATPLPPYITHAADATDERRYQTVYAREPGAVAAPTAGLHFDQPMLEQLAAQGVQRAFVTLHVGAGTFQPVRVQNLAEHIMHAEWYTVPEATVAAIARARAHGGRIVAVGTTSVRALESAAAQAQDGPLAAAQGDTRLFITPGYRYRIVDALLTNFHLPQSTLLMLVSALAGVAPIRRAYAHAVAERYRFFSYGDAMFIETPAP

SEQ ID NO: 64263 - protein, 357 aa, Bordetella parapertussis
  REGION 1..357: note = tr|K0MLW3|K0MLW3_BORPB S-adenosylmethionine:tRNA ribosyltransferase-isomerase OS=Bordetella parapertussis (strain Bpp5) OX=1208660 GN=queA PE=3 SV=1
MAAAFHRTYRVPTPLTLADFDYHLPPELIAQSPAAERGGSRLLHLDAASRLHDRRFPDLAGLLRPHDLLVFNDTRVIKARLTGQKATGGKVEVLVERITAPDRALAHVRASKSPGPGMRLRLAEAFEAEVLGREGELFDLRFPAPVLDLLDAHGATPLPPYITHAADATDERRYQTVYAREPGAVAAPTAGLHFDQPMLEQLAAQGVQRAFVTLHVGAGTFQPVRVQNLAEHIMHAEWYTVPEATVAAIARARAHGGRIVAVGTTSVRALESAAAQAQDGPLAAAQGDTRLFITPGYRYRIVDALLTNFHLPQSTLLMLVSALAGVAPIRRAYAHAVAERYRFFSYGDAMFIETPAP

SEQ ID NO: 64264 - protein, 347 aa, Bordetella pertussis
  REGION 1..347: note = sp|Q7VZ81|QUEA_BORPE S-adenosylmethionine:tRNA ribosyltransferase-isomerase OS=Bordetella pertussis (strain Tohama I / ATCC BAA-589 / NCTC 13251) OX=257313; GN = queA P E=3 SV=1
MPTPLTLADFDYHLPPELIAQSPAAERGGSRLLHLDAASRLHDRRFPDLAGLLRPHDLLVFNDTRVIKARLTGQKATGGKVEVLVERITAPDRALAHVRASKSPGPGMRLRLAEAFEAEVLGREGELFDLRFPAPVLDLLDAHGATPLPPYITHAADATDERRYQTVYAREPGAVAAPTAGLHFDQPMLEQLAAQGVQRAFVTLHVGAGTFQPVRVQNLAEHIMHAEWYTVPEATVAAIARARAHGGRIVAVGTTSVRALESAAAQAQDGPLAAAQGDTRLFITPGYRYRAVDALLTNFHLPQSTLLMLVSALAGVEPIRRAYAHAVAERYRFFSYGDAMFIETPAP

SEQ ID NO: 64265 - protein, 347 aa, Bordetella pertussis; identical to SEQ ID NO: 64264
  REGION 1..347: note = tr|A0A0T7CQY3|A0A0T7CQY3_BORP1 S-adenosylmethionine:tRNA ribosyltransferase-isomerase; OS = Bordetella pertussis (strain ATCC 9797 / DSM 5571 / NCTC 10739 / 18323) OX=5 68706 GN=queA PE=3 SV=1

SEQ ID NO: 64266 - protein, 353 aa, Bordetella petrii
  REGION 1..353: note = tr|A9HZW7|A9HZW7_BORPD S-adenosylmethionine:tRNA ribosyltransferase-isomerase OS=Bordetella petrii (strain ATCC BAA-461 / DSM 12804 / CCUG 43448) OX=340100 GN=queA P; E = 3 SV=1
MSSPSFTLSDFDYALPPELIAQTPAAQRGGSRLLHLDGAGAPHDRRFPDLAGLLRAGDLLVFNDTRVIKARLTGHKASGGKVEVLVERITEPDRALAHVRASKSPGPGTTLRLADAFDATVLGRAGELFDLRFPAPVLDLLDAHGATPLPPYITHAADATDEARYQTVYAREPGAVAAPTAGLHFDEAMLERLAALGVERAFVTLHVGAGTFQPVRVDNLADHVMHAEWYTVGQPVIDAIARARTRGGRVIAVGTTSVRALESAAAQNPHGPQAPLAPLQGDTRLFITPGYRYRVVDALVTNFHLPQSTLLMLVSALAGMEPIRRAYAHAVAQRYRFFSYGDAMFIESPASHS

SEQ ID NO: 64267 - protein, 402 aa, unidentified
  source 1..402: note = Bordetella pseudohinzii
  REGION 1..402: note = tr|A0A0M7I7Y2|A0A0M7I7Y2_9BORD S-adenosylmethionine:tRNA ribosyltransferase-isomerase; OS = Bordetella pseudohinzii OX=1331258 GN=queA PE=3 SV=1
MDEDESIHKAGAGRRAVTSGRGREAARPAGVYNSGLRADCAASFSSPVLSGRDNTVSTFTLSDFDYDLPPELIAQTPAAERAGSRLLHLDGQGKLHDRQFPDLLALLRPHDLLVFNDTRVIKARLAGQKATGGKVEVLVERITEPTRALAHVRASKSPGPGMRLELAGGAVTAEVLGRQGELFDLRFAGPVLDLLEAHGATPLPPYITHAAEHEDEQRYQTVYAREPGAVAAPTAGLHFDQAMLERLAAGGVQRAFVTLHVGAGTFQPVRVQNLDEHIMHAEWYTVPETTVQAIAAARRAGGRVIAVGTTSVRALESAAAQSADGPLAACQGDTRLFITPGYRYRVVDALVTNFHLPQSTLLMLVSALAGIDPIRRAYAHAVAGRYRFFSYGDAMFIESAQP

SEQ ID NO: 64268 - protein, 366 aa, Bordetella sp.
  REGION 1..366: note = tr|A0A2R4XIV2|A0A2R4XIV2_9BORD S-adenosylmethionine:tRNA ribosyltransferase-isomerase; OS = Bordetella sp. HZ20 OX=2163011 GN=queA PE=3 SV=1
MTTAPSTTLTLDDFNYELPQDLIAQFPAASRTDSRLLHLAADGSLVDRAFTDIMQLIRPGDLLVFNDTRVIKARLHASKRTGGRVEVLIERIISPHEALAHVRASKSPKPGTWLEFDSTVQKAGEPGSKAEVTAREEDLFLLRFEQPVLEVLDEIGHVPLPPYITHQDDDQDASRYQTVYARHPGAVAAPTAGLHFDQTLLDELARRGIKQAFVTLHIGAGTFQPVRESDLSRHKMHSEWYTIDQACADLIQETRRQGSRVIAVGTTSVRALESSAVANLGRVSAHSDQTRLFITPGFEWKVVDAMITNFHLPKSTLLMLVASFCGLQSMRDAYAHAVAQRYRFFSYGDAMFIEKPTIQEGFCHAV

SEQ ID NO: 64269 - protein, 350 aa, Bordetella sp.
  REGION 1..350: note = tr|A0A3T0NHP4|A0A3T0NHP4_9BORD S-adenosylmethionine:tRNA ribosyltransferase-isomerase; OS = Bordetella sp. J329 OX=1977852 GN=queA PE=3 SV=1
MSTLLLLSDYDYTLPPELIAQTPAARRDASRLLRLDPQAQLHDMHFSQLPALLRPADLLVFNDTRVIKARLFGIKHSGGKIEVLVERILSGTEVLAHIRSSKSPKPGSGIRLADAFDAEVLGRDGALFHLRFPADALSLLDQHGSTPLPPYIEHSPDAEDDSRYQTVYAREPGAVAAPTAGLHFDEAMLDRLAAQGVARAFVTLHVGAGTFQPVRAERLEDHVMHAERYTVPAATLEAIAQARAAGGRVIAVGTTSVRALESAAAQLAGKAPPPGQAMTGDTRLFITPGYRFHYIDALITNFHLPQSTLLMLVSALAGVEPIKRAYAHAVAERYRFFSYGDAMFIESPAA

SEQ ID NO: 64270 - protein, 382 aa, Bordetella trematum
  REGION 1..382: note = tr|A0A157SIR5|A0A157SIR5_9BORD S-adenosylmethionine:tRNA ribosyltransferase-isomerase; OS = Bordetella trematum OX=123899 GN=queA PE=3 SV=1
MAALCSSGVYNTGLSRRLATATLSNPCNGLGPQLPVSTLSLSDFDYVLPPELIAQAPAAERGGSRLLHLDAGGALHDRRFPDLAGLLRPHDLLVFNDTRVIKARLTGQKATGGKVEVLVERITEPTRALAHVRASKSPGRGMRLELAGGAIVAEVLGREGELFDLRFPGPVLALLDAHGATPLPPYITHAAQAEDDQRYQTVYAREPGAVAAPTAGLHFDEPMLERLAAQGVARAFVTLHVGAGTFQPVRVENLAEHVMHAEWYTVPEATVQAIAAARAAGGRVIAVGTTSVRALESAAAQAGGGPLAPAQGDTRLFITPGYRYQAVDALITNFHLPQSTLLMLVSALAGVEPIRRAYAHAVAGRYRFFSYGDAMFIETPQP

SEQ ID NO: 64271 - protein, 346 aa, Borrelia afzelii
  REGION 1..346: note = sp|Q0SPE3|QUEA_BORAP S-adenosylmethionine:tRNA ribosyltransferase-isomerase OS=Borrelia afzelii (strain PKo) OX=390236 GN=queA PE=3 SV=1
MKTKEFHFNLPYSLIAQYPSEKRGSSRLMVLDPKLQKIYHENSVNNILKYINSDTFIVFNNSKVRKSRMYAESEMGSNVEFLILDRIGTDLFTALISKSKKQIVGNVYKFPEGLMGKILSKNSSEIVLKFNDDVREDYFEKHGFVPIPPYIKRDYDKIDEDRYQTIYSKYVGSAASATAGLHFSRDLFSAFEKNNIEYDFITLHVGLGTFLPVRSKKVEEHNMHFETFLIKDCVANRLENAKFLGKKVLSIGTTTLRALESSYDNKLKKFKTGQQSTNLFIYPGKNYCFKFVDMLFTNFHTPQSTLLMLVSAFAGKDFVFSSYEEGINKGYKFFSYGDAMLVLNHI

SEQ ID NO: 64272 - protein, 348 aa, Borrelia anserina
  REGION 1..348: note = tr|W5SM97|W5SM97_BORAN S-adenosylmethionine:tRNA ribosyltransferase-isomerase OS=Borrelia anserina BA2; OX = 1313293 GN=queA PE=3 SV=1
MGRMNTKEFYFNLPYNLIAQYPSKKRGLSRLMVLDSGNQRIYHNDSINDILKYIDSNTFLIFNDSRVRKSRIYAKTEYGGSVEFLILDKLAGDTFTSLISKAKKQSIGRVYTFPQGLLAQIISKLGNEFVLKFNKCVDESYFEQYGLIPLPPYIKRNYDREDENRYRTIYSKYIGSSASATAGLHFSEELFYKLDENNIEYDFITLHVGLGTFLPVRTKTIEEHKMHFESFSIKNSVALRLEEAKALGKKILAIGTTTLRALESAYDKHKGFVRGEQKTDLFIYPGKGYKFKFVDMLFTNFHTPESTLLMLVSSFGGKDFVFNAYREAVKMNYKFFSYGDATLFLNHI

SEQ ID NO: 64273 - protein, 343 aa, Borrelia burgdorferi
  REGION 1..343: note = sp|O51053|QUEA_BORBU S-adenosylmethionine:tRNA ribosyltransferase-isomerase OS=Borrelia burgdorferi (strain ATCC 35210 / B31 / CIP 102532 / DSM 4680); OX = 224326 GN=qu eA PE=3 SV=2
MKTKEFHFNLSHSLIEQYPSEKRGSSRLIVLDPQLQKIYHKNSVNNILKYINSNIFNNSKARKSRIYAESEMSSNVEFLILDRIDTNLFTALVSKSKKQIIGNFYKFPEGLMDEILSKNSSEVVLKFNNNVGEDYFEKHCFVPLPSYIKRDYDKIDEDRYQTIYSKYVGSTASATAGLHFSRDLFSAFENNNIEYDFITLHVGAGTFLPVRSKKVEEHNMHFETFLIKDFVAVRLQNAKLLGKRILSIVTTTLRALESSYDNNLKKFKTGQQSTNLFIYPGKNYCFKFVDMLFTNFHTPQSTLLMLVSSFAGKDFVFSFYEEAINKGYKFFSYGDAMLILNNI

SEQ ID NO: 64274 - protein, 343 aa, Borrelia burgdorferi
  REGION 1..343: note = tr|A0A0H3C457|A0A0H3C457_BORBZ S-adenosylmethionine:tRNA ribosyltransferase-isomerase; OS = Borrelia burgdorferi (strain ZS7) OX=445985 GN=queA; PE = 3 SV=1
MKTKEFHFNLPHSLIEQYPSEKRGSSRLIVLDPQLQKIYHKNSVNNILKYINSNIFNNSKARKSRIYAESEMSSNVEFLILDRIGTNLFTALVSKSKKQIIGNFYKFPEGLMGEILSKNSSEVVLKFNNDVGEDYFEKHCFVPLPSYIKRDYDKIDEDRYQTIYSKYVGSAASATAGLHFSIDLFSVFENNNIEYDFITLHVGLGTFLPVRSKKVEEHNMHFETFLIKDFVAVRLQNAKLLGKKILSIVTTTLRALESSYDNNLKKFKTGQQSTNLFIYPGKNYCFKFVDMLFTNFHTPQSTLLMLVSSFAGKDFVFSFYEEAINKGYKFFSYGDAMLILNHI

SEQ ID NO: 64275 - protein, 345 aa, Borrelia coriaceae
  REGION 1..345: note = tr|W5STA3|W5STA3_9SPIR S-adenosylmethionine:tRNA ribosyltransferase-isomerase OS=Borrelia coriaceae Co53; OX = 1313292 GN=queA PE=3 SV=1
MDTKEFYFDLPYNLIAQYPSEKRGLSRLMVLDSGNQKIYHNDSINDIFKYINSNTFLVFNDSRVRKSRIYAKTDHGGSVEFLILDRLSGDTFTSMIAKAKRQRVGKVYMFPRNLLAQIISRSGNEFILKFDKCVDEAYFEQYGLIPLPPYIKRSYDIEDEERYRTIYSKYIGSSASATAGLHFSEELFSELDKNNIEYDFITLHVGLGTFLPVRTKTIEEHKMHFENFSIKDSVALRLEEAKALGKNILAIGTTTLRALESAYDKQKGFVRGDQKTNLFIYPGKGYKFKFVDMLFTNFHTPESTLLMLVSSFGGKDFVFNAYREAVKMKYKFFSYGDATLFLNHM

SEQ ID NO: 64276 - protein, 346 aa, Borrelia crocidurae
  REGION 1..346: note = tr|I0FBF0|I0FBF0_BORCA S-adenosylmethionine:tRNA ribosyltransferase-isomerase OS=Borrelia crocidurae (strain Achema) OX=1155096 GN=queA PE=3 SV=1
METKEFYFDLPHHLIAQYPSERRGLAKLMVLDSICQKIYHTDSVNDILKYIGSNTFLVFNDSRVRKSRIYAKTDYDGNVEFLILNRLTGDTFTSLISKAKRQKVGKVYRFPQDLSAQIISKLDNEFTIKFNRYVDESYFEQYGFIPLPPYIKRDYDKENEDRYQTIYSKYIGSSASATAGLHFSEELFSKFAQNDIEYDFITLHVGLGTFLPVRTKTIEKHKMHFESFSIRDSVACRLERAKSLGKKILAVGTTTLRALESAYDKQKGRFTRGEQKTNLFIYPGKNYKFKSVDMLFTNFHTPESTLLMLVSSFGGKDFVFNAYREAVTMNYRFFSYGDATLFLSHI

SEQ ID NO: 64277 - protein, 352 aa, Borrelia crocidurae
  REGION 1..352: note = tr|W5SGS6|W5SGS6_9SPIR S-adenosylmethionine:tRNA ribosyltransferase-isomerase OS=Borrelia crocidurae DOU; OX = 1293575 GN=queA PE=3 SV=1
MILVGSMETKEFYFDLPHHLIAQYPSERRGLAKLMVLDSICQKIYHTDSVNDILKYIGSNTFLVFNDSRVRKSRIYAKTDYDGNVEFLILNRLTGDTFTSLISKAKRQKVGKVYRFPQDLSAQIISKLDNEFTIKFNRYVDESYFEQYGFIPLPPYIKRDYDKEDEDRYQTIYSKYIGSSASATAGLHFSEELFSKFAQNDIEYDFITLHVGLGTFLPVRTKTIEKHKMHFESFSIRDSVACRLERAKSLGKKILAVGTTTLRALESAYDKQKGRFTRGEQKTNLFIYPGKNYKFKSVDMLFTNFHTPESTLLMLVSSFGGKDFVFNAYREAVTMNYRFFSYGDATLFLSHI

SEQ ID NO: 64278 - protein, 352 aa, Borrelia duttonii
  REGION 1..352: note = tr|B5RLM9|B5RLM9_BORDL S-adenosylmethionine:tRNA ribosyltransferase-isomerase OS=Borrelia duttonii (strain Ly) OX=412419 GN=queA PE=3 SV=1
MILVGSMETKEFYFDLPHHLIAQYPSERRGLAKLMVLDSICQKIYHTDSVNDILKYIGSNTFLVFNDSRVRKSRIYAKTDYDGNVEFLILNRLTGDTFTSLISKAKRQKVGKVYRFPQDLSAQIISKLDNEFTIKFNRYVDESYFEQYGFIPLPPYIKRDYDKEDEDRYQTIYSKYIGSSASATAGLHFSEELFSKFAQNNIEYDFITLHVGLGTFLPVRTKTIEKHKMHFESFSIRDSVACRLERAKSLGKKILAVGTTTLRALESAYDKQKGRFTRGEQKTNLFIYPGKNYKFKSVDMLFTNFHTPESTLLMLVSSFGGKDFVFNAYREAVTMNYRFFSYGDATLFLSHI

SEQ ID NO: 64279 - protein, 352 aa, Borrelia duttonii
  REGION 1..352: note = tr|W6TLB8|W6TLB8_9SPIR S-adenosylmethionine:tRNA ribosyltransferase-isomerase OS=Borrelia duttonii CR2A; OX = 1432657 GN=queA PE=3 SV=1
MILVGSMETKEFYFDLPHHLIAQYPSERRGLAKLMVLDSICQKIYHTDSVNDILKYIGSNTFLVFNDSRVRKSRIYAKTDYDGNVEFLILNRLTGDTFTSLISKAKRQKVGKVYRFPQDLSAQIISKLDNEFTIKFNRYVDESYFEQYGFIPLPPYIKRDYDKEDEDRYQTIYSKYIGSSASATAGLHFSEELFSKFAQNNIEYDFITLHVGLGTFLPVRTKTIENHKMHFESFSIRDSVACRLERAKSLGKKILAVGTTTLRALESAYDKQKGRFTRGEQKTNLFIYPGKNYKFKSVDMLFTNFHTPESTLLMLVSSFGGKDFVFNAYREAVTMNYRFFSYGDATLFLSHI

SEQ ID NO: 64280 - protein, 348 aa, Borrelia hermsii
  REGION 1..348: note = tr|A0A0E1C0J7|A0A0E1C0J7_BORHE S-adenosylmethionine:tRNA ribosyltransferase-isomerase; OS = Borrelia hermsii MTW OX=1313291 GN=queA PE=3 SV=1
MDRMDTKEFYFDLPYNLIAQYPSEKRGLSRLMVLDSGKQKIYHNDSINDIFKYIDSNTFLVFNDSRVRKSRIYAKTDHGGSVEFLILDRLTGDTFTSLISKSKKQSIGRVYTLPQGLLAQIISKAGNEFTLKFNKCVDESYFEQHGLIPLPPYIKRNYDREDEDRYRTIYSKYIGSSASATAGLHFSEELFSKLDEKNIEYDFITLHVGLGTFLPVRTKTIEEHKMHFESFSIKDSVALRLEEAKALGKKILAVGTTTLRALESAYDKQRGLIRGDQKTNLFIYPGKGYEFKFIDMLFTNFHTPESTLLMLVSSFGGKDFVFTAYREAVKMNYKFFSYGDATLFLNHI

SEQ ID NO: 64281 - protein, 345 aa, Borrelia hermsii
  REGION 1..345: note = tr|A0A142JCH4|A0A142JCH4_BORHE S-adenosylmethionine:tRNA ribosyltransferase-isomerase; OS = Borrelia hermsii OX=140 GN=queA PE=3 SV=1
MDTKEFYFDLPHNLIAQYPSEKRGLSRLMVLDSGKQKIYHNDSINDIFKYIDSNTFLVFNDSRVRKSRIYAKTDHGGSVEVLILDRLTGDTFTSLISKAKKQSIGRVYTLPQGLLAQIISKSGNEFTLKFNKCVDESYFEQHGLIPLPPYIKRNYDREDEDRYRTIYSKYIGSSASATAGLHFSEELFSKLDEKNIEYDFITLHVGLGTFLPVRTKTIEEHKMHFESFSIKDSVALRLEEAKALGKKILAVGTTTLRALESAYYKQRGLIRGDQKTNLFIYPGKGYEFKFIDMLFTNFHTPESTLLMLVSSFGGKDFVFTAYREAVKMNYKFFSYGDATLFLNHI

SEQ ID NO: 64282 - protein, 346 aa, unidentified
  source 1..346: note = Borrelia mayonii
  REGION 1..346: note = tr|A0A1L6VPB6|A0A1L6VPB6_9SPIR S-adenosylmethionine:tRNA ribosyltransferase-isomerase; OS = Borrelia mayonii OX=1674146 GN=queA PE=3 SV=1
MKTKEFHFNLPYSLIAQYPSEKRGSSRLMVLDPKLQKIYHEDSVNNILKYINSDTFIVFNNSKVRKSRIYAESEMGSNVEFLILDRIGANLFTSLISKSKKQIVGNLYKFPEGLIGKILSKNSSEIVLKFDLDVGEDYFEKHGFVPIPPYIKRDYDKIDEDRYQTIYSQYVGSTASATAGLHFSRDLFYAFEKNNIEYDFITLHVGLGTFLPVRSKKVEEHSMHFETFLIKDCVANRLENVKFLGKKILSIGTTTLRALESSYDNKLKKFKTGQQSTNLFIYPGKNYCFKFVDMLFTNFHTPQSTLLMLVSSFAGKDFVFSSYEEAINTGYKFFSYGDAMLVLNHI

SEQ ID NO: 64283 - protein, 345 aa, Borrelia miyamotoi
  REGION 1..345: note = tr|A0A2D1YZA6|A0A2D1YZA6_9SPIR S-adenosylmethionine:tRNA ribosyltransferase-isomerase; OS = Borrelia miyamotoi OX=47466 GN=queA PE=3 SV=1
MDTKEFYFDLPYNLIAQYPSEKRGLSRLMVLDSGNRKIYHNASISDIFKYIDSNVFLVFNDSRVRKSRIYASTDHGGSVEFLILDRLTKDTFTSLIAKAKRQNIGKVYKFPTDLLGQIISRSDNEFILKFNRCVDESYFERYGLMPLPPYIKRSYDREDEERYQTIYSKCVGSSASATAGLHFSEELFFKLYENNIEYCFITLHVGLGTFLPVRTKTIEEHKMHFETFSIKDSVAVKLEEAKALGKKILAVGTTTLRALESSYDKQKGFVRGDQKTNLFIYPGKGYEFKFVDMLFTNFHTPESTLLMLVSSFGGKDFVFNAYKEAIKMDYKFFSYGDATLFLNHI

SEQ ID NO: 64284 - protein, 345 aa, Borrelia miyamotoi
  REGION 1..345: note = tr|A0A1D8TEG3|A0A1D8TEG3_9SPIR S-adenosylmethionine:tRNA ribosyltransferase-isomerase; OS = Borrelia miyamotoi OX=47466 GN=queA PE=3 SV=1
MDTKEFYFDLPYKLIAQYPSEKRGLSRLMVLDSGNRKIYHNASISDIFKYIDSNIFLVFNDSRVRKSRIYASTDHGLSVEFLILDRLTEDTFTSLISKAKRQNIGKVYKFPKDLLGQIISRSDNEFILKFNRCVDESYFERYGLIPLPPYIKRSYDREDEERYQTIYSKCVGSSASATAGLHFSKELFFKLYENNIEYCFITLHVGLGTFLPVRTKTIEEHKMHFETFSIKDSVAVKLEEAKALGKKILAVGTTTLRALESSYDKQKGFVRGEQKTNLFIYPGKGYEFKFVDMLFTNLHTPESTLLMLVSSFGGKDFVFNAYKEAIKMDYKFFSYGDATLFLNHI

SEQ ID NO: 64285 - protein, 348 aa, Borrelia parkeri
  REGION 1..348: note = tr|W5SRW2|W5SRW2_BORPR S-adenosylmethionine:tRNA ribosyltransferase-isomerase OS=Borrelia parkeri SLO; OX = 1313294 GN=queA PE=3 SV=1
MEKMDTKEFYFNLPCKLIAQYPSEQRGLSRLMVLDSGNQKIYHNDSINDIFKYINSNTFLVFNDSRVRKSRIYAKTEHGGSIEFLILDRLAGDKFTSLISKAKKQNIGTVYMFPQGLLAQIISKTGNEFIIKFNKCVNESYFEQHGLIPLPPYIKRNYDREDEERYRTIYSKYIGSSASATAGLHFSEELFSKLDENNIEYDFITLHVGLGTFLPVRTKTIEEHKMHFESFSIKNSVALRLEEAKALGKKILAIGTTTLRALESAYDKQKGFVRGEQKTNLFIYPGKGYEFKFVDMLFTNFHTPESTLLMLVSSFGGKDFVFSAYREAVKMNYKFFSYGDATLFLNHM

SEQ ID NO: 64286 - protein, 352 aa, Borrelia recurrentis
  REGION 1..352: note = tr|B5RQK4|B5RQK4_BORRA S-adenosylmethionine:tRNA ribosyltransferase-isomerase OS=Borrelia recurrentis (strain A1) OX=412418 GN=queA PE=3 SV=1
MILVGSMETKEFYFDLPHHLIAQYPSERRGLAKLMVLDSICQKIYHTDSVNDILKYIGSNTFLVFNDSRVRKSRIYAKTDYDGNVEFLILNRLTGDTFTSLISKAKRQKVGKVYRFPQDLSAQIISKLDNEFTIKFNRYVDESYFEQYGFIPLPPYIKRDYDKEDEDRYQTIYSKYIGSSASATAGLHFSEELFSKFAQNNIEYDFITLHVGLGTFLPVRTKTIEKHKMHFESFSIRDSVACRLERAKSLGKKILAVGTTTLRALESAYDKQKGRFTRGEQKTNLFIYPGKNYKFKSVDMLFTNFHTPESTLLMLVSSFGGKDFVFDAYREAVTMNYRFFSYGDATLFLSHI

SEQ ID NO: 64287 - protein, 346 aa, Borrelia sp.
  REGION 1..346: note = tr|A0A5J6W942|A0A5J6W942_9SPIR tRNA preQ1(34) S-adenosylmethionine ribosyltransferase-isomerase QueA; OS = Borrelia sp. CA690 OX=1476873 GN=queA PE=4 SV=1
MKTKEFHFNLSNSLIAQYPSEKRGSSRLMVLDPQLQKIYHEHSVNNIFKYINSDIFIVFNDSKVRKSRIYAESEMGSNVEFLILDRIGTNLFTALVSKSKKQIVGNLYKFPEGLMGEILSKNSSEIVLKFNKDVGEDYFEKHGFIPLPPYIKRDYDKIDEDRYQTIYSKYVGSAASATAGLHFSKDLFSAFEKNNIEYDFITLHVGLGTFLPVRSKKVEEHNMHFETFLMKDCVSERLQNAKLLGKKILSIGTTTLRTLESSYDNTLKKFKTGPQSTNLFIYPSKNYCFKFVDMLFTNFHTPQSTLLMLVSSFAGKDFVFSSYEEAINKGYKFFSYGDAMLVLNHI

SEQ ID NO: 64288 - protein, 344 aa, Borrelia turcica
  REGION 1..344: note = tr|A0A386PLV4|A0A386PLV4_9SPIR S-adenosylmethionine:tRNA ribosyltransferase-isomerase; OS = Borrelia turcica IST7 OX=1104446 GN=queA PE=3 SV=1
MDTKEFYFDLPSNLIAQHPSKKRGLSRLMVLDPSNQKVYHDHSVNDILKYINSNTFLVFNDSRVRKSRIYAKTDNGGSVEFLMLARIADDIFTCLISKARRQNVGRVYKFPQDLLAQVISKTDSEFTLKFNQNVDESYFEQYGLIPLPPYIKRNYEKEDEERYRTIYSKYIGSTASATAGLHFSRELFSLLDKNRIEYDFITLHVGLGTFLPVRTKRIEEHKMHFERFFIKDSVALRLEKAKALGKKILAIGTTTLRALESAYDNSNFMRGEQQTDLFIYPGKNYDFKFVDMLFTNFHTPESTLLMLVSSFGGKDFVFSSYREAVEMNYKFFSYGDATLFLNHV

SEQ ID NO: 64289 - protein, 345 aa, Borrelia turicatae
  REGION 1..345: note = tr|A1QYH4|A1QYH4_BORT9 S-adenosylmethionine:tRNA ribosyltransferase-isomerase OS=Borrelia turicatae (strain 91E135) OX=314724 GN=queA PE=3 SV=1
MDTKEFYFDLPCKLIAQYPSEKRGLSRLMVLDSGNQKIYHNDSINDIFKYINSNTFLVFNDSRVRKSRIYAKTEHGGSIEFLILDRLAGDEFTSLISKAKKQNIGKVYMFPQGLLAQIISKTDNEFIIKFNKCVSESYFEQHGLIPLPPYIKRNYDRADEERYRTIYSKYIGSSASATAGLHFSEELFSKLDENNIEYDFITLHVGLGTFLPVRTKTIEEHKMHFESFSIKNSVALRLEESKALGKKILAIGTTTLRALESAYDKQKGFVRGEQKTNLFIYPGKGYEFKFVDMLFTNFHTPESTLLMLVSSFGGKDFVFSAYREAVKMNYKFFSYGDATLFLNHM

SEQ ID NO: 64290 - protein, 345 aa, Borrelia turicatae
  REGION 1..345: note = tr|A0A172XA58|A0A172XA58_BORTU S-adenosylmethionine:tRNA ribosyltransferase-isomerase; OS = Borrelia turicatae OX=142 GN=queA PE=3 SV=1
MDTKEFYFDLPCKLIAQYPSEKRGLSRLMVLDSGNQKIYHNDSINDIFKYINSNTFLVFNDSRVRKSRIYAKTEHGGSIEFLILDRLAGDEFTSLISKAKKQNIGKVYMFPQGLLAQIISKTDNEFIIKFNKCVSESYFEQHGLIPLPPYIKRNYDRADEERYRTIYSKYIGSSASATAGLHFSEELFSKLDENNIEYDFITLHVGLGTFLPVRTKTIEEHKMHFESFSIKNSVALRLEEAKALGKKILAIGTTTLRALESAYDKQKGFVRGEQKTNLFIYPGKGYEFKFVDMLFTNFHTPESTLLMLVSSFGGKDFVFSAYREAVKMNYKFFSYGDATLFLNHM

SEQ ID NO: 64291 - protein, 346 aa, unidentified
  source 1..346: note = Borreliella bavariensis
  REGION 1..346: note = sp|Q662Z1|QUEA_BORBP S-adenosylmethionine:tRNA ribosyltransferase-isomerase OS=Borreliella bavariensis (strain ATCC BAA-2496 / DSM 23469 / PBi) OX=290434 GN=queA; PE = 3 SV=1
MKTKEFHFNLPYSLIAQYPSEKRGSSRLMVLDPKLQKIYHENSVNNILKYINSDTFIIFNNSKVRKSRMYAESELGNNIEFLILDRIGTDLFTALISKSKKQIVGNVYKFPEGLMGEILSKNNSEIVLKFDNNVDEDYFEKHGFVPIPPYIKRDYDKIDEDRYQTVYSKYVGSAASATAGLHFSRDLFSTFEKNNIEYDFITLHVGLGTFLPVRSKKVEEHNMHFETFLIEDCVATRLENAKFLGKKILSIGTTTLRALESSYDNKLKKFKTGQQSTNLFIYPGKNYCFKFVDMLFTNFHTPQSTLLMLVSSFAGKDFVFSSYEEAINKGYKFFSYGDAMLVLNHI

SEQ ID NO: 64292 - protein, 346 aa, unidentified
  source 1..346: note = Borreliella bissettii
  REGION 1..346: note = tr|A0A1L8ZDR3|A0A1L8ZDR3_BORBI S-adenosylmethionine:tRNA ribosyltransferase-isomerase; OS = Borreliella bissettii OX=64897 GN=queA PE=3 SV=1
MKTKEFHFNLPYSLIAQYPSEKRGSSRLMVLDPKLQKIYHEDSVSNILKYINSDTFIIFNNSKVRKSRMYAESEMGSNVEVLILDRIDTNSFTALISKSKKQIVGNLYKFPEGLIGEILSKNSSEIVLKFDVDVGEDYFEKHGFVPIPPYIKRDYEKMDEDRYQTVYSKYVGSAASATAGLHFSKDLFSAFEKNNIEYDFITLHVGLGTFLPVRSKKVEEHNMHFETFLIKDCVANRLQNAKFLGKKILSIGTTTLRALESSYDNKLKKFKTGQQSTNLFIYPGKNYCFKFVDMLFTNFHTPQSTLLMLVSSFAGKDFVFSSYEEAINTGYKFFSYGDAMLVLNHI

SEQ ID NO: 64293 - protein, 346 aa, unidentified
  source 1..346: note = Borreliella bissettii
  REGION 1..346: note = tr|G0AKI5|G0AKI5_BORBD S-adenosylmethionine:tRNA ribosyltransferase-isomerase OS=Borreliella bissettii (strain DN127) OX=521010 GN=queA PE=3 SV=1
MKTKEFHFNLPYSLIAQYPSEKRGSSRLMVLDPKLQKIYHEDSVSNILKYINSDTFIIFNNSKVRKSRMYAESEMGSNVEVLILDRIDTSSFTALISKSKKQIVGNLYKFPEGLIGEILSKNSSEIVLKFDVDVGEDYFEKHGFVPIPPYIKRDYEKMDEDRYQTVYSKYVGSAASATAGLHFSKDLFSAFEKNNIEYDFITLHVGLGTFLPVRSKKVEEHNMHFETFLIKDCVANRLQNAKFLGKKILSIGTTTLRALESSYDNKLKKFKTGQQSTNLFIYPGKNYCFKFVDMLFTNFHTPQSTLLMLVSSFAGKDFVFSSYEEAINTGYKFFSYGDAMLVLNRI

SEQ ID NO: 64294 - protein, 111 aa, unidentified
  source 1..111: note = Borreliella burgdorferi
  REGION 1..111: note = tr|A0A0E1U9Z3|A0A0E1U9Z3_BORBG S-adenosylmethionine:tRNA ribosyltransferase-isomerase; OS = Borreliella burgdorferi 64b OX=498740 GN=BBU64B_0022; PE = 3 SV=1
MKTKEFHFNLPHSLIEQYSSEKRGSSRLIVLDPQLQKIYHKNSVNNILKYINSNIFNNSKARKSRIYAESEMSSNVEFLILDRIGTNLFTALVSKSKKQIIGNFYKFPEGL

SEQ ID NO: 64295 - protein, 232 aa, unidentified
  source 1..232: note = Borreliella burgdorferi
  REGION 1..232: note = tr|A0A0E1UFY8|A0A0E1UFY8_BORBG S-adenosylmethionine:tRNA ribosyltransferase-isomerase; OS = Borreliella burgdorferi 64b OX=498740 GN=queA PE=3 SV=1
MGEILSKNSSEVVLKFNNDVGEDYFEKHCFVPLPSYIKRDYDKIDEDRYQTIYSKYVGSAASATAGLHFSRDLFSAFENNNIEYDFITLHVGLGTFLPVRSKKVEERNMHFETFLIKDFVAVRLQNAKLLGKRILPIVTTTLRALESSYDNNLKKFKTGQQSTNLFIYPGKNYCFKFFDMLFTNFHIPQSTLLMLVSSFAGKDFVFSSYKEAVNKGYKFFSYGDAMLILNHI

SEQ ID NO: 64296 - protein, 346 aa, unidentified
  source 1..346: note = Borreliella chilensis
  REGION 1..346: note = tr|A0A0A7UUU7|A0A0A7UUU7_9SPIR S-adenosylmethionine:tRNA ribosyltransferase-isomerase; OS = Borreliella chilensis OX=1245910 GN=queA PE=3 SV=1
MKTKEFHFNLPYSLIAQYPSEKRGSSRLMVLDPKFQKIYHEDSVNNILKYVNSDTFIIFNNSKVRKSRIYAESEMGSNVEFLILDRIGTDLFTALISKSKKQIVGNVYKFPEGLIGKILSKNSNEIVLRFDDTIGEDYFERHGFVPIPPYIKRDYDKIDEDRYQTVYSKYVGSAASATAGLHFSKDLFSVFEENNIEYDFITLHVGLGTFLPVRSKKVEEHRMHFETFLIKDCVADRLENAKSLGKKILAIGTTTLRALESSYNNKLKKFKTGQQSTNLFIYPGKNYCFNFVDMLFTNFHTPQSTLLMLVSSFAGKDFVFNSYEEAIKRNYKFFSYGDAMLFLNHI

SEQ ID NO: 64297 - protein, 102 aa, unidentified
  source 1..102: note = Borreliella finlandensis
  REGION 1..102: note = tr|C0ANT0|C0ANT0_9SPIR S-adenosylmethionine:tRNA ribosyltransferase-isomerase OS=Borreliella finlandensis; OX = 498741 GN=BSV1_0024 PE=3 SV=1
MCKILSKSSSEVVLKFNNDVGEDYFEKHGFVPLPPYIKRDYDKIDENRYQTIYSKYVGSAASATAGLHFSRDLFSALLKITILNMILSLFMWGAWDFSSYKI

SEQ ID NO: 64298 - protein, 53 aa, unidentified
  source 1..53: note = Borreliella finlandensis
  REGION 1..53: note = tr|C0ANS8|C0ANS8_9SPIR S-adenosylmethionine:tRNA ribosyltransferase-isomerase OS=Borreliella finlandensis; OX = 498741 GN=queA PE=3 SV=1
MLFTNFHTPQSTLLMLVSSFAGKDFVFSSYEEAINKGYKFFSYGDAMLILNHI

SEQ ID NO: 64299 - protein, 346 aa, unidentified
  source 1..346: note = Borreliella garinii
  REGION 1..346: note = tr|B7XTB2|B7XTB2_BORGR S-adenosylmethionine:tRNA ribosyltransferase-isomerase OS=Borreliella garinii PBr; OX = 498743 GN=queA PE=3 SV=1
MKTKEFHFNLPYSLIAQYPSEKRGSSRLMVLDPKLQKIYHENSVNNILKYINSDTFIIFNNSKVRKSRMYAESEMGNNIEFLILDRIGTDLFTALISKSKKQIVGNVYKFPEGLMGEILSKNNSEIVLKFDNNVDEDYFEKHGFVPIPPYIKRDYDKIDEDRYQTVYSKYVGSAASATAGLHFSRDLFSAFEKNNIEYDFITLHVGLGTFLPVRSKKVEEHNMHFETFLIENSVAARLENAKFLGKKILSIGTTTLRALESSYDNKLKKFKTGQQSTNLFIYPGKNYCFKFVDMLFTNFHTPQSTLLMLVSSFAGKDFVFSSYEEAINKGYKFFSYGDAMLVLNHI

SEQ ID NO: 64300 - protein, 346 aa, unidentified
  source 1..346: note = Borreliella japonica
  REGION 1..346: note = tr|A0A1G4PXL2|A0A1G4PXL2_BORJA S-adenosylmethionine:tRNA ribosyltransferase-isomerase; OS = Borreliella japonica OX=34095 GN=queA PE=3 SV=1
MKTKEFHFNLPYSLIAQYPSEKRGTSRLMVLDPKLQKNYHENSVNNILKYINSDTFIIFNNSKVRKSRMYAESEMGSNVEFLILDRIGTDLFTALISKSKKQIVGNVYKFPEGLVGEILSKNSSEIVLKFNNDVGEDYFEKYGFIPIPPYIKRDYDKIDEDRYQTVYSKYVGSAASATAGLHFSQDLFSAFKKNNIEYDFITLHVGLGTFLPVRSKKVEEHNMHFETFLIKDCVADRLENAKLLGKKILSIGTTTLRALESAYDNKLKKFKTGQQSTNLFIYPGKNYCFKFVDMLFTNFHTPQSTLLMLVSSFAGKDFVFSSYEEAINKGYKFFSYGDAMLVLNHI

SEQ ID NO: 64301 - protein, 346 aa, unidentified
  source 1..346: note = Borreliella spielmanii
  REGION 1..346: note = tr|B9X931|B9X931_9SPIR S-adenosylmethionine:tRNA ribosyltransferase-isomerase OS=Borreliella spielmanii A14S OX=498742 GN=queA PE=3 SV=1
MKTKEFHFNLPYSLIAQYPSEKRGSSRLMVLDPKLQEIYHENSVNNILKYINSDTFIVFNNSKVRKSRIYAESELGSDVEFLILDKIDTDLFTALISKSKKQIVGSVYKFPEGLIGKILSKNGSEIVLKFDNDVGEDYFEKHGFVPIPPYIKRDYDKIDEDRYQTIYSKYVGSAASATAGLHFSRDLFTFFEKNNIEYDFITLHVGLGTFLPVRSKKVEEHNMHFETFLIKDCVADRLEKAKFLGKKILSIGTTTLRALESSYDDELKKFKTGQQSTNLFIYPGKNYCFKFVDMLFTNFHTPQSTLLMLVSAFAGKDFVFSSYEEAIKKGYKFFSYGDAMLVLNHI

SEQ ID NO: 64302 - protein, 346 aa, unidentified
  source 1..346: note = Borreliella valaisiana
  REGION 1..346: note = tr|D6RWM2|D6RWM2_BORVA S-adenosylmethionine:tRNA ribosyltransferase-isomerase OS=Borreliella valaisiana VS116 OX=445987 GN=queA PE=3 SV=1
MKTKEFHFNLPHSLIAQYPSEKRGSSRLMVLDPKLQKIYHENSVNNILKYINSDTFIIFNNSKVRKSRMYAESEIGSNVEFLILDRIGTAMFTALISKSKKQIVDNVYKFPEGLIGKILSKNGSEIVLKFDADVGEDYFEKHGFVPIPPYIKRDYDKIDEDRYQTVYSKYIGSAAAATAGLHFGKDLFSVFEKNNIEYDFVTLHVGLGTFLPVRSKRIEEHKMHFETFLIKDSVADRLENAKFLGKKILSIGTTTLRALESSYDHKLRKFKTGQQSTNLFIYPDQNYCFKFVDMLFTNFHTPQSTLLMLVSSFAGKDFVFNSYKEAVNQSYKFFSYGDAMLVLNHI

SEQ ID NO: 64303 - protein, 364 aa, unidentified
  source 1..364: note = Bosea lathyri
  REGION 1..364: note = tr|A0A1H5VWK5|A0A1H5VWK5_9BRAD S-adenosylmethionine:tRNA ribosyltransferase-isomerase; OS = Bosea lathyri OX=1036778 GN=queA PE=3 SV=1
MDVGLFDFELPEDRIALRPVSPRDAARMLVVRPDAVEPFEDRGIRDLVSLLRPGDALVLNDTRVIPSRLYGRRYRGETSARIEIMLHKREGADLWRAFARPAKKLALGDTITFGDDSEGIACELGRLQAEVVDRSEGGEVELRFAFSGAFLDEAIARFGELPLPPYIAGKRPTDQADEIDYQTVHAREDGAVAAPTAGLHFTPELFAALEAHGVSRHFVTLHVGAGTFLPVKAQDTRDHRMHAEWGSVSPETAAALNAVKAKGGRVIAVGTTSLRLLESATGEDGVIAPFSGDTAIFITPGYRFRAVDVLMTNFHLPRSTLFMLVSAFCGADIMKRAYAHAIAEKYRFYSYGDGSLLFRGAPGG

SEQ ID NO: 64304 - protein, 364 aa, unidentified
  source 1..364: note = Bosea lupini
  REGION 1..364: note = tr|A0A1H7H0E2|A0A1H7H0E2_9BRAD S-adenosylmethionine:tRNA ribosyltransferase-isomerase; OS = Bosea lupini OX=1036779 GN=queA PE=3 SV=1
MDVGLFDFDLPEERIALRPVTPRDAARLLVVRPGSPEPLADRGVRDLVELLQPGDALVLNDTRVIPSRLWGRRTRGEASARIEIMLHKREADNRWRAFARPAKKLNVGETIVFDSDGAGNACELARLQAEVEDKGEGGDIGLRFSLTGPYLDEAIARLGELPLPPYIAGKRATDQADAQDYQTTYAREEGAVAAPTAGLHFTPELFDALRTRGVSSHFVTLHVGAGTFLPVKAEDTDEHRMHAEWGTVGAATADALNAVHAAGGRIVAVGTTSLRLLESATGEDGVVKPFSGDTAIFITPGYRFRAVDLLMTNFHLPRSTLFMLVSAFSGLDVMKRAYAHAIAEGYRFYSYGDGSLLFRADASA

SEQ ID NO: 64305 - protein, 367 aa, Bosea sp.
  REGION 1..367: note = tr|A0A0N1BAE7|A0A0N1BAE7_9BRAD S-adenosylmethionine:tRNA ribosyltransferase-isomerase; OS = Bosea sp. AAP35 OX=1523417 GN=queA PE=3 SV=1
MDVGLFDFDLPEDRIALRPASPRDAARLLVVRPDAVKLFEDRGIRDLVSLLEPGDALVLNDTRVIPSRLYGRRARGETSARVEIMLHKREAQDRWLAFARPAKKLALGETIVFENALEGAACELGRLQAEVVAKADGGEVELRFALSGPHLDEAIARLGELPLPPYIAGKRATDAADASDYQTMHARTDGAVAAPTAGLHFTPELVAALEARGVTRHLVTLHVGAGTFLPVKADDTDDHRMHAEWGSVSPPTASALNAVRARGGRIVAVGTTSLRLLESATGEDGVIAPFSGDTAIFITPGYRFRAVDLLLTNFHLPRSTLFMLVSAFCGLDVMKRAYAHAIAGGYRFYSYGDGSLLHRAEPDQSRL

SEQ ID NO: 64306 - protein, 365 aa, Bosea sp.
  REGION 1..365: note = tr|A0A1Q3P189|A0A1Q3P189_9BRAD S-adenosylmethionine:tRNA ribosyltransferase-isomerase; OS = Bosea sp. 67-29 OX=1895723 GN=queA PE=3 SV=1
MNVDLFDFDLPEDRIALRPASPRDAARLLVVRPDTPEPFADMGIRDLPALLQPGDALVLNDTRVIPSRLRGRRYRGEDSARVEIMLHKRESEDRWLAFARPAKKLAPGETVVFDSEGASNACELGRLQAEVVARGEGGEVELRFSLTGAWLDEAIARLGELPLPPYIAGKRPADSADASDYQTAYARHEGAVAAPTAGLHFTPELFAALDARGVSRHFVTLHVGAGTFLPVKAEDTKEHRMHAEWGTVSAETAAALNAVRARGGRIVAAGTTSLRLLESATGEDGVVGPFSGDTAIFITPGYRFRAVDVLMTNFHLPRSTLFMLVSAFCGLDVMKRAYAHAIAEQYRFYSYGDGSLLFRASRPQA

SEQ ID NO: 64307 - protein, 361 aa, Bosea thiooxidans
  REGION 1..361: note = tr|A0A0Q3I862|A0A0Q3I862_9BRAD S-adenosylmethionine:tRNA ribosyltransferase-isomerase; OS = Bosea thiooxidans OX=53254 GN=queA PE=3 SV=1
MDVGLFDFDLPEERIALRPVSPRDAARLLVVRPDAPEPLEDRGVRDLVSLLQPGDALVLNDTRVIPSRLRGRRYRGEDSARIEIMLHKRESEDRWLAFARPAKKLLLGETVVFDSEGASNACELGRLQAEVIGKSEGGEVELRFSLTSAYLDEAIARLGELPLPPYIAGKRPTDSADATDYQTNFARKDGAVAAPTAGLHFTPELLAALEARGVSRHFVTLHVGAGTFLPVKAEDTDAHRMHAEWGTVSAETAAALNAVKAAGGRIVCVGTTSLRLIESAAAEDGTIRPFSGDTAIFITPGYRFKAVDLLVTNFHLPRSTLFMLVSAFCGLDVMKRAYAHAIAANYRFYSYGDGSLLFRAG

SEQ ID NO: 64308 - protein, 365 aa, unidentified
  source 1..365: note = Bosea vaviloviae
  REGION 1..365: note = tr|A0A0N1N2R7|A0A0N1N2R7_9BRAD S-adenosylmethionine:tRNA ribosyltransferase-isomerase; OS = Bosea vaviloviae OX=1526658 GN=queA PE=3 SV=1
MNIGLFDFDLPEDRIALRPASPRDAARLLVVNPAASEPLQDRGIRDLVALLRPGDALVLNDTRVIPSRLRGRRRRGDSVARVEIMLHKREGADRWRAFARPAKKLALGETIAFGDESEGSACELGRLQAEIVGKGEAGEVELRFTLAGSQLDEAIARLGELPLPPYIAGKRPTDHADASDYQTMHAREDGAVAAPTAGLHFTPDLVAALEAHGVSRHFVTLHVGAGTFLPVKADDTDDHRMHAEWGSVSAQTAAALNAVRQNGGRIVAVGTTSLRLLESATGEDGVIAPFSGDTAIFITPGYRFRAVDLLLTNFHLPRSTLFMLVSAFCGLELMQRAYAHAIAGGYRFYSYGDGSLLHRVSQPSS

SEQ ID NO: 64309 - protein, 361 aa, unidentified
  source 1..361: note = Bosea vaviloviae
  REGION 1..361: note = tr|A0A1D7U553|A0A1D7U553_9BRAD S-adenosylmethionine:tRNA ribosyltransferase-isomerase; OS = Bosea vaviloviae OX=1526658 GN=queA PE=3 SV=1
MDVGLFDFDLPEDRIALRPASPRDTARLLVVRPDAPEPFEDRGIRDLVGLLQPGDALVLNDTRVIPSRLRGRRFRGETSAGIEIMLHKREGADRWLAFARPAKKLTIGEMIVFGEAGASNVCELGRLEAEVQSKGEGGEVELRFALSGPMLDEAIARLGELPLPPYIAGKRPTDQQDASDYQTMHAREDGAVAAPTAGLHFTPDLVAALDAYGVSRHLVTLHVGAGTFLPVKVDDTSEHRMHAEWGSVSAETAAALNAVKAKGGRVVAVGTTSLRLLESATGEDGVIAPFSGDTAIFITPGYRFRAVDLLLTNFHLPRSTLFMLVSAFCGLNIMKRAYAHAIADNYRFYSYGDASLLQRGA

SEQ ID NO: 64310 - protein, 361 aa, Bosea vestrisii
  REGION 1..361: note = tr|A0A543NYR8|A0A543NYR8_9BRAD S-adenosylmethionine:tRNA ribosyltransferase-isomerase; OS = Bosea vestrisii OX=151416 GN=queA PE=3 SV=1
MDVGLFDFDLPEDRIALRPASPRDAARLLVVRPDAAQPFADLGIRDLPSLLQPGDALVLNDTRVIPSRLRGRRYRGEDSARVEIMLHKRESEDRWRAFARPAKKLALGETVMFDADGASNACELGRLQAEVLEKGEGGEVELRFSLTGAYLDEAIARLGELPLPPYIAGKRPADHADASDYQTSYARHEGAVAAPTAGLHFTPELFSGLEARGVSRHFVTLHVGAGTFLPVKADDTDEHRMHAEWGTVSAETAAALNAVKARGGRIVAAGTTSLRLLESATGEDGAIRPFSGDTAIFITPGYRFRAVDVLMTNFHLPRSTLFMLVSAFCGLDVMKRAYAHAIAEQYRFYSYGDGSLLFRAG

SEQ ID NO: 64311 - protein, 351 aa, unidentified
  source 1..351: note = Boseongicola aestuarii
  REGION 1..351: note = tr|A0A238IWD1|A0A238IWD1_9RHOB S-adenosylmethionine:tRNA ribosyltransferase-isomerase; OS = Boseongicola aestuarii OX=1470561 GN=queA PE=3 SV=1
MKLSDFDFDLPEGLIATRPARPRSASRLLVARADAIDEAHAIDLPSFLNPGDRLVLNDTKVIPARLSGVRTRSGEAGVTEARIEATLLDPLPDGNWMALLKPLRKVRDGEVIRFSDALSAEVVGRAEGTAALKFNLTGDDFDAALNASGAMPLPPYIEALRKSDDQDRVDYQTIWAKRTGAVAAPTASLHFDAALMEALASRGIEVSYVTLHVGAGTFLPVKVDDIADHKMHSERGSINAKAASEINATRAHGGRIVPVGTTAMRLIETAAGEDGTLSAWEGATDIFITPGYRFKIADGLMTNFHLPKSTLMMLVSAFMGSDRIRSIYAYAISREFRFFSYGDASLLLPKG

SEQ ID NO: 64312 - protein, 351 aa, unidentified
  source 1..351: note = Boseongicola sp.
  REGION 1..351: note = tr|A0A4P7JGN2|A0A4P7JGN2_9RHOB S-adenosylmethionine:tRNA ribosyltransferase-isomerase; OS = Boseongicola sp. CCM32 OX=2552942 GN=queA PE=3 SV=1
MKLSDFDFDLPEHLIATRPARPRSSARLLLAEGAKTQDRTVSDLPGILRPGDRLVLNDTRVIPARLTGLRLRDTGEEVVKARVEVTLLEPQANGSWSALAKPLRKLAIGETVVFSGDLSAEVTGLQGGLRLRFNLTGPDFDAALNAAGAMPLPPYIAGKRPADARDHEDYQTIWARRSGAVAAPTASLHFDEPLLAGLRAKGVTMSFVTLHVGAGTFLPVTVEDVTTHRMHAEWGEISAEAAADITATRAAGGRIIPVGTTALRLIETAAGADGQLAAWQGDTDIFIYPGYRFKIADALMTNFHLPKSTLMMLVSALMGAGRIREIYAHAIDHEYRFFSYGDASLLIPSQM

SEQ ID NO: 64313 - protein, 356 aa, unidentified
  source 1..356: note = Boseongicola sp.
  REGION 1..356: note = tr|A0A5D0RLU9|A0A5D0RLU9_9RHOB S-adenosylmethionine:tRNA ribosyltransferase-isomerase; OS = Boseongicola sp. HY14 OX=2603819 GN=queA PE=3 SV=1
MSDDLPEGARLSDYDFDLPDELIATRPARPRSSARLLVATPGRTADRIVTDLPEILSPGDRLVLNDTRVIPARLRGKRHRGEAVAGIEVTLLEPAPEGRWRALIKPLRKVAEGERIVFSDRLSATLIGRDDGQALIAFNLTGADFDAALAEAGQMPLPPYIEAKRRADERDRVDYQTIWAETPGAVAAPTASLHFDADLLAALRARGVTMTHVTLHVGAGTFLPVKTDDLSGHKMHAEWGEVTQTAADEINATKAAGHRVIPVGTTALRLIESAATGRGRIAPWRGPTDIFIRPGFTFQIADALMTNFHLPKSTLMMLVSALMGLERMRAVYAHAIEQRYRFFSYGDASLLLPKGD

SEQ ID NO: 64314 - protein, 345 aa, Bowmanella sp.
  REGION 1..345: note = tr|A0A4Q9XIY2|A0A4Q9XIY2_9ALTE S-adenosylmethionine:tRNA ribosyltransferase-isomerase; OS = Bowmanella sp. JS7-9 OX=1605368 GN=queA PE=3 SV=1
MKRSDFSFDLPDELIARYPTEKRSASRLLHLDGKSGTTQHLHFPDIVNLLEPGDLLVFNNTRVIPARLLGQKASGGKVEVLVERLLDERRVLAHVRASKAPKPGTKLILENSVEVTMLARHDALFELEFTSGDVLADLQAHGHMPLPPYIDRPDEQSDQERYQTVYSEKPGAVAAPTAGLHFDDEIFAALEAKGVNKAFVTLHVGAGTFQPVRADNILEHKMHSEYAEVPQEVVDAILATKAAGKRVVAVGTTSVRSLESAAQAAKHAGTGLAPFFADTDIFIYPGYEFQLVDAMLTNFHLPESTLIMLISAFAGRDNVMHAYQQAIAQRYRFFSYGDAMFINRA

SEQ ID NO: 64315 - protein, 353 aa, Brachymonas denitrificans
  REGION 1..353: note = tr|A0A1H8KEI3|A0A1H8KEI3_9BURK S-adenosylmethionine:tRNA ribosyltransferase-isomerase; OS = Brachymonas denitrificans DSM 15123 OX=1121117 GN=queA; PE = 3 SV=1
MSSASSSFTLSDFDFHLPPELIAQHPAAERTGSRLLDGTGNTPQDRQFRDLPSLLRAGDLMVFNDTQVVKARLFGHKPSGGRLELLVERVLHEPGLPNTVAAHMKVSKKPQPGTVLQMDGGFTATLLGRWPHEDGPIYRLQFSEDPYTLMAQHGHVPLPPYITHVDSAEDERRYQTVFARSPGAVAAPTAALHFDEAMLATLDAAGVQHANVTLHVGAGTFQPVKTENIAEHVMHFERYEVPQATADAIAACRARGGRVLAVGTTSVRALESWATRGEARGDTDIFITPGYQFRTVDMLLTNFHLPKSTLMMLVSAFAGYGHVMALYQHAIARHYRFFSYGDAMLLQRQTVSS

SEQ ID NO: 64316 - protein, 352 aa, Brachyspira aalborgi
  REGION 1..352: note = tr|A0A5C8F5E9|A0A5C8F5E9_9SPIR S-adenosylmethionine:tRNA ribosyltransferase-isomerase; OS = Brachyspira aalborgi OX=29522 GN=queA PE=3 SV=1
MIDYLNKETYNFYLPEKLIATNPNHKRDNCKLMTMNIKTGEIEHKIFYNIIDYLKKDDILILNDSKVIPARIYAKKKTGGIVEILLLQKKDSDESYWECLIKGKNIKEKDILYLDYDNIKAIIEKDNISTKLIKFSKPLNNDILENIGNIPLPPYIIQNRKKRGEKEYTENDKEFYQNIFAKNEGSVASPTSGLHFTKELLDKIKNKGIKICYITLHVGFSTFNPLKEDNIKNHIMHKEKFLIEKETADIIKESKINKKRIVACGTTVARVLESEFDKGDFKRLKGETDIFIYPPYKFKCVDALITNFHTPHSTLLAMVSAFAGYDNIMKSYKNAIENNYRFFSYGDAMFMY

SEQ ID NO: 64317 - protein, 352 aa, Brachyspira aalborgi
  REGION 1..352: note = tr|A0A5C8EXX2|A0A5C8EXX2_9SPIR S-adenosylmethionine:tRNA ribosyltransferase-isomerase; OS = Brachyspira aalborgi OX=29522 GN=queA PE=3 SV=1
MTDYLNKETYNFYLPENLIATNPNYDRDKCKLMTMNIKTGEIEHKIFYNIIDYLKKDDILILNDSKVIPARIYAKKKTGGIVEILLLQKKDSDESYWECLIKGKNIKEKDILFLNYDSIEAIIEKDNISTKLIKFSKPLNNEILNNIGNIPLPPYIIQNRKKRGESEYNDKDKEFYQNIFAKNEGSVASPTSGLHFTKELLDKIKNKGIKICYITLHVGFSTFNPLKEDNIKNHIMHKEKFLIEKETADIIKESKINKKRIVACGTTVARVLESEFDKVDFKRLKGETDIFIYPPYKFKCIDALITNFHTPHSTLLAMVSAFAGYDNIMKSYKNAIENNYKFFSYGDAMFMY

SEQ ID NO: 64318 - protein, 352 aa, unidentified
  source 1..352: note = Brachyspira catarrhinii
  REGION 1..352: note = tr|A0A4U7NB57|A0A4U7NB57_9SPIR S-adenosylmethionine:tRNA ribosyltransferase-isomerase; OS = Brachyspira catarrhinii OX=2528966 GN=queA PE=3 SV=1
MIDYLNKETYNFYLPENLIATNPNYDRDKCKLMTMNIKTGEIEHKFFYDIINYLKKDDILVLNDSKVIPARIYAKKKTGGIVEILLLQKINFSESYWECLIKGKNIKENDILFLDYDNIEAIIEKDNISTKSIKFSKPLDTNILNNIGNIPLPPYIIQNRKKRGESEYNDRDKEFYQNIYAKNEGSIASPTSGLHFTSELLSKIKNIGIEICYITLHVGFSTFNPLKEYNIKNHKMHEEKFVIEKETADLIKETKKNGRRIVACGTTVARVLESEFDNGDFKRLKGATNIFIYPPYEFKCIDALITNFHTPHSTLLAMVSAFAGYENIMKAYKNAIENNYRFFSYGDAMFMY

SEQ ID NO: 64319 - protein, 359 aa, unidentified
  source 1..359: note = Brachyspira hampsonii
  REGION 1..359: note = tr|A0A2U4F033|A0A2U4F033_9SPIR S-adenosylmethionine:tRNA ribosyltransferase-isomerase; OS = Brachyspira hampsonii 30446 OX=1289135 GN=queA PE=3 SV=1
MTDYFNKETYNFYLPENLIATNPNYERDHCKLMTLNKNTGKLEHKIFADIINYLNKDDVLVLNDSKVIPARIYAKKNTGGNSEILLLNKVNNDDSIWECIIRGKNIKEKDILYLNYSHLENAGGIEALIEKDNISTKIIKFSKSLTSDILDAIGKIPLPPYIIQSRKRKGEEEYNSHDKEFYQNVYAKNEGSIASPTSGLHFTKELLEKIKSIGVTVCYVTLHVGFSTFNPLKEDDLRNHIMHEEKFIIPKESYDIIINAKKEGRRVVSCGTTVARVLESEYDNYDFKRMEGSTNIFIYPPYKFKCVDALITNFHTPHSTLLAMVSAFAGYDNIMNAYKTAVENNYRFFSYGDAMFMFE

SEQ ID NO: 64320 - protein, 359 aa, unidentified
  source 1..359: note = Brachyspira hampsonii
  REGION 1..359: note = tr|A0A1E5NKN6|A0A1E5NKN6_9SPIR S-adenosylmethionine:tRNA ribosyltransferase-isomerase; OS = Brachyspira hampsonii OX=1287055 GN=queA PE=3 SV=1
MTDYFNKETYNFYLPENLIATNPNYERDHCKLMTLNKNTGKLEHKIFADIINYLNKDDVLVLNDSKVIPARIYAKKNTGGNSEILLLNKVNNDESTWECLIKGKNIKEADTLYLDYSHLDNVGNIEALIEKDNISTKLIKFSKPLTSDILDAIGKIPLPPYIIQSRKRKGEEEYNSNDKEFYQNVYAKNEGSIASPTSGLHFTKELLEKIKSIGVTVCYVTLHVGFSTFNPLKEDDLRNHIMHEEKFIIPKESYDIIINAKKDGRRVVSCGTTVARVLESEYDNYDFKRMEGSTNIFIYPPYKFKCVDALITNFHTPHSTLIAMVSAFAGYDNIMNAYKTAVENNYRFFSYGDAMFMFE

SEQ ID NO: 64321 - protein, 358 aa, Brachyspira hyodysenteriae
  REGION 1..358: note = tr|A0A3B6VQH1|A0A3B6VQH1_BRAHO S-adenosylmethionine:tRNA ribosyltransferase-isomerase; OS = Brachyspira hyodysenteriae ATCC 27164 OX=1266923; GN = queA PE=3 SV=1
MIDYLNKETYNFYLPENLIATTPNYERDHCKLMILNKSTGEIEHKIFSDIINYLNKDDILVLNDSKVIPARIYAKKNTGGNVEILLLNKFNDDDSTWECLIKGKNIKEKDILYLDYSNLENVGNIEAVLEKDNISTKLIKFSKPLTSEILDAIGKVPLPPYIIQSRKKKGEEEYNDKDKEFYQNVYAKNEGSIASPTSGLHFTKELLEKIKSMGITVCYVTLHVGFSTFNPLKEDDLRNHVMHEEKFIIPKESYDIIINAKKEGRRVVSCGTTVARVLESEYDNYDFKRMEGSTDIFIYPPYKFKCVDALITNFHTPHSTLLAMVSAFAGYDNIMNSYKLAIENNYRFFSYGDAMFMY

SEQ ID NO: 64322 - protein, 358 aa, Brachyspira hyodysenteriae
  REGION 1..358: note = tr|A0A3B6VDK9|A0A3B6VDK9_BRAHW S-adenosylmethionine:tRNA ribosyltransferase-isomerase; OS = Brachyspira hyodysenteriae (strain ATCC 49526 / WA1); OX = 565034 GN=queA PE=3SV=1
MIDYLNKETYNFYLPENLIATTPNYERDHCKLMILNKSTGEIEHKIFSDIINYLNKEDILVLNDSKVIPARIYAKKNTGGNVEILLLNKFNNDESTWECLIKGKNIKEKDILYLDYSNLENVGNIEAVLEKDNISTKLIKFSKPLTSEILDAIGKVPLPPYIIQSRKKKGEEEYNDKDKEFYQNVYAKNEGSIASPTSGLHFTKELLEKIKSMGITVCYVTLHVGFSTFNPLKEDDLRNHVMHEEKFIIPKESYDIIINAKKDGRRVVSCGTTVARVLESEYDNYDFKRMEGSTDIFIYPPYKFKCVDALITNFHTPHSTLLAMVSAFAGYDNIMNAYKTAVENNYRFFSYGDAMFMY

SEQ ID NO: 64323 - protein, 358 aa, Brachyspira intermedia
  REGION 1..358: note = tr|G0EKE9|G0EKE9_BRAIP S-adenosylmethionine:tRNA ribosyltransferase-isomerase OS=Brachyspira intermedia (strain ATCC 51140 / PWS/A) OX=1045858 GN=queA PE=3 SV=1
MIDYLNKETYNFYLPENLIATTPNYERDHCKLMILNKDTGKLEHKIFSDIINYLNKDDVLVLNDSKVIPARIYAKKNTGGNVEILLLNKFNDDESTWECLIKGKNIKEKDILYLNYSHLENVGDIEALIEKDNISTKIIKFSKPLTSDILDSIGKVPLPPYIIQSRKKKGEEEYNDKDKEFYQNVYAKNEGSIASPTSGLHFTKELLEKIKSMGITVCYVTLHVGFSTFNPLKEDDLRNHVMHEEKFIIPKESYDIIINAKKEGRRVVSCGTTVARVLESEYDNYDFKRMEGSTDIFIYPPYKFKCVDALITNFHTPHSTLLAMVSAFAGYDNIMNAYKTAVENNYRFFSYGDAMFMY

SEQ ID NO: 64324 - protein, 358 aa, Brachyspira murdochii
  REGION 1..358: note = tr|D5U856|D5U856_BRAM5 S-adenosylmethionine:tRNA ribosyltransferase-isomerase OS=Brachyspira murdochii (strain ATCC 51284 / DSM 12563 / 56-150) OX=526224 GN=queA; PE = 3 SV=1
MTDYLNKETYNFYLPENLIATEPNYERDHCRLMTLNKNTGELEHKIFADIINYLNKDDVLVLNDSKVIPARIYAKKSTGGNAEILLLNKVNNDESTWECLIKGKNIKEADTLYLDYAHLDNVGNIEALIEKDNISTKLIKFSKPLTNDILDTIGKIPLPPYIIQSRKRKGEEEYNSNDKEFYQNVYAKNEGSIASPTSGLHFTNELLDKIKSIGVTVCYVTLHVGFSTFNPLKEDDLRNHIMHEEKFIIPKDSYDIIINAKKEGRRIVSCGTTVARVLESEYDNYDFKRLEGSTNIFIYPPYKFKCVDALITNFHTPHSTLLAMVSAFAGYDNIMNAYKTAVDNNYRFFSYGDAMFIY

SEQ ID NO: 64325 - protein, 358 aa, Brachyspira pilosicoli
  REGION 1..358: note = tr|A0A381ACN3|A0A381ACN3_BRAPL S-adenosylmethionine:tRNA ribosyltransferase-isomerase; OS = Brachyspira pilosicoli OX=52584 GN=queA PE=3 SV=1
MIDYLNRETYNFYLPENLIATTPNYERDHCKLMTINKNTGEVEHKIFSDIINYLNKDDILVLNDSKVIPARIYAKKNTGGNAEILLLNKFNNSEDLWECLIKGKNIKENDILYLDYSHIENIGIIEASIIKDNISTKLIKFSKPLTSNILDTIGKIPLPPYIIQSRKKKGEEEYNDKDKEFYQNVYAKNEGSIASPTSGLHFTKELLEKIKSLGITICYVTLHVGFSTFNPIKEEDLKKHVMHEEKFSIPKETASIIINAKKDGRRIVSCGTTVARVLESEYNDFNFNRLEGSTNIFIYPPYKFKCVDALITNFHTPHSTLLAMVSSFAGYDNIMNAYKIAVENNYHFFSYGDATFLY

SEQ ID NO: 64326 - protein, 358 aa, Brachyspira pilosicoli
  REGION 1..358: note = tr|A0A3B6VQQ0|A0A3B6VQQ0_BRAPL S-adenosylmethionine:tRNA ribosyltransferase-isomerase; OS = Brachyspira pilosicoli P43/6/78 OX=1042417 GN=queA PE=3; SV = 1
MIDYLNRETYNFYLPENLIATTPNYERDHCKLMTINKNTGEVEHKIFSDIINYLNKDDILVLNDSKVIPARIYAKKNTGGNAEILLLNKFNNSEDLWECLIKGKNIKENDILYLDYSHIENIGIIEASIIKDNISTKLIKFSKPLTSNILDTIGKIPLPPYIIQSRKKKGEEEYNDKDKEFYQNVYAKNEGSIASPTSGLHFTKELLEKIKSLGITICYVTLHVGFSTFNPIKEEDLKKHVMHEEKFSIPKETANIIINAKKDGKRIVSCGTTVARVLESEYNDFNFNRLEGSTNIFIYPPYKFKCVDALITNFHTPHSTLLAMVSAFAGYDNIMNAYKIAVENNYHFFSYGDATFLY

SEQ ID NO: 64327 - protein, 347 aa, Brachyspira sp.
  REGION 1..347: note = tr|R5HKL4|R5HKL4_9SPIR S-adenosylmethionine:tRNA ribosyltransferase-isomerase OS=Brachyspira sp. CAG:484; OX = 1262759 GN=queA PE=3 SV=1
MKLSDYDYNLPEELIAQLPAEKRENSRMLVLNRDKHSILHKHFYDIVDLIEPDSMLVLNNTKVLPARLYGMKETGAKIEIFLLKQLENDEWEVLIKPSKRVKNGTIVRISSELSVEVIKRLEDDGEWLVKLIYEGNILEVLHRNGNIPLPPYIERKMQNEDIKKLDFERYQTVYAKDEGSVAAPTAGLHFTEEILKKLKDKGVDIVYVTLNVGLGTFRPVKCENILEHKMHSETFEITQEAAGAINTAKANGKTIIAVGTTTVRTLETAYSKFGELKACHDHSELFIYPPYEFKVVDKLITNFHLPKSTLLMLVSALAGKDFIFEAYNEAIKNNYRFYSYGDCMFIN

SEQ ID NO: 64328 - protein, 358 aa, Brachyspira sp.
  REGION 1..358: note = tr|A0A2A4IQS4|A0A2A4IQS4_9SPIR S-adenosylmethionine:tRNA ribosyltransferase-isomerase; OS = Brachyspira sp. G79 OX=1358104 GN=queA PE=3 SV=1
MIDYLNKETYNFYLPENLIATEPNYERDHCRLMTLNKNTGKLEHKIFADIINYLNKDDVLVLNDSKVIPARIYAKKSTGGNAEILLLNRANDDESTWECLIKGKNIKESDTLYLDYAHLDNVGNIEALIEKDNISTKLIKFSKPLTNDILDTIGKIPLPPYIIQSRKRKGEEEYNSNDKEFYQNVYAKNEGSIASPTSGLHFTNELLDKIKSIGVTVCYVTLHVGFSTFNPLKEDNLLNHVMHEEKFIIPKDSCNIIINAKKNGRRIVSCGTTVSRVLESEYDNYDFKRVEGSTNIFIYPPYKFKCVDALITNFHTPHSTLLAMVSAFAGYDNIMNAYKTAVDNNYRFFSYGDAMFMY

SEQ ID NO: 64329 - protein, 358 aa, unidentified
  source 1..358: note = Brachyspira suanatina
  REGION 1..358: note = tr|A0A0G4K594|A0A0G4K594_9SPIR S-adenosylmethionine:tRNA ribosyltransferase-isomerase; OS = Brachyspira suanatina OX=381802 GN=queA PE=3 SV=1
MIDYLNKETYNFYLPENLIATTPNYERDHCKLMILNKFTGEIEHKIFSDIINYLNKDDILVLNDSKVIPARIYAKKNTGGNVEILLLNKFNNDETTWECLIKGKNIKEKDILYLNYSHLENVGDIEALIEKDNISTKIIKFSKPLTSEILDAIGKVPLPPYIIQSRKKKGEEEYNDKDKEFYQNVYAKNEGSIASPTSGLHFTKELLEKIKSMGITVCYVTLHVGFSTFNPLKEDDLRNHVMHEEKFIIPKESYDIIINAKKDGRRVVSCGTTVARVLESEYDNYYFKRMEGSTDIFIYPPYKFKCVDALITNFHTPHSTLLAMVSAFAGYDNIMNAYKTAVENNYRFFSYGDAMFMY

SEQ ID NO: 64330 - protein, 388 aa, unidentified
  source 1..388: note = Bradymonadaceae bacterium
  REGION 1..388: note = tr|A0A3D8MZ78|A0A3D8MZ78_9DELT S-adenosylmethionine:tRNA ribosyltransferase-isomerase; OS = Bradymonadaceae bacterium TMQ3 OX=2283320 GN=queA PE=3; SV = 1
MSIDVKKLCAPPDIWNRPAGDVSLGDVEAYDYALPPELIAETPAAHREHARLLVYERDGEALTHTRFDTIVDHLRPGDLLIFNDTQVVPARMEAFKETGGRVELLALEVEQPAGEHRWSSPADGGLLHLRCMTRSSKPLREGTTLTVKSGDDAHPVELLEVSPGRALVAIAWPGSALAFLERFGRIPLPPYIEQRRRESQEAVAVDDRVRYQTVLASEPGAVAAPTAGLHFSRALLEELEQRGVERATLTLTVGPGTFKPVTTETLDDHPMHAEAYRIPEGLKAKVEACKARGGRVIAVGTTSARALEAEARREEPLLPGWRQTSIFLRPGDPLKMCDGLVTNFHLPRSTLLALVTAFVGYPAIRRIYNEAVAGAYRFYSYGDSSLLL

SEQ ID NO: 64331 - protein, 387 aa, unidentified
  source 1..387: note = Bradymonadales bacterium
  REGION 1..387: note = tr|A0A5C6XJD0|A0A5C6XJD0_9DELT S-adenosylmethionine:tRNA ribosyltransferase-isomerase; OS = Bradymonadales bacterium TMQ4 OX=2600176 GN=queA PE=3; SV = 1
MSIDAKKERVTLDVWARHEDDVALDDVEAYDYALPPELIAETPAERREHSRLLVYERAGERLTHTRFDAIVDHLRPGDLLIFNDTRVVPARLEAFKETGGRVELLALEVEQPGGEHRWSEPAAGQLQMRCMTRSSKPLRTGMTLTVRAGDDAFPVELLEVAPGRALVAVDSSGSALAFLERFGRIPLPPYIEQRRRESEVDVAIDDSVRYQTVLASEPGAVAAPTAGLHFSEVLLEGLEARGVERATLTLTVGPGTFKPVTSDTLDEHPMHAEAYRIPEGLKAKVEGCKARGGRVIAVGTTSARALEAEARREEPLLPGWRQTDIFLRPGDSLRLCDGLITNFHLPRSTLLALVTAFVGYPAVRRIYNEAVAGGYRFYSYGDSSLLL

SEQ ID NO: 64332 - protein, 387 aa, unidentified
  source 1..387: note = Bradymonadales bacterium
  REGION 1..387: note = tr|A0A5B8YD86|A0A5B8YD86_9DELT S-adenosylmethionine:tRNA ribosyltransferase-isomerase; OS = Bradymonadales bacterium YN101 OX=2292766 GN=queA PE=3; SV = 1
MSSNDTGTQKGAEADRDAQARDLDAVDAYDYELPEELIAAHPADRRGESRLLVARRDSAQIEHVQFSDLPDYLEPSDLLVFNNTRVIPARIMAKKETGGAVEMLVLDIIEPGGEDRWTEEAGGTVVFRCMTRSSRALRPGMELTADAGDAGPFVVREWEAGKAEVEVDWDGAPVDLLEEVGQMPLPPYILKRRKTLGEAEEATADDRKRYQTVYAAKPGAVAAPTAGLHFSEELLERLEERGIRRAFVTLQVGIGTFRPVSADRLSEHEMHSEEYEISAELARAIEETREAGGRIIAVGTTSMRALEAEARRDKPFEPGVRRTDIFLHPGVDFEVCDGLVTNFHLPRSTLLALVAGLAGYDFMRQIYAEAIEERYRFYSYGDGMLIL

SEQ ID NO: 64333 - protein, 410 aa, unidentified
  source 1..410: note = Bradymonas sediminis
  REGION 1..410: note = tr|A0A2Z4FR20|A0A2Z4FR20_9DELT S-adenosylmethionine:tRNA ribosyltransferase-isomerase; OS = Bradymonas sediminis OX=1548548 GN=queA PE=3 SV=1
MSPKDQDLNAPKTHGDADYSARSAQESVDLDRVDAYDYELPEELIAAHPSARRSGSRLLVATRDGSSLAHRNFGDLLAYLKPGDLLVFNNTRVIPARVMTHKSSGGAVELLILDVVDPVDSELDTPSADADARSSERWTRPAGAGGKVAFRCMTRSSRRLRPGMELSADQAALPPFVVREYAAGHALVEVAWEDSAVALLEQAGQMPLPPYIVKRRKDMGEAETATAADQKRYQTVYAAKPGAVAAPTAGLHFSDALFEELDALGVQRAFVTLQVGAGTFKPISAERLSEHEMHSEEYEISAELAEAIARTRAAGGRVIAVGTTSARALEAEARRQTPFEPGLRRTDIFLFPGEPFKVCDALITNFHLPRSTLLALVAAFAGYDFMCEIYRSAVAEKYRFYSYGDSVFIR

SEQ ID NO: 64334 - protein, 387 aa, unidentified; identical to SEQ ID NO: 64332
  source 1..387: note = Bradymonas sp.
  REGION 1..387: note = tr|A0A4Y6Q1V1|A0A4Y6Q1V1_9DELT S-adenosylmethionine:tRNA ribosyltransferase-isomerase; OS = Bradymonas sp. YN101 OX=2589075 GN=queA PE=3 SV=1

SEQ ID NO: 64335 - protein, 373 aa, unidentified
  source 1..373: note = Bradyrhizobiaceae bacterium
  REGION 1..373: note = tr|F7QMR9|F7QMR9_9BRAD S-adenosylmethionine:tRNA ribosyltransferase-isomerase OS=Bradyrhizobiaceae bacterium SG-6C OX=709797 GN=queA PE=3 SV=1
MDGRAYVPAIDILSIMRTDLFDFELPEANIALRPVSPRDAARMLVVKPDQPLIDAIVSDLPRFLQPGDQLVVNDTKVIPAQLTGRRIGRETEPKIEATLIKRFDGSRWQALVKPAKKLAQGDVIRFGNEGRVCLLGNLDAQVEHKGENGEVTLSFSFHGPILDQAIADVGAPPLPPYIASRRTPDERDNADYQTMFAVSEGAVAAPTAGLHFTPGLEAALRARGVGLHRVTLHVGAGTFLPVKADDTAEHKMHAEWGTVSVETATALNEARAKGARIVAVGTTSLRLLESAAADDGTIKPFTAETAIFITPGYRFRAVDILMTNFHLPRSTLFMLVSAFSGLETMQQAYAHAIGSGYRFYSYGDASLLFRRST

SEQ ID NO: 64336 - protein, 357 aa, unidentified
  source 1..357: note = Bradyrhizobiaceae bacterium
  REGION 1..357: note = tr|A0A3S0FFI3|A0A3S0FFI3_9BRAD S-adenosylmethionine:tRNA ribosyltransferase-isomerase; OS = Bradyrhizobiaceae bacterium OX=2072420 GN=queA PE=3 SV=1
MRTDLFDFDLPAERIALRPASPRDSARMLVVENGALRDQTIADLPQWLKAGDQLVVNDTKVIAAQLKGRRIGRETEPRIEATLIKRLDGSRWQALVKPAKKLTAGDRIRFGNEGKVCLLGHLDAEVEAKGTEGEVTLSFSFHGPALDQAIADLGSPPLPPYIASKRTPDDQDLADYQTMFAANEGAVAAPTAGLHFTPALEQALRVRGVGIVRVTLHVGAGTFLPVKVDDTEAHKMHAEWGTISAETAERLNNARKNGGRIIAVGTTSLRLLESAAREDGTIEPFAAETAIFITPGYRFRAVDILMTNFHLPKSTLFMLVSAFSGLETMKRAYAHAIASGYRFYSYGDACLLFRALP

SEQ ID NO: 64337 - protein, 357 aa, unidentified
  source 1..357: note = Bradyrhizobium arachidis
  REGION 1..357: note = tr|A0A1I7IT73|A0A1I7IT73_9BRAD S-adenosylmethionine:tRNA ribosyltransferase-isomerase; OS = Bradyrhizobium arachidis OX=858423 GN=queA PE=3 SV=1
MRTDLFDFDLPAERIALRPASPRDSAKMLVVEGGALRDQSIADLPQWLKAGDQLVVNDTKVIAAQLKGRRIGRETEPKIEATLIKRLDGSRWQALVKPAKKLVAGDRIRFGNEGKICLLGHLDAEVEAKGSEGEVTLSFSFHGPALDQAIADLGSPPLPPYIASKRTPDDQDLADYQTMFAANEGAVAAPTAGLHFTAALEQALHARGVGINRVTLHVGAGTFLPVKVDDTDGHKMHAEWGTISAETAERLNTARKNGGRIVAVGTTSLRLLESAASEDGTIQPFTAETSIFITPGYRFRAVDVLMTNFHLPKSTLFMLVSAFAGLETMKQAYAHAVANEYRFYSYGDACLLFRADG

SEQ ID NO: 64338 - protein, 355 aa, Bradyrhizobium betae
  REGION 1..355: note = tr|A0A4Q1V348|A0A4Q1V348_9BRAD S-adenosylmethionine:tRNA ribosyltransferase-isomerase; OS = Bradyrhizobium betae OX=244734 GN=queA PE=3 SV=1
MRTDLFDFDLPPERIALRPASPRDSAKMLVVENGALRDEVISDLPQWLKPGDQLVVNDTKVIAAQLKGRRIGRETEPKIEATLIKRLDGSRWQALVKPAKKLTAGDRIRFGNEGKVCLLGHLDAEVEAKGAEGEVTLSFSFHGPALDQAIADLGSPPLPPYIASKRTPDDQDLADYQTMFAANEGAVAAPTAGLHFTPALEQALRARGVGINRITLHVGAGTFLPVKVDDTEGHKMHAEWGTISAETAERLNTARKNGGRIVAVGTTSLRLLESAAAEDGTVQPFAAETSIFITPGYRFRAVDIMMTNFHLPKSTLFMLVSAFAGLETMQRAYAHAIASGYRFYSYGDACLLFRA

SEQ ID NO: 64339 - protein, 358 aa, Bradyrhizobium canariense
  REGION 1..358: note = tr|A0A1H1Q2K0|A0A1H1Q2K0_9BRAD S-adenosylmethionine:tRNA ribosyltransferase-isomerase; OS = Bradyrhizobium canariense OX=255045 GN=queA PE=3 SV=1
MRTDLFDFELPPDSIALRPASPRDSARMLIVQPEAVLRDRSVADLPQWLEPGDQLVVNDTKVIAAQLAGRRIGRDTEPKIEATLIKRLDGSRWQALVKPAKKLAQGDVVRFGNEGRVCLLGHLDAEVEHKGDSGEITLSFSFHGPTLDQAIADLGSPPLPPYIASKRTPDERDAADYQTMFAAKEGAVAAPTAGLHFTPALEMALRDRGIGLHRITLHVGAGTFLPVKVEDTAGHKMHAEWGVITGDTAAALNEARAGGGRIVAVGTTSLRLLESATAEDGTIEPFADDTSIFITPGYRFRAVDILLTNFHLPRSTLFMLVSAFSGLDTMKRAYAHAIASGYRFYSYGDACLLFRAHE

SEQ ID NO: 64340 - protein, 357 aa, Bradyrhizobium canariense
  REGION 1..357: note = tr|A0A1X3G9X2|A0A1X3G9X2_9BRAD S-adenosylmethionine:tRNA ribosyltransferase-isomerase; OS = Bradyrhizobium canariense OX=255045 GN=queA PE=3 SV=1
MRTDLFDFDLPAERIALRPASPRDSAKMLVVDHGTLRDQVVADLPQWLKPGDQLVVNDTKVIAAQLKGRRIGRENEPKIEATLIKRLDGSRWQALVKPAKKLIAGDRIRFGNEGKVCLLGHLDAEVEAKGGEGEVTLSFSFHGPTLDQAIADLGSPPLPPYIASKRTPDDQDLADYQTMFAVNEGAVAAPTAGLHFTPALEQAMHARGVGINRVTLHVGAGTFLPVKVDDTEGHKMHAEWGTLSAETAERLNTARKNGGRIIAVGTTSLRLLESAASEDGTIEPFAAETSIFITPGYRFRAVDVLLTNFHLPKSTLFMLVSAFSGLEAMQQAYAHAIATGYRFYSYGDACLLFPARE

SEQ ID NO: 64341 - protein, 357 aa, unidentified
  source 1..357: note = Bradyrhizobium centrolobii
  REGION 1..357: note = tr|A0A176Y9G7|A0A176Y9G7_9BRAD S-adenosylmethionine:tRNA ribosyltransferase-isomerase; OS = Bradyrhizobium centrolobii OX=1505087 GN=queA PE=3 SV=1
MRTDLFDFDLPPERIALRPASPRDSAKMLVVENGVLRDQFISDLPQWLKPGDQLVVNDTKVIAAQLRGRRIGRETEPKIDATLIKRLDGSRWQALVKPAKKLVAGDRIRFGNEGKVCLLGHLDAEVEAKGVEGEVTLSFSFHGPTLDQAISDLGSPPLPPYIASKRTPDDQDAADYQTMFAANEGAVAAPTAGLHFTPALEQALHDCGIGINRVTLHVGAGTFLPVKVEDTEGHRMHAEWGTISAETADALNAAQNAGGRIIAVGTTSLRLLESAADEDGTIEPFAADTSIFITPGYRFRAVDVLLTNFHLPRSTLFMLVSAFAGLETMKQAYAHAIAEGYRFYSYGDACLLFRAGE

SEQ ID NO: 64342 - protein, 365 aa, unidentified
  source 1..365: note = Bradyrhizobium daqingense
  REGION 1..365: note = tr|A0A562KWJ4|A0A562KWJ4_9BRAD S-adenosylmethionine:tRNA ribosyltransferase-isomerase; OS = Bradyrhizobium daqingense OX=993502 GN=queA PE=3 SV=1
MLCGAKPDMRTDLFDFDLPPERIALRPASPRDSAKMLVVENGVLRDQVISALPQWLRPGDQLVVNDTKVIAAQLKGRRIGRETEPRIEATLIKRLDGSRWKALVKPAKKLTAGDRIRFGNEGKVCLLGHLDAEVEAKGSEGEVTLSFSFHGPTLDQAIADLGSPPLPPYIASKRTPDDQDLADYQTMFAANEGAVAAPTAGLHFTPALERALQERGVGVNRVTLHVGAGTFLPVKVDDTEGHRMHAEWGTISAETTERLNTARKNGGRIVAIGTTSLRLLESAASEDGTIQPFAAETSIFITPGYRFRAVDILMTNFHLPKSTLFMLVSAFSGLETMKQAYAHAIANGYRFYSYGDACLLFRSEP

SEQ ID NO: 64343 - protein, 366 aa, unidentified
  source 1..366: note = Bradyrhizobium diazoefficiens
  REGION 1..366: note = sp|Q89L59|QUEA_BRADU S-adenosylmethionine:tRNA ribosyltransferase-isomerase OS=Bradyrhizobium diazoefficiens (strain JCM 10833 / IAM 13628 / NBRC 14792 / USDA 110) O X=224911 GN=queA PE=3 SV=1
MRTDLFDFDLPAERIALRPASPRDSAKMLVVEGGALRDRTISELPQWLKRGDQLVVNDTKVIAAQLKGRRIGRETEPKIEATLIKRLDGSRWQALVKPAKKLIAGDRIRFGNEGKVCLLGHLDAEVEAKGSEGEVTLSFSFHGPALDQAIADLGSPPLPPYIASKRTPDDQDFADYQTMFAANEGAVAAPTAGLHFTPALEQALRERGVGLNRVTLHVGAGTFLPVKVEDTAGHKMHAEWGTISAETAERLNIARHNGGRIIAVGTTSLRLLESAASEDGTIQPFAAETSIFITPGYRFRAVDILLTNFHLPKSTLFMLVSAFSGLETMRRAYAHAIAQGYRFYSYGDACLLFRAGGTEVHDPSPP

SEQ ID NO: 64344 - protein, 366 aa, unidentified; identical to SEQ ID NO: 64343
  source 1..366: note = Bradyrhizobium diazoefficiens
  REGION 1..366: note = tr|A0A2A6MRS1|A0A2A6MRS1_9BRAD S-adenosylmethionine:tRNA ribosyltransferase-isomerase; OS = Bradyrhizobium diazoefficiens OX=1355477 GN=queA PE=3; SV = 1

SEQ ID NO: 64345 - protein, 358 aa, Bradyrhizobium elkanii
  REGION 1..358: note = tr|A0A4Q4K515|A0A4Q4K515_BRAEL S-adenosylmethionine:tRNA ribosyltransferase-isomerase; OS = Bradyrhizobium elkanii OX=29448 GN=queA PE=3 SV=1
MRTDLFDFELPPESIALRPASPRDSARMLVVHPDGVLRDATIADLPHWLEAGDQIVVNDTKVIAAQLRGRRIGRDTEPKIEATLIKRLDGSRWQALVKPAKKLSPGDTIRFGNEGRVCLLGNLDAEVEAKGQEGEVTLSFSFHGPVLDQAIADVGATPLPPYIASKRTPDEKDVSDYQTMFATNEGAVAAPTAGLHFTPALEAALKSRGVELHRLTLHVGAGTFLPVKTEETSEHKMHAEWGCITAETASALNAARARGGRIVAIGTTSLRLLESAASADGTIEPFAAETSIFITPGYRFRAVDILLTNFHLPRSTLFMLVSAFSGLETMQRAYAHAIRDGYRFYSYGDACLLFRARG

SEQ ID NO: 64346 - protein, 358 aa, Bradyrhizobium elkanii
  REGION 1..358: note = tr|A0A0D1P0T8|A0A0D1P0T8_BRAEL S-adenosylmethionine:tRNA ribosyltransferase-isomerase; OS = Bradyrhizobium elkanii OX=29448 GN=queA PE=3 SV=1
MRTDLFDFELPPDSIALRPASPRDSARLLVVHPDGVLRDATIADLPHWLEPGDQIVVNDTKVIAAQLKGRRIGRETEPKIEATLIKRLDGSRWQALVKPAKKLGPGDTIRFGNEGKVCLLGHLDATVEAKGQEGEVTLSFSFHGPALDQAIADVGATPLPPYIASKRTPDDQDVSDYQTMFAANEGAVAAPTAGLHFTPALEAALRARGVALHRLTLHVGAGTFLPVKTEETSEHRMHAEWGCISAETASALNAARANGGRIVAIGTTSMRLLESATTPDGEVQPFAAETSIFITPGYRFRAVDILLTNFHLPRSTLFMLVSAFSGLETMQGAYAHAIKSGYRFYSYGDACLLFRAKS

SEQ ID NO: 64347 - protein, 356 aa, unidentified
  source 1..356: note = Bradyrhizobium erythrophlei
  REGION 1..356: note = tr|A0A1N6KA56|A0A1N6KA56_9BRAD S-adenosylmethionine:tRNA ribosyltransferase-isomerase; OS = Bradyrhizobium erythrophlei OX=1437360 GN=queA PE=3 SV=1
MRTDIFDFELPPESIALRPASPRDSARMLVVQGDGVLRDRTVAELPQWLEPGDQLVVNDTKVISAQLKGRRIGRDTEPKIEATLIKRLDGSRWQALVKPAKKLVPGDVVRFGNEGKVCLLGHLDAEVEAKGEDGEITLSFSFHGPTLDQAIADLGAPPLPPYIASKRTPDDQDAADYQTMFAANEGAVAAPTAGLHFTPALEAALRGRGVELHRLTLHVGAGTFLPVKVEETSEHKMHAEWGCISLETAAALNAARAKGGRIVAVGTTSLRLLESATAEDGTIQPFGGETSIFITPGYRFRAVDILLTNFHLPRSTLFMLVSAFAGLETMKHAYAHAIARGYRFYSYGDATLLFRR

SEQ ID NO: 64348 - protein, 358 aa, unidentified
  source 1..358: note = Bradyrhizobium erythrophlei
  REGION 1..358: note = tr|A0A1M7UTI7|A0A1M7UTI7_9BRAD S-adenosylmethionine:tRNA ribosyltransferase-isomerase; OS = Bradyrhizobium erythrophlei OX=1437360 GN=queA PE=3 SV=1
MRTDLFDFELPAERIALRPAQPRDAARLLVVEASGSLHDRVVSDLPQWLKAGDQIVVNDTKVISAQLRGRRIGRETEPKIEATLIKRLDASRWQALVKPAKKLAAGDLVRFGNEGKVCLLGHLDAEVEEKGEEGEVTLSFSFHGPALDSAIADLGSPPLPPYIASKRTPDEQDAADYQTMFATNEGAVAAPTAGLHFTPALETALRERGVGIVRLTLHVGAGTFLPVKVDDTAEHKMHSEWGTISPEAAEALNAARAKGGRIVAVGTTSMRLLESAATEDGTVRPFADETAIFITPGYRFRAVDMLLTNFHLPRSTLFMLVSAFSGLKTMKRAYAHAIDNGYRFYSYGDACLLFRGDN

SEQ ID NO: 64349 - protein, 357 aa, unidentified
  source 1..357: note = Bradyrhizobium genosp.
  REGION 1..357: note = tr|A0A4Q7FLP0|A0A4Q7FLP0_9BRAD S-adenosylmethionine:tRNA ribosyltransferase-isomerase; OS = Bradyrhizobium genosp. SA-3 OX=508868 GN=queA PE=3 SV=1
MRTDLFDFDLPPERIALRPASPRDSAKMLVVENGALRDQTISDLPQWLKPGDQVVVNDTKVIAAQLRGRRIGRETEPKIEATLIKRLDGSRWQALVKPAKKLTAGDRIRFGNEGKVCLLGHLDAEVEAKGSEGEVTLSFSFHGPALDQAITDLGSPPLPPYIASKRTPDDQDLADYQTMFAANEGAVAAPTAGLHFTPALEQALRDRGVGINRLTLHVGAGTFLPVKVDDTEGHKMHPEWGTISAETAEQLNAARKSGGRIIAVGTTSLRLLESAAAEDGSIQPFAAETSIFITPGYRFRAVDILLTNFHLPKSTLFMLVSAFSGLETMKQAYAHAIAAGYRFYSYGDACLLFRAGP

SEQ ID NO: 64350 - protein, 357 aa, unidentified
  source 1..357: note = Bradyrhizobium guangdongense
  REGION 1..357: note = tr|A0A410V7V4|A0A410V7V4_9BRAD S-adenosylmethionine:tRNA ribosyltransferase-isomerase; OS = Bradyrhizobium guangdongense OX=1325090 GN=queA PE=3; SV = 1
MRTDLFDFDLPPERIALRPASPRDSAKMLVVEGGALRDQTVADLPQWLQPRDQLVVNDTKVIAAQLKGRRIGRETEPKIEATLIKRLDGSRWQALVKPAKKLVAGDRIRFGNEGKVCLLGHLDAEVEAKGGEGEVTLSFSFHGPALDQAIADLGSPPLPPYIASKRTPDDQDFADYQTMFAANEGAVAAPTAGLHFTPALEQALQARGVGIVRVTLHVGAGTFLPVKVEDTDGHKMHAEWGTISAETAEQLNTARKNGGRIVAVGTTSLRLLESAANEDGIIQPFAAETSIFITPGYRFRAVDVLMTNFHLPKSTLFMLVSAFAGLDTMKQAYAHAIANEYRFYSYGDACLLFRAGG

SEQ ID NO: 64351 - protein, 357 aa, unidentified
  source 1..357: note = Bradyrhizobium guangzhouense
  REGION 1..357: note = tr|A0A4V1KZT1|A0A4V1KZT1_9BRAD S-adenosylmethionine:tRNA ribosyltransferase-isomerase; OS = Bradyrhizobium guangzhouense OX=1325095 GN=queA PE=3; SV = 1
MRTDLFDFDLPPERIALRPASPRDSAKMLVVQNGALRDQTIADLPQWLKPGDQLVVNDTKVIAAQLKGRRIGRETEPKIEATLIKRLDGSRWQALVKPAKKLVPGDRIRFGNEGKVCLLGHLDAEVEAKGMEGEVTLSFSFHGPALDQAIADLGSPPLPPYIASKRTPDDQDLADYQTMFAANEGAVAAPTAGLHFTPALEQRLRARGVGIVRVTLHVGAGTFLPVKVEDTDAHKMHAEWGTISAGMAEQLNTARKSGGRIVAVGTTSLRLLESAASEDGSIQPFAAETSIFITPGYRFRAVDILMTNFHLPKSTLFMLVSAFAGLGTMKQAYAHAIANEYRFYSYGDACLLFRAVP

SEQ ID NO: 64352 - protein, 355 aa, unidentified
  source 1..355: note = Bradyrhizobium huanghuaihaiense
  REGION 1..355: note = tr|A0A562RI75|A0A562RI75_9BRAD S-adenosylmethionine:tRNA ribosyltransferase-isomerase; OS = Bradyrhizobium huanghuaihaiense OX=990078 GN=queA PE=3; SV = 1
MRTDLFDFDLPAERIALRPASPRDSAKMLVVENGALRDQVIADLPQWLRRGDQLVVNDTKVIAAQLKGRRIGRETEPKIEATLIKRLDGSRWQALVKPAKKLTAGDRIRFGNEGKVCLLGHLDAEVEAKGVEGEVTLSFSFHGPALDQAIADLGNPPLPPYIASKRTPDDQDLADYQTMFAANEGAVAAPTAGLHFTPALEQALRAREVGINRVTLHVGAGTFLPVKVDDTEGHKMHAEWGTIPAEVAERLNSAKRNGGRIVAVGTTSLRLLESAASEDGTIQPFAAETSIFITPGYRFRAVDILMTNFHLPKSTLFMLVSAFSGLETMKQAYAHAIASGYRFYSYGDACLLFRS

SEQ ID NO: 64353 - protein, 365 aa, unidentified
  source 1..365: note = Bradyrhizobium icense
  REGION 1..365: note = tr|A0A533J621|A0A533J621_9BRAD S-adenosylmethionine:tRNA ribosyltransferase-isomerase; OS = Bradyrhizobium icense OX=1274631 GN=queA PE=3 SV=1
MRTDLFDFDLPAERIALRPASPRDSAKMLVVQGDGVLRDRHVSELPQWLEPGDQIVVNDTKVISAQLRGRRIGRETEPKIEATLIKRLDGSRWQALVKPAKKLAPGDRIRFGNEGKVCLLGHLDAEVEAKGGEGEVTLSFSFHGPALDQAISDLGSPPLPPYIASKRTPDEQDAADYQTMFAANEGAVAAPTAGLHFTPALETALRQRGVGINRLTLHVGAGTFLPVKVDDTAEHRMHAEWGTVSAETARKLNEARTKGGRIVAVGTTSLRLLESAAHDDGTIQPFSGETSIFITPGYRFRAVDILLTNFHLPRSTLFMLVSAFSGLDAMKQAYAHAITSGYRFYSYGDACLLFRKREPHGIELT

SEQ ID NO: 64354 - protein, 358 aa, unidentified
  source 1..358: note = Bradyrhizobium icense
  REGION 1..358: note = tr|A0A1B1UH24|A0A1B1UH24_9BRAD S-adenosylmethionine:tRNA ribosyltransferase-isomerase; OS = Bradyrhizobium icense OX=1274631 GN=queA PE=3 SV=1
MRTDLFDFELPATRIALRPASPRDAARMLVVQPDGVLRDRTVAELPQWLEPGDQLVVNDTKVISAQLKGRRIGRETEPKIEATLIKRLDGSRWRALVRPAKKLAPGDIVRFGNEGKVCLLGHLDAEVEAKGDEGEITLSFSFHGPALDQAIADLGTPPLPPYIASKRTPDDRDAADYQTMFAANEGAVAAPTAGLHFTPELETALRRHGVELHRITLHVGAGTFLPVKVEETSAHNMHAEWGSISADTAAALNAARANGGRIVAVGTTSLRLLESATAEDGTVQPFDGETSIFITPGYRFRAVDILMTNFHLPRSTLFMLVSAFSGLDTMKRAYAHAIAAGYRFYSYGDACLLFRAPD

SEQ ID NO: 64355 - protein, 357 aa, Bradyrhizobium japonicum
  REGION 1..357: note = tr|A0A4Y3YS50|A0A4Y3YS50_BRAJP S-adenosylmethionine:tRNA ribosyltransferase-isomerase; OS = Bradyrhizobium japonicum OX=375 GN=queA PE=3 SV=1
MRTDLFDFELPPERIALRPASPRDSAKMLVVEGGALRDQLISELPQWLKPGDQLVVNDTKVIAAQLKGRRIGRETEPKIEATLIKRLDGSRWQALVKPAKKLTAGDRIRFGNEGKVCLLGHLDAEVEAKGTDGEVTLSFSFHGPALDQAIEDLGSPPLPPYIASKRTPDDQDLADYQTMFAANEGAVAAPTAGLHFTPALEQALRDRGVGINHITLHVGAGTFLPVKVDDTEGHKMHAEWGTISAETAERLNTARQNGGRIIAVGTTSLRLLESAASEDGTIQPFAAETSIFITPGYRFRAVDILLTNFHLPKSTLFMLVSAFSGLEAMQQAYAHAIAKGYRFYSYGDACLLFRAEP

SEQ ID NO: 64356 - protein, 357 aa, Bradyrhizobium japonicum
  REGION 1..357: note = tr|A0A1L3FEU5|A0A1L3FEU5_BRAJP S-adenosylmethionine:tRNA ribosyltransferase-isomerase; OS = Bradyrhizobium japonicum OX=375 GN=queA PE=3 SV=1
MRTDLFDFDLPAERIALRPASPRDSAKMLVVEGGALRDQLISELPQWLKAGDQLVVNDTKVIAAQLKGRRIGRETEPKIEATLIKRLDGSRWQALVKPAKKLVAGDRIRFGNEGKVCLLGHLDAEVEAKGTDGEVTLSFSFHGPALDQAIEDLGSPPLPPYIASKRTPDDQDLADYQTMFAANEGAVAAPTAGLHFTPALEQALRDRGVGINRVTLHVGAGTFLPVKVDDTEGHKMHAEWGTISAETAERLNTARQNGGRIIAVGTTSLRLLESAAGEDGTIQPFAAETSIFITPGYRFRAVDILLTNFHLPKSTLFMLVSAFSGLEAMQKAYAHAIAEGYRFYSYGDACLLFRARD

SEQ ID NO: 64357 - protein, 358 aa, Bradyrhizobium jicamae
  REGION 1..358: note = tr|A0A0R3KJH1|A0A0R3KJH1_9BRAD S-adenosylmethionine:tRNA ribosyltransferase-isomerase; OS = Bradyrhizobium jicamae OX=280332 GN=queA PE=3 SV=1
MRTDLFDFELPPTSIALRPASPRDAARMLVVQQGGVLHDRTVAELPQWLKAGDQLVVNDTKVISAQLKGRRIGRETEPKIEATLIKRLDGSRWQALVKPAKKLAPGDTVRFGNEGKVCLLGHLDAEVEAKGEEGEITLSFSFHGPTLDQAIADLGTPPLPPYIASKRTPDDRDAADYQTMFAANEGAVAAPTAGLHFTPALEAALRGGGVELHRLTLHVGAGTFLPVKVEETSEHKMHAEWGSISAATAASLNAARARGGRIIAVGTTSLRLLESATREDGIVQPFDGETSIFITPGYRFRAVDILMTNFHLPRSTLFMLVSAFSGLDTMKQAYAHAIAAGYRFYSYGDACLLFRATD

SEQ ID NO: 64358 - protein, 358 aa, Bradyrhizobium lablabi
  REGION 1..358: note = tr|A0A2H9VCF0|A0A2H9VCF0_9BRAD S-adenosylmethionine:tRNA ribosyltransferase-isomerase; OS = Bradyrhizobium lablabi OX=722472 GN=queA PE=3 SV=1
MRTDLFDFELPPENIALRPASPRDSARMLVVQGDGVLCDRVVTDLPQWLEPGDQLVVNDTQVIAAQLKGRRIGRDTEPKIEATLIKRLDGSRWQALVKPAKKLAAGDVVRFGNEGKVCLLGHLDAEVEAKGMEGEVTLSFSFHGPALDQAISDLGSPPLPPYIASRRAPDDQDAADYQTMFAANEGAVAAPTAGLHFTPALEAALRNHGVGLHRLTLHVGAGTFLPVKVDDTANHRMHAEWGFVSAETAGALNEARANGGRIVAVGTTSLRLLESAAAEDGTIQPFTGETSIFITPGYRFRAVDILLTNFHLPRSTLFMLVSAFAGLETMKRAYAHAIKTGYRFYSYGDACLLFRARD

SEQ ID NO: 64359 - protein, 358 aa, Bradyrhizobium lablabi
  REGION 1..358: note = tr|A0A0R3MMZ3|A0A0R3MMZ3_9BRAD S-adenosylmethionine:tRNA ribosyltransferase-isomerase; OS = Bradyrhizobium lablabi OX=722472 GN=queA PE=3 SV=1
MRTDLFDFELPPTSIALRPASPRDAARMLVVQSDGIMHDRTVAELPQWLQPGDQLVVNDTKVISAQLKGRRIGRETEPKIEATLIKRLDGSRWRALVKPAKKLAPGDIVRFGNEGKVCLLGHLDAEVEAKGEEGEITLSFSFHGPTLDQAIADLGTPPLPPYIASKRTPDDRDAADYQTMFAANEGAVAAPTAGLHFTPELEAALRGRGVELHRLTLHVGAGTFLPVKVEETSEHRMHAEWGSISADTAAALNAARAKGGRIIAVGTTSLRLLESAAREDGTVQAFDGETSIFITPGYRFRAVDILMTNFHLPRSTLFMLVSAFSGLDTMKRAYAHAIAAGYRFYSYGDACLLFRARD

SEQ ID NO: 64360 - protein, 357 aa, Bradyrhizobium liaoningense
  REGION 1..357: note = tr|A0A151FJH6|A0A151FJH6_9BRAD S-adenosylmethionine:tRNA ribosyltransferase-isomerase; OS = Bradyrhizobium liaoningense OX=43992 GN=queA PE=3 SV=1
MRTDLFDFDLPPERIALRPASPRDSAKMLVVKKGALRDQVISDLPQWLAPGDQLVVNDTKVIAAQLKGRRIGRETEPRIEATLIKRLDGSRWQALVKPAKKLMAGDRIRFGNEGKVCLLGHLDAEVEAKGGEGEVTLSFSFHGPALDQAIADLGSPPLPPYIASKRTPDDQDLADYQTMFAANEGAVAAPTAGLHFTPALEQALRARGVGIERVTLHVGAGTFLPVKVDDTEGHKMHAEWGTISTETAQRLNTARKNGGRIVAVGTTSLRLLESAAGEDGTIQPFAAETAIFITPGYRFRAVDVLVTNFHLPKSTLFMLVSAFSGLETMKQAYAHAIANGYRFYSYGDACLLFRAER

SEQ ID NO: 64361 - protein, 360 aa, unidentified
  source 1..360: note = Bradyrhizobium lupini
  REGION 1..360: note = tr|K5D1G0|K5D1G0_RHILU S-adenosylmethionine:tRNA ribosyltransferase-isomerase OS=Bradyrhizobium lupini HPC(L) OX=1229491 GN=queA PE=3 SV=1
MRVDLFDFDLPEENIALRPANPRDSARLLVVDPNENRMEDHRVFDLPSFLRAGDALVFNDTRVIPAQLEGVRLREGAPETAVSATLHMRADQSRWKAFARPGKRIKQGDRIRFGYERDNACGLAHLEATVEQKGEEGEITLLFDVSGPVLDEAIASVGHIPLPPYIAAKRPEDAQDRTDYQTIYAREKGAVAAPTAGLHFTPDLFAALDKAGIERHFVTLHVGAGTFLPVKADDTDDHKMHFEIGHVSQETADRLNAVKARGGRIVCVGTTSLRLIESAAAEDGIIHPWSDATGIFITPGYRFRAVDMLMTNFHLPKSTLFMLVSAFCGLETMRDAYKHAIETGYRFYSYGDSSLLFRKN

SEQ ID NO: 64362 - protein, 363 aa, unidentified
  source 1..363: note = Bradyrhizobium macuxiense
  REGION 1..363: note = tr|A0A125Q9I0|A0A125Q9I0_9BRAD S-adenosylmethionine:tRNA ribosyltransferase-isomerase; OS = Bradyrhizobium macuxiense OX=1755647 GN=queA PE=3 SV=1
MRTDLFDFELPPERIALRPASPRDSARMLVVYPDGVLRDAGIADLPNWLEAGDQIVVNDTKVIAAQLKGRRIGRETEPKIEATLIKRLDGSRWQALVKPAKKLAVGDIVRFGNEGKVCLLGHLDAEVEAKGQEGEVTLSFSFHGPTLDQAISDVGATPLPPYIASKRTPDDQDSADYQTMFATNEGAVAAPTAGLHFTPALEAALRARGVGLHRLTLHVGAGTFLPVKAEETSEHKMHAEWGRISAETASALNAARADGGRIVAIGTTSLRLLESATTADGTVHPFAAETSIFITPGYRFRAVDILLTNFHLPRSTLFMLVSAFSGLAAMKSAYAHAIKHGYRFYSYGDACLLFRAHEPHADL

SEQ ID NO: 64363 - protein, 358 aa, unidentified
  source 1..358: note = Bradyrhizobium macuxiense
  REGION 1..358: note = tr|A0A560MHK3|A0A560MHK3_9BRAD S-adenosylmethionine:tRNA ribosyltransferase-isomerase; OS = Bradyrhizobium macuxiense OX=1755647 GN=queA PE=3 SV=1
MRTDLFDFELPPESIALRPANPRDSARMLVVHPDGVLRDASVADLPHWLEAGDQIVVNDTKVIAAQLKGRRIGRETEPKIEATLIKRLDGSRWQALVKPAKKLSPGDTIRFGNEGKVCLLGNLDAEVEAKGQEGEVTLSFSFHGPVLDQAIADVGATPLPPYIASKRTPDDRDVSDYQTMFAANEGAVAAPTAGLHFTPALEATLKGRGVALHRLTLHVGAGTFLPVKTEETSEHKMHAEWGCITAETAAALNAARARGRRIVAIGTTSLRLLESATTPDGEVQPFAAETSIFITPGYRFRAVDILLTNFHLPRSTLFMLVSAFSGLETMQGAYAHAVSNGYRFYSYGDACLLFRAKS

SEQ ID NO: 64364 - protein, 357 aa, unidentified
  source 1..357: note = Bradyrhizobium manausense
  REGION 1..357: note = tr|A0A0R3D168|A0A0R3D168_9BRAD S-adenosylmethionine:tRNA ribosyltransferase-isomerase; OS = Bradyrhizobium manausense OX=989370 GN=queA PE=3 SV=1
MRTDLFDFDLPPERIALRPASPRDSAKMLVVENGALRDQTIADLPHWLKPGDQLVVNDTKVIAAQLKGRRIGRETEPKIEATLIKRLDGSRWQALVKPAKKLTPGDRIRFGNEGKVCLLGHLDAEVEAKGMEGEVTLGFSFHGPALDQAIADLGSPPLPPYIASKRTPDDQDLADYQTMFATNEGAVAAPTAGLHFTPALEQALRERGVGIVRVTLHVGAGTFLPVKVDDTDAHKMHAEWGTISAEIAERLNSARKNGGRIIAVGTTSLRLLESATTEDGTIQPFAAETSIFITPGYRFRAVDILMTNFHLPKSTLFMLVSAFAGLGTMKQAYAHAIANGYRFYSYGDACLLFRAVP

SEQ ID NO: 64365 - protein, 364 aa, unidentified
  source 1..364: note = Bradyrhizobium nanningense
  REGION 1..364: note = tr|A0A4Q0S3R7|A0A4Q0S3R7_9BRAD S-adenosylmethionine:tRNA ribosyltransferase-isomerase; OS = Bradyrhizobium nanningense OX=1325118 GN=queA PE=3 SV=1
MRTDLFDFDLPAERIALRPASPRDSAKMLVVENGALRDQTIADLPSWLKAGDQLVVNDTKVIAAQLKGRRIGRETEPRIEATLIKRLDGSRWQALVKPAKKLVAGDRIRFGNEGKVCLLGHLDAEVEAKGSEGEVTLSFSFHGPALDQAIADLGSPPLPPYIASKRTPDDQDLTDYQTMFAVNEGAVAAPTAGLHFTPVLEHALLARGVGINQVTLHVGAGTFLPVKVDDTEGHKMHAEWGTIPAETAERLNSARKNGGRIIAVGTTSLRLLESAAREDGTIQPFAAETAIFITPGYRFRAVDVLMTNFHLPKSTLFMLVSAFSGLETMKAAYAHAIANGYRFYSYGDACLLFRATSAAPSPSP

SEQ ID NO: 64366 - protein, 357 aa, unidentified
  source 1..357: note = Bradyrhizobium neotropicale
  REGION 1..357: note = tr|A0A176YZC7|A0A176YZC7_9BRAD S-adenosylmethionine:tRNA ribosyltransferase-isomerase; OS = Bradyrhizobium neotropicale OX=1497615 GN=queA PE=3 SV=1
MRTDLFDFDLPAERIALRPAQPRDSAKMLVVENGALRDQIISDLPQWLRAGDQLVVNDTKVIAAQLKGRRIGRETEPKIEATLIKRLDGSRWQALVKPAKKLVAGDRIRFGNEGKVCLLGHLDAEVEAKGVEGEVTLSFSFHGPTLDQAIADLGSPPLPPYIASKRMPDDQDLADYQTMFAVNEGAVAAPTAGLHFTPALEQALRDRGVGINRVTLHVGAGTFLPVKVDDTEGHRMHAEWGTISAETADVLNTTRNSGGRIVAVGTTSLRLLESAAAEDGTIEPFAAETAIFITPGYRFRAVDILLTNFHLPRSTLFMLVSAFAGLETMKEAYAHAIGSGYRFYSYGDACLLFRAGA

SEQ ID NO: 64367 - protein, 364 aa, unidentified
  source 1..364: note = Bradyrhizobium oligotrophicum
  REGION 1..364: note = tr|M4Z9A3|M4Z9A3_9BRAD S-adenosylmethionine:tRNA ribosyltransferase-isomerase OS=Bradyrhizobium oligotrophicum S58 OX=1245469 GN=queA PE=3 SV=1
MRTHLFDFHLPPENIALRPASPREAARMLVVQGDGVLRDRTVADLPDWLEPGDQLVVNDTRVIAAQLSGRRISRDTEAKIEATLIKRLDGSRWQALVRPAKKLAPGDTIRFGNEGKVCLLGHLDATVEAKGEEGEVTLSFVFHGPSLDQAIADLGRPPLPPYIAGKRPADEQDTQDYQTMFAAKEGAVAAPTAGLHFTPALEQRLRERGIGLQRVTLHVGAGTFLPVKVEDTEGHRMHAEWGSLTPETATALNEARARGGRIVAVGTTSLRLLESAALPDGTIAPFEQETSIFITPGYRFRAVDILMTNFHLPRSTLFMLVSAFAGLETMQAAYAHAIRSGYRFYSYGDACLLFRQQDERIVEP

SEQ ID NO: 64368 - protein, 357 aa, unidentified
  source 1..357: note = Bradyrhizobium ottawaense
  REGION 1..357: note = tr|A0A2U8PES4|A0A2U8PES4_9BRAD S-adenosylmethionine:tRNA ribosyltransferase-isomerase; OS = Bradyrhizobium ottawaense OX=931866 GN=queA PE=3 SV=1
MRTDLFDFDLPAERIALRPASPRDSAKMLVVESGALRDQTIADLAQWLKPGDQLVVNDTKVIAAQLKGRRIGRETEPKIEATLIKRLDGSRWQALVKPAKKLTAGDRIRFGNEGKVCLLGHLDAEVEAKGLEGEVTLSFSFHGPALDQAIAELGSPPLPPYIASKRTPDDQDLADYQTMFAVNEGAVAAPTAGLHFTPALEQALRARGVDINQVTLHVGAGTFLPVKVEDTEGHKMHAEWGTISAETAERLNSARKNGGRIIAVGTTSLRLLESAASEDGTIQPFAAETSIFITPGYRFRAVDILMTNFHLPKSTLFMLVSAFSGLETMKAAYAHAIASGYRFYSYGDACLLFRSRG

SEQ ID NO: 64369 - protein, 358 aa, Bradyrhizobium pachyrhizi
  REGION 1..358: note = tr|A0A0R3CEI5|A0A0R3CEI5_9BRAD S-adenosylmethionine:tRNA ribosyltransferase-isomerase; OS = Bradyrhizobium pachyrhizi OX=280333 GN=queA PE=3 SV=1
MRTDLFDFELPPESIALRPASPRDAARMLVVHPDGVLRDAAIADLPQWLEPGDQIVVNDTKVIAAQLKGRRIGRDTEPKIEATLIKRLDGSRWQALVKPAKKLSPGDTIRFGNEGRVCLLGNLDAEVEAKGQEGEVTLSFSFHGPMLDQAIADVGATPLPPYIASKRTPDEKDVSDYQTMFAANEGAVAAPTAGLHFTPALEAALKSRGVELHRLTLHVGAGTFLPVKTEETSEHKMHAEWGCITAETASALNAARAKGGRIVAIGTTSLRLLESAASADGTIEPFAAETSIFITPGYRFRAVDILLTNFHLPRSTLFMLVSAFSGLETMQGAYAHAIRDGYRFYSYGDACLLFRARG

SEQ ID NO: 64370 - protein, 358 aa, unidentified
  source 1..358: note = Bradyrhizobium retamae
  REGION 1..358: note = tr|A0A0R3MQV5|A0A0R3MQV5_9BRAD S-adenosylmethionine:tRNA ribosyltransferase-isomerase; OS = Bradyrhizobium retamae OX=1300035 GN=queA PE=3 SV=1
MRTDLFDFELPATSVALRPASPRDAARMLVVQPDGVLRDRTVAELPQWLEPGDQLVVNDTKVISAQLKGRRIGRETEPKIEATLIKRLDGSRWRALVKPAKKLAPGDIVRFGNEGKVCLLGHLDAEVEARGAEGEVTLSFSFHGPALDQAIADLGTPPLPPYIASKRAPDDRDAADYQTMFAANEGAVAAPTAGLHFTPELETALRRHGVELHRITLHVGAGTFLPVKVEETSEHRMHAEWGSISVDTAAALNAARAQGGRIIAVGTTSLRLLESATREDGTVQPFDGETSIFITPGFRFRAVDILMTNFHLPRSTLFMLVSAFSGLDTMKRAYAHAIAAGYRFYSYGDACLLFRAPD

SEQ ID NO: 64371 - protein, 358 aa, unidentified
  source 1..358: note = Bradyrhizobium rifense
  REGION 1..358: note = tr|A0A5D3K7V7|A0A5D3K7V7_9BRAD S-adenosylmethionine:tRNA ribosyltransferase-isomerase; OS = Bradyrhizobium rifense OX=515499 GN=queA PE=3 SV=1
MRTDLFDFNLPPERIALRPAHPRDSARMLVVANGALRDQIIADLPHWLKDGDQLVVNDTKVISAQLKGRRIGRETEPKIEATLIKRLDGSRWQALVKPAKKLVAGDRIRFGNEGKVCLLGHLEAEVEAKGGEGEVTLSFSFHGPALDQAIADLGSPPLPPYIASKRTPDDQDLADYQTMFAANEGAVAAPTAGLHFTPALEQALGARGVGINRVTLHVGAGTFLPVKVDDTDGHKMHAEWGTISAETAERLNAARKNGGRIIAVGTTSLRLLESAASEDGIIQPFTAETSIFITPGYRFRAVDILMTNFHLPKSTLFMLVSAFAGLDTMKQAYAHAIASGYRFYSYGDACLLFRAPAP

SEQ ID NO: 64372 - protein, 357 aa, unidentified
  source 1..357: note = Bradyrhizobium sacchari
  REGION 1..357: note = tr|A0A560KKG1|A0A560KKG1_9BRAD S-adenosylmethionine:tRNA ribosyltransferase-isomerase; OS = Bradyrhizobium sacchari OX=1399419 GN=queA PE=3 SV=1
MRTDLFDFDLPAERIALRPASPRDSAKMLVVENGALRDQIIADLPQWLRPGDQLVVNDTKVIAAQLKGRRIGRETEPKIEATLIKRLDGSRWQALVKPAKKLVAGDRIRFGNEGKVCLLGHLDAEVEAKGVEGEVTLSFSFHGPALDQAIADLGSPPLPPYIASKRAPDDQDLADYQTMFAANEGAVAAPTAGLHFTPALEQALRARGVGIVSVTLHVGAGTFLPVKVDDTDGHKMHAEWGTIPADVAAKLNTARKNGGRIVAVGTTSLRLLESATSEHGIVQPFAAETSIFITPGYRFRAVDILMTNFHLPKSTLFMLVSAFSGLDTMKQAYAHAIANGYRFYSYGDACLLFRTGP

SEQ ID NO: 64373 - protein, 357 aa, unidentified
  source 1..357: note = Bradyrhizobium shewense
  REGION 1..357: note = tr|A0A1C3XFP9|A0A1C3XFP9_9BRAD S-adenosylmethionine:tRNA ribosyltransferase-isomerase; OS = Bradyrhizobium shewense OX=1761772 GN=queA PE=3 SV=1
MRTDLFDFDLPAERIALRPASPRDSAKMLVVENGALRDQTIADLAQWLKPGDQLVVNDTKVIAAQLKGRRIGRETEPKIEATLIKRLDGSRWQALVKPAKKLTAGDRIRFGNEGKVCLLGHLDAEVEAKGLEGEVTLSFSFHGPTLDQAIADLGSPPLPPYIASKRTPDDQDLADYQTMFAVNEGAVAAPTAGLHFTPALEQALRARGVGINQVTLHVGAGTFLPVKVDDTEGHKMHAEWGTISAETAERLNSARKNGGRIIAVGTTSLRLLESAASEDGTIQPFAAETSIFITPGYRFRAVDILMTNFHLPKSTLFMLVSAFSGLETMKAAYAHAIASGYRFYSYGDACLLFRSRG

SEQ ID NO: 64374 - protein, 364 aa, Bradyrhizobium sp.
  REGION 1..364: note = sp|A4YV19|QUEA_BRASO S-adenosylmethionine:tRNA ribosyltransferase-isomerase OS=Bradyrhizobium sp. (strain ORS 278) OX=114615 GN=queA PE=3 SV=1
MRTDLFDFHLPPENIALRPASPREAARMLVVQGDGVLRDRTIGDLPDWLEPGDQLVVNDTKVIAAQLSGRRISRETEAKIEATLIKRLDGSRWQALVRPAKKLLAGDTIRFGNEGKVCLLGHLDATVEAKGEEGEVTLSFVFHGPALDQAIADLGRPPLPPYIAGKRPADEQDAQDYQTMFAAKEGAVAAPTAGLHFTPALEQRLRARGVGLQRVTLHVGAGTFLPVKVEDTEGHRMHAEWGSLTPETAAALNQAKAEGGRIVAVGTTSMRLLESAALPDGTIAPFEAETSIFITPGYRFRAVDILMTNFHLPRSTLFMLVSAFAGLETMQAAYAHAIESGYRFYSYGDACLLFRQPDERVVEP

SEQ ID NO: 64375 - protein, 358 aa, Bradyrhizobium sp.
  REGION 1..358: note = tr|A0A1B9YQL4|A0A1B9YQL4_9BRAD S-adenosylmethionine:tRNA ribosyltransferase-isomerase; OS = Bradyrhizobium sp. LMTR 3 OX=189873 GN=queA PE=3 SV=1
MRTDLFDFELPATSVALRPASPRDAARMLVVQPDGVLRDRTVAELTQWLEPGDQLVVNDTKVISAQLKGRRIGRETEPKIEATLIKRLDGSRWQALAKPAKKLAPGDIVRFGNEGKVCLLGHLDAEVEAKGEEGEVTLSFSFHGPALDQAIADLGTPPLPPYIASKRTPDDRDAADYQTMFAANEGAVAAPTAGLHFTPELETALRRHGVELHRITLHVGAGTFLPVKVDETSEHRMHAEWGSISADTAAALNAARAQGGRIIAVGTTSLRLLESATHEDGTVQPFDGETSIFITPGYRFRAVDILMTNFHLPRSTLFMLVSAFSGLDTMKRAYAHAIAAGYRFYSYGDACLLFRAPD

SEQ ID NO: 64376 - protein, 357 aa, unidentified
  source 1..357: note = Bradyrhizobium stylosanthis
  REGION 1..357: note = tr|A0A560DIP3|A0A560DIP3_9BRAD S-adenosylmethionine:tRNA ribosyltransferase-isomerase; OS = Bradyrhizobium stylosanthis OX=1803665 GN=queA PE=3 SV=1
MRTDLFDFDLPAERIALRPAHPRDSARMLVVENGALRDQTIADLAQWLKPGDQLVVNDTKVIAAQLKGRRIGRETEPKIEATLIKRLDGSRWQALVKPAKKLVAGDRIRFGNEGKVCLLGHLDAEVEAKGSEGEVTLSFSFHGPALDQAIADLGSPPLPPYIASKRTPDDQDLADYQTMFAANEGAVAAPTAGLHFTPALEQALHARGVGINRITLHVGAGTFLPVKVDDTEGHKMHAEWGTISAETAETLNTARKNGGRIIAVGTTSLRLLESAASEDGTIQPFAAETAIFITPGYRFRAVDILMTNFHLPKSTLFMLVSAFSGLETMQAAYAHAIASGYRFYSYGDACLLFRARD

SEQ ID NO: 64377 - protein, 358 aa, unidentified
  source 1..358: note = Bradyrhizobium valentinum
  REGION 1..358: note = tr|A0A0R3L5T2|A0A0R3L5T2_9BRAD S-adenosylmethionine:tRNA ribosyltransferase-isomerase; OS = Bradyrhizobium valentinum OX=1518501 GN=queA PE=3 SV=1
MRTDLFDFELPATSIALRPASPRDAARMLVVQPDGVLRDRSIAELPQWLEPGDQLVVNDTKVISAQLKGRRIGRETEPKIEATLIKRLDGSRWRALVKPAKKLAPGDVVRFGNEGKVCLLGHLDAEVEAKGEEGEITLSFSFHGPALDQAIADLGTPPLPPYIASKRTPDDRDAADYQTMFAAKEGAVAAPTAGLHFTPDLEAALRGRGIELHRLTLHVGAGTFLPVKVGETSEHKMHAEWGAISAGTADALNAARANGGRIVAVGTTSLRLLESATTEDGTIQPFDGETSIFITPGYRFRAVDILMTNFHLPRSTLFMLVSAFSGLETMKRAYAHAIASGYRFYSYGDACLLFRARD

SEQ ID NO: 64378 - protein, 357 aa, unidentified
  source 1..357: note = Bradyrhizobium vignae
  REGION 1..357: note = tr|A0A4Q0R1D3|A0A4Q0R1D3_9BRAD S-adenosylmethionine:tRNA ribosyltransferase-isomerase; OS = Bradyrhizobium vignae OX=1549949 GN=queA PE=3 SV=1
MRTDLFDFDLPAERIALRPASPRDSAKMLVVENGALRDQTISDLPQWLKPGDQLVVNDTKVIAAQLKGRRIGRETEPKIEATLIKRVDGSRWQALVKPAKKLVAGDRIRFGNEGKVCLLGHLDADVEAKGAEGEVTLSFSFHGPALDQAIADLGSPPLPPYIASKRTPDDQDFADYQTMFAANEGAVAAPTAGLHFTPALEQALRARDIGINRVTLHVGAGTFLPVKAEDTEGHKMHAEWGTISAEVAERLNSARKNGRRIVAVGTTSLRLLESAASEDGMIQPFAAETSIFITPGYHFRAVDVLMTNFHLPKSTLFMLVSAFSGLETMKQAYAHAIANGYRFYSYGDACLLFPSVP

SEQ ID NO: 64379 - protein, 357 aa, Bradyrhizobium yuanmingense
  REGION 1..357: note = tr|A0A0R3C538|A0A0R3C538_9BRAD S-adenosylmethionine:tRNA ribosyltransferase-isomerase; OS = Bradyrhizobium yuanmingense OX=108015 GN=queA PE=3 SV=1
MRTDLFDFDLPPERIALRPASPRDSARMLVVENGALRDQIISDLPQWLRPGDQLVVNDTKVIAAQLKGRRIGRDTEPKIEATLIKRLDGSRWQALVKPAKKLAPGDRIRFGNDGKVCLLGHLDAEVEAKGTEGEVTLAFSFHGPALDQAIADLGSPPLPPYIASKRTPDDQDLADYQTMFAANEGAVAAPTAGLHFTPALEQALRDRGVGLNRVTLHVGAGTFLPVKVDDTEAHKMHAEWGTISAATAQRLNAARETGGRIVAVGTTSLRLLESAASEDGTIQPFAAETSIFITPGYRFRAIDILMTNFHLPKSTLFMLVSAFSGLETMKQAYAHAIASGYRFYSYGDACLLFRAER

SEQ ID NO: 64380 - protein, 357 aa, Bradyrhizobium yuanmingense
  REGION 1..357: note = tr|A0A1C3W5N1|A0A1C3W5N1_9BRAD S-adenosylmethionine:tRNA ribosyltransferase-isomerase; OS = Bradyrhizobium yuanmingense OX=108015 GN=queA PE=3 SV=1
MRTDLFDFDLPPERIALRPASPRDSARMLVVENGALRDQIISDLPQWLRPGDQLVVNDTKVIAAQLKGRRIGRETEPKIEATLIKRLDGSRWQALVKPAKKLAPGDRIRFGNDGKVCLLGYLDAEVEAKGTEGEVTLAFSFHGPALDQAIADLGSPPLPPYIASKRTPDDQDLADYQTMFAANEGAVAAPTAGLHFTPALEQALRDRGVGLNRVTLHVGAGTFLPVKVDDTEAHKMHAEWGTISAATAERLNAARKTGGRIVAVGTTSLRLLESAAREDGTIQPFAAETSIFITPGYRFRAVDILMTNFHLPKSTLFMLVSAFSGLATMKQAYAHAIASGYRFYSYGDACLLFRAVP

SEQ ID NO: 64381 - protein, 357 aa, unidentified
  source 1..357: note = Bradyrhizobium zhanjiangense
  REGION 1..357: note = tr|A0A4Q0SAI8|A0A4Q0SAI8_9BRAD S-adenosylmethionine:tRNA ribosyltransferase-isomerase; OS = Bradyrhizobium zhanjiangense OX=1325107 GN=queA PE=3; SV = 1
MRTDLFDFDLPPERIALRPASPRDSAKMLVVESGALRDQTISDLPQWLKPGDQLVVNDTKVIAAQLRGRRIGRETEPRIEATLIKRLDGSRWQALVKPAKKLTAGDRIRFGNEGKVCLLGHLDAEVEAKGSEGEVTLSFSFHGPALDQAIADLGSPPLPPYIASKRTPDDQDLADYQTMFAANDGAVAAPTAGLHFTPALERALRDRGVGINRLTLHVGAGTFLPVKVDDTEGHKMHPEWGTISAEVADRLNTARKNGGRIVAVGTTSLRLLESAAAEDGSIQPFAADTSIFITPGYRFRAVDILLTNFHLPRSTLFMLVSAFSGLETMKRAYAHAIATGYRFYSYGDACLLFRAEP

SEQ ID NO: 64382 - protein, 357 aa, unidentified
  source 1..357: note = Bradyrhizobium zhanjiangense
  REGION 1..357: note = tr|A0A4Q0QGF3|A0A4Q0QGF3_9BRAD S-adenosylmethionine:tRNA ribosyltransferase-isomerase; OS = Bradyrhizobium zhanjiangense OX=1325107 GN=queA PE=3; SV = 1
MRTDLFDFDLPPERIALRPASPRDSAKMLVVENGALRDQTISDLPQWLKPGDQLVVNDTKVIAAQLRGRRIGRETEPRIEATLIKRLDGSRWQALVKPAKKLTAGDRIRFGNEGKVCLLGHLDAEVEAKGSEGEVTLSFSFHGPALDQAIADLGSPPLPPYIASKRTPDDQDLADYQTMFAANEGAVAAPTAGLHFTPALERALRDHGVGINRLTLHVGAGTFLPVKVDDTEGHKMHPEWGTISAETAERLNTARKNGGRIVAVGTTSLRLLESAAAEDGSIQPFAADTSIFITPGYRFRAVDILLTNFHLPRSTLFMLVSAFSGLETMKRAYAHAIATGYRFYSYGDACLLFRAEP

SEQ ID NO: 64383 - protein, 355 aa, Brenneria alni
  REGION 1..355: note = tr|A0A421DT62|A0A421DT62_9GAMM S-adenosylmethionine:tRNA ribosyltransferase-isomerase; OS = Brenneria alni OX=71656 GN=queA PE=3 SV=1
MRVADFSFELPESLIAHYPQAKRSGCRLLSLDGPTGNLTHGVFTDLLNKLEAGDLLVFNDTRVIPARLFGRKTSGGKLEVLVERVLDEHRVLAHVRASKAPKPGTGLLLGDDDSVRATMVARHDALFELRFDDPRDVLSILNDIGHIPLPPYIDRPDEEADRELYQTVYSQRPGAVAAPTAGLHFDEPMLAALREKGVEMAFVTLHVGAGTFQPVRVETIEDHVMHAEYAEVPQDVVDAVLACKARGNRVVAVGTTSVRSLESAAQASQGALIAPFLGDTRIFIYPGYHYQIIDALVTNFHLPESTLIMLVSAFAGYRHTMSAYRQAVAEQYRFFSYGDAMFITRNPQAEQEKAG

SEQ ID NO: 64384 - protein, 355 aa, unidentified
  source 1..355: note = Brenneria goodwinii
  REGION 1..355: note = tr|A0A250BFD1|A0A250BFD1_9GAMM S-adenosylmethionine:tRNA ribosyltransferase-isomerase; OS = Brenneria goodwinii OX=1109412 GN=queA PE=3 SV=1
MRVADFSFELPESLIAHYPQAQRSGCRLLSLDGPTGNLTHGVFTDLLNKLDAGDLLVFNNTRVIPARLFGRKASGGKLEVLVERVLDERRVIAHVRASKAPKPGAELLLGDDDSVRATMVARHDALFELHFDDSRDVLSILNDIGHIPLPPYIDRPDEESDRELYQTVYSRRPGAVAAPTAGLHFDEPMLAALREKGVEMAFVTLHVGAGTFQPVRVETIEDHVMHAEYAEVPQEVVDAVLACKARGNKVVAVGTTSVRSLESAAQASKEALIAPFFGDTRIFIYPGYHYRIIDALVTNFHLPESTLIMLVSAFAGYQHTMSAYRQAVAEQYRFFSYGDAMFITRNPLAEQEQIG

SEQ ID NO: 64385 - protein, 355 aa, unidentified
  source 1..355: note = Brenneria goodwinii
  REGION 1..355: note = tr|A0A0G4JPT8|A0A0G4JPT8_9GAMM S-adenosylmethionine:tRNA ribosyltransferase-isomerase; OS = Brenneria goodwinii OX=1109412 GN=queA PE=3 SV=1
MRVADFSFELPESLIAHYPQAQRSGCRLLSLDGPTGNLTHGVFTDLLNKLDAGDLLVFNNTRVIPARLFGRKASGGKLEVLVERVLDERRVLAHVRASKAPKPGAELLLGDDDSVRATMVARHDALFELHFDDSRDVLSILNDIGHIPLPPYIDRPDEESDRELYQTVYSRRPGAVAAPTAGLHFDEPMLAALREKGVEMAFVTLHVGAGTFQPVRVETIEDHVMHAEYAEVPQEVVDAVLACKAHGNKVVAVGTTSVRSLESAAQASKEALIAPFFGDTRIFIYPGYHYRIIDALVTNFHLPESTLIMLVSAFAGYRHTMSAYRQAVAEQYRFFSYGDAMFITRNPLAEQEQIG

SEQ ID NO: 64386 - protein, 355 aa, Brenneria nigrifluens
  REGION 1..355: note = tr|A0A2U1UW56|A0A2U1UW56_9GAMM S-adenosylmethionine:tRNA ribosyltransferase-isomerase; OS = Brenneria nigrifluens DSM 30175 = ATCC 13028 OX=1121120; GN = queA PE=3 SV=1
MRVADFSFELPESLIAHYPQAQRSGCRLLSLEGPTGKVTHEVFTDLLNKLDAGDLLVFNDTRVIPARLFGRKASGGKLEVLVERVLDERRVLAHVRASKAPKPGTELLLGDDESVRATMAARHDALFELHFDDSRDVLSILNAIGHIPLPPYIDRPDEEADRELYQTVYSQRPGAVAAPTAGLHFDEPMLAALREKGVEMAFVTLHVGAGTFQPVRVESIEDHVMHAEYAEVPQAVVDAVLACKARGNRVVAVGTTSVRSLESAAQASKDALIAPFFGDTRIFIYPGYRYRIIDALVTNFHLPESTLIMLVSAFAGYRHTLSAYRQAVAEQYRFFSYGDAMFITRNPAAEQEQAG

SEQ ID NO: 64387 - protein, 355 aa, unidentified
  source 1..355: note = Brenneria roseae
  REGION 1..355: note = tr|A0A2U1U014|A0A2U1U014_9GAMM S-adenosylmethionine:tRNA ribosyltransferase-isomerase; OS = Brenneria roseae subsp. americana OX=1508507 GN=queA; PE = 3 SV=1
MRVADFSFELPESLIAHYPQAQRSGCRLLSLDGPTGNLTHGIFTDLLNKLDAGDLLVFNNTRVIPARLFGRKASGGRLEVLVERVLDEHRVLAHVRASKAPKPGTELLLGDDESVKATMAVRHDALFELHFDDARDVLTILNDIGHIPLPPYIDRPDEDADRELYQTVYSQRPGAVAAPTAGLHFDEPLLAALREKGVEMVFVTLHVGAGTFQPVRVETIEDHVMHAEYAEVPQDVVDAVLACKARGNRVIAVGTTSVRSLESAAQASEDALIAPFFGDTRIFIYPGYHYQVIDALVTNFHLPESTLIMLVSAFAGYRNTLSAYRQAVEEQYRFFSYGDAMFITRNPMAEQEKIK

SEQ ID NO: 64388 - protein, 355 aa, Brenneria rubrifaciens
  REGION 1..355: note = tr|A0A4V1F9K1|A0A4V1F9K1_9GAMM S-adenosylmethionine:tRNA ribosyltransferase-isomerase; OS = Brenneria rubrifaciens OX=55213 GN=queA PE=3 SV=1
MRVADFSFELPESLIAHYPQAQRSGCRLLSLDGPTGNLTHGIFTDLLNKLDAGDLLVFNNTRVIPARLFGRKVSGGKLEVLVERVLDAHRVLAHVRASKAPKPGAELLLGDDESVRATMAARHDTLFELHFDDPREVLSILNDIGHIPLPPYIDRPDEDADRECYQTVYSQRPGAVAAPTAGLHFDESLLAALREKGVEMAFVTLHVGAGTFQPVRVETIEDHVMHAEYAEVAQEVVDAVLACKARGNRVVAVGTTSVRALESAAQVSQDALIAPFFGDTRIFIYPGYRYQVIDVLITNFHLPESTLIMLVSAFAGYRHTMSAYQQAVQEQYRFFSYGDAMFITRNPMAEREAVA

SEQ ID NO: 64389 - protein, 356 aa, Brenneria salicis
  REGION 1..356: note = tr|A0A366IC94|A0A366IC94_9GAMM S-adenosylmethionine:tRNA ribosyltransferase-isomerase; OS = Brenneria salicis ATCC 15712 = DSM 30166 OX=714314; GN = queA PE=3 SV=1
MRVADFSFDLPQSLIARYPQAQRSGCHLLSLDGPTGNLTHGIFTDLLDELDAGDLLVFNNTRVIPARLFGRKASGGKLEVLVERVLDEHRVLAHVRASKAPKPGAALLLGDDESVRATMAARHDALFELHFDDARDVLAILNDIGHIPLPPYIDRPDEESDRELYQTVYSQRPGAVAAPTAGLHFDEPMLAALREKGVQMAFVTLHVGAGTFQPVRVETIEDHVMHAEYAEVPQDVVDAVLACKARGNRVIAVGTTSVRSLESAAQASQDALLAPFFGDTRIFIYPGYRYQVIDALITNFHLPESTLIMLVAAFAGYQHTMSAYRQAVAEQYRFFSYGDAMFITRNPQAEQEQVDS

SEQ ID NO: 64390 - protein, 355 aa, Brenneria sp.
  REGION 1..355: note = tr|A0A2U1UAA2|A0A2U1UAA2_9GAMM S-adenosylmethionine:tRNA ribosyltransferase-isomerase; OS = Brenneria sp. CFCC 11842 OX=2173106 GN=queA PE=3 SV=1
MRVADFSFELPESLIAHYPQAQRSGCRLLSLDGPTGKVTHEVFTDLLNKLDAGDLLVFNDTRVIPARLFGRKASGGKLEVLVERVLDERRVLAHVRASKAPKPGTELLLGDDESVRATMAARHDALFELHFDDSRDVLSILNAIGHIPLPPYIDRPDEEADRELYQTVYSQRPGAVAAPTAGLHFDEPMLAALREKGVEMAFVTLHVGAGTFQPVRVESIEDHVMHAEYAEVPQAVVDAVLACKARGNRVVAVGTTSVRSLESAAQASRDAPIAPFFGDTRIFIYPGYRYRIIDALVTNFHLPESTLIMLVSAFAGYRHTLSAYRQAVAEQYRFFSYGDAMFITRNPAAEQEKVG

SEQ ID NO: 64391 - protein, 355 aa, Brenneria sp.
  REGION 1..355: note = tr|A0A5J5G0P8|A0A5J5G0P8_9GAMM tRNA preQ1(34) S-adenosylmethionine ribosyltransferase-isomerase QueA; OS = Brenneria sp. L3-3HA OX=2590031 GN=queA PE=4 SV=1
MRVADFSFELPESLIARYPQPQRSACRLLSLDGPSGALTHGVFTDLLDKLEAGDLLVFNNTRVIPARLFGRKASGGRLEVLVERMLDNRRVLAHVRASKAPKPGAELLLGDDESVRATMAARHDTLFELHFHDERDVLTILNAIGHMPLPPYIDRPDEDADRELYQTVYSQRPGAVAAPTAGLHFDEPLLAALREKGVQMAFVTLHVGAGTFQPVRVETIEDHVMHAEYAEVPQEVVEAVQACKARGNRVIAVGTTSVRSLESAAQACGNGQIEPFFGDTRIFIYPGYHYQVVDALVTNFHLPESTLIMLVSAFAGYRHTMTAYRSAVEQQYRFFSYGDAMFITHNTQAEQERVE

SEQ ID NO: 64392 - protein, 362 aa, Breoghania corrubedonensis
  REGION 1..362: note = tr|A0A2T5VB91|A0A2T5VB91_9RHIZ S-adenosylmethionine:tRNA ribosyltransferase-isomerase; OS = Breoghania corrubedonensis OX=665038 GN=queA PE=3 SV=1
MRVDDFDFELPEDRIALRPARPRDSARQLIVHPGGEGELSDDIVANLVNHLRPGDALVFNDTKVIPAQLEGTRERDGAIARVGVTLHMRVAADRWRAFVRPAKKLLVGERVRFGSHEGTMCSAGLLDATVAEKGEGGEIEFAFDLSGPDLDIAIATAGHVPLPPYIASKRGEDEQDRRDYQTVYARHEGAVAAPTGGLHFTDDLLQRLRAHGVEEHFVTLHVGAGTFLPVKVDDIADHRMHSELCEVSAETADTLNAVRARGGRIVAVGTTSLRLLESAADETGIIHPFHAPTDIFITPGYRFRAVDILMTNFHLPRSTLFMLVSAFSGFETMHRAYAHAIANGYRFYSYGDSSLLFPQDTQ

SEQ ID NO: 64393 - protein, 340 aa, unidentified
  source 1..340: note = Brevefilum fermentans
  REGION 1..340: note = tr|A0A1Y6KA24|A0A1Y6KA24_9CHLR S-adenosylmethionine:tRNA ribosyltransferase-isomerase; OS = Brevefilum fermentans OX=1986204 GN=queA PE=3 SV=1
MRTAEFDYDLPLDRIAQTPITPRHDSRLMIVDRSTGKIEHRCFWEIDRFLKPGDVVVINETRVIPARIFATKQPGGGKVELLLLERNDARTWTAWVGGKGLIPGRRLTIAGGPEVEIIEVLEGPKRRLRFDEPIEPFFERVGHVPLPPYIHTRLDDLERYQTVYATTPGSAAAPTAGLHFTDPLIKKLLDQGILFARVTLHVGLDTFAPVTEADPREHKIHTEWCLLNQQTADQINAAKAAGGRVVSVGTTSVRTLETAARGRANGQVVAASCGHTDLFILPGFIFNAVDIMITNFHLPKSTLLMLVSAFAGRDLIFKAYQVAIDEGYRFYSFGDAMLIL

SEQ ID NO: 64394 - protein, 342 aa, Brevibacillus agri
  REGION 1..342: note = tr|A0A3M8AW02|A0A3M8AW02_9BACL S-adenosylmethionine:tRNA ribosyltransferase-isomerase; OS = Brevibacillus agri OX=51101 GN=queA PE=3 SV=1
MDVQQFDFELPEHLIAQHPLKDRTASRLLVLNKQTGAISHQRFTDLIDHLQPGDVLVMNDSRVLPARLIGEKAETGAKIEVLLLKSLGDDRWETLVKPGKRMKPGTEVVFGNGLLRCVCEEATETGGRIVRFLYEGIFYEILDQLGSMPLPPYIHEQLEDSERYQTVYARERGSAAAPTAGLHFTKPYLEQIAAKGVQLAYVTLHVGLGTFRPVSADSVEEHVMHAEYYEIPEETAELVNKAKAEGRRVIAVGTTSCRTLETVGRANGGKLAATSGWTDIFIYPGYTFSILDGLLTNFHLPKSTLVMLVSALAGKEHVMNAYKAAVQEEYRFFSFGDAMLIV

SEQ ID NO: 64395 - protein, 342 aa, Brevibacillus borstelensis
  REGION 1..342: note = tr|M8DH34|M8DH34_9BACL S-adenosylmethionine:tRNA ribosyltransferase-isomerase OS=Brevibacillus borstelensis AK1 OX=1300222 GN=queA PE=3 SV=1
MDVQQFDFELPERLIAQHPLEDRTASRLLVMNKRTGELAHRQFTQLIDYLNPGDVLVLNDSRVLPARLIGEKADTGAKIEVLLLKSLGEDRWETLVKPGKRVKPGTEVVFGNGQLRCVCEDVTETGGRIVRFHYEGIFYEILDQLGSMPLPPYIHAQLDDQERYQTVYAKERGSAAAPTAGLHFTEAYLKRLEEKGVQIAYITLHVGLGTFRPVTADLVEEHVMHSEYYEIPQKTAEIVNAAKAEGRRVIAVGTTSCRTLETVGQAHDGKLAAESGWTDIFIYPGYRFRIIDGLLTNFHLPKSSLVMLVSALAGRDHIMNAYRAAVKEEYRFFSFGDAMLLI

SEQ ID NO: 64396 - protein, 342 aa, Brevibacillus brevis
  REGION 1..342: note = sp|C0ZAN8|QUEA_BREBN S-adenosylmethionine:tRNA ribosyltransferase-isomerase OS=Brevibacillus brevis (strain 47 / JCM 6285 / NBRC 100599) OX=358681 GN=queA; PE = 3 SV=1
MDVQQFDFDLPEHLIAQHPLEDRTSSRLLVLEKQTGNIVHQQFTHLIDHLQAGDVLVMNDSRVLPARLIGEKTDTGAKIEILLLKSLGEDRWETLVKPGKRMKPGTEVVFGNGLLRCVCEDVTETGGRIVRFLYEGIFYEILDQLGSMPLPPYIHAQLEDSERYQTVYAKERGSAAAPTAGLHFTKPYLEQIAAKGVQLAYVTLHVGLGTFRPVSADSVEEHVMHAEYYEIPEETVELVNQAKAEGRRVIAVGTTSCRTLETVGRANGGKLVATSGWTDIFIYPGYTFSILDGLLTNFHLPKSTLVMLVSALAGKENVMRAYKRAVEEEYRFFSFGDAMLIL

SEQ ID NO: 64397 - protein, 342 aa, Brevibacillus brevis
  REGION 1..342: note = tr|A0A291BHF4|A0A291BHF4_BREBE S-adenosylmethionine:tRNA ribosyltransferase-isomerase; OS = Brevibacillus brevis X23 OX=1200792 GN=queA PE=3 SV=1
MDVQQFDFDLPEHLIAQHPLEDRTSSRLLVLEKQTGNIVHQQFTNLIDHLQAGDVLVMNDSRVLPARLIGEKAETGAKIEILLLKSLGDDRWETLVKPGKRMKPGTEVVFGNGLLRCLCEDVTETGGRIVRFLYEGIFYEILDQLGSMPLPPYIHAQLEDSERYQTVYAKERGSAAAPTAGLHFTKPYLEQIAAKGVQLAYVTLHVGLGTFRPVSADSVEEHVMHAEYYEIPEETVKLVNQAKAEGRRVIAVGTTSCRTLETVGRANGGKLVVTSGWTDIFIYPGYTFSILDGLLTNFHLPKSTLVMLVSALAGKENVMRAYKTAVEEEYRFFSFGDAMFIL

SEQ ID NO: 64398 - protein, 342 aa, Brevibacillus choshinensis
  REGION 1..342: note = tr|A0A0Q3WNQ7|A0A0Q3WNQ7_BRECH S-adenosylmethionine:tRNA ribosyltransferase-isomerase; OS = Brevibacillus choshinensis OX=54911 GN=queA PE=3 SV=1
MDVQQFDFELPEHLIAQHPLEERTSSRLLALNKATGDIMHQRFTDLIDHLVPGDVLVMNDSRVLPARLIGEKAETGAKIEVLLLKSLGDDRWETLVKPGKRMKPGTEVVFGNGLLSCTCEEATETGGRIVRFHYEGIFYEILDQLGSMPLPPYIHEQLDDQERYQTVYARERGSAAAPTAGLHFTKPYLEQIAAKGVHLAYVTLHVGLGTFRPVAANTIEEHVMHAEYYEISEETAQIVNSAKAEGRRVIAVGTTSCRTLETVGKANGGKLTPSSGWTDIFIYPGYSFTILDGLLTNFHLPKSTLVMLVSALAGKENVMNAYKSAVEEEYRFFSFGDAMLIL

SEQ ID NO: 64399 - protein, 343 aa, Brevibacillus fluminis
  REGION 1..343: note = tr|A0A3M8DT13|A0A3M8DT13_9BACL S-adenosylmethionine:tRNA ribosyltransferase-isomerase; OS = Brevibacillus fluminis OX=511487 GN=queA PE=3 SV=1
MDVTQFDFDLPERLIAQHPLEDRSASRLLVLHKQTGAVEHRTFTDLIDYLREGDVMVLNDSRVLPARLIGVKTDTGANIEVLLLKSLGDDRWETLVKPGKRVKPGTEISFGDGLLRAVCESSTEMGGRIIRFSYEGIFYELLDRLGSMPLPPYIHEQLEDRERYQTVYSRELGSAAAPTAGLHFTKDYLQRLEQKGVQLAYITLHVGLGTFRPVSADTVEEHVMHAEYYEIPEETARIVNTAKSEGRRVIAVGTTSCRTLETVGKAHGGKLAVESGWTDIFIYPGYQFSIIDGMITNFHLPKSTLVMLISALAGRETILNAYREAVEQEYRFFSFGDAMLINP

SEQ ID NO: 64400 - protein, 342 aa, Brevibacillus formosus
  REGION 1..342: note = tr|A0A4Y4I0R0|A0A4Y4I0R0_9BACL S-adenosylmethionine:tRNA ribosyltransferase-isomerase; OS = Brevibacillus formosus OX=54913 GN=queA PE=3 SV=1
MDVQQFDFDLPEHLIAQHPLEDRTSSRLLVLEKQTGNVAHQQFTNLIDHLQAGDVLVMNDSRVLPARLIGEKAETGAKIEILLLKSLGDDRWETLVKPGKRMKQGTEVVFGNGLLRCVCEDVTETGGRIVRFLYEGIFYEILDQLGSMPLPPYIHAQLEDSERYQTVYAKERGSAAAPTAGLHFTKPYLEQIAAKGVQLAYVTLHVGLGTFRPVSADSVEEHVMHAEYYEIPEETVELVNQAKAEGRRVIAVGTTSCRTLETVGRANGGKLVATSGWTDIFIYPGYTFSILDGLLTNFHLPKSTLVMLVSALAGKENVMRAYKTAVKEEYRFFSFGDAMLIL

SEQ ID NO: 64401 - protein, 342 aa, Brevibacillus formosus
  REGION 1..342: note = tr|A0A220MD06|A0A220MD06_9BACL S-adenosylmethionine:tRNA ribosyltransferase-isomerase; OS = Brevibacillus formosus OX=54913 GN=queA PE=3 SV=1
MDVQQFDFDLPEHLIAQHPLEDRTSSRLLVLEKQTGNIAHQKFTNLIDHLQAGDVLVMNDSRVLPARLIGEKADTGAKIEILLLKSLGDDRWETLVKPGKRMKQGTEVVFGNGLLRCVCEDVTETGGRIVRFLYEGIFYEILDQLGSMPLPPYIHAQLEDSERYQTVYAKERGSAAAPTAGLHFTKPYLEQIAAKGVQLAYVTLHVGLGTFRPVSADSVEEHVMHAEYYEIPEETVELVNQAKAEGRRVIAVGTTSCRTLETVGRANGGKLVATSGWTDIFIYPGYTFSILDGLLTNFHLPKSTLVMLVSALAGKENVMRAYKTAVEEEYRFFSFGDAMLIL

SEQ ID NO: 64402 - protein, 342 aa, unidentified
  source 1..342: note = Brevibacillus gelatini
  REGION 1..342: note = tr|A0A3M8ATA6|A0A3M8ATA6_9BACL S-adenosylmethionine:tRNA ribosyltransferase-isomerase; OS = Brevibacillus gelatini OX=1655277 GN=queA PE=3 SV=1
MDVQQFDFELPEHLIAQHPLEDRTASRLLVLDKQTGSISHQRFTDLIDHLQPGDVLVMNDSRVLPARLIGEKAGTGAKIEILLLKSLGDDRWETLVKPGKRMKPGTEVVFGNGLLRCVCEEVTETGGRIVRFLYEGIFYEILDQLGSMPLPPYIHAQLEDSERYQTVYARERGSAAAPTAGLHFTKPYLEQIAAKGVQLAYVTLHVGLGTFRPVSADTVEEHVMHAEYYEIPEKTAELVNKAKAEGRRVIAVGTTSCRTLETVGRANGGRLVATAGWTDIFIYPGYTFSILDGLLTNFHLPKSTLVMLVSALAGKEHVMNAYRAAIQEEYRFFSFGDAMLIV

SEQ ID NO: 64403 - protein, 342 aa, Brevibacillus invocatus
  REGION 1..342: note = tr|A0A3M8CMJ7|A0A3M8CMJ7_9BACL S-adenosylmethionine:tRNA ribosyltransferase-isomerase; OS = Brevibacillus invocatus OX=173959 GN=queA PE=3 SV=1
MDVQQFDFELPEHLIAQHPLEDRTSSRLLVLNKETGEIQHQRFTNLIDHLVPGDVLVLNDSRVLPARLIGEKAETGAKIEVLLLKSLGDDRWETLVKPGKRMKPGTIVTFGNGLLRCVCEEITETGGRIVRFSYEGIFYEILEQLGSMPLPPYIHAQLEDQERYQTVYARERGSAAAPTAGLHFTKEYLEQIAAKGVHLATITLHVGLGTFRPVAADTVEEHVMHAEYYEISQETADLVNAAKTEGRRVIAVGTTSCRTLETVGRDHGGRLAATSGWTDIFIYPGYTFSIIDGMLTNFHLPKSTLVMLVSALAGKEHILHAYNTAVKEEYRFFSFGDAMLIL

SEQ ID NO: 64404 - protein, 342 aa, Brevibacillus laterosporus
  REGION 1..342: note = tr|A0A075R161|A0A075R161_BRELA S-adenosylmethionine:tRNA ribosyltransferase-isomerase; OS = Brevibacillus laterosporus LMG 15441 OX=1042163 GN=queA; PE = 3 SV=1
MDVTLFDFDLPEELIAQHPLEDRTGSRLLVLDKQTGEVTHQQFTDLLTYLEAGDVLVVNDSRVLPARLIGLKSETGAKIEILLLKSLGDDRWETLARPGKRFKVGTEIEFGDGMLRCVCEEITPTGGRIVRFSYEGIFYEILDRLGSMPLPPYIHEQLDDRERYQTVYSKEVGSAAAPTAGLHFTQEYLDKLQQKGIKLAYVTLHVGLGTFRPVEADVIEEHVMHAEHYQLTQEMADLINGAKEAGKRVIAVGTTSCRTLETIAKEHGGKLVAQSGWTDIFMYPGYEFAIIDGLLTNFHLPKSTLVMLISALAGRENVLRAYQDAIARKYRFFSFGDAMLIK

SEQ ID NO: 64405 - protein, 342 aa, Brevibacillus laterosporus
  REGION 1..342: note = tr|H0UGH3|H0UGH3_BRELA S-adenosylmethionine:tRNA ribosyltransferase-isomerase OS=Brevibacillus laterosporus GI-9 OX=1118154 GN=queA PE=3 SV=1
MDVTLFDFDLPEELIAQHPLEDRTGSRLLVLDKQTGEVTHQQFTDLLTYLEAGDVLVVNDSRVLPARLIGVKSETGAKIEILLLKSLGDDRWETLARPGKRFKVGTEIEFGDGMLRCVCEEITPTGGRIVRFSYEGIFYEILDRLGSMPLPPYIHEQLDDRERYQTVYSKELGSAAAPTAGLHFTQEYLDKLQQKGIKLAYVTLHVGLGTFRPVEADVIEEHVMHAEHYQLTQEMADLINGAKEAGKRVIAVGTTSCRTLETIAKEHGGKLVAQSGWTDIFMYPGYEFAIIDGLLTNFHLPKSTLVMLISALAGRENVLRAYQDAIARKYRFFSFGDAMLIK

SEQ ID NO: 64406 - protein, 342 aa, unidentified
  source 1..342: note = Brevibacillus nitrificans
  REGION 1..342: note = tr|A0A3M8D8S7|A0A3M8D8S7_9BACL S-adenosylmethionine:tRNA ribosyltransferase-isomerase; OS = Brevibacillus nitrificans OX=651560 GN=queA PE=3 SV=1
MDVQQFDFELPEHLIAQHPLQERTSSRLLVLNKKTGDILHQRFTDLIEHLVPGDVLVMNDSRVLPARLIGEKTDTGAKIEVLLLKSLGDDRWETLVKPGKRMKPGTQVVFGNGLLRCTCEEVTETGGRIIRFHYDGIFYEILDQLGSMPLPPYIHEQLDDQERYQTVYARERGSAAAPTAGLHFTKPYLEQIAAKGVQLAYVTLHVGLGTFRPVSADSVEEHIMHAEYYEIPEETAEIVNRAKAEGRRVIAVGTTSCRTLETVGKANSGKLTPTSGWTDIFIYPGYTFSILDGLLTNFHLPKSTLVMLVSALAGKENVLRAYQTAVEEEYRFFSFGDAMLIL

SEQ ID NO: 64407 - protein, 345 aa, Brevibacillus panacihumi
  REGION 1..345: note = tr|V6LYL9|V6LYL9_9BACL S-adenosylmethionine:tRNA ribosyltransferase-isomerase OS=Brevibacillus panacihumi W25 OX=1408254 GN=T458_24505 PE=3 SV=1
MKVSELDFELPPKLLARRPREIDGQNRSDSRMLVIQKSQNKIIHDNIRNIGSYLSEGDLIVLNNSKTINAVFQGKNKNVGFVSVALCSQLDKRRWLATLHNTFKDNMANQIFEVGEGLEFKIIGPSNDIYGLFELELIHEEELIFLSEKYGRPIISNYTEKMWSLEYYQNEYATIPGSVELPAAGRHFTKTLLEELKNSGIEIEYITLHTGLSSMTIETEELEEHQMYSESYSISENTARKINETKEKGNKIIAIGTTVTRTLESSVNENGVIQSGSSWTNLYIYPGFEFKVIDGIVTNFHGPRTSRIALAAAMAGQSLIMDAYREAIQKEYLFYEFGDATLIFK

SEQ ID NO: 64408 - protein, 342 aa, Brevibacillus panacihumi
  REGION 1..342: note = tr|V6ME93|V6ME93_9BACL S-adenosylmethionine:tRNA ribosyltransferase-isomerase OS=Brevibacillus panacihumi W25 OX=1408254 GN=queA PE=3 SV=1
MDVQQFDFELPEHLIAQHPLADRTASRLLVLHKETGNILHQRFTNLIDHLVPGDVLVLNDSRVLPARLIGEKEGTGAKIEVLLLKSLGEDRWETLVKPGKRVKPGTVVVFGDGLLRCICEESTDMGGRIVRFSYEGIFYEILERLGTMPLPPYIHEQLEDQERYQTVYARERGSAAAPTAGLHFTKEYLERIAAKGVHITTITLHVGLGTFRPVSADRVEEHVMHAEYYEISQETADVVNAAKEEGRRVIAVGTTSCRTLETVGSAHGGRLAATSGWTDIFIYPGYSFSIIDGMLTNFHLPKSTLVMLVSALAGKENILNAYKSAVEQEYRFFSFGDAMLII

SEQ ID NO: 64409 - protein, 342 aa, Brevibacillus parabrevis
  REGION 1..342: note = tr|A0A4Y3PE17|A0A4Y3PE17_BREPA S-adenosylmethionine:tRNA ribosyltransferase-isomerase; OS = Brevibacillus parabrevis OX=54914 GN=queA PE=3 SV=1
MDVQQFDFDLPEHLIAQHPLEDRTSSRLLVLDKQTGAIAHRRFTDLIDHLQPGDVLVMNDSRVLPARLIGEKAETGAKIEILLLKSLGDDRWETLVKPGKRMKPGTEVVFGNGLLRCVCEEATETGGRIVRFLYEGIFYEILDQLGSMPLPPYIHAQLEDSERYQTVYARERGSAAAPTAGLHFTKPYLEQIAAKGVQLAYVTLHVGLGTFRPVSADSVEEHVMHAEYYEIPEETVELVNKAKAEGRRVIAVGTTSCRTLETVGRANEGKLVAASGWTDIFIYPGYTFSILDGLLTNFHLPKSTLVMLVSALAGKEHVMNAYKTAVREEYRFFSFGDAMLIV

SEQ ID NO: 64410 - protein, 342 aa, Brevibacillus reuszeri
  REGION 1..342: note = tr|A0A0K9Z0D6|A0A0K9Z0D6_9BACL S-adenosylmethionine:tRNA ribosyltransferase-isomerase; OS = Brevibacillus reuszeri OX=54915 GN=queA PE=3 SV=1
MDVQQFDFELPEHLIAQHPLEDRTSSRLLVLQKQTGEIMHQHFTDLIDHLQPGDVLVMNDSRVLPARLIGEKSETGAKIEILLLKSLGDDRWETLVKPGKRMKPGTEVVFGNGLLRCVCEEVTETGGRIVRFMYEGIFYEILDQLGSMPLPPYIHAQLEDSERYQTVYARERGSAAAPTAGLHFTKPYLEKIAAKGIQLAYVTLHVGLGTFRPVAADSVEEHVMHAEYYEIPEETAELVNRAKAEGRRVIAVGTTSCRTLETVGRAHGGKLAATSGWTDIFIYPGYTFSILDGLMTNFHLPKSTLVMLVSALAGKDNVMNAYKTAVQEEYRFFSFGDAMLIL

SEQ ID NO: 64411 - protein, 342 aa, Brevibacillus sp.
  REGION 1..342: note = tr|A0A553KNV4|A0A553KNV4_9BACL S-adenosylmethionine:tRNA ribosyltransferase-isomerase; OS = Brevibacillus sp. LEMMJ03 OX=2595056 GN=queA PE=3 SV=1
MDVQLFDFELPERLIAQHPLKDRTASRLLVLDKRTGEMAHRRFTDLVEYLRPGDVLVLNDSRVLPARLIGEKAGTGAKIEVLLLKSLGGDRWETLVKPGKRVKPGTEVVFGGGLLRCVCEEVTETGGRIVRFQYEGIFYEILDQLGTMPLPPYIHEQLEDQERYQTVYARERGSAAAPTAGLHFTEEYLRRVAEKGVEIAYVTLHVGLGTFRPVTADVVEEHVMHAEYYDIPPETAETVNRAKAEGRRVIAVGTTSCRTLETVGGLHDGRLAAGSGWTDIFIYPGYQFRIIDGLLTNFHLPKSTLVMLVSALAGRENVLRAYRTAVAEEYRFFSFGDAMLIL

SEQ ID NO: 64412 - protein, 342 aa, Brevibacillus sp.
  REGION 1..342: note = tr|A0A1I3WQ80|A0A1I3WQ80_9BACL S-adenosylmethionine:tRNA ribosyltransferase-isomerase; OS = Brevibacillus sp. OK042 OX=1884381 GN=queA PE=3 SV=1
MDVQQFDFELPEHLIAQHPLQERTSSRLLVLNKKTGDILHQRFTDLIEHLVPGDVLVMNDSRVLPARLIGEKTDTGAKIEVLLLKSLGDDRWETLVKPGKRMKIGTEVVFGNGLLRCTCEEVTETGGRIIRFHYDGIFYEILDQLGSMPLPPYIHEQLDDQERYQTVYARERGSAAAPTAGLHFTKPYLEQIAAKGVQLAYVTLHVGLGTFRPVSADSVEEHIMHAEYYEIPEETAEIVNRAKAEGRRVIAVGTTSCRTLETVGKANGGKLTPTSGWTDIFIYPGYTFSILDGLLTNFHLPKSTLVMLVSALAGKENVLRAYKTAVEEEYRFFSFGDAMLIL

SEQ ID NO: 64413 - protein, 297 aa, unidentified
  source 1..297: note = Brevifollis gellanilyticus
  REGION 1..297: note = tr|A0A512MG18|A0A512MG18_9BACT S-adenosylmethionine:tRNA ribosyltransferase-isomerase; OS = Brevifollis gellanilyticus OX=748831 GN=BGE01nite_49840; PE = 3 SV=1
MLVVHRESGEIEHRSFRELPGYLRADDLLVLNNTRVVPARFFSNDGSREVLRLEPISPLRWRCMVKPGKKFKIGHMVQIGESNGTVREILENGERIIEWDSLVDENVHGHLALPHYMGRDDQPADRERYQTVFAQSAGAIAAPTAGLHFTPQMLSTLPHAFVTLHVGVGTFQPVKVEKLSEHQMHSEVYEVGVETSKRISNAKRVIAVGTTSMRTLETVARDHGKVVPASGSTDIFIYPGFQFRVVGALLTNFHLPKSTLMMLVSAFAGRDLIMKAYTEAIRERYRFYSYGDCMLIV

SEQ ID NO: 64414 - protein, 341 aa, Brevinema andersonii
  REGION 1..341: note = tr|A0A1I1D992|A0A1I1D992_9SPIR S-adenosylmethionine:tRNA ribosyltransferase-isomerase; OS = Brevinema andersonii OX=34097 GN=queA PE=3 SV=1
MEYFLDFDLPENLIATSPAPERDGDRLMLINHNKLNHYMFTELPLFLNEGDVLVVNNSKVFKARLSIRLVRSDLESEMLLIEAENPYTWTAMLKKARRFKKGDLIIVANCVRAKVMEVLDSGLRRIRFEEPFSAERADQIGLVPLPPYIIEQRKKRSEVLYSFQDEERYQTLFAKYYGSVAAPTASLRFSQKILESLKNKGVQVAELTLHVGLGTFKPMDQLPENFKMHKEKISVPYETIQLCLQAKNKKKRVIAAGTTVCRALEASGNKAFCGETDIFIKPGYQFRMIDGLITNFHLPQSTLLLLVQAFAGIDNIRHAYAEAILQQYRFFSYGDGMLILQ

SEQ ID NO: 64415 - protein, 362 aa, unidentified
  source 1..362: note = Brevirhabdus pacifica
  REGION 1..362: note = tr|A0A1U7DL27|A0A1U7DL27_9RHOB S-adenosylmethionine:tRNA ribosyltransferase-isomerase; OS = Brevirhabdus pacifica OX=1267768 GN=queA PE=3 SV=1
MKLSDFDFDLPETLIATRPAVPRTAARLLLAEGPGIEDRQVADLPDILRPGDVLVLNDTKVMPVHLDGARHRDSAQGPVTARIRVNLLEPLPDGRWTALLKPLRKLREGEEIVFAPGFAARFEGVEGDHAILHFDLEGEDFDTALETAGAMPLPPYIAARRAPDAQDMTDYQTVFARQRGAVAAPTASLHFDRALLDRLEAAGVEFVHVTLHVGAGTFLPVKVDDITQHRMHSERGEITAEAAERLNRARAEGRRVIPVGTTALRLIESAANEDGTLAAWQGSTDIFITPGYRFRVTDGLMTNFHLPKSTLMMLVSALMGADTIRNIYRHAIDTGYRFFSYGDSSLLLPETGAGARKVAQRS

SEQ ID NO: 64416 - protein, 362 aa, unidentified
  source 1..362: note = Brevundimonas abyssalis
  REGION 1..362: note = tr|U2ZCC1|U2ZCC1_9CAUL S-adenosylmethionine:tRNA ribosyltransferase-isomerase OS=Brevundimonas abyssalis TAR-001 OX=1391729 GN=queA PE=3 SV=1
MAIAPPMLTADFDFHLPEDLIALRPVSPRDSARLMVVRDGRIEDRIVRDLADLLQPGDASSSTTPGSSRPASTACATATALTVPVEATLHQRTAPDRWTAFMKPGKRLKPDDRVMFGKTADGACLVGRLDARVVDKGEDGLITLAFDLAGPALDDAIREAGVMPLPPYIAAKRPEDDQDRIDYQTLFARHDGSVAAPTAGLHFTPELMAALAARGVSTHAVTLHVGAGTFLPVKADNVADHRMHAETGEVSPESAAALNAVRAAGGRIVCVGTTSLRLLESAADEDGVIRPYSDATAIFITPGYRFRAADVLMTNFHLPRSTLFMLVSAFAGTETMKAAYAHAVDTGYRFYSYGDGSLLFRA

SEQ ID NO: 64417 - protein, 370 aa, Brevundimonas diminuta
  REGION 1..370: note = tr|A0A2X1CCM9|A0A2X1CCM9_BREDI S-adenosylmethionine:tRNA ribosyltransferase-isomerase; OS = Brevundimonas diminuta OX=293 GN=queA PE=3 SV=1
MSIPRPMRTSDFDFDLPEACIALRPADPRDSARLLVVKGGDLEDRIIRDLPGFLQPGDALVFNDTRVIPARLSGVRHRTRPEGELLSVPVEATLHHRDAPDVWSAFMKPGKRLKVGDRVRFGREEDNACFLGQVDAEITAKGEDGLVTLRFDLTGPVLDDAIREVGVMPLPPYIAAKRAEDDQDLKDYQTVFAEHDGSVAAPTAGLHFTPALLDAIRARGVTTHAVTLHVGAGTFLPVKADDTADHKMHSEWGEVSAETAAALNAVRAAGGRIVCVGTTSLRLLESATREDGVVQPFHGDTAIFITPGYRFRACDVLMTNFHLPKSTLFMLVSAFAGLETMRAAYAHAIDSGYRFYSYGDGSLLFREDAQ

SEQ ID NO: 64418 - protein, 364 aa, Brevundimonas diminuta
  REGION 1..364: note = tr|L1QFP7|L1QFP7_BREDI S-adenosylmethionine:tRNA ribosyltransferase-isomerase OS=Brevundimonas diminuta 470-4 OX=1035191 GN=queA PE=3 SV=1
MRTSDFDFDLPEACIALRPADPRDSARLLVVKGGDLQDKIIHDLPDFLQPGDALVFNDTRVIPARLSGVRHRTGPEGELLSVPVEATLHHRDAPDVWSAFMKPGKRLKVGDRVRFGREEDNACLIGQVDAEITAKGEDGLVTLRFDLAGPVLDDAIREVGVMPLPPYIAAKRAEDDQDLKDYQTVFAEHDGSVAAPTAGLHFTPALLDAIRARGVTTHAVTLHVGAGTFLPVKADDTADHKMHSEWGEVSAETAAVLNAVRAAGGRIVCVGTTSLRLLESATGEDGVVKAFHGDTAIFITPGYRFRACDVLMTNFHLPKSTLFMLVSAFAGLETMKAAYAHAIDSGYRFYSYGDGSLLFREDAQ

SEQ ID NO: 64419 - protein, 361 aa, Brevundimonas intermedia
  REGION 1..361: note = tr|A0A4Y9RY75|A0A4Y9RY75_9CAUL S-adenosylmethionine:tRNA ribosyltransferase-isomerase; OS = Brevundimonas intermedia OX=74315 GN=queA PE=3 SV=1
MKTADFDFDLPEERIALRPADPRDSARLLVVKGGALEDRVIRDLPDFLRPGDALVFNDTRVIPARLSGVRQRIGAEGETLTVEVEATLHHRDAPDVWSAFMKPGKRIKPGDRIRFGLASEAACDLGRLDATVTAKGDDGLITLTFDLSGPALDDAIRDVGVMPLPPYIAAKRPEDDRDRSDYQTVFAEHDGSVAAPTAGLHFTPALLDAIRAKGVSTHAVTLHVGAGTFLPVKADDLADHKMHSEWGEVSPETAAALNAVHTNGGRIVCVGTTSLRLLESATTEDGEIKPFHGDTAIFITPGYRFRAVDILMTNFHLPKSTLFMLVSAFAGSATMKAAYAHAIADGYRFYSYGDGSLLFRD

SEQ ID NO: 64420 - protein, 363 aa, Brevundimonas naejangsanensis
  REGION 1..363: note = tr|A0A494RQP2|A0A494RQP2_9CAUL S-adenosylmethionine:tRNA ribosyltransferase-isomerase; OS = Brevundimonas naejangsanensis OX=588932 GN=queA PE=3; SV = 1
MRTSDFDFDLPEACIALRPADPRDSARLLVVKDGDLQDRIIRDLPDFLQPGDALVFNDTRVIPARLSGVRHRTGPEGELLSVPVEATLHHRDAPDAWSAFMKPGKRLKIGDRVRFGREEDNACFLGQIDAEITAKGEDGLVTLRFDLAGPALDDVIREVGVMPLPPYIAAKRPEDDRDLKDYQTVFATYDGSVAAPTAGLHFTPALLDAIRARGVATHAVTLHVGAGTFLPVKADDTADHKMHSEWGEVSAETAAALNAVRAAGGRIVCVGTTSLRLLESATTEDGMVQPFHGDTAIFITPGYRFRACDVLMTNFHLPKSTLFMLVSAFAGLETMRAAYAHAIDSGYRFYSYGDGSLLFRKDA

SEQ ID NO: 64421 - protein, 364 aa, Brevundimonas naejangsanensis
  REGION 1..364: note = tr|A0A4P7BSU3|A0A4P7BSU3_9CAUL S-adenosylmethionine:tRNA ribosyltransferase-isomerase; OS = Brevundimonas naejangsanensis OX=588932 GN=queA PE=3; SV = 1
MRTSDFDFDLPEACIALRPADPRDSARLLVVKGGELQDRVIRDLPGFLQPGDALVFNDTRVIPARLSGVRHRTGPEGERLSVPVEATLHHRDAPDVWSAFMKPGKRLKVGDRVRFGREEDNACFLGQVDAEITAKGEDGLVTLRFDLAGPALDDAIREVGVMPLPPYIAAKRAEDDQDLKDYQTVFAEHDGSVAAPTAGLHFTPALLDAIRARGVTTHAVTLHVGAGTFLPVKADDTADHKMHSEWGEVSAETAAALNGVRAAGGRIVCVGTTSLRLLESATSEDGVVQPFHGDTAIFITPGYRFRACDVLMTNFHLPKSTLFMLVSAFAGLETMKAAYAHAIDSGYRFYSYGDGSLLFREDAQ

SEQ ID NO: 64422 - protein, 361 aa, Brevundimonas nasdae
  REGION 1..361: note = tr|A0A0B4CS03|A0A0B4CS03_9CAUL S-adenosylmethionine:tRNA ribosyltransferase-isomerase; OS = Brevundimonas nasdae OX=172043 GN=queA PE=3 SV=1
MKTADFNFDLPEDRIALRPADPRDSARLLVVKGGALEDRIIRDLPDFLQPGDALVFNDTRVIPARLSGVRQRIGPEGETLTVEVEATLHHRDAPDVWSAFMKPGKRIKPGDRVRFGNASNAACDLGRLDATVTAKGEDGLITLTFDLAGPALDDAIREVGVMPLPPYIAAKRPEDDRDRSDYQTVFAEHDGSVAAPTAGLHFTPALLDAIRAKGVSTHAVTLHVGAGTFLPVKADDLADHRMHSEWGEVSPETAAALNAVHAKGGRIVCVGTTSLRLLESATAEDGEIKPFHGDTAIFITPGYRFRAVDVLMTNFHLPKSTLFMLVSAFAGTATMKAAYAHAVADGYRFYSYGDGSLLFRD

SEQ ID NO: 64423 - protein, 368 aa, Brevundimonas sp.
  REGION 1..368: note = tr|A0A4Y9RFY2|A0A4Y9RFY2_9CAUL S-adenosylmethionine:tRNA ribosyltransferase-isomerase; OS = Brevundimonas sp. S30B OX=2561925 GN=queA PE=3 SV=1
MKTSDFDFDLPEDRIALRPVEPRDAARLLVVRDGGLEDRIVRDLPDFLKPGDALVFNDTRVIPARLSGVRQRLGAEGETLTVEVEATLHHRDAPDVWSAFMKPGKRIKAGDRIRFGVVEDGACALGRLDATVEAKGEDGLVALRFDLAGPALDDAIRDLGVMPLPPYIAAKRPEDDRDRSDYQTVFAEHDGSVAAPTAGLHFTPALLEALRARGVSTHAVTLHVGAGTFLPVKADDTADHKMHSEWGEVSQETAAALNAVRAAGGRIVCVGTTSLRLLESATREDGVVQPFHGDTAIFITPGYRFRAVDVLMTNFHLPKSTLFMLVSAFAGLETMRAAYAHAIDKSYRFYSYGDGSLLFRQDAKGHDL

SEQ ID NO: 64424 - protein, 362 aa, Brevundimonas sp.
  REGION 1..362: note = tr|A0A0Q7TP17|A0A0Q7TP17_9CAUL S-adenosylmethionine:tRNA ribosyltransferase-isomerase; OS = Brevundimonas sp. Root1423 OX=1736462 GN=queA PE=3 SV=1
MKTADFDFDLPDDRIALRPAEPRDSARLLIVKDDALEDRIIRDLPGFLEPGDALVFNDTRVIPARLSGVRQRVGPESETLTVAVEATLHHRDAPDVWSAFMKPGKRIKAGDRIRFGAHGDGACELGRLDATVVDKGEDGLVTLRFDLAGPMLDEAIRAVGVMPLPPYIAAKRAEDDRDRSDYQTMFAQLDGSVAAPTAGLHFTPALLAAIRARGVSTHALTLHVGAGTFLPVKADDTADHRMHSEWGEVSAGTAAALNAVRAAGGRIVCVGTTSLRLLESATTEDGEVRPFHGDTAIFITPGYRFRAADVLMTNFHLPKSTLFMLVSAFAGLETMKAAYAHAVQDGYRFYSYGDGSLLFRAR

SEQ ID NO: 64425 - protein, 351 aa, Brevundimonas subvibrioides
  REGION 1..351: note = tr|A0A258FLF0|A0A258FLF0_9CAUL S-adenosylmethionine:tRNA ribosyltransferase-isomerase; OS = Brevundimonas subvibrioides OX=74313 GN=queA PE=3 SV=1
MKTADFDFDLPEDRIALRPAEPRDSARLLVVRDGGLSDHAIRDLADFLRPGDALVFNDTRVIPARLSGVRERAGPDGETLTVPVEATLHHRDAPDVWSAFMKPGKRIKPGDRIVFQSLTATVEAKSDDGLIALRFDVSGPALDEAIRAVGVMPLPPYIAAKRPEDDRDRSDYQTVFAQYDGSVAAPTAGLHFTPALLNAIRARGVTTHAVTLHVGAGTFLPVKADDTADHRMHSEWGTVSDETAAALNAVRAAGGRIVCVGTTSLRLLESATTPDGVIQPFHGDTAIFITPGYAFRAANVLMTNFHLPKSTLFMLVSAFAGLDTMKAAYAHAVATGYRFYSYGDGSLLFRH

SEQ ID NO: 64426 - protein, 356 aa, Brevundimonas subvibrioides
  REGION 1..356: note = tr|D9QK80|D9QK80_BRESC S-adenosylmethionine:tRNA ribosyltransferase-isomerase OS=Brevundimonas subvibrioides (strain ATCC 15264 / DSM 4735 / LMG 14903 / NBRC 16000 /CB 81) OX=633149 GN=queA PE=3 SV=1
MKTADFDFDLPEDRIALRPAEPRDSARLLVVQDGALADHVIRDLPAFLRPGDALVFNDTRVIPARLSGVRQRPNPVVGSPEGETLTVPVEATLHHRDTPDTWSAFMKPGKRIRPDDRIVFDSLSATVIAKSDDGLVTLRFDVSGPALDDAIRAVGVMPLPPYIAAKRPEDDRDRLDYQTVFATHDGSVAAPTAGLHFTPALLDAIRAKGVTTHAVTLHVGAGTFLPVKADDTADHRMHSEWGTVSGETAAALNAVHANGGRIVCVGTTSLRLLESATTPDGVIQPFHGDTAIFITPGYAFRAADVLVTNFHLPKSTLFMLVSAFAGLDTMKTAYAHAVADGYRFYSYGDGSLLFRQ

SEQ ID NO: 64427 - protein, 370 aa, Brevundimonas vancanneytii
  REGION 1..370: note = tr|A0A4P1K5P1|A0A4P1K5P1_9CAUL S-adenosylmethionine:tRNA ribosyltransferase-isomerase; OS = Brevundimonas vancanneytii OX=1325724 GN=queA PE=3 SV=1
MSIPRSMRTSDFDFDLPEACIALRPADPRDSARLLVVKGRDLQHQIIRDLPGFLQPGDALVFNDTRVIPARLSGVRHRTGPEGELLSVPVEATLHHRDAPDVWSAFMKPGKRLKVGDRVRFGREEDNACFLGQVDAEITAKGEDGLVTLRFDLAGPALDDAIREVGVMPLPPYIAAKRAEDDQDLKDYQTVFAEHDGSVAAPTAGLHFTPALLDAIRARGVTTHAVTLHVGAGTFLPVKADDTADHKMHSEWGEVSAETAAALNAVRAAGGRIVCVGTTSLRLLESATGEDGVVQPFHGDTAIFITPGYRFRACDVLMTNFHLPKSTLFMLVSAFAGLETMRAAYAHAIDSGYRFYSYGDGSLLFREDAQ

SEQ ID NO: 64428 - protein, 361 aa, Brevundimonas vesicularis
  REGION 1..361: note = tr|A0A1Z3UD74|A0A1Z3UD74_BREVE S-adenosylmethionine:tRNA ribosyltransferase-isomerase; OS = Brevundimonas vesicularis OX=41276 GN=queA PE=3 SV=1
MKTADFDFDLPEDRIALRPADPRDSARLLVVKGGALEDRIVRDLPDFLQPGDALVFNDTRVIPARLSGVRQRIGAEGETLTVEVEATLHHRDAPDVWSAFMKPGKRIKPGDRIRFGNASDAACDLGRLDATVTAKGEDGLITLTFDLAGPALDDAIRDVGVMPLPPYIAAKRPEDDRDRSDYQTVFAEHDGSVAAPTAGLHFTPALLDAIRAKGVSTHAVTLHVGAGTFLPVKADDPADHKMHSEWGEVSPETAAALNAVHAKGGRVVCVGTTSLRLLESATSEDGEIKPFHGDTAIFITPGYRFRAVDVLMTNFHLPKSTLFMLVSAFAGTATMKAAYAHAVADGYRFYSYGDGSLLFRD

SEQ ID NO: 64429 - protein, 361 aa, Brevundimonas vesicularis
  REGION 1..361: note = tr|A0A2X1B4L1|A0A2X1B4L1_BREVE S-adenosylmethionine:tRNA ribosyltransferase-isomerase; OS = Brevundimonas vesicularis OX=41276 GN=queA PE=3 SV=1
MKTADFDFDLPEDRIALRPADPRDSARLLVVKGGALEDRVIRDLPDFLQPGDALVFNDTRVIPARLSGVRQRIGAEGETLTVEVEATLHHRDAPDVWSAFMKPGKRIKPGDRVRFGNASDAACDLGRLDATVTAKGEDGLITLTFDLAGPALDDAIRDVGVMPLPPYIAAKRPEDDRDRSDYQTVFAEHDGSVAAPTAGLHFTPALLDAIRAKGVSTHAVTLHVGAGTFLPVKADDLADHKMHSEWGEVSPETAAALNAVHAKGGRIVCVGTTSLRLLESATAEGGEIKPFHGDTAIFITPGYRFRAVDVLMTNFHLPKSTLFMLVSAFAGTATMKAAYAHAVADGYRFYSYGDGSLLFRD

SEQ ID NO: 64430 - protein, 368 aa, unidentified
  source 1..368: note = Brevundimonas viscosa
  REGION 1..368: note = tr|A0A1I6S190|A0A1I6S190_9CAUL S-adenosylmethionine:tRNA ribosyltransferase-isomerase; OS = Brevundimonas viscosa OX=871741 GN=queA PE=3 SV=1
MKTADFDFDLPEDRIALRPVEPRDSARLLVVRPGGGLEDRIVRDLPDFLRPGDALVFNDTRVIPARLSGVRQRPGPEGEVLTVAVEANLHHRDAPDVWSAFMKPGKRIKVGDRIRFGAPSSGVLGDAACELGRLDATVEAKGEDGLVTLRFDLSGPFLDEAIRDVGVMPLPPYIAAKRPEDERDRTDYQTVFAEHDGSVAAPTAGLHFTPALLEAIRRRGVSTHAVTLHVGAGTFLPVKAEDVAGHRMHSEWGEVSAETAAALNAVRAAGGRVVCVGTTSLRLLESATGEDGVVRPFHGDTAIFITPGYRFRAVDVLMTNFHLPKSTLFMLVSAFAGLETMKAAYAHAVQTGYRFYSYGDGSLLFRAA

SEQ ID NO: 64431 - protein, 99 aa, Brochothrix campestris
  REGION 1..99: note = tr|W7CXK0|W7CXK0_9LIST S-adenosylmethionine:tRNA ribosyltransferase-isomerase OS=Brochothrix campestris FSL F6-1037 OX=1265861 GN=BCAMP_02415 PE=3 SV=1
MVKKIIAVGTTSMRTLESITQKFDGEIKADDGWTDIFISPGFEFKACDALITNFHLPKSTLVMLVSAFSSREHIINAYNHAVEEKYRFFSFGDAMFLQK

SEQ ID NO: 64432 - protein, 263 aa, Brochothrix campestris
  REGION 1..263: note = tr|W7D8C9|W7D8C9_9LIST S-adenosylmethionine:tRNA ribosyltransferase-isomerase OS=Brochothrix campestris FSL F6-1037 OX=1265861 GN=queA PE=3 SV=1
MKNVKVEDFNYELPEELIAQTPLLDRTASRLLMVNRATGAYRDGHFPDVLDYFEAGDALVLNNTRVLPARLHGIKTESGGHVEVLLLKQLLDDEWETLVKPAKRVRVGTKMSFGEGQLTAVCTEELEHGGRKLKFSYEGIFYEVLEALGEMPLPPYIKEQLADQERYQTVYAEENGSAAAPTAGLHFTTELLDAIRAKGVHVVFITLHVGLGTFRPISVEDTTNHKMHSEFYRMTEDVAATLNEVKANGKKNHRCRYYKYANT

SEQ ID NO: 64433 - protein, 343 aa, Brochothrix thermosphacta
  REGION 1..343: note = tr|A0A1D2KIQ1|A0A1D2KIQ1_BROTH S-adenosylmethionine:tRNA ribosyltransferase-isomerase; OS = Brochothrix thermosphacta OX=2756 GN=queA PE=3 SV=1
MRVEDFNYELPEELIAQTPLLDRTSSRLLMMNRETGAYRDGVFPDMLEYLSEGDALVLNNTRVLPARLHGIKAETGGHTEVLLLKQLEGDEWETLVKPAKRIRVGTVLSFGDGRLTAVCTGELEHGGRLMTFKYEGIFYEVLEALGEMPLPPYIKEQLEDQERYQTVYAEENGSAAAPTAGLHFTNELLEAIRAKGVHIVFITLHVGLGTFRPISVEDTTNHKMHSEFYRMTEEAAATLNDVRNNGKKIIAVGTTSMRTLESITQKFDGAIKADDGWTDIFISPGFEFKACDALITNFHLPKSTLVMLVSAFSSRDNVINAYEHAVAEKYRFFSFGDAMFLQK

SEQ ID NO: 64434 - protein, 356 aa, unidentified
  source 1..356: note = Brockia lithotrophica
  REGION 1..356: note = tr|A0A2T5G774|A0A2T5G774_9THEO S-adenosylmethionine:tRNA ribosyltransferase-isomerase; OS = Brockia lithotrophica OX=933949 GN=queA PE=3 SV=1
MRLSDFDYELPEDLIAQEPLPERDGSRLMVLHRVEGRWEHRRFRDLPDFLRPGDVLVFNDSRVIPARLYGRKAGTGARVELLLVEPRGDPWRWKVLARPARRLRPGTVVEIFPAPSEISERTSPALRATVEDVLDGGLRGVRFDLGAEEEGDFFQLLERVGRVPLPPYVRRELRDPERYQTVYARERGSVAAPTAGLHFTPELLAALADRGVTFAYVTLHVGLGTFRPVTEEDPTRHRMHEEPYRLPPETAEVLDAARREGQRILAVGTTSLRVLETVYRRHGRFVPEEGVTDLFLYPGVPVRSVQGLLTNFHLPRSTLLMLVAAFAGYELTIAAYRAAVQERYRFFSFGDAMFIL

SEQ ID NO: 64435 - protein, 363 aa, unidentified
  source 1..363: note = Brucella abortus
  REGION 1..363: note = tr|D7H3N2|D7H3N2_BRUAO S-adenosylmethionine:tRNA ribosyltransferase-isomerase OS=Brucella abortus bv. 5 str. B3196 OX=520453 GN=queA PE=3 SV=1
MRVDLFDFDLPEERIALRPVEPRDHAKLLHVRPGEPFEDRHVYDLPDLLQPGDALVFNDTKVIPAQLEGMRERTGNISQVSATLHMRVGPDRWKAFLRPAKRVKEGDRIRFGHSGTSCFLGTLDATVAEKGDSGEALLVFDLSGAVLDEAIAAVGHIPLPPYIASKRPEDERDRKDYQTVYAREEGAVAAPTAGLHFTPDLLEKIKARGIEEHFVTLHVGAGTFLPVKADDTGDHKMHAEIGHVSQRTASALNAVHERGGRIICVGTTSLRLIESATGEDGVVRPWSGATDIFITPGYRFRAVDLLMTNFHLPRSTLFMLVSAFSGLDTMHAAYNYAIADGYRFYSYGDASLLERIDHDRHSA

SEQ ID NO: 64436 - protein, 363 aa, unidentified; identical to SEQ ID NO: 64435
  source 1..363: note = Brucella abortus
  REGION 1..363: note = sp|B2S5U5|QUEA_BRUA1 S-adenosylmethionine:tRNA ribosyltransferase-isomerase OS=Brucella abortus (strain S19) OX=430066 GN=queA PE=3 SV=1

SEQ ID NO: 64437 - protein, 363 aa, unidentified; identical to SEQ ID NO: 64435
  source 1..363: note = Brucella canis
  REGION 1..363: note = sp|A9M5A4|QUEA_BRUC2 S-adenosylmethionine:tRNA ribosyltransferase-isomerase OS=Brucella canis (strain ATCC 23365 / NCTC 10854) OX=483179 GN=queA PE=3 SV=1

SEQ ID NO: 64438 - protein, 363 aa, Brucella ceti
  REGION 1..363: note = tr|C0G6I3|C0G6I3_9RHIZ S-adenosylmethionine:tRNA ribosyltransferase-isomerase OS=Brucella ceti str. Cudo; OX = 595497 GN=queA PE=3 SV=1
MRVDLFDFDLPEERITLRPVEPRDHAKLLHVRPGEPFEDRHVYDLPDLLQPGDALVFNDTKVIPAQLEGMRERTGNISQVSATLHMRVGPDRWKAFLRPAKRVKEGDRIRFGHSGTSCFLGTLDATVAEKGDSGEALLVFDLSGAVLDEAIAAVGHIPLPPYIASKRPEDERDRKDYQTVYAREEGAVAAPTAGLHFTPDLLEKIKARGIEEHFVTLHVGAGTFLPVKADDTGDHKMHAEIGHVSQRTASALNAVHERGGRIICVGTTSLRLIESATGEDGVVRPWSGATDIFITPGYRFRAVDLLMTNFHLPRSTLFMLVSAFSGLDTMHAAYNYAIADGYRFYSYGDASLLERIDHDRHSA

SEQ ID NO: 64439 - protein, 363 aa, Brucella melitensis; identical to SEQ ID NO: 64435
  REGION 1..363: note = sp|P65948|QUEA_BRUME S-adenosylmethionine:tRNA ribosyltransferase-isomerase OS=Brucella melitensis biotype 1 (strain 16M / ATCC 23456 / NCTC 10094) OX=224914; GN = queAPE=3 SV=1

SEQ ID NO: 64440 - protein, 363 aa, Brucella melitensis
  REGION 1..363: note = sp|C0RJ65|QUEA_BRUMB S-adenosylmethionine:tRNA ribosyltransferase-isomerase OS=Brucella melitensis biotype 2 (strain ATCC 23457) OX=546272 GN=queA PE=3 SV=1
MRVDLFDFDLPEERIALRPVEPRDHAKLLHVRPGEPFEDRHVYDLFDLLQPGDALVFNDTKVIPAQLEGMRERTGNISQVSATLHMRVGPDRWKAFLRPAKRVKEGDRIRFGHSGTSCFLGTLDATVAEKGDSGEALLVFDLSGAVLDEAIAAVGHIPLPPYIASKRPEDERDRKDYQTVYAREEGAVAAPTAGLHFTPDLLEKIKARGIEEHFVTLHVGAGTFLPVKADDTGDHKMHAEIGHVSQRTASALNAVHERGGRIICVGTTSLRLIESATGEDGVVRPWSGATDIFITPGYRFRAVDLLMTNFHLPRSTLFMLVSAFSGLDTMHAAYNYAIADGYRFYSYGDASLLERIDHDRHSA

SEQ ID NO: 64441 - protein, 363 aa, Brucella microti; identical to SEQ ID NO: 64435
  REGION 1..363: note = tr|C7LC45|C7LC45_BRUMC S-adenosylmethionine:tRNA ribosyltransferase-isomerase OS=Brucella microti (strain CCM 4915) OX=568815 GN=queA PE=3 SV=1

SEQ ID NO: 64442 - protein, 363 aa, unidentified; identical to SEQ ID NO: 64435
  source 1..363: note = Brucella neotomae
  REGION 1..363: note = tr|A0A381B7K0|A0A381B7K0_BRUNE S-adenosylmethionine:tRNA ribosyltransferase-isomerase; OS = Brucella neotomae OX=29460 GN=queA PE=3 SV=1

SEQ ID NO: 64443 - protein, 363 aa, unidentified; identical to SEQ ID NO: 64435
  source 1..363: note = Brucella ovis
  REGION 1..363: note = tr|N8NCF1|N8NCF1_BRUOV S-adenosylmethionine:tRNA ribosyltransferase-isomerase OS=Brucella ovis IntaBari-2002-82-58 OX=1293916 GN=queA PE=3 SV=1

SEQ ID NO: 64444 - protein, 363 aa, unidentified; identical to SEQ ID NO: 64435
  source 1..363: note = Brucella ovis
  REGION 1..363: note = sp|A5VQL9|QUEA_BRUO2 S-adenosylmethionine:tRNA ribosyltransferase-isomerase OS=Brucella ovis (strain ATCC 25840 / 63/290 / NCTC 10512) OX=444178 GN=queA PE=3 SV=1

SEQ ID NO: 64445 - protein, 363 aa, Brucella pinnipedialis; identical to SEQ ID NO: 64435
  REGION 1..363: note = tr|A0A0E1X4W8|A0A0E1X4W8_9RHIZ S-adenosylmethionine:tRNA ribosyltransferase-isomerase; OS = Brucella pinnipedialis M292/94/1 OX=520462 GN=queA PE=3; SV = 1

SEQ ID NO: 64446 - protein, 363 aa, Brucella sp.; identical to SEQ ID NO: 64435
  REGION 1..363: note = tr|D6LPW5|D6LPW5_9RHIZ S-adenosylmethionine:tRNA ribosyltransferase-isomerase OS=Brucella sp. NVSL 07-0026; OX = 520448 GN=queA PE=3 SV=1

SEQ ID NO: 64447 - protein, 349 aa, Brucella sp.
  REGION 1..349: note = tr|A0A1P8S1I7|A0A1P8S1I7_9RHIZ S-adenosylmethionine:tRNA ribosyltransferase-isomerase; OS = Brucella sp. 09RB8910 OX=1844051 GN=BKD02_01755 PE=3; SV = 1
MNPNFFDFSMENRSLPINPHWIDKDDDRKNCKLITIDKKSNSIEKSSFSKIMDYIHPGDVIVLNNSRILANAMILKNETHVVKFILHGFTPDGIVITPFFADICCNSSYTLCGFPHVSIEIKEKNSDSSWNASISDPQALVKYLSSNGERFDEYVSSRYFYTNRNAYEAVFATEYGSLDIPSAGIHFTNDIIDEIKNKGAIVKFITLHVSTSEMALNRIVNTDNIEDFKINPEYYDVPQETADCINEAVKQGSRIFAIGTTVTRALESAFDHSSNKVVESKGWTTLYINPSYKIRVVDCLLTNLHQPKSSHMVLTAQFAGADLLMQAYKSKEMDSMNFDLFGDCMLVLK

SEQ ID NO: 64448 - protein, 363 aa, unidentified; identical to SEQ ID NO: 64435
  source 1..363: note = Brucella suis
  REGION 1..363: note = tr|A0A4Z0EYV8|A0A4Z0EYV8_BRUSS S-adenosylmethionine:tRNA ribosyltransferase-isomerase; OS = Brucella suis OX=29461 GN=queA PE=3 SV=1

SEQ ID NO: 64449 - protein, 363 aa, unidentified; identical to SEQ ID NO: 64435
  source 1..363: note = Brucella suis
  REGION 1..363: note = sp|B0CGP2|QUEA_BRUSI S-adenosylmethionine:tRNA ribosyltransferase-isomerase OS=Brucella suis (strain ATCC 23445 / NCTC 10510) OX=470137 GN=queA PE=3 SV=1

SEQ ID NO: 64450 - protein, 356 aa, unidentified
  source 1..356: note = Brucellaceae bacterium
  REGION 1..356: note = tr|A0A3P1UQN3|A0A3P1UQN3_9RHIZ S-adenosylmethionine:tRNA ribosyltransferase-isomerase; OS = Brucellaceae bacterium VT-16-1752 OX=2487907 GN=queA; PE = 3 SV=1
MRVDLFDFDLPEERIALRPAEPRDHARLLRVVPGQPFEDRHVYDLPDLLQPGDALVFNDTKVIPAQLEGMRERDGNISQVSATLHMRMGPDRWAAFLRPAKRVKEGDRIRFGHSGSSCFLGTLDATVAEKGEAGEALLVFDLSSAMLDEAIAAVGHIPLPPYIASKRAEDDRDRSDYQTVYAREEGAVAAPTAGLHFTPDLLEKIKAKGIEEHFVTLHVGAGTFLPVKADDTTDHKMHSEIGYVSQKTADALNAVHERGGRVVCVGTTSLRLIESAAGEDGLIRPWSGPTDIFITPGYKFRAVDMLMTNFHLPRSTLFMLVSAFSGLDTMRAAYERAIETGYRFYSYGDGSLLERA

SEQ ID NO: 64451 - protein, 349 aa, unidentified
  source 1..349: note = Brumimicrobium aurantiacum
  REGION 1..349: note = tr|A0A3E1EVI5|A0A3E1EVI5_9FLAO S-adenosylmethionine:tRNA ribosyltransferase-isomerase; OS = Brumimicrobium aurantiacum OX=1737063 GN=queA PE=3 SV=1
MKLSEFDFELPEELIAKHPVENRDESRMMVIHRETGEIEHRLFKDVINYFDEGDVMVRNNTKVFPARLYGNKEKTGAKIEVFLLRELNRESLLWDVLVDPARKIRIGNKLYFGEDESLVAEVIDNTTSRGRTLRFLYDGTYEEFKNKIDELGETPLPKYIDREVEPEDAERFQTIYAKEEGAVAAPTAGMHFSKQLLKRLELKGISFSEITLHVGLGTFRPVEVEDLTKHKMDSEQAEITQEAADIVNKAKKNKKRVCAVGTTSMRTIETSVSTDGMLKPYEGWTNKFIFPPYDFSIADSMITNFHTPSSTLLMMVSAFLGHELMLKAYQEAIKEKYRFYSYGDVMLIL

SEQ ID NO: 64452 - protein, 349 aa, Brumimicrobium glaciale
  REGION 1..349: note = tr|A0A4Q4KTP3|A0A4Q4KTP3_9FLAO S-adenosylmethionine:tRNA ribosyltransferase-isomerase; OS = Brumimicrobium glaciale OX=200475 GN=queA PE=3 SV=1
MKLSEFDFELPEELIAKHPVENRDESRMMVIHRETGEIEHKLFKDVINYFGEGDVMVRNNTKVFPARLYGNKEKTGAKIEVFLLRELNRESLLWDVLVDPARKIRIGNKLYFGDDESLVAEVIDNTTSRGRTLRFLYDGSYEEFKNKIDELGETPLPKYIDREVEPEDAERFQTIYASEEGAVAAPTAGMHFSKQLLKRLELKGIEFAEITLHVGLGTFRAVEVEDLTKHKMDSEQAEVTQENADIVNKAKEKKKRVCAVGTTSMRTIETSVSTDGMLKPYEGWTNKFIFPPYDFSIADSMITNFHMPSSTLLMMVSAFLGHELMLRAYQEAIKEKYRFYSYGDVMLII

SEQ ID NO: 64453 - protein, 349 aa, unidentified
  source 1..349: note = Brumimicrobium salinarum
  REGION 1..349: note = tr|A0A2I0R0Z5|A0A2I0R0Z5_9FLAO S-adenosylmethionine:tRNA ribosyltransferase-isomerase; OS = Brumimicrobium salinarum OX=2058658 GN=queA PE=3 SV=1
MKLSEFDFELPEELIAKHPMENRDESRLMVVNRETGEIKHEQFKDIINYFDEGDVMVRNNTKVFPARLYGNKEKTGAKIEVFLLRELNRESLLWDVLVDPARKIRIGNKLYFGEDESLVAEVIDNTTSRGRTLRFLFEGSYDEFKDKIEELGETPLPKYIDREVEPDDAERYQTIFAKEEGAVAAPTAGMHFSKQLLKRLELKGIDFAEITLHVGLGTFREVEVEDLTKHKMDSEQAFITAKAADKVNKAKRNKKRVCAVGTTSMRTIETSVSTDGMLKPYEGWTNKFIFPPYDFSIADSMITNFHTPSSTLLMMVSAFLGHELMLKAYKEAIKEKYRFFSYGDAMLII

SEQ ID NO: 64454 - protein, 349 aa, Brumimicrobium sp.
  REGION 1..349: note = tr|A0A2U2XB80|A0A2U2XB80_9FLAO S-adenosylmethionine:tRNA ribosyltransferase-isomerase; OS = Brumimicrobium sp. C305 OX=2100725 GN=queA PE=3 SV=1
MKLSEFDFELPEELIAKHPAPNRDESRMMVINRETGEIEHKLFKDVINYFDEGDVMVRNNTKVFPARLYGNKEKTGAKIEVFLLRELNRESLLWDVLVDPARKIRIGNKLYFGDDESLVAEVIDNTTSRGRTLRFLFDGSYEEFKNKIDELGETPLLKYIDREVEPEDAERFQTIYAKVEGAVAAPTAGMHFSKQLLKRLELKGVEFAEITLHIGLGTFRPVEVEDLTKHKMDSEQAEITEKNANIVNKAKKNRKRVCAVGTTSMRTIETSVSTDGMLKPYEGWTNKFIFPPYDFSIADSMITNFHEPSSTLLMMVSAFLGHELTMKAYQEAIKEKYRFYSYGDAMLII

SEQ ID NO: 64455 - protein, 355 aa, unidentified
  source 1..355: note = Bryobacterales bacterium
  REGION 1..355: note = tr|A0A359LTW2|A0A359LTW2_9BACT S-adenosylmethionine:tRNA ribosyltransferase-isomerase; OS = Bryobacterales bacterium OX=2026791 GN=queA PE=3 SV=1
MDLAEFDYHLPPERIAQQPLADRAASRMLVLHRREQRWEDRLFRDLRAYLGPGDCLVLNDSKVFPSRLFGHRTGVRAVPIGKNNPKRHEYLSGQVEVFLLRPQSDDARTWTALVRPGRKLRSGERIRFDGGVEAEILEHREFGERLVRFEVEGDLYAWLDTAGHTPLPPYIDRPDTAQDRDRYQTVYAKQAGSAAAPTAGLHFTPEVLEACRGAGSDIACVTLHVGLGTFQPLHTEIVEKVELHAESYRITEENAAKLRAARRLVCVGTTSVRTIETAARGAGFSASSGDTSLYIYPGFAYRAVGAMLTNFHLPKSSLILLVAAFAGREFTLAAYRHAVAAEYRFYSYGDCMLIV

SEQ ID NO: 64456 - protein, 339 aa, unidentified
  source 1..339: note = Bryobacterales bacterium
  REGION 1..339: note = tr|A0A350ULP1|A0A350ULP1_9BACT S-adenosylmethionine:tRNA ribosyltransferase-isomerase; OS = Bryobacterales bacterium OX=2026791 GN=queA PE=3 SV=1
MRLSEFDYHLPDELIAQTPLLDRASSRMLVLHKENGRIEDRHFRDLPEYLGPGDCLALNNTRVFPARLFGRKPGYDRQVEIFLLKPVSPDRMLWSALARPGRHLHAGSRVDFTEQLSCEILESGMRGERVIQFHCAGDFDAELEAAGHVPLPPYIHRPDESGDRERYQTVYAEKRGSVAAPTAGLHFTPEVLEACEERGAGVAKVTLHVGLATFQPLANDEVAANELHEETYEICGANATRLREARRIVAVGTTSVRTIESAALNGGLEPQTGATRLFIYPGFEFKATGAMLTNFHLPKSSLLLLVSAFAGPEYVLNAYRYAVDQRYRFFSYGDCMLIV

SEQ ID NO: 64457 - protein, 375 aa, Bryocella elongata
  REGION 1..375: note = tr|A0A1H5W6B7|A0A1H5W6B7_9BACT S-adenosylmethionine:tRNA ribosyltransferase-isomerase; OS = Bryocella elongata OX=863522 GN=queA PE=3 SV=1
MLVSDFHFDLPEELIAQQPPAVRGSSRMLAVDRATGALADRQFTDLPSLLQRGDLLVMNDSRVLPARLFATRAGLTTQHNSPAPSGHIEVLLVEHLSNAEGHNEWRALVKPAKKVQPAETLRFDETLSAQVIAAGEFGERTLRFNLAGTAFYEGLDRIGHLPLPPYIHRDKAAPNTSEDRERYQTVFARERGSAAAPTAGLHFTPEVLEALRARGVELATITLHVGLGTFQPVRVDRTEDIRLHAEPYTLSEATACAINRATREGRRIVAVGTTTTRTLEHIARITPAGENVAAHSGSTSLFLSPGLNDRFLLVAGLLTNFHLPQSTLLMLVSAFLGDAHSEESDWGRQAALRAYAHAVAERYRFFSYGDCMLIT

SEQ ID NO: 64458 - protein, 357 aa, Buchnera aphidicola
  REGION 1..357: note = sp|P57232|QUEA_BUCAI S-adenosylmethionine:tRNA ribosyltransferase-isomerase OS=Buchnera aphidicola subsp. Acyrthosiphon pisum (strain APS) OX=107806 GN=queA PE=3; SV = 1
MQLSDFSFDLPKSLISFHPYFIRSTCRLMVMYGHTGMIFHKRFFNIIDEINSGDLIILNNTQVIPARFFGKKESGGKVEVLVEKILGINNILASIKNSKNINIGSKIFFGYKDKIKGSVVDCKNSFFEIFFHDNIDSAIDIINNIGEIPLPPYIKRFRNKLDVDLYQTVYKKKTGSIAAPTAGLHFDLPLLEALHNKGVDIDYITLHIGSGTFQPIRRVQIEEHIMHSESVEVSSSVIQKIKSCKKKGGRIIAVGTSTLRALESAYHSSEWSDSQDFISDTNIFIYPGYKHNIVDALITNFHFPESTLIMLVCSFLGYKNTMNAYNTAIVNKYSFFSYGDAMYITHNKLAPYENFII

SEQ ID NO: 64459 - protein, 357 aa, Buchnera aphidicola
  REGION 1..357: note = sp|B8D737|QUEA_BUCAT S-adenosylmethionine:tRNA ribosyltransferase-isomerase OS=Buchnera aphidicola subsp. Acyrthosiphon pisum (strain Tuc7) OX=561501 GN=queA PE=3; SV = 1
MQLSDFSFDLPKSLISFHPYFIRSTCRLMVMYGHTGMIFHKRFFNIIDEINSGDLIILNNTQVIPARFFGKKESGGKVEVLVEKILGINNILASIKNSKNINIGSKIFFGYKDKIKGSVVDCKNSFFEIFFHDNIDSAIDIINNIGEIPLPPYIKRFRNKLDVDLYQTVYKKKTGSIAAPTAGLHFDLPLLEALHNKGVDIDYITLHIGSGTFQPIRRVQIEEHIMHSESVEVSSSVIQKIKSCKKKGGRIIAVGTSTLRALESAYHSSEWSDSKDFISDTNIFIYPGYKHNIVDALITNFHFPESTLIMLVCSFLGYKNTMNAYNTAIVNKYSFFSYGDAMYITHNKLAPYENFII

SEQ ID NO: 64460 - protein, 159 aa, Budvicia aquatica
  REGION 1..159: note = tr|A0A484ZXF6|A0A484ZXF6_9GAMM S-adenosylmethionine:tRNA ribosyltransferase-isomerase; OS = Budvicia aquatica OX=82979 GN=queA_1 PE=3 SV=1
MAFVTLHVGAGTFQPVRVDDIKQHIMHSEYVEVPQDVVDAVLACKARGNKVIAVGTTSVRSLESAAQATQNGLLEPFFGDTCIFIYPGYQFKIVDTLITNFHLPESTLIMLVSAFAGYTNTLRAYHRAVEKQYRFFSYGDAMFITRNPEAVNEIPNREL

SEQ ID NO: 64461 - protein, 358 aa, Budvicia aquatica
  REGION 1..358: note = tr|A0A2C6DMS8|A0A2C6DMS8_9GAMM S-adenosylmethionine:tRNA ribosyltransferase-isomerase; OS = Budvicia aquatica OX=82979 GN=queA PE=3 SV=1
MRVTDFSFELPESLIARYPQAERSACRLLSLDGMSGSLSDGVFTDVLDKLEPGDLLVFNNTRVIPARLFGCKASGGKVEVLVERVLDDRRVLAHVRASKSPKPGTQLLLGDDESIPATMVARHDALFELHFDDGRDVLTILNAAGHMPLPPYIDRPDEESDRELYQTVYSERPGAVAAPTAGLHFDQPLLDALKAKGIEMAFVTLHVGAGTFQPVRVDDIKQHIMHSEYVEVPQDVVDAVLACKARGNKVIAVGTTSVRSLESAAQATQNGLLEPFFGDTCIFIYPGYQFKIVDTLITNFHLPESTLIMLVSAFAGYTNTLRAYHRAVEKQYRFFSYGDAMFITRNPEAVNEIPNREL

SEQ ID NO: 64462 - protein, 347 aa, Bulleidia extructa
  REGION 1..347: note = tr|D2MP02|D2MP02_9FIRM S-adenosylmethionine:tRNA ribosyltransferase-isomerase OS=Bulleidia extructa W1219; OX = 679192 GN=queA PE=3 SV=1
MKINWKTSDFDYNLPHELIAQSPLADRSTSRMMWIHKKSQKYEDKHFYDIVDILKPGDVLVRNNTRVIPARLFGIKEETGAHVELLLLKQKEHDVWECLAGNAKVVKVGSIVSFGDGQLKAQCLSIGDKGLREMKMLYEGIFTEILDQLGQVPLPPYIKKKLDDSERYQTVYAKIDGSAAAPTAGLHFTKEVDQQLLAKGITITEVTLHVGLGTFRPMDVENVHDHVMHSEVYEMSQETADILNQAKKLGRRIVAIGTTSVRTLESVWNRFGQFQECRGETTLFIYPGYQWHTCDVMLTNFHLPKSTLLMMISSFMGYELTQEVYHHAVNEKYRFFSFGDCMLIDHD

SEQ ID NO: 64463 - protein, 355 aa, Burkholderia ambifaria
  REGION 1..355: note = tr|A0A2S9NN86|A0A2S9NN86_9BURK S-adenosylmethionine:tRNA ribosyltransferase-isomerase; OS = Burkholderia ambifaria OX=152480 GN=queA PE=3 SV=1
MFTLSDFDFNLPPELIAQTALPERTASRLLEVDHTVEPARLVDRNFAELPSCIAPGDLLVFNDTRVLKARFFGQKASGGKIEVLIERVTGTHTALAQIRASKSPGAGTTLRLADAFDVTVGERVEPFFTLHFPQPCLTLIEQHGRLPLPPYIEHDADANDETRYQTVYASNPGAVAAPTAGLHFDLPLLEKLDAMGVERATLTLHVGAGTFQPVRVENIAEHRMHSEWYDLPQSLVDKIAATRARGGNVIAVGTTSMRALEAAARSADEAGRPLAATQAETDIFITPGYRFRVVDRLVTNFHLPKSTLLMLVSAFAGVETIRAAYRHAIDQRYRFFSYGDAMLLTRRDTPEAPQA

SEQ ID NO: 64464 - protein, 355 aa, Burkholderia ambifaria
  REGION 1..355: note = sp|B1YTH0|QUEA_BURA4 S-adenosylmethionine:tRNA ribosyltransferase-isomerase OS=Burkholderia ambifaria (strain MC40-6) OX=398577 GN=queA PE=3 SV=1
MFTLSDFDFNLPPELIAQTALPERTASRLLEVDHTVEPARLVDRNFVELPSCIAPGDLLVFNDTRVLKARFFGQKASGGKIEVLIERVTGTHTALAQIRASKSPGAGTTLRLADAFDVTVGERVEPFFTLHFPQPCLTLIEQHGRLPLPPYIEHDADASDETRYQTVYASNPGAVAAPTAGLHFDLPLLERLDAMGVERATLTLHVGAGTFQPVRVENIAEHRMHSEWYDLPQSLVDKIAATRARGGNVIAVGTTSMRALEAAARSADEAGRPLAATQAETDIFITPGYRFRVVDRLVTNFHLPKSTLLMLVSAFAGVETIRAAYRHAIDQRYRFFSYGDAMLLTRRDTPEAPRA

SEQ ID NO: 64465 - protein, 355 aa, Burkholderia anthina
  REGION 1..355: note = tr|A0A119RI62|A0A119RI62_9BURK S-adenosylmethionine:tRNA ribosyltransferase-isomerase; OS = Burkholderia anthina OX=179879 GN=queA PE=3 SV=1
MFTLSDFDFNLPPELIAQTALPDRTASRLLEVDGTVEPARLVDRHFTELPACIAPGDLLVFNDTKVLKARFFGQKASGGRIEVLIERVTGTHTALAQIRASKSPGAGTTLRLADAFDVTVGERVEPFFTLHFPAPCLDLIEQYGRLPLPPYIEHDPDATDETRYQTVYASNPGAVAAPTAGLHFDQPLLEKLDAMGVERATLTLHVGAGTFQPVRVENIAEHKMHSEWYDLPQSLVDKIAATRARGGNVIAVGTTSMRALEAAARSADEAGRALAATQAETDIFITPGYRFRVVDRLVTNFHLPKSTLLMLVSAFAGVETIRAAYRHAIEERYRFFSYGDAMLLTRRDTPEAPGA

SEQ ID NO: 64466 - protein, 355 aa, unidentified
  source 1..355: note = Burkholderia catarinensis
  REGION 1..355: note = tr|A0A1J9PWW3|A0A1J9PWW3_9BURK S-adenosylmethionine:tRNA ribosyltransferase-isomerase; OS = Burkholderia catarinensis OX=1108140 GN=queA PE=3 SV=1
MFTLSDFDFNLPPELIAQTALPDRTASRLLEVDRTVEPARFVDRRFAELPSCIAPGDLLVFNDTKVLKARFFGQKASGGKIEVLIERVTGTHTALAQIRASKSPGAGTTLRLADAFDVTVGERVEPFFTLHFPEPCLVLIEQYGRLPLPPYIEHDPDATDETRYQTVYASNPGAVAAPTAGLHFDKPLLDKLDAMGVERATLTLHVGAGTFQPVRVDNIAEHKMHSEWYDLPQSLVDRIAATRARGGNVIAVGTTSMRALEAAARAADEAGRPLAATQAETDIFITPGYRFRVVDRLVTNFHLPKSTLLMLVSAFAGVETIRAAYRHAIDERYRFFSYGDAMLLTRRDTPEAPRA

SEQ ID NO: 64467 - protein, 355 aa, Burkholderia cenocepacia
  REGION 1..355: note = sp|B4EE24|QUEA_BURCJ S-adenosylmethionine:tRNA ribosyltransferase-isomerase OS=Burkholderia cenocepacia (strain ATCC BAA-245 / DSM 16553 / LMG 16656 / NCTC 13227 / J 2315 / CF5610) OX=216591 GN=queA PE=3 SV=1
MFTLSDFDFNLPPELIAQTALPDRTASRLLEVDRSVEPARLVDRHFAELPSCIAPGDLLVFNDTKVLKARFFGQKASGGKIEVLIERVTGTHTALAQIRASKSPGAGTTLRLADAFDVTVGERVEPFFTLHFPAPCLDLIEQYGRLPLPPYIEHDPDATDETRYQTVYASNPGAVAAPTAGLHFDQPLLEQLDALGVERATLTLHVGAGTFQPVRVDNIAEHKMHSEWYDLPQSLVDKIAATRARGGNVIAVGTTSMRALEAAARSADEAGRPLAATQAETDIFITPGYRFRVVDRLVTNFHLPKSTLLMLVSAFAGVETIRAAYRHAIEERYRFFSYGDAMLLTRRDTPEAPGA

SEQ ID NO: 64468 - protein, 355 aa, Burkholderia cenocepacia
  REGION 1..355: note = sp|B1JVY9|QUEA_BURCC S-adenosylmethionine:tRNA ribosyltransferase-isomerase OS=Burkholderia cenocepacia (strain MC0-3) OX=406425 GN=queA PE=3 SV=1
MFTLSDFDFNLPPELIAQTALPDRTASRLLEVDGSVAPARLVDRHFAELPSCIAPGDLLVFNDTKVLKARFFGQKASGGKIEVLIERVTGTHTALAQIRASKSPGAGTTLRLADAFDVTVGERVEPFFTLHFPAPCLDLIEQHGRLPLPPYIEHDADATDETRYQTVYASNPGAVAAPTAGLHFDQPLLEKLDAMGVERATLTLHVGAGTFQPVRVENIAEHKMHSEWYDLPQSLVDKIAATRARGGNVIAVGTTSMRALEAAARSADEAGRPLAATQAETDIFITPGYRFRVVDRLVTNFHLPKSTLLMLVSAFAGVETIRAAYRHAIEERYRFFSYGDAMLLTRRDTPEAPGA

SEQ ID NO: 64469 - protein, 355 aa, Burkholderia cepacia
  REGION 1..355: note = tr|A0A0U3LA53|A0A0U3LA53_BURCE S-adenosylmethionine:tRNA ribosyltransferase-isomerase; OS = Burkholderia cepacia JBK9 OX=1395570 GN=queA PE=3 SV=1
MFTLSDFDFNLPPELIAQTALPDRTASRLLEVDRGVEPARLVDRHFTELPSCIAPGDLLVFNDTKVLKARFFGQKASGGKIEVLIERVTGTHTALAQIRASKSPGAGTTLRLADAFDVTVGERVEPFFTLHFPAPCLDLIEQFGRLPLPPYIEHDPDATDETRYQTVYASNPGAVAAPTAGLHFDQPLLDRLDAMGVERATLTLHVGAGTFQPVRVDNIAEHKMHSEWYDLPQSLVDRIAATRARGGNVIAVGTTSMRALEAAARSADEAGRPLAATQAETDIFITPGYRFRVVDRLVTNFHLPKSTLLMLVSAFAGVETIRAAYRHAIDERYRFFSYGDAMLLTRRDTPEAPHA

SEQ ID NO: 64470 - protein, 355 aa, Burkholderia cepacia
  REGION 1..355: note = tr|J7J4Q0|J7J4Q0_BURCE S-adenosylmethionine:tRNA ribosyltransferase-isomerase OS=Burkholderia cepacia GG4; OX = 1009846 GN=queA PE=3 SV=1
MFTLSDFDFNLPPELIAQTALPDRTASRLLEVDRTVEPARLVDRRFAELPSCIAPGDLLVFNDTKVLKARFFGQKASGGKIEVLIERVTGTHTALAQIRASKSPGAGTTLRLADAFDVTVGERVEPFFTLHFPEPCLTLIEQHGRLPLPPYIEHDADANDETRYQTVYASNPGAVAAPTAGLHFDQPLLAQLDAMGVERATLTLHVGAGTFQPVRVENIAEHKMHSEWYDLPQSLVDKIAATRARGGNVIAVGTTSMRALEAAARAADEAGRPLAATQAETDIFITPGYRFRVVDRLVTNFHLPKSTLLMLVSAFAGVETIRAAYQHAIDERYRFFSYGDAMLLTRRDTPEAPRA

SEQ ID NO: 64471 - protein, 355 aa, Burkholderia contaminans
  REGION 1..355: note = tr|A0A2S9P4V9|A0A2S9P4V9_9BURK S-adenosylmethionine:tRNA ribosyltransferase-isomerase; OS = Burkholderia contaminans OX=488447 GN=queA PE=3 SV=1
MFTLSDFDFNLPPELIAQTALPDRTASRLLEVDGTVAPARLTDRHFTELPSCIAAGDLLVFNDTKVLKARFFGQKASGGKIEVLIERVTGTHTALAQIRASKSPGAGTTLRLADAFDVTVGERVDPFFTLNFPAPCLDLIEQYGRLPLPPYIEHDPDATDETRYQTVYASNPGAVAAPTAGLHFDQPMLDRLDAMGVERATLTLHVGAGTFQPVRVDNIAEHKMHSEWYDLPQSLVDKIAATRARGGKVIAVGTTSMRALEAAARSADEAGRPLAATQAETDIFITPGYRFRVVDRLVTNFHLPKSTLLMLVSAFAGVETIRAAYRHAIDERYRFFSYGDAMLLTRRDVPEAPGA

SEQ ID NO: 64472 - protein, 355 aa, Burkholderia contaminans
  REGION 1..355: note = tr|A0A2S5DYP2|A0A2S5DYP2_9BURK S-adenosylmethionine:tRNA ribosyltransferase-isomerase; OS = Burkholderia contaminans OX=488447 GN=queA PE=3 SV=1
MFTLSDFDFNLPPELIAQTALPDRTASRLLEVDGTVAPARLVDRHFTALPSCIAAGDLLVFNDTKVLKARFFGQKASGGKIEVLIERVTGTHTALAQIRASKSPGAGTTLRLADAFDVTVGERVDPFFTLTFPAPCLDLIEQYGRLPLPPYIEHDPDATDETRYQTVYASNPGAVAAPTAGLHFDQPMLDRLDAMGVERATLTLHVGAGTFQPVRVDNIAEHKMHSEWYDLPQSLVDKIAATRARGGNVIAVGTTSMRALEAAARTADEAGRPLAATQAETDIFITPGYRFRVVDRLVTNFHLPKSTLLMLVSAFAGVETIRAAYRHAIAERYRFFSYGDAMLLTRRDTPEAASA

SEQ ID NO: 64473 - protein, 349 aa, unidentified
  source 1..349: note = Burkholderia dabaoshanensis
  REGION 1..349: note = tr|A0A2N7W1M6|A0A2N7W1M6_9BURK S-adenosylmethionine:tRNA ribosyltransferase-isomerase; OS = Burkholderia dabaoshanensis OX=564714 GN=queA PE=3 SV=1
MFTLSDFDFNLPPELIAQTALPERSASRLLEVDTSAAPARLVDRRFAELPECLAPGDLLVFNDTKVLKARFFGQKASGGKIEVLIERLTGARTALAQIRASKSPAPGTVLTLADAFDVTVGERVEPFYTLHFPDECLTLIERYGRLPLPPYIEHDPDAADETRYQTVFARNPGAVAAPTAGLHFDEAVLARLEARGIESATLTLHVGAGTFQPVRVENIAEHKMHSEWYQLPQTLVDKIAATRARAGRVVAVGTTSMRALEAAARDAAAAGRPLAATSAETDIFITPGYRFRIVDRLVTNFHLPKSTLLMLVSAFAGVDAIRDAYRHAIEERYRFFSYGDAMLLTRAES

SEQ ID NO: 64474 - protein, 355 aa, Burkholderia diffusa
  REGION 1..355: note = tr|A0A1B4BPR3|A0A1B4BPR3_9BURK S-adenosylmethionine:tRNA ribosyltransferase-isomerase; OS = Burkholderia diffusa OX=488732 GN=queA PE=3 SV=1
MFTLSDFDFNLPPELIAQTALPDRTASRLLEVDGAVEPARLVDRRFAELPSCIAPGDLLVFNDTKVLKARFFGQKASGGKIEVLIERVTGTHTALAQIRASKSPGAGTTLRLADAFDVTVGERVEPFFTLHFPQPCLTLIEQHGRLPLPPYIEHDADANDETRYQTVYAANPGAVAAPTAGLHFDQPLLEKLDAMGVERATLTLHVGAGTFQPVRVENIAEHRMHSEWYDLPQSLVDKIAATRARGGNVIAVGTTSMRALEAAARSADEAGRSLAAMQAETDIFITPGYRFRVVDRLVTNFHLPKSTLLMLVSAFAGVETIRAAYRHAIDERYRFFSYGDAMLLTRRDTPEAPRR

SEQ ID NO: 64475 - protein, 355 aa, Burkholderia dolosa
  REGION 1..355: note = tr|A0A0D5J4M1|A0A0D5J4M1_9BURK S-adenosylmethionine:tRNA ribosyltransferase-isomerase; OS = Burkholderia dolosa AU0158 OX=350701 GN=queA PE=3 SV=1
MFTLSDFDFNLPPELIAQTALPERTASRLLDVDPAVEPARLVDRRFAELPSCIARGDLLVFNDTKVLKARFFGQKASGGKIEVLVERVTGTHTALAQIRASKSPGAGTTLRLADAFDVTVGERVEPFFTLYFPQPCLDLIERYGRLPLPPYIEHDPDATDETRYQTVYASNPGAVAAPTAGLHFDEPLLAKLDAMGVERATLTLHVGAGTFQPVRVENIAEHKMHSEWYDLPQSLVDKIAATRARGGNVIAVGTTSLRALEAAARSADEAGRPLAATQAETDIFITPGYRFRVVDRLITNFHLPKSTLMMLVSAFAGIETIRAAYRHAIERRYRFFSYGDAMLLTRRDTPEAPPA

SEQ ID NO: 64476 - protein, 405 aa, Burkholderia dolosa
  REGION 1..405: note = tr|A2WCI8|A2WCI8_9BURK S-adenosylmethionine:tRNA ribosyltransferase-isomerase OS=Burkholderia dolosa AU0158; OX = 350701 GN=queA PE=3 SV=1
MLRKYNSGFHVVRTNDAGQAAHPAIIAARAPHLRVSAVPAAPAGRFEPLRMFTLSDFDFNLPPELIAQTALPERTASRLLDVDPAVEPARLVDRRFAELPSCIARGDLLVFNDTKVLKARFFGQKASGGKIEVLVERVTGTHTALAQIRASKSPGAGTTLRLADAFDVTVGERVEPFFTLYFPQPCLDLIERYGRLPLPPYIEHDPDATDETRYQTVYASNPGAVAAPTAGLHFDEPLLAKLDAMGVERATLTLHVGAGTFQPVRVENIAEHKMHSEWYDLPQSLVDKIAATRARGGNVIAVGTTSLRALEAAARSADEAGRPLAATQAETDIFITPGYRFRVVDRLITNFHLPKSTLMMLVSAFAGIETIRAAYRHAIERRYRFFSYGDAMLLTRRDTPEAPPA

SEQ ID NO: 64477 - protein, 350 aa, Burkholderia gladioli
  REGION 1..350: note = tr|F2L964|F2L964_BURGS S-adenosylmethionine:tRNA ribosyltransferase-isomerase OS=Burkholderia gladioli (strain BSR3) OX=999541 GN=queA PE=3 SV=1
MFKLSDFDFDLPPELIAQTALPERSASRLLEVDGSVAPTRLTDRRFTDLPECIGAGDLLVFNDTKVLKARFFGQKASGGKIEVLVERVIGSRTVLAQVRSSKSPVEGSTLRLAEAFEVTVGERVEPFFTLHFPEDCLALIERHGRLPLPPYIEHDPDATDETRYQTVFASNPGAVAAPTAGLHFDEALLATLRARGVETATLTLHVGAGTFQPVRVDNIAEHKMHSEWYELSDTLVAQIAATRARGGKVVAVGTTSMRALEAAARDAQREGRALAPTRAETDIFITPGYAFRVVDRLVTNFHLPKSTLLMLVSAFAGVETIRDAYRHAIAERYRFFSYGDAMLLTRRDPE

SEQ ID NO: 64478 - protein, 350 aa, Burkholderia gladioli
  REGION 1..350: note = tr|A0A095FH11|A0A095FH11_BURGA S-adenosylmethionine:tRNA ribosyltransferase-isomerase; OS = Burkholderia gladioli OX=28095 GN=queA PE=3 SV=1
MFKLSDFDFDLPPELIAQTALPERSASRLLEVDGSVAPTRLTDRRFTDLPECIGAGDLLVFNDTKVLKARFFGQKASGGKIEVLVERVIGPRTVLAQIRSSKSPVEGSTLRLAEAFEVTVGERVEPFFTLHFPEDCLALIERHGRLPLPPYIEHDPDATDETRYQTVFASNPGAVAAPTAGLHFDEALLATLRARGVETATLTLHVGAGTFQPVRVDNIAEHKMHSEWYELSDTLVAQIAATRARGGKVVAVGTTSMRALEAAARDAQREGRALAPTRAETDIFITPGYAFRVVDRLVTNFHLPKSTLLMLVSAFAGVGTIRDAYRHAIAERYRFFSYGDAMLLTRRDPE

SEQ ID NO: 64479 - protein, 350 aa, Burkholderia glumae
  REGION 1..350: note = tr|A0A2J9HDF8|A0A2J9HDF8_BURGL S-adenosylmethionine:tRNA ribosyltransferase-isomerase; OS = Burkholderia glumae OX=337 GN=queA PE=3 SV=1
MFKLSDFDFDLPPELIAQTALPERSASRLLEVGGTAGPARLVDRRFTELPDCLAAGDLLVFNDTKVLKARFFGQKASGGRIEVLIERVTGPRTALAQIRASKSPAAGATLTLADAFEVTVGERVEPFFTLHFPDDCLTLIERHGRLPLPPYIEHDPDATDETRYQTVFASNPGAVAAPTAGLHFDEALLATLRARGVETATLTLHVGAGTFQPVRVDNIADHRMHSEWYELTDALVERIAATRARGGRVIAVGTTSMRALEAAARDAEAAGRPLAATRAETDIFITPGYRFRVVDRLVTNFHLPKSTLLMLVSAFAGIEPIRAAYRHAIAERYRFFSYGDAMLLTRREPD

SEQ ID NO: 64480 - protein, 350 aa, Burkholderia glumae; identical to SEQ ID NO: 64479
  REGION 1..350: note = tr|C5AB59|C5AB59_BURGB S-adenosylmethionine:tRNA ribosyltransferase-isomerase OS=Burkholderia glumae (strain BGR1) OX=626418 GN=queA PE=3 SV=1

SEQ ID NO: 64481 - protein, 350 aa, unidentified
  source 1..350: note = Burkholderia insecticola
  REGION 1..350: note = tr|R4WW25|R4WW25_9BURK S-adenosylmethionine:tRNA ribosyltransferase-isomerase OS=Burkholderia insecticola; OX = 758793 GN=queA PE=3 SV=1
MFTLSDFDFNLPPELIAQSALAERSASRLLEVDNRATPAALIDRRFSELPDLIGPGDLLVFNDTKVLKARFFGQKASGGRVEVLVERLSGATTALAQIRASKSPVEGSTIRLADAFDVTVGERVEPFYTLHFPAECLTLIEQFGRLPLPPYIEHDADAYDETRYQTVYAANPGAVAAPTAGLHFDDALFARLDARGVERATLTLHVGAGTFQPVRVENIAEHKMHSEWYDLPQSLADRIAAVKARGNRVIAVGTTSMRALEAAARDAAHAGRPLAGSQAETDIFITPGYEFRVVDRLVTNFHLPKSTLLMLVSAFAGMDTIRDAYRHAIEQRYRFFSYGDAMLLTRRDPN

SEQ ID NO: 64482 - protein, 355 aa, Burkholderia lata
  REGION 1..355: note = tr|A0A3G3H3N9|A0A3G3H3N9_BURL3 S-adenosylmethionine:tRNA ribosyltransferase-isomerase; OS = Burkholderia lata (strain ATCC 17760 / DSM 23089 / LMG 22485 / NCIMB 9086 /R18194 / 383) OX=482957 GN=queA PE=3; SV = 1
MFTLSDFDFNLPPELIAQTALPDRTASRLLEVDGTVAPARLVDRQFTELPSCIAAGDLLVFNDTKVLKARFFGQKASGGKIEVLIERVTGTHTALAQIRASKSPGAGTTLRLADAFDVTVGERVEPFFTLNFPEPCLDLIEQYGRLPLPPYIEHDPDATDETRYQTVYASNPGAVAAPTAGLHFDQPMLDRLDAMGVERATLTLHVGAGTFQPVRVDNIAEHKMHSEWYDLPQSLVDKIAATRARGGNVIAVGTTSMRALEAAARAADEAGRPLAATQAETDIFITPGYRFRVVDRLVTNFHLPKSTLLMLVSAFAGVETIRAAYRHAIEQRYRFFSYGDAMLLTRRDTPEAPRA

SEQ ID NO: 64483 - protein, 355 aa, Burkholderia lata
  REGION 1..355: note = sp|Q39JF4|QUEA_BURL3 S-adenosylmethionine:tRNA ribosyltransferase-isomerase OS=Burkholderia lata (strain ATCC 17760 / DSM 23089 / LMG 22485 / NCIMB 9086 / R18194 / 3 83) OX=482957 GN=queA PE=3 SV=1
MFTLSDFDFNLPPELIAQTALPDRTASRLLEVDGTVAPARLVDRHFTELPSCISAGDLLVFNDTKVLKARFFGQKASGGKIEVLIERVTGTHTALAQIRASKSPGAGTTLRLADAFDVTVGERVDPFFTLNFPEPCLDLIEQYGRLPLPPYIEHDPDATDETRYQTVYASNPGAVAAPTAGLHFDQPMLDRLDAMGVERATLTLHVGAGTFQPVRVDNIAEHKMHSEWYDLPQSLVDKIAATRARGGNVIAVGTTSMRALEAAARAADEAGRPLAATQAETDIFITPGYRFRVVDRLVTNFHLPKSTLLMLVSAFAGVETIRAAYRHAIEQRYRFFSYGDAMLLTRRDTPEAPLA

SEQ ID NO: 64484 - protein, 358 aa, Burkholderia latens
  REGION 1..358: note = tr|A0A1B4NPL4|A0A1B4NPL4_9BURK S-adenosylmethionine:tRNA ribosyltransferase-isomerase; OS = Burkholderia latens OX=488446 GN=queA PE=3 SV=1
MFTLSDFDFNLPPELIAQTALPDRTASRLLEVDATVEPARLVDRRFTELLSCIAPGDLLVFNDTKVLKARFFGQKASGGKIEVLIERVTGTQTALAQIRASKSPGAGTTLRLADAFDVTVGERVEPFFTLHFPAPCLDLIEQYGRLPLPPYIEHDADANDETRYQTVYASNPGAVAAPTAGLHFDQPLLDKLDAIGVERATLTLHVGAGTFQPVRVENIAEHKMHSEWYDLPQTLVDKIAATRARGGSVIAVGTTSMRALEAAARDADEAGRPLAATQAETDIFITPGYRFRVVDRLVTNFHLPKSTLLMLVSAFAGVETIRAAYRHAIEARYRFFSYGDAMLLTRRDTPEAPEAPRA

SEQ ID NO: 64485 - protein, 360 aa, Burkholderia mallei
  REGION 1..360: note = sp|Q62H77|QUEA_BURMA S-adenosylmethionine:tRNA ribosyltransferase-isomerase OS=Burkholderia mallei (strain ATCC 23344) OX=243160 GN=queA PE=3 SV=1
MLTLSDFDFDLPPELIAQTALPERSASRLLEVDNTNPSAPPRLIDRRFAELPACVAPGDLLVFNDTKVLKARFFGRKASGGKIEVLIERVTGERIALAQIRASKSPPPGTTLTLADAFDVTVGERVEPFFTLHFPDNCLVLIERHGRLPLPPYIEHAPDAADETRYQTVFAANPGAVAAPTAGLHFDDAVLAALEARGVERATLTLHVGAGTFQPVRVENLAEHRMHSESYELTDALVEKIAATRARGGRVIAVGTTSMRALEAAARDAQAAGRPLAATRAETDIFITPGYRFRVVDRLVTNFHLPKSTLLMLVSAFAGIETIRAAYRHAIDARYRFFSYGDAMLLTRRDDAAEATHGGA

SEQ ID NO: 64486 - protein, 360 aa, Burkholderia mallei
  REGION 1..360: note = sp|A3MPB4|QUEA_BURM7 S-adenosylmethionine:tRNA ribosyltransferase-isomerase OS=Burkholderia mallei (strain NCTC 10247) OX=320389 GN=queA PE=3 SV=1
MLTLSDFDFDLPPELIAQTALPERSASRLLEVDNTNPSAPPRLIDRRFAELPACVAPGDLLVFNDTKVLKARFFGRKASGGKIEVLIERVTGERTALAQIRASKSPPPGTTLTLADAFDVTVGERVEPFFTLHFPDNCLVLIERHGRLPLPPYIEHAPDAADETRYQTVFAANPGAVAAPTAGLHFDDAVLAALEARGVERATLTLHVGAGTFQPVRVENLAEHRMHSESYELTDALVEKIAATRARGGRVIAVGTTSMRALEAAARDAQAAGRPLAATRAETDIFITPGYRFRVVDRLVTNFHLPKSTLLMLVSAFAGIETIRAAYRHAIDARYRFFSYGDAMLLTRRDDAAEATHGGA

SEQ ID NO: 64487 - protein, 355 aa, Burkholderia metallica
  REGION 1..355: note = tr|A0A1B4HR21|A0A1B4HR21_9BURK S-adenosylmethionine:tRNA ribosyltransferase-isomerase; OS = Burkholderia metallica OX=488729 GN=queA PE=3 SV=1
MFTLSDFDFNLPPELIAQTALPDRTASRLLEVDGTVAPARLVDRRFTELPSCIAAGDLLVFNDTKVLKARFFGQKASGGKVEVLIERVTGTHTALAQIRASKSPGAGTTLRLADAFDVTVGERVEPFFTLNFPEPCLDLIEQYGRLPLPPYIEHDPDATDETRYQTVYASNPGAVAAPTAGLHFDQPMLERLDAMGVERATLTLHVGAGTFQPVRVDNIAEHKMHSEWYDLPQSLVDRIAATRARGGNVIAVGTTSMRALEAAARAADEAGRPLAATQAETDIFITPGYRFRVVDRLITNFHLPKSTLLMLVSAFAGVDTIRAAYRHAIDERYRFFSYGDAMLLTRRDTPEAPRV

SEQ ID NO: 64488 - protein, 355 aa, Burkholderia multivorans
  REGION 1..355: note = tr|A0A2S9LVU1|A0A2S9LVU1_9BURK S-adenosylmethionine:tRNA ribosyltransferase-isomerase; OS = Burkholderia multivorans OX=87883 GN=queA PE=3 SV=1
MFTLSDFDFNLPPELIAQTALPDRTASRLLEVDTTAEPARFVDRRFAELPACIARGDLLVFNDTKVLKARFFGQKASGGRIEVLIERVTGSHTALAQIRASKSPGAGTTLRLADAFDVTVGERVEPFFTLHFPQPCLELIEQYGRLPLPPYIEHDPDATDETRYQTVYASNPGAVAAPTAGLHFDEPLLAKLDAMGIERATLTLHVGAGTFQPVRVENIAEHKMHSEWYELPQSLVDKIAATRARGGKVIAVGTTSMRALEAAARDAEAAGRPLAATQAETDIFITPGYRFRVVDRLVTNFHLPKSTLMMLVSAFAGIETIRAAYRHAIEQRYRFFSYGDAMLLTRRDTPEATHA

SEQ ID NO: 64489 - protein, 355 aa, Burkholderia multivorans
  REGION 1..355: note = tr|A0A0H3KCC2|A0A0H3KCC2_BURM1 S-adenosylmethionine:tRNA ribosyltransferase-isomerase; OS = Burkholderia multivorans (strain ATCC 17616 / 249); OX = 395019 GN=queA PE=3 SV =1
MFTLSDFDFNLPPELIAQTALPDRTASRLLEVDATAEPARFVDRRFAELPACIARGDLLVFNDTKVLKARFFGQKASGGRIEVLIERVTGSHTALAQIRASKSPGAGTTLRLADAFDVTVGERVEPFFTLHFPQPCLELIEQYGRLPLPPYIEHDPDATDETRYQTVYASNPGAVAAPTAGLHFDEPLLAKLDAMGIERATLTLHVGAGTFQPVRVENIAEHKMHSEWYELPQSLVDKIAATRARGGKVIAVGTTSMRALEAAARDAEAAGRPLAATQAETDIFITPGYRFRVVDRLVTNFHLPKSTLMMLVSAFAGIETIRAAYRHAIEQRYRFFSYGDAMLLTRRDTPEATHA

SEQ ID NO: 64490 - protein, 348 aa, unidentified
  source 1..348: note = Burkholderia novacaledonica
  REGION 1..348: note = tr|A0A2U3I4Q3|A0A2U3I4Q3_9BURK S-adenosylmethionine:tRNA ribosyltransferase-isomerase; OS = Burkholderia novacaledonica OX=1544861 GN=queA PE=3 SV=1
MFTLSDFDFNLPPELIAQSALAERSASRLLEVDNRVTPATLVDRRFSELPGLIAPGDLLVFNDTKVLKARFFGQKASGGRVEVLVERLTGATTALAQIRASKSPAEGSTIRLADAFDVTVGERVEPFYTLHFPAECLTLIEQFGRLPLPPYIEHDADAYDETRYQTVYAANPGAVAAPTAGLHFDDALFAELDARGVERATLTLHVGAGTFQPVRVENIAEHKMHSEWYDLPQSLVDRIAAVKARGNKVIAVGTTSMRALEAAARDAADAGRPLAATQAETDIFITPGYGFRVVDRLVTNFHLPKSTLLMLVSAFAGMDTIRDAYRHAIEQRYRFFSYGDAMLLTHQR

SEQ ID NO: 64491 - protein, 354 aa, Burkholderia oklahomensis
  REGION 1..354: note = tr|A0A381IGJ6|A0A381IGJ6_9BURK S-adenosylmethionine:tRNA ribosyltransferase-isomerase; OS = Burkholderia oklahomensis OX=342113 GN=queA_2 PE=3 SV=1
MKTDDFDFGLDWKAMPTDPAELRGKRRDSGRMIVLDRAAATIEHTIFATISDRLRPGDLLVFNDSYMLSNTLPFRHGNESAHVIVYGQEPDGTSIVELRSSQSPRPGLTLTATDDSQLSCTLLSPEPNQLWRARFEPAGKLVGVLDRRGWRSDETIPLNPVYWRTRPDAYRSVYARKPGSLEIPSAGLHFSTDVLRRLADKGVEFAYITLHVGATEILAVRHIDEDEVEQHKVRPEYFEVGAKAAGQINRARAERRRIIAIGTTAMRTLESLAAHGEPGAALRAQAGWTQLYIYPGFEFKIANGLLTNLHRPRSSHIVLTAAFAGKDLVMRGYAEILEMGGYEFDMFGDSMLIL

SEQ ID NO: 64492 - protein, 351 aa, Burkholderia oklahomensis
  REGION 1..351: note = tr|A0A381BRR8|A0A381BRR8_9BURK S-adenosylmethionine:tRNA ribosyltransferase-isomerase; OS = Burkholderia oklahomensis OX=342113 GN=queA_1 PE=3 SV=1
MFTLSDFDFDLPPELIAQTALPERSASRLLEVDNTSEPPRLVDRRFAELPACVAPGDLLVFNDTKVLKARFFGHKASGGRIEVLIERVTGARTALAQIRASKRPAPGTTLTLADAFDATVGERVEPFFTLHFPEDCLGLIERYGRLPLPPYIEHTPDATDETRYQTVFAANPGAVAAPTAGLHFDDAVLAALDARGVERATLTLHVGAGTFQPVRVENLAEHKMHREWYELTGALVEKIAATRARGGRVIAVGTTSMRALEAAARDAEAAGRPLSATRAETDIFITPGYRFRVVDRLVTNFHLPKSTLLMLVSAFAGVDTIRAAYRHAIAARYRFFSYGDAMLLTRRDDAR

SEQ ID NO: 64493 - protein, 350 aa, Burkholderia plantarii
  REGION 1..350: note = tr|A0A0B6RP33|A0A0B6RP33_9BURK S-adenosylmethionine:tRNA ribosyltransferase-isomerase; OS = Burkholderia plantarii OX=41899 GN=queA PE=3 SV=1
MFKLSDFDFDLPPELIAQTALPERSASRLLEVDGAATPARLVDRRFTELPDCLAAGDLLVFNDTKVLKARFFGQKASGGRIEVLVERVTGPRTALAQIRASKSPAAGTTLTLADAFEVTVGERVEPFFTLHFPDDCLTLIERHGRLPLPPYIEHDPDATDETRYQTVFANNPGAVAAPTAGLHFDDALLATLRARGVETATLTLHVGAGTFQPVRVDDIAEHKMHSEWYELTDALVERIAATRARGGRVIAVGTTSMRALEAAARDAEAAGRPLAATRAETDIFITPGYRFRVVDRLVTNFHLPKSTLLMLVSAFAGIEPIRAAYRHAIAGRYRFFSYGDAMLLTRREPD

SEQ ID NO: 64494 - protein, 360 aa, Burkholderia pseudomallei
  REGION 1..360: note = sp|Q3JNW2|QUEA_BURP1 S-adenosylmethionine:tRNA ribosyltransferase-isomerase OS=Burkholderia pseudomallei (strain 1710b) OX=320372 GN=queA PE=3 SV=2
MLTLSDFDFDLPPELIAQTALPERSASRLLEVDNTNPSAPPRLVDRRFAELPACVAPGDLLVFNDTKVLKARFFGRKASGGKIEVLIERVTGERTALAQIRASKSPPPGTTLTLADAFDVTVGERVEPFFTLHFPDDCLVLIERHGRLPLPPYIEHAPDAADETRYQTVFAANPGAVAAPTAGLHFDDAVLAALEARGVERATLTLHVGAGTFQPVRVENLAEHRMHSESYELTDALVEKIAATRARGGRVIAVGTTSMRALEAAARDAQAAGRPLAATRAETDIFITPGYRFRVVDRLVTNFHLPKSTLLMLVSAFAGIETIRAAYRHAIDARYRFFSYGDAMLLTRRDDAAEATHGGA

SEQ ID NO: 64495 - protein, 360 aa, Burkholderia pseudomallei; identical to SEQ ID NO: 64494
  REGION 1..360: note = sp|A3NDB6|QUEA_BURP6 S-adenosylmethionine:tRNA ribosyltransferase-isomerase OS=Burkholderia pseudomallei (strain 668) OX=320373 GN=queA PE=3 SV=1

SEQ ID NO: 64496 - protein, 355 aa, unidentified
  source 1..355: note = Burkholderia pseudomultivorans
  REGION 1..355: note = tr|A0A132EBP9|A0A132EBP9_9BURK S-adenosylmethionine:tRNA ribosyltransferase-isomerase; OS = Burkholderia pseudomultivorans OX=1207504 GN=queA PE=3; SV = 1
MFTLSDFDFNLPPELIAQTALPDRTASRLLEVDAAAEPARLVDRRFAELPACIARGDLLVFNDTKVLKARFFGQKASGGRIEVLIERVTGTRTALAQIRASKSPGAGTTLRLADAFDVTVGERVEPFFTLHFPAPCLTLIEQYGRLPLPPYIEHDPDATDETRYQTVYASNPGAVAAPTAGLHFDEPLLAKLDAMGVERATLTLHVGAGTFQPVRVENIAEHKMHSEWYELPQSLVDKIAATRARGGNVIAVGTTSMRALEAAARDADTAGRPLAAAQAETDIFITPGYRFRVVDRLVTNFHLPKSTLLMLVSAFAGVETIRAAYRHAIAERYRFFSYGDAMLLTRRDTPEATHA

SEQ ID NO: 64497 - protein, 355 aa, unidentified
  source 1..355: note = Burkholderia pseudomultivorans
  REGION 1..355: note = tr|A0A132F5N2|A0A132F5N2_9BURK S-adenosylmethionine:tRNA ribosyltransferase-isomerase; OS = Burkholderia pseudomultivorans OX=1207504 GN=queA PE=3; SV = 1
MFTLSDFDFNLPPELIAQTALPDRTASRLLEVDGAAEPARLVDRRFADLPACIAPGDLLVFNDTKVLKARFFGQKASGGRIEVLVERVTGTHTALAQIRASKSPGAGTTLRLADAFDVTVGERVEPFFTLHFPAPCLTLIEQYGRLPLPPYIEHDPDATDETRYQTVYASNPGAVAAPTAGLHFDEPLLAKLDAMGVERATLTLHVGAGTFQPVRVENIAEHRMHSEWYELPQSLVDKIAATRARGGKVIAVGTTSMRALEAAARDADAAGRPLAATQAETDIFITPGYRFRVVDRLVTNFHLPKSTLLMLVSAFAGVETIRAAYRHAIAERYRFFSYGDAMLLTRRDTPEAAGA

SEQ ID NO: 64498 - protein, 356 aa, unidentified
  source 1..356: note = Burkholderia puraquae
  REGION 1..356: note = tr|A0A1X1PAW6|A0A1X1PAW6_9BURK S-adenosylmethionine:tRNA ribosyltransferase-isomerase; OS = Burkholderia puraquae OX=1904757 GN=queA PE=3 SV=1
MFTLSDFDFNLPPELIAQTALPDRTASRLLEVDGTVAPARLVDRHFTALPSCISAGDLLVFNDTKVLKARFFGQKASGGKIEVLIERVTGTHTALAQIRASKSPGAGTTLRLADAFDVTVGERVEPFFTLNFPEPCLELIEQYGRLPLPPYIEHDPDATDETRYQTVYASNPGAVAAPTAGLHFDQPMLDRLDAMGVERATLTLHVGAGTFQPVRVDNIAEHKMHSEWYDLPQSLADRIAATRARGGNVIAVGTTSMRALEAAARAADEAGRPLAATQAETDIFITPGYRFRVVDRLVTNFHLPKSTLLMLVSAFAGVETIRAAYRHAIDERYRFFSYGDAMLLTRRDTPETTAGA

SEQ ID NO: 64499 - protein, 355 aa, Burkholderia pyrrocinia
  REGION 1..355: note = tr|A0A104MT02|A0A104MT02_BURPY S-adenosylmethionine:tRNA ribosyltransferase-isomerase; OS = Burkholderia pyrrocinia OX=60550 GN=queA PE=3 SV=1
MFTLSDFDFNLPPELIAQTALPDRTASRLLEVDTTAAPARLVDRHFAELPSCISAGDLLVFNDTKVLKARFFGHKASGGRIEVLIERVTGTHTALAQIRASKSPGPGTTLTLADAFDVTVGERVEPFFTLHFPAPCLNLIEQYGRLPLPPYIEHDPDATDETRYQTVYASNPGAVAAPTAGLHFDEPLLAKLDAMGVERATLTLHVGAGTFQPVRAENIAEHKMHSEWYELPQSLVDKIAATRARGGSVIAVGTTSMRALEAAARDADAAGRPLAATQAETDIFITPGYAFRVVDRLVTNFHLPKSTLLMLVSAFAGVDTIRAAYRHAIEQRYRFFSYGDAMLLTRRSAPEAPAA

SEQ ID NO: 64500 - protein, 355 aa, Burkholderia pyrrocinia
  REGION 1..355: note = tr|A0A087NPV4|A0A087NPV4_BURPY S-adenosylmethionine:tRNA ribosyltransferase-isomerase; OS = Burkholderia pyrrocinia OX=60550 GN=queA PE=3 SV=1
MFTLSDFDFNLPPELIAQTALPDRTASRLLEVDRTVEPARLVDRRFTELPSCIAPGDLLVFNDTRVLKARFFGQKASGGKIEVLIERVTGTHTALAQIRASKSPGAGTTLRLADAFDVTVGERVEPFFTLHFPEPCLALIEQYGRLPLPPYIEHDPDATDETRYQTVYASNPGAVAAPTAGLHFDQPMLEKLDAMGVERATLTLHVGAGTFQPVRVDNIAEHKMHSEWYDLPQSLVDKIAATRARGGNVIAVGTTSMRALEAAARSADEAGRPLAATQAETDIFITPGYRFRVVDRLVTNFHLPKSTLLMLVSAFAGVETIRAAYRHAIDQRYRFFSYGDAMLLTRRDTPEAPRV

SEQ ID NO: 64501 - protein, 355 aa, unidentified
  source 1..355: note = Burkholderia reimsis
  REGION 1..355: note = tr|A0A365QI42|A0A365QI42_9BURK S-adenosylmethionine:tRNA ribosyltransferase-isomerase; OS = Burkholderia reimsis OX=2234132 GN=queA PE=3 SV=1
MFTLSDFDFNLPPELIAQTALPDRTASRLLEVDGTVEPARLVDRRFAELPSCIAPGDLLVFNDTKVLKARFFGQKASGGKIEVLVERVTGTHTALAQIRASKSPGAGTTLRLADAFDVTVGERVEPFFTLVFPEPCLDLIEQYGRLPLPPYIEHDPDATDETRYQTVYASNPGAVAAPTAGLHFDQPLLDKLDAMGVERATLTLHVGAGTFQPVRVDNIAEHKMHSEWYDLPQSLVDKIAATRARGGSVIAVGTTSMRALEAAARTADEAGRPLAATQAETDIFITPGYRFRVVDRLVTNFHLPKSTLLMLVSAFAGVETIRAAYRHAIEQRYRFFSYGDAMLLTRRDTPETPRA

SEQ ID NO: 64502 - protein, 355 aa, Burkholderia seminalis
  REGION 1..355: note = tr|A0A118FST2|A0A118FST2_9BURK S-adenosylmethionine:tRNA ribosyltransferase-isomerase; OS = Burkholderia seminalis OX=488731 GN=queA PE=3 SV=1
MFTLSDFDFNLPPELIAQTALPDRTASRLLEVDNTAEPARLVDRRFTELPSCIAPGDLLVFNDTKVLKARFFGQKASGGKIEVLIERLTGTHTALAQIRASKSPGAGTTLRLADAFDVTVGERVEPFFTLHFPAPCLDLIEQFGRLPLPPYIEHDADATDETRYQTVYASNPGAVAAPTAGLHFDQPLLAKLDAMGVERATLTLHVGAGTFQPVRVENIAEHKMHSEWYDLPQSLVDKIAAARARGGNVIAVGTTSMRALEAAARAADEAGRPLAATQAETDIFITPGYRFRVVDRLVTNFHLPKSTLLMLVSAFAGVETIRAAYRHAIEERYRFFSYGDAMLLTRRDTPEAPGA

SEQ ID NO: 64503 - protein, 357 aa, unidentified
  source 1..357: note = Burkholderia singularis
  REGION 1..357: note = tr|A0A238H9E5|A0A238H9E5_9BURK S-adenosylmethionine:tRNA ribosyltransferase-isomerase; OS = Burkholderia singularis OX=1503053 GN=queA PE=3 SV=1
MLTLSDFDFDLPPELIAQTALPERSASRLLEVGNAPAGARLVDRRFAELPGCIAPGDLLVFNDTKVLKARLLGRKASGGKIEVLIERVTGPRTALAQIRASKSPAAGTTLTLADAFDVTVGERVEPFFTLHFPDDCGTLIERYGRLPLPPYIEHAPDAIDETRYQTVFAANPGAVAAPTAGLHFDDAVLAALDVRGVERATLTLHVGAGTFQPVRAENIAEHRMHREWYELSGALVDQIAATRARGGRVIAVGTTSLRALEAAARDAEAAGRPLAATRAETDIFITPGYRFRVVDRLVTNFHLPKSTLMMLVSAFAGLETIRAAYRHAIDARYRFFSYGDAMLLTRRDLPEENRRDA

SEQ ID NO: 64504 - protein, 357 aa, unidentified
  source 1..357: note = Burkholderia singularis
  REGION 1..357: note = tr|A0A103E456|A0A103E456_9BURK S-adenosylmethionine:tRNA ribosyltransferase-isomerase; OS = Burkholderia singularis OX=1503053 GN=queA PE=3 SV=1
MLTLSDFDFDLPPELIAQTALPERSASRLLEVGNAPAGARLVDRRFAELPGCIAPGDLLVFNDTKVLKARLLGRKASGGKIEVLIERVTGPRTALAQIRASKSPAAGTTLTLADAFDVTVGERVEPFFTLHFPDDCGTLIERYGRLPLPPYIEHAPDAIDETRYQTVFAANPGAVAAPTAGLHFDDAVLAALDARGVERATLTLHVGAGTFQPVRAENIAEHRMHSEWYELSGALVDQIAATRARGGRVIAVGTTSLRALEAAARDAEAAGRPLAATRAETDIFITPGYRFRVVDRLVTNFHLPKSTLMMLVSAFAGLETIRAAYRHAIDARYRFFSYGDAMLLTRRDVPEENRRDA

SEQ ID NO: 64505 - protein, 350 aa, Burkholderia sp.
  REGION 1..350: note = tr|A0A063BCX8|A0A063BCX8_9BURK S-adenosylmethionine:tRNA ribosyltransferase-isomerase; OS = Burkholderia sp. lig30 OX=1192124 GN=queA PE=3 SV=1
MFTLSDFDFNLPPELIAQTALPDRTASRLLEVDNSTEPPRLADRGFAELPSCISPGDLLVFNDTKVLKARFFGHKASGGKIEVLIERVTGTHTALAQIRASKSPGAGTALTLADAFDVTVGERVEPFFTLHFPEPCLTLIERYGRLPLPPYIEHDPDATDETRYQTVYASNPGAVAAPTAGLHFDDALLARLDAMGVERATLTLHVGAGTFQPVRVENIAEHKMHSEWYELPQSLVDRIAATRARGGKVIAVGTTSMRALEAAARDAEAAGRPLAATQAETDIFITPGYRFRVVDRLVTNFHLPKSTLLMLVSAFAGIETVRAAYRHAIEQRYRFFSYGDAMLLTRRDGA

SEQ ID NO: 64506 - protein, 355 aa, Burkholderia sp.
  REGION 1..355: note = tr|A0A3N8GU55|A0A3N8GU55_9BURK S-adenosylmethionine:tRNA ribosyltransferase-isomerase; OS = Burkholderia sp. Bp8998 OX=2184557 GN=queA PE=3 SV=1
MFTLSDFDFNLPPELIAQTALPERTASRLLEVDGTVEPARLVDRRFAELPSCIAPGDLLVFNDTKVLKARFFGQKASGGKIEVLIERVTGTHTALAQIRASKSPGAGTTLRLADAFDVTVGERVEPFFTLHFPAPCLTLIEQHGRLPLPPYIEHDADANDETRYQTVYASNPGAVAAPTAGLHFDQPLLEKLDAMGVERATLTLHVGAGTFQPVRVENIAEHRMHSEWYDLPQSLVDKIAATHARGGNVIAVGTTSMRALEAAARSAAEAGRPLAATQAETDIFITPGYRFRIVDRLVTNFHLPKSTLLMLVSAFAGVETIRAAYRHAIDERYRFFSYGDAMLLTRRDTPEAPRA

SEQ ID NO: 64507 - protein, 355 aa, Burkholderia stabilis
  REGION 1..355: note = tr|A0A1Y1BNG2|A0A1Y1BNG2_9BURK S-adenosylmethionine:tRNA ribosyltransferase-isomerase; OS = Burkholderia stabilis OX=95485 GN=queA PE=3 SV=1
MFTLSDFDFNLPPELIAQTALPDRTASRLLEVDRTVEPARLVDRRFAELPSCIAPGDLLVFNDTKVLKARFFGQKASGGKIEVLIERVTGTHTALAQIRASKSPGAGTTLRLADAFDVTVGERVEPFFTLHFPEPCLVLIEQYGRLPLPPYIEHDPDATDETRYQTVYASNPGAVAAPTAGLHFDRPMLDKLDAMGVERATLTLHVGAGTFQPVRVDNIAEHKMHSEWYELPQSLVDKIAATRARGGNVIAVGTTSMRALEAAARAADEAGRPLAATQAETDIFITPGYRFRVVDRLVTNFHLPKSTLLMLVSAFAGVETIRAAYRHAIDERYRFFSYGDAMLLTRRDTPETPRA

SEQ ID NO: 64508 - protein, 355 aa, Burkholderia stabilis
  REGION 1..355: note = tr|A0A4Q2ASW5|A0A4Q2ASW5_9BURK S-adenosylmethionine:tRNA ribosyltransferase-isomerase; OS = Burkholderia stabilis OX=95485 GN=queA PE=3 SV=1
MFTLSDFDFNLPPELIAQTALPDRTASRLLEVDRTVEPARLVDRKFAELPSCIAPGDLLVFNDTKVLKARFFGQKASGGKIEVLIERVTGTHTALAQIRASKSPGAGTKLRLADAFDVTVGERVEPFFTLIFPEPCLDLIEQFGRLPLPPYIEHDPDSTDETRYQTVYASNPGAVAAPTAGLHFDQPMLDRLDAMGVERATLTLHVGAGTFQPVRVDNIAEHKMHSEWYDLPQSLVDRIATTRARGGNVIAVGTTSMRALEAAARTADEAGRPLAATQAETDIFITPGYRFRVVDRLVTNFHLPKSTLLMLVSAFAGVETIRAAYRHAIDQRYRFFSYGDAMLLTRRDTPEAPRA

SEQ ID NO: 64509 - protein, 355 aa, unidentified
  source 1..355: note = Burkholderia stagnalis
  REGION 1..355: note = tr|A0A3N7UCR4|A0A3N7UCR4_9BURK S-adenosylmethionine:tRNA ribosyltransferase-isomerase; OS = Burkholderia stagnalis OX=1503054 GN=queA PE=3 SV=1
MFTLSDFDFNLPPELIAQTALPDRTASHLLEVDNTAAPARLVDRRFAELPSCISAGDLLVFNDTKVLKARFFGHKASGGRIEVLIERVTGTHTALAQIRASKSPGPGTTLTLADAFDVTVGERVEPFFTLHFPAPCLNLIEQYGRLPLPPYIEHDPDATDETRYQTVYARNPGAVAAPTAGLHFDAPLLAQLDAMGVERATLTLHVGAGTFQPVRVENIAEHKMHSEWYELPQSLVDKIAATRARGGNVIAVGTTSMRALEAAARDAAAAGRPLAATQAETDIFITPGYAFRVVDRLVTNFHLPKSTLLMLVSAFAGVDTIRAAYRHAIEQRYRFFSYGDAMLLTRRDAPQAPGA

SEQ ID NO: 64510 - protein, 355 aa, unidentified
  source 1..355: note = Burkholderia stagnalis
  REGION 1..355: note = tr|A0A119W057|A0A119W057_9BURK S-adenosylmethionine:tRNA ribosyltransferase-isomerase; OS = Burkholderia stagnalis OX=1503054 GN=queA PE=3 SV=1
MFTLSDFDFNLPPELIAQTALPDRTASRLLEVDNTAAPARLVDRRFAELPSCISAGDLLVFNDTKVLKARFFGHKASGGRIEVLIERVTGTHTALAQIRASKSPGPGTTLTLADAFDVTVGERVEPFFTLHFPAPCLNLIEQYGRLPLPPYIEHDPDATDETRYQTVYARNPGAVAAPTAGLHFDAPLLAQLDAMGVERATLTLHVGAGTFQPVRVENIAEHKMHSEWYELPQSLVDKIAATRARGGNVIAVGTTSMRALEAAARDAAVAGRPLAATQAETDIFITPGYAFRVVDRLVTNFHLPKSTLLMLVSAFAGVDTIRAAYRHAIEQRYRFFSYGDAMLLTRRDAPQAPGA

SEQ ID NO: 64511 - protein, 355 aa, unidentified
  source 1..355: note = Burkholderia territorii
  REGION 1..355: note = tr|A0A102G1C4|A0A102G1C4_9BURK S-adenosylmethionine:tRNA ribosyltransferase-isomerase; OS = Burkholderia territorii OX=1503055 GN=queA PE=3 SV=1
MFTLSDFDFNLPPELIAQTALPDRTASRLLEVDGTVEPARLVDRRFTELPSCIAPGDLLVFNDTKVLKARFFGQKASGGKIEVLIERVTGTHTALAQIRASKSPGAGTTLRLADAFDVTVGERVEPFFTLHFPAPCLDLIEQHGRLPLPPYIEHDADANDETRYQTVYAANPGAVAAPTAGLHFDQPLLEKLDAMGVERATLTLHVGAGTFQPVRVENIAEHKMHSEWYDLPQSLVDKIAATRARGGKVIAVGTTSMRALEAAARSAEEAGQPLAAMQAETDIFITPGYRFRVVDRLVTNFHLPKSTLLMLVSAFAGVETIRAAYRHAIDERYRFFSYGDAMLLTRRDTPEAPRA

SEQ ID NO: 64512 - protein, 355 aa, unidentified
  source 1..355: note = Burkholderia territorii
  REGION 1..355: note = tr|A0A125A8M5|A0A125A8M5_9BURK S-adenosylmethionine:tRNA ribosyltransferase-isomerase; OS = Burkholderia territorii OX=1503055 GN=queA PE=3 SV=1
MFTLSDFDFNLPPELIAQTALPDRTASRLLEVDGTVEPARLVDRRFTELPSCIAAGDLLVFNDTKVLKARFFGQKASGGKIEVLIERVTGTHTALAQIRASKSPGAGTTLRLADAFDVTVGERVEPFFTLHFPAPCLDLIEQHGRLPLPPYIEHDADANDETRYQTVYAANPGAVAAPTAGLHFDRPLLEKLDAMGVERATLTLHVGAGTFQPVRVENIAEHKMHSEWYDLPQSLVDKIAATRARGGKVIAVGTTSMRALEAAARSAEEAGRPLAAMQAETDIFITPGYRFRVVDRLVTNFHLPKSTLLMLVSAFAGVETIRAAYRHAIDERYRFFSYGDAMLLTRRDTPEAPRA

SEQ ID NO: 64513 - protein, 374 aa, Burkholderia thailandensis
  REGION 1..374: note = tr|Q2SZ23|Q2SZ23_BURTA S-adenosylmethionine:tRNA ribosyltransferase-isomerase OS=Burkholderia thailandensis (strain ATCC 700388 / DSM 13276 / CIP 106301 / E264) OX=2 71848 GN=queA PE=3 SV=1
MPRRALSVRPAAPAPFRMLTLSDFDFDLPPELIAQTALPERSASRLLEVDNASAPPRLVDRRFAELPACVAPGDLLVFNDTKVLKARFFGRKASGGKIEVLIERVTGQRTALAQIRASKSPAPGTTLTLADAFDVTVGERVEPFFTLHFPDDCLVLIERHGRLPLPPYIEHTPDATDEARYQTVFAANPGAVAAPTAGLHFDDAVLAALDARGVERATLTLHVGAGTFQPVRVENIAEHRMHRESYELTDALVEKIAATRARGGRVIAVGTTSMRALEAAARDADAAGRPLAATRAETDIFITPGYRFRVVDRLVTNFHLPKSTLLMLVSAFAGVDTIRAAYRHAIDARYRFFSYGDAMLLTRRDAAEETHGGG

SEQ ID NO: 64514 - protein, 357 aa, Burkholderia thailandensis
  REGION 1..357: note = tr|A0A2Z4T7D1|A0A2Z4T7D1_BURTH S-adenosylmethionine:tRNA ribosyltransferase-isomerase; OS = Burkholderia thailandensis OX=57975 GN=queA PE=3 SV=1
MLTLSDFDFDLPPELIAQTALPERSASRLLEVDNASAPPRLVDRRFAELPACVAPGDLLVFNDTKVLKARFFGRKASGGKIEVLIERVTGQRTALAQIRASKSPAPGTTLTLADAFDVTVGERVEPFFTLHFPDDCLVLIERHGRLPLPPYIEHTPDATDEARYQTVFAANPGAVAAPTAGLHFDDAVLAALDARGVERATLTLHVGAGTFQPVRVENIAEHRMHRESYELTDALVEKIAATRARGGRVIAVGTTSMRALEAAARDADAAGRPLAATRAETDIFITPGYRFRVVDRLVTNFHLPKSTLLMLVSAFAGVDTIRAAYRHAIDARYRFFSYGDAMLLTRRDAAEETHGGG

SEQ ID NO: 64515 - protein, 354 aa, Burkholderia ubonensis
  REGION 1..354: note = tr|A0A1R1J3L5|A0A1R1J3L5_9BURK S-adenosylmethionine:tRNA ribosyltransferase-isomerase; OS = Burkholderia ubonensis OX=101571 GN=queA PE=3 SV=1
MLTLSDFDFHLPPELIAQIALPDRTASRLLEVDNTIAPARLVDRRFAELPSCIAAGDLLVFNDTKVLKARFFGHKASGGKVEVLIERVTGTHTALAQIRASKSPGPGTTLTLADAFDVTVGERVEPFFTLHFPAPCLTLIEQYGRLPLPPYIEHDPDATDETRYQTVYASNPGAVAAPTAGLHFDEPLLAKLDAMGVERATLTLHVGAGTFQPVRVDNLAEHKMHSEWYELPQSLVDKIAATRARGGNVIAVGTTSMRALEAAARDADAAGRPLAATQTETDIFITPGYAFRVVDRLVTNFHLPKSTLLMLVSAFAGVETIRAAYRHAIDERYRFFSYGDAMLLTRRSAPEAGA

SEQ ID NO: 64516 - protein, 354 aa, Burkholderia ubonensis
  REGION 1..354: note = tr|A0A118ZSX2|A0A118ZSX2_9BURK S-adenosylmethionine:tRNA ribosyltransferase-isomerase; OS = Burkholderia ubonensis OX=101571 GN=queA PE=3 SV=1
MLTLSDFDFHLPPELIAQTALPDRTASRLLEVDNTVAPARLVDRRFAELPSCIAAGDLLVFNDTKVLKARFFGHKASGGKVEVLIERVTGTHTALAQIRASKSPGPGTTLTLADAFDVTLGERVEPFFTLHFPAPCLTLIEQYGRLPLPPYIEHDPDATDETRYQTVYASNPGAVAAPTAGLHFDEPLLAKLDAMGVERATLTLHVGAGTFQPVRVENLAEHKMHSEWYELPQSLVDRIAATRARGGNVIAVGTTSMRALEAAARDADAAGRPLAATQAETDIFITPGYAFRVVDRLVTNFHLPKSTLLMLVSAFAGVETIRAAYRHAIDERYRFFSYGDAMLLTRRSAPEAGA

SEQ ID NO: 64517 - protein, 353 aa, Burkholderia vietnamiensis
  REGION 1..353: note = tr|A0A2Z6TL49|A0A2Z6TL49_BURVI S-adenosylmethionine:tRNA ribosyltransferase-isomerase; OS = Burkholderia vietnamiensis OX=60552 GN=queA PE=3 SV=1
MFTLSDFDFNLPPELIAQTALPERTASRLLEVDGTVAPARLVDRRFAELPSCIARGDLLVFNDAKVLKARFFGPKASGGKIEVLVERVTGTHTALAQIRASKSPGAGTTLRLADAFDVTVGERVEPFFTLHFPQPCLTLIEQYGRLPLPPYIEHAADATDGTRHQTVYASNPGAVAAPTAGLHFDQPLLEKLDEMGVGRATLTLHVGAGTFQPVRVENIAEHRMHSEWYELPQSLVDKIAATRARGGNGIAVGTTSRRALEAAARSAEAAGRPLAATQDETDIFITPGYRFRVVDRLVTNFHLPKSTLLMLVSAFAGVETIRAAYRHAIDERYRFFSYGDAMLLTRRDTPEHA

SEQ ID NO: 64518 - protein, 353 aa, Burkholderia vietnamiensis
  REGION 1..353: note = sp|A4JBP3|QUEA_BURVG S-adenosylmethionine:tRNA ribosyltransferase-isomerase OS=Burkholderia vietnamiensis (strain G4 / LMG 22486) OX=269482 GN=queA PE=3 SV=1
MFTLSDFDFNLPPELIAQTALPERTASRLLEVDGTVAPARLVDRRFAELPSCIARGDLLVFNDTKVLKARFFGQKASGGKIEVLVERVTGTHTALAQIRASKSPGAGTTLRLADAFDVTVGERVEPFFTLHFPQPCLTLIEQYGRLPLPPYIEHDADATDETRYQTVYASNPGAVAAPTAGLHFDQPLLEKLDAMGVERATLTLHVGAGTFQPVRVENIAEHRMHSEWYDLPQSLVDKIAATRARGGNVIAVGTTSMRALEAAARSAEAAGRPLAATQDETDIFITPGYRFRVVDRLVTNFHLPKSTLLMLVSAFAGVETIRAAYRHAIDERYRFFSYGDAMLLTRRDTPEHA

SEQ ID NO: 64519 - protein, 353 aa, unidentified
  source 1..353: note = Burkholderiaceae bacterium
  REGION 1..353: note = tr|A0A0F0E5T8|A0A0F0E5T8_9BURK S-adenosylmethionine:tRNA ribosyltransferase-isomerase; OS = Burkholderiaceae bacterium 26 OX=1619951 GN=queA PE=3; SV = 1
MLTLSDFDFDLPPELIAQTALPDRTASRLLAVCRAEDAVHFEDRQFADLVDYLRPGDLLVFNDTRVIKARFFGHKASGGKVEVLVERLLDEHTVLAQIRSSKSPVEGTTLRLADAFDVTVGPRAEPFFTLRFPQPALDLIEQYGRLPLPPYIEHDPDSFDETRYQTVYARNPGAVAAPTAGLHFDDALFAKLDAMGIQRGFLTLHVGAGTFQPVRVENIAEHRMHSEWYQITPELAEAIRGTRAAGGRVIAVGTTSMRALESAAQPDGTLNACSGETDIFITPGYRFRAVDLLVTNFHLPKSTLLMLVSAFAGMGAIRGAYQHAIAQRYRFFSYGDAMLLMRAPSEPGEPQSL

SEQ ID NO: 64520 - protein, 362 aa, unidentified
  source 1..362: note = Burkholderiaceae bacterium
  REGION 1..362: note = tr|A0A522L5N4|A0A522L5N4_9BURK S-adenosylmethionine:tRNA ribosyltransferase-isomerase; OS = Burkholderiaceae bacterium OX=2030806 GN=queA PE=3 SV=1
MHSFPSSAARPFTLSDFDFALPPELIAQHPTPERSASRLLDGRGAQPVDRIFHDLPGLLDPRDLMVFNDTKVIKARLFGEKPTGGKVELLVERVLSGNQVVAHMRVSKRPEAGATLALAGGGGFRATLLGRWPDEQGDLFRFVLSNDAGDDPYALMQQHGQVPLPPYITHAASSEDEQRYQTVFAKNPGAVAAPTAALHFDEALLAALDAHGVQRASVTLHVGAGTFQPVKTEDLAQHQMHSEWYDVPEATQRAIQACRARGGRLIAVGTTTVRTLEAMAASGHTCGDTRIFITPGFEFKRVDGLITNFHLPKSTLMMLVSAFAGYEHIMALYRHAIESRYRFFSYGDAMLLSRQAANHAAI

SEQ ID NO: 64521 - protein, 388 aa, unidentified
  source 1..388: note = Burkholderiales bacterium
  REGION 1..388: note = tr|A0A1Q3R436|A0A1Q3R436_9BURK S-adenosylmethionine:tRNA ribosyltransferase-isomerase; OS = Burkholderiales bacterium 68-10 OX=1895730 GN=queA PE=3; SV = 1
MRGEAQHRAASGATGEGHFTTSDFDFALPPELIAQHPAPERSASRLLDGSGAAPMDRVFRDLPALLQPGDLLVFNDTQVVKARLYGHKPPPPAPRSRRSPQGAQLGWGRPGADVAPSGGKLELLIERVLPDGSVAAHMKVSKKPPPGTVLRMADGAFTAELLGRWPDAGGPLFHLRFSGDAYALMAAHGHVPLPPYIGHADSHEDAARYQTVFARHPGAVAAPTAALHFDEPLLRAIAARGVQRAFVTLHVGAGTFQPVKTEDLAAHVMHRERYHVPPETAQAIADCRARGGRVVAVGTTSVRTLESWAASGQASGDTDIFITPGFRFRVVDALITNFHLPRSTLMMLVSALAGHTHVMALYAHAVARRYRFFSYGDAMWLVRTAQEN

SEQ ID NO: 64522 - protein, 353 aa, unidentified
  source 1..353: note = Burkholderiales bacterium
  REGION 1..353: note = tr|A0A1F4NJQ1|A0A1F4NJQ1_9BURK S-adenosylmethionine:tRNA ribosyltransferase-isomerase; OS = Burkholderiales bacterium RIFOXYC12_FULL_65_23; OX = 1797572 GN=queA PE=3 SV=1
MNPSSSGATRAHTVSDFDFELPPELVAQHPAAERSGSRLLDNTGRSPVDRIFKELPGLLQAGDLLIFNDTKVVKARLYGEKASGGKVELLIERVLDGHEVVAHMKVSKKPLPGALLHMVGGFSAELLGRWPEDNGPLFRFRLSAEPYGLMEQHGHVPLPPYIEHGDSAEDERRYQTVFARAPGAVAAPTASLHFDQALLDELEARGIQRASVTLHVGAGTFQPVKVETIADHVMHSERYEVPEATQQAIRECRARGGRVIAIGTTTVRTLESWAQSGHASGETQIFITPGFDFKIVDLLVTNFHLPKSTLMMLVSAFAGYETIMALYARAVREGYRFFSYGDAMLLARKSTHA

SEQ ID NO: 64523 - protein, 356 aa, Buttiauxella agrestis
  REGION 1..356: note = tr|A0A381CB84|A0A381CB84_9ENTR S-adenosylmethionine:tRNA ribosyltransferase-isomerase; OS = Buttiauxella agrestis OX=82977 GN=queA PE=3 SV=1
MRVADFSFELPESLIAHYPQAQRSGCRLLSLEGPTGNLTHGTFTDLLDKLNPGDLLVFNNTRVIPARLFGRKASGGKIEVLVERMLDDKRILAHIRASKAPKPGAELLLGDDESVHATMVARHDALFEVQFEDERSVLDILNSIGHMPLPPYIDRPDEESDRELYQTVYSQKPGAVAAPTAGLHFDEPLLEALRNKGIEQAFVTLHVGAGTFQPVRVDSIEDHIMHSEYAEVPQDVVDAVLACKARGNRVIAVGTTSVRSLESAAQAAKNDLIEPFFGDTQIFIYPGYQYKVIDALVTNFHLPESTLIMLVSAFAGYKNTMNAYKEAVSSEYRFFSYGDAMFITYNPQAINERPGA

SEQ ID NO: 64524 - protein, 356 aa, Buttiauxella agrestis; identical to SEQ ID NO: 64523
  REGION 1..356: note = tr|A0A085GI01|A0A085GI01_9ENTR S-adenosylmethionine:tRNA ribosyltransferase-isomerase; OS = Buttiauxella agrestis ATCC 33320 OX=1006004 GN=queA; PE = 3 SV=1

SEQ ID NO: 64525 - protein, 356 aa, Buttiauxella brennerae
  REGION 1..356: note = tr|A0A1B7IV20|A0A1B7IV20_9ENTR S-adenosylmethionine:tRNA ribosyltransferase-isomerase; OS = Buttiauxella brennerae ATCC 51605 OX=1354251 GN=queA; PE = 3 SV=1
MRVADFTFELPESLIAHYPQAQRSGCRLLSLDGPTGNLTHGTFTDLLDKLNPGDLLVFNNTRVIPARLFGRKASGGKIEVLVERMLDDKRILAHIRASKAPKPGAQLLLGDDESVHATMVARHDALFEVQFEDERSVLDILNSIGHMPLPPYIDRPDEDADRELYQTVYSQKPGAVAAPTAGLHFDEPLLEALRNKGIGQAFVTLHVGAGTFQPVRVDSIEDHIMHSEYAEVPQDVVDAVLACKARGNRVIAVGTTSVRSLESAAQASKNGLIEPFFGDTQIFIYPGYQYKVIDALVTNFHLPESTLIMLVSAFAGYKNTMNAYKEAVSSEYRFFSYGDAMYITYNPQAINERPGA

SEQ ID NO: 64526 - protein, 356 aa, Buttiauxella gaviniae
  REGION 1..356: note = tr|A0A1B7HUB3|A0A1B7HUB3_9ENTR S-adenosylmethionine:tRNA ribosyltransferase-isomerase; OS = Buttiauxella gaviniae ATCC 51604 OX=1354253 GN=queA; PE = 3 SV=1
MRVADFSFELPDSLIAHYPQAQRSGCRLLSLEGPTGNLTHGTFTDLLDKLNPGDLLVFNNTRVIPARLFGRKASGGKIEVLVERMLDDKRILAHIRASKAPKPGAELLLGDDESVHATMVARHDALFEVQFEDDRSVLDILNSIGHMPLPPYIDRPDEESDRELYQTVYSQKPGAVAAPTAGLHFDEPLLEALRSKGIEQAFVTLHVGAGTFQPVRVDSIEDHIMHSEYAEVPQDVVDAVLACKARGNRVIAVGTTSVRSLESAAQAAKNDLIEPFFGDTQIFIYPGYQYKVIDALVTNFHLPESTLIMLVSAFAGYKNTMNAYKEAVSSEYRFFSYGDAMFITYNPQAIDERPGA

SEQ ID NO: 64527 - protein, 356 aa, Buttiauxella izardii
  REGION 1..356: note = tr|A0A3A5JKU2|A0A3A5JKU2_9ENTR S-adenosylmethionine:tRNA ribosyltransferase-isomerase; OS = Buttiauxella izardii OX=82991 GN=queA PE=3 SV=1
MRVADFSFELPDSLIAHYPQAQRSSCRLLSLDGPTGDLAHGTFTDLLDKLNPGDLLVFNNTRVIPARLFGRKASGGKIEVLVERMLDDKRILAHIRASKAPKPGAELLLGDDESVHATMVARHDALFEVQFEDERSVLDILNSIGHMPLPPYIDRPDEDSDRELYQTVYSQKPGAVAAPTAGLHFDEPLLEALRNKGIEQAFVTLHVGAGTFQPVRVDSIEDHIMHSEYAEVPQDVVDAVLACKARGNRVIAVGTTSVRSLESAAQAAKNELIEPFFGDTQIFIYPGYQYKVIDALVTNFHLPESTLIMLVSAFAGYKNTMNAYKQAVSSEYRFFSYGDAMYITYNPQAINERPGA

SEQ ID NO: 64528 - protein, 356 aa, Buttiauxella noackiae
  REGION 1..356: note = tr|A0A1B7I1J6|A0A1B7I1J6_9ENTR S-adenosylmethionine:tRNA ribosyltransferase-isomerase; OS = Buttiauxella noackiae ATCC 51607 OX=1354255 GN=queA; PE = 3 SV=1
MRVADFSFELPESLIAHYPQAQRSGCRLLSLEGPTGNLTHGTFTDLLDKLNPGDLLVFNNTRVIPARLFGRKASGGKIEVLVERMLDDKRILAHIRASKAPKPGAELLLGDDESVHATMVARHDALFEVQFEDERSVLDILNSIGHMPLPPYIDRPDEESDRELYQTVYSQKPGAVAAPTAGLHFDEPLLEALRNKGIEQAFVTLHVGAGTFQPVRVDSIEDHIMHSEYAEVPQDVVDAVLACKARGNRVIAVGTTSVRSLESAAQAAKNDLIEPFFGDTQIFIYPGYQYKVIDALVTNFHLPESTLIMLVSAFAGYKNTMNAYKEAVSSEYRFFSYGDAMFITYNPQAIDERPGA

SEQ ID NO: 64529 - protein, 356 aa, Buttiauxella sp.
  REGION 1..356: note = tr|A0A5C5D8J4|A0A5C5D8J4_9ENTR S-adenosylmethionine:tRNA ribosyltransferase-isomerase; OS = Buttiauxella sp. B2 OX=2587812 GN=queA PE=3 SV=1
MRVADFSFELPDSLIAHYPQASRSSCRLLSLDGPTGKLAHGTFTDLLDKLNPGDLLVFNNTRVIPARLFGRKASGGKIEVLVERMLDDKRILAHIRASKAPKPGAELLLGDDESVHATMVARHDALFEVQFEDERSVLDILNSIGHMPLPPYIDRPDEESDRELYQTVYSQKPGAVAAPTAGLHFDEPLLEALRNKGIEHAFVTLHVGAGTFQPVRVDSIEDHIMHSEYAEVPQEVVDAVLACKARGNRVIAVGTTSVRSLESAAQAAKNDLIEPFFGDTQIFIYPGYQYKVIDALVTNFHLPESTLIMLVSAFAGYKNTMNAYKEAVSSEYRFFSYGDAMYITYNPQAINERPGA

SEQ ID NO: 64530 - protein, 356 aa, Buttiauxella sp.
  REGION 1..356: note = tr|A0A4P5QF56|A0A4P5QF56_9ENTR S-adenosylmethionine:tRNA ribosyltransferase-isomerase; OS = Buttiauxella sp. A111 OX=2563088 GN=queA PE=3 SV=1
MRVADFSFELPESLIAHYPQAQRSGCRLLSLEGPTGNLTHGTFTDLLDKLNPGDLLVFNNTRVIPARLFGRKASGGKIEVLVERMLDDKRILAHIRASKAPKPGAELLLGDDESVHATMVARHDALFEVQFEDERSVLDILNSIGHMPLPPYIDRPDEESDRELYQTVYSQKPGAVAAPTAGLHFDEPLLEALRKKGIEQAFVTLHVGAGTFQPVRVDSIEDHIMHSEYAEVPQDVVDAVLACKARGNRVIAVGTTSVRSLESAAQAAQNDLIEPFFGDTQIFIYPGYQYKVIDALVTNFHLPESTLIMLVSAFAGYKNTMNAYKEAVNSEYRFFSYGDAMYITYNPQAINERPGA

SEQ ID NO: 64531 - protein, 356 aa, Buttiauxella warmboldiae
  REGION 1..356: note = tr|A0A3N5DIH1|A0A3N5DIH1_9ENTR S-adenosylmethionine:tRNA ribosyltransferase-isomerase; OS = Buttiauxella warmboldiae OX=82993 GN=queA PE=3 SV=1
MRVADFSFELPESLIAHYPQAQRSACRLLSLNGPTGELTHGTFTDLLDKLNPGDLLVFNNTRVIPARLFGRKASGGKIEVLVERMLDDKRILAHIRASKAPKPGAELLLGDDESVHATMVARHDALFEVQFEDERSVLDILNSIGHMPLPPYIDRPDEDSDRELYQTVYSQKPGAVAAPTAGLHFDEPLLEALRNKGIEQAFVTLHVGAGTFQPVRVDSIEDHIMHSEYAEVPQDVVDAVLACKARGNRVIAVGTTSVRSLESAAQAAKNDLIEPFFGDTQIFIYPGYQYKVIDALVTNFHLPESTLIMLVSAFAGYKNTINAYKEAVSSEYRFFSYGDAMYITYNPQAINERPGA

SEQ ID NO: 64532 - protein, 341 aa, unidentified
  source 1..341: note = Unknown
  REGION 1..341: note = tr|D7GU47|D7GU47_9FIRM S-adenosylmethionine:tRNA ribosyltransferase-isomerase OS=butyrate-producing bacterium SS3/4 OX=245014 GN=queA PE=3 SV=1
MNVTDFNFELPPELIAQDPLEDRAASRLLVLDKKTGEIEHRHFRDILKYLKKGDCLVINDTKVIPARLMGHKIGTDAGIEVLLLKRKSDNVWETLVKPGKKMKVGAEVSFGDGLLKGKVIDVVDEGNRLIQFEYDGIFEEILDKLGQMPLPPYITHQLKDKNRYQTVYAKNEGSAAAPTAGLHFTKELLQEIEEMGVKIAHVTLHVGLGTFRPVKVDTIEEHHMHSEFYMVEESEAKKINDTKANGGRVICVGTTSCRTLESATGDDGILKAGSGWTEIFIYPGYKFKILDCLITNFHLPESTLVMLVSALAGREHILNAYQEAIKERYRFFSFGDAMFIH

SEQ ID NO: 64533 - protein, 344 aa, unidentified
  source 1..344: note = Butyribacterium methylotrophicum
  REGION 1..344: note = tr|A0A1E7S194|A0A1E7S194_BUTME S-adenosylmethionine:tRNA ribosyltransferase-isomerase; OS = Butyribacterium methylotrophicum OX=1487 GN=queA PE=3; SV = 1
METLTTKDFYYDLPEELIAQTPEKKRDASRLMVLNRMEGSIQDRYFHDIIDYLNEDDLLVMNNTKVLPARIFGKKEETGGKVELLLLKRLDDKTWETMVKPGKKAMPGTRLVFGDKLKGEIKDKIESGLRIIEFEYDGIFEEIIGELGTMPLPPYIHEVLEDQDRYQTVYAKYTGSAAAPTAGLHFTEELLDALRRKGIRTAEVTLHVGIGTFRPVKCDNILDHHMHEETYQVPKETEKLIEETRKKGGRVIAVGTTSVRTLESAAARFGGKVQACEGSTDIFIYPGYKWQVIDALITNFHLPESTLLMLVSSFYNREAVLKAYQHAIDARYRFFSFGDAMFIY

SEQ ID NO: 64534 - protein, 353 aa, unidentified
  source 1..353: note = Butyricicoccus porcorum
  REGION 1..353: note = tr|A0A252F2Z1|A0A252F2Z1_9CLOT S-adenosylmethionine:tRNA ribosyltransferase-isomerase; OS = Butyricicoccus porcorum OX=1945634 GN=queA PE=3 SV=1
MKTSDFYYDLPERLIAQTPLDHRDESRLLALCKDTGEIQHRHFYDLPDFLRPGDTLVLNNSRVIPARLLGVREDTGYPIELVLLTDKGDGVWECLTRPGKKCREGAKLSFGDGKLTATVEEILPDGGNRLIRFHYEGIFLEILEELGMMPLPPYIKEKLDDPERYQTVYSKTPGSAAAPTAGLHFTPELLEKIRAMGVNIACVTLHVGLGTFRPVKVDDVQDHVMHSEFYMMDEENAAIINNTRKNGGRVFAVGTTATRTLETIAAEDGSVRACSGWTNIFIYPGYRFKAIDCLVTNFHLPESTLMMLISAFAGRDMIMNAYQIAVEQEYRFFSFGDSMLIYTENAHREDTNV

SEQ ID NO: 64535 - protein, 342 aa, Butyricicoccus pullicaecorum
  REGION 1..342: note = tr|A0A1Y4LI87|A0A1Y4LI87_9CLOT S-adenosylmethionine:tRNA ribosyltransferase-isomerase; OS = Butyricicoccus pullicaecorum OX=501571 GN=queA PE=3 SV=1
MKKSDFYFDLPERLIAQHPMEQRDASRMLVMDRKTGELSHRHFHDLIEYLKPGDCLVMNNSRVIPARLMGQAEGRTTPIEVVLLTDHGDGVWECLTRPGKKTREGVKLSFGDGLLTGVVESVNPKDGNRMIRFQYEGVFLELLEQLGTMPLPPYIKEKLDDPERYQTVYSKTPGSAAAPTAGLHFTPELLDEIRAKGVKTAFVTLHVGLGTFRPVKEEEITDHIMHSEFYTMDEETARIINETHAQGHDVFAVGTTACRTLETIAAEDGTVRAQSGWTDIFIYPGYRFKCIDHLVTNFHLPESTLMMLISAFAGRERVLDMYKTAVEQEYRFFSFGDSTLFL

SEQ ID NO: 64536 - protein, 342 aa, Butyricicoccus pullicaecorum; identical to SEQ ID NO: 64535
  REGION 1..342: note = tr|R8W480|R8W480_9CLOT S-adenosylmethionine:tRNA ribosyltransferase-isomerase OS=Butyricicoccus pullicaecorum 1.2 OX=1203606 GN=queA PE=3 SV=1

SEQ ID NO: 64537 - protein, 341 aa, Butyricicoccus sp.
  REGION 1..341: note = tr|A0A417HX16|A0A417HX16_9CLOT S-adenosylmethionine:tRNA ribosyltransferase-isomerase; OS = Butyricicoccus sp. AM28-25 OX=2292294 GN=queA PE=3 SV=1
MKKSDFYFDLPERLIAQHPLEQRDASRLMVLDRRDGSVTHRHFRDLLEYVQPGDCMVFNNSRVIPARLMGHAVGHVTPIEVLLLTDKGDGLWECLTRPGKKTRTGVELTFGDGLLTATVEAVQPDGNRLIRFRYEGIFLEILDKLGTMPLPPYIKEKLDDPERYQTVYSKTPGSAAAPTAGLHFTTELLDALKAKGVKLAFVTLHVGLGTFRPVKEDEITDHIMHSEYYIMDEETAGIINDTRAAGGKIWAVGTTASRTLETIAADDGTVRAQSGWTDIFIYPGYKFKAVDHLVTNFHLPESTLMMLISAFATREMVMNAYQEAIKEEYRFFSFGDSMLLY

SEQ ID NO: 64538 - protein, 341 aa, Butyricicoccus sp.; identical to SEQ ID NO: 62979
  REGION 1..341: note = tr|A0A396N1L9|A0A396N1L9_9CLOT S-adenosylmethionine:tRNA ribosyltransferase-isomerase; OS = Butyricicoccus sp. AF15-40 OX=2292197 GN=queA PE=3 SV=1

SEQ ID NO: 64539 - protein, 419 aa, unidentified
  source 1..419: note = Butyricimonas faecalis
  REGION 1..419: note = tr|A0A3S9VZL3|A0A3S9VZL3_9BACT S-adenosylmethionine:tRNA ribosyltransferase-isomerase; OS = Butyricimonas faecalis OX=2093856 GN=D8S85_08610 PE=3; SV = 1
MTKKMAIENSRDMVEKLKEIRIEDYTYDLPDERIAKFPLENREASKLLIYEEGRIEERHFYEVPEILDAGKMLVFNNTKVIYARMLFQKVTGAVIEVFCLEPYRPSDYVQSFAAYGRCEWKCMVGNLKKWKEGTIFCHYRFEGKEYQLAATLKCREENDVIVEFTWDTPASFSEVLECCGRIPIPPYLNRESEEDDKIRYQTVYSKNEGSVAAPTAGLHFSIPVLKALREKGITIEELTLHVGAGTFRPVKSETIGGHDMHTEHISVRREVVEHLRAHPENIVAVGTTSVRTLESLYWMGVKRILGDENFNSLGQWEAYDLPSGYSLKESMTALLGWFDERDAELLKAKTTIIIVPGYSYRVITAMFTNFHQPQSTLLLLVAAAIGDDWHKVYDYALAHDFRFLSYGDSSLLKVRKDKK

SEQ ID NO: 64540 - protein, 349 aa, unidentified
  source 1..349: note = Butyricimonas faecalis
  REGION 1..349: note = tr|A0A3S9VX12|A0A3S9VX12_9BACT S-adenosylmethionine:tRNA ribosyltransferase-isomerase; OS = Butyricimonas faecalis OX=2093856 GN=queA PE=3 SV=1
MKLSKFKYKLPPELIALHPTPNRDEARLMVLDRKTGKIEHKIFKDVIDYFDEKDVFVFNDSKVFPARLYGNKEKTGAEIEVFLLRELNPELRIWDVLVDPARKIRIGNKLYFGEDDSMVAEVIDNTTSRGRTLRFLFDGEYDEFKKELYALGETPLPRFINRKVEPEDAENYQTIFAKHEGAVAAPTAGMHFSRELMKRMEIKGIDFAYITLHVGLGNFREVDVEDLTKHKMDSEQIFVTPETVKIVNDAKDEKHKICAVGTTVVRTLESCVTTKGRLTEFEGWTNKFIFPPYDFSVPDAFISNFHLPYSTLLMMVAAFGGYEHVMEAYNQAVKEKYRFGTYGDAMLII

SEQ ID NO: 64541 - protein, 419 aa, Butyricimonas sp.
  REGION 1..419: note = tr|A0A3D2DTN0|A0A3D2DTN0_9BACT S-adenosylmethionine:tRNA ribosyltransferase-isomerase; OS = Butyricimonas sp. OX=1969738 GN=DFK15_04165 PE=3 SV=1
MTKKIAIENSRDMVERLKEIRIEDYIYDLPDERIAKFPLENREASKLLIYDEGRIDERHFYEVPEILDAGKMLVFNNTKVIYARILFQKVTGAMIEVFCLEPYRPSDYVQSFAAYGKCEWKCMVGNLKKWKEGTIYCHYQFEGKEYQLAATLKFREENDVIVEFTWDASASFSEVLECCGRIPIPPYLNRESEEKDKIRYQTVYSKNEGSVAAPTAGLHFSIPVLKALREKGITIEELTLHVGAGTFRPVKSETIGGHDMHTEHISVRREVVEHLCTHPENIIAVGTTSVRTLESLYWMGVKRILGDEDFSSLGQWEAYDLPSGYSLKESMTALLGWFDEQDAELLKAKTTIIIVPGYSYRVITAMFTNFHQPQSTLLLLVAAAIGEDWHNVYDYALAHDFRFLSYGDSSLLKVRKDKK

SEQ ID NO: 64542 - protein, 349 aa, Butyricimonas sp.
  REGION 1..349: note = tr|A0A3D2DT98|A0A3D2DT98_9BACT S-adenosylmethionine:tRNA ribosyltransferase-isomerase; OS = Butyricimonas sp. OX=1969738 GN=queA PE=3 SV=1
MKLSKFKYKLPPELIALHPTPNRDEARLMVLDRKAGKIEHKVFKDVIDYFDEKDVFVFNDSKVFPARLYGNKEKTGAEIEVFLLRELNPELRIWDVLVDPARKIRIGNKLYFGEDDSMVAEVIDNTTSRGRTLRFLFDGEYDEFKKELYALGETPLPRFINRKVEPEDAENYQTIFARHEGAVAAPTAGMHFSRELMKRMEIKGIDFAYITLHVGLGNFREVDVEDLTKHKMDSEQIFVTPETVKIVNDAKDEKHKICAVGTTVVRTLESCVTTKGRLTEFEGWTNKFIFPPYDFSVPDAFISNFHLPYSTLLMMVAAFGGYEHVMEAYNQAVKEKYRFGTYGDAMLII

SEQ ID NO: 64543 - protein, 407 aa, Butyricimonas synergistica
  REGION 1..407: note = tr|A0A1U7L9V7|A0A1U7L9V7_9BACT S-adenosylmethionine:tRNA ribosyltransferase-isomerase; OS = Butyricimonas synergistica OX=544644 GN=BHV81_11850; PE = 3 SV=1
MVEKLKEIRIEDYTYDLPDERIAKFPLENREASKLLIYDEGRIDERHFYEVPEILDAGKMLVFNNTKVIYARILFQKVTGAMIEVFCLEPYRPSDYVQSFAAYGKCEWKCMVGNLKKWKEGTIFCHYRFEGKEYQLAATRKLREENDVIVEFTWDAPASFSEVLECCGRIPIPPYLNRESEEDDKIRYQTVYSKNEGSVAAPTAGLHFSVPVLKALREKGITIEELTLHVGAGTFRPVKSETIGGHDMHTEHISVRREVVEHLCTHPENIIAVGTTSVRTLESLYWMGVKRILGDEDFSSLGQWEAYDLPSGYSLKESMTALLGWFDERDVELLKAKTTIIIVPGYSYRVITAMFTNFHQPQSTLLLLVAAAIGEDWHKVYDYALAHDFRFLSYGDSSLLKVRKDKK

SEQ ID NO: 64544 - protein, 349 aa, Butyricimonas synergistica
  REGION 1..349: note = tr|A0A1U7L8C7|A0A1U7L8C7_9BACT S-adenosylmethionine:tRNA ribosyltransferase-isomerase; OS = Butyricimonas synergistica OX=544644 GN=queA PE=3 SV=1
MKLSKFKYKLPPELIALHPTPNRDEARLMVLDRKTGKIEHKVFKDVIDYFDEKDVFVFNDSKVFPARLYGNKEKTGAEIEVFLLRELNPELRIWDVLVDPARKIRIGNKLYFGEDDSMVAEVIDNTTSRGRTLRFLFDGEYDEFKKELYALGETPLPRFINRKVEPEDAENYQTIFARHEGAVAAPTAGMHFSRELMKRMEIKGIDFAYITLHVGLGNFREVDVEDLTKHKMDSEQIFVTPETVKIVNDAKDEKHKICAVGTTVVRTLESCVTTKGRLTEFEGWTNKFIFPPYDFSVPDAFISNFHLPYSTLLMMVAAFGGYEHVMEAYNQAVKEKYRFGTYGDAMLII

SEQ ID NO: 64545 - protein, 419 aa, Butyricimonas virosa
  REGION 1..419: note = tr|A0A412X4D8|A0A412X4D8_9BACT S-adenosylmethionine:tRNA ribosyltransferase-isomerase; OS = Butyricimonas virosa OX=544645 GN=DWW18_05330 PE=3 SV=1
MTKKIAIENSRDMVEKLKEIRIEDYIYDLPDERIAKFPLENREASKLLIYDEGRIDERHFYEVPEILDAGKMLVFNNTKVIYARILFQKVTGAMIEVFCLEPYRPSDYVQSFAAYGKCEWKCMVGNLKKWKEGTIYCHYQFEGKEYQLAATLKFREENDVIVEFTWDASASFSEVLECCGRIPIPPYLNRESEEKDKIRYQTVYSKNEGSVAAPTAGLHFSIPVLKALREKGITIEELTLHVGAGTFRPVKSETIGGHDMHTEHISVRREVVEHLCTHPENIIAVGTTSVRTLESLYWMGVKRILGDEDFSSLGQWEAYDLPSGYSLKESMTALLGWFDEQDAELLKAKTTIIIVPGYSYRVITAMFTNFHQPQSTLLLLVAAAIGEDWHKVYDYALTHDFRFLSYGDSSLLKVRKDKK

SEQ ID NO: 64546 - protein, 349 aa, Butyricimonas virosa; identical to SEQ ID NO: 64544
  REGION 1..349: note = tr|A0A413IU22|A0A413IU22_9BACT S-adenosylmethionine:tRNA ribosyltransferase-isomerase; OS = Butyricimonas virosa OX=544645 GN=queA PE=3 SV=1

SEQ ID NO: 64547 - protein, 341 aa, Butyrivibrio crossotus
  REGION 1..341: note = tr|R5LJN7|R5LJN7_9FIRM S-adenosylmethionine:tRNA ribosyltransferase-isomerase OS=Butyrivibrio crossotus CAG:259 OX=1263062 GN=queA PE=3 SV=1
MDLKDFNYDLPEELIAQDPLEDRSSSRLMVLHKDTGRIEHKIFRDIIDYLNPGDCLVINDTKVIPARLMGIKEDTGATIEVLLLKRNADDVWECLVKPGKKARTGARIVFGEGLLVGEIVDVIEDGNRMIKFHYEGIFEEILDKLGQMPLPPYITHKLQDKNRYQTVYARNEGSAAAPTAGLHFTKELLEKIKEKGVNVVSITLHVGLGTFRPVKVDKIEEHHMHTETFNISKEAADTINRARAAGGRVIAVGTTSCRTLESAAADDGTIPARSGDTDIFIYPGYKFKAIDCLITNFHLPESTLIMLVSALAGRDNIMNAYETAVKERYRFFSFGDAMFIC

SEQ ID NO: 64548 - protein, 341 aa, Butyrivibrio crossotus
  REGION 1..341: note = tr|D4S0Q3|D4S0Q3_9FIRM S-adenosylmethionine:tRNA ribosyltransferase-isomerase OS=Butyrivibrio crossotus DSM 2876 OX=511680 GN=queA PE=3 SV=1
MDLKAFNYDLPEELIAQDPLEDRSSSRLMVLHKDTGRIEHKIFRDIIDYLNPGDCLVINDTKVIPARLMGIKEDTGAAIEVLLLKRNADDVWECLVKPGKKARTGARIVFGEGLLVGEIVDVIEDGNRMIKFHYEGIFEEILDKLGQMPLPPYITHKLQDKNRYQTVYAKNEGSAAAPTAGLHFTKELLEKIKEKGVNVVSITLHVGLGTFRPVKVDKIEEHHMHTETFNISKEAADTINRTRAAGGRVIAVGTTSCRTLESAAADDGTIPARSGDTDIFIYPGYKFKAIDCLITNFHLPESTLIMLVSALAGRDNIMNAYETAVKERYRFFSFGDAMFIC

SEQ ID NO: 64549 - protein, 345 aa, Butyrivibrio fibrisolvens
  REGION 1..345: note = tr|D4J2D2|D4J2D2_BUTFI S-adenosylmethionine:tRNA ribosyltransferase-isomerase OS=Butyrivibrio fibrisolvens 16/4 OX=657324 GN=queA PE=3 SV=1
MLVKDFDYELPEELIAQDPLEKRSNSRLMVLDKHTGEIAHRHFYDIKEYLRPGDCLVINNTRVIPARLYGARVGSGGKVEILLLKRISDNQWECLVKPGKKARPGMEISFGDGLLIGKIVDIVDEGNRIIEFTYEGIFEEILDKLGEMPLPPYITHKLQDRDRYQTVYAKFDGSAAAPTAGLHFTPELLEEVKAMGVRIAEVTLHVGLGTFRPVKEDEVLDHHMHSEYYEITQEACDIINETKANGGRVISVGTTSTRTLESAAEAGKPLSPKSGWTQIFIYPGYEFKVIDCLITNFHLPQSTLIMLVSALAGREHVLAAYKKAVEEKYRFFSFGDAMMITDLEQ

SEQ ID NO: 64550 - protein, 349 aa, Butyrivibrio fibrisolvens
  REGION 1..349: note = tr|A0A317G5T0|A0A317G5T0_BUTFI S-adenosylmethionine:tRNA ribosyltransferase-isomerase; OS = Butyrivibrio fibrisolvens OX=831 GN=queA PE=3 SV=1
MLGLRTSDYYFDLPQELIAQDPLEDRAASKLLVMDKKTGEIQHHVFKDIIDYLEPGDCLVLNNTKVIPARLLGTKEETGAAIEILLLKRRENDVWETLVKPGKKMRPGARVTFGDGRLKAEVLEVIEDGNRLVKFYYDGIWEEVLDSLGEMPLPPYITHKLQDKNMYQTVYAKFDGSAAAPTAGLHFTSELLDAIEKKGIDLAYVTLHVGLGTFRPVKVDNVLEHHMHTEWYQVTQEAADKINKAKESGHRVICVGTTSCRTIESAADENGHLKECSDNTSIFIYPGYKFKVLDCLITNFHLPESTLVMLVSALAGRDHVLNAYNEAIKLKYRFFSFGDACFFTDKMPK

SEQ ID NO: 64551 - protein, 346 aa, Butyrivibrio hungatei
  REGION 1..346: note = tr|A0A1M7SAK6|A0A1M7SAK6_9FIRM S-adenosylmethionine:tRNA ribosyltransferase-isomerase; OS = Butyrivibrio hungatei DSM 14810 OX=1121132 GN=queA PE=3; SV = 1
MSELGLSTSDYYFDLPEELIAQDPMEKRDECRLLVVDKNTGELEHHKFNEIINYLEPGDCLVLNNTKVIPARLLGEKEGTGAAVEILLLRRKEADVWETLVKPGKKLRPGARVSFGGGILKAEILDIVEEGNRLVKFYYDGIWEEVLDKLGEMPLPPYITHKLQDKNMYQTVYAKFEGSAAAPTAGLHFTEKLLEDIKAKGVDMAFVTLHVGLGTFRPVKVDNVKEHHMHTEWYQVTQEAADKINKAKAEGHRVICVGTTSCRTIESAADENGHLSECSGDTSIFIYPGYKFKVLDQLITNFHLPESTLVMLVSALAGREHVLNAYEEAIKERYRFFSFGDACFFK

SEQ ID NO: 64552 - protein, 353 aa, Butyrivibrio hungatei
  REGION 1..353: note = tr|A0A1G5BWS6|A0A1G5BWS6_9FIRM S-adenosylmethionine:tRNA ribosyltransferase-isomerase; OS = Butyrivibrio hungatei OX=185008 GN=queA PE=3 SV=1
MSETTQIGLSTADYFFDLPQELIAQDPLEKRDECRLLVIDKETGKTKHKIFSDIIDYLEPGDCLVLNNTKVIPARLLGEKEGTGAAVEILLLKRKENDIWETLVKPGKKLRPGARVSFGGGILTAEILDIVEDGNRLVKFYYEGIWEEVLDRLGEMPLPPYITHKLKDKNMYQTIYAKYEGSAAAPTAGLHFTDELLKRISDKGVDMAFVTLHVGLGTFRPVKVTNVKEHHMHTEWYQVTAEAAEKINRAKENGHRVICVGTTSCRTIESAADENGRLSECSGDTSIFIYPGYKFKVLDCLITNFHLPESTLVMLVAALAGRENILAAYEEAIKEKYRFFSFGDACFITDRME

SEQ ID NO: 64553 - protein, 349 aa, Butyrivibrio proteoclasticus
  REGION 1..349: note = tr|E0S201|E0S201_BUTPB S-adenosylmethionine:tRNA ribosyltransferase-isomerase OS=Butyrivibrio proteoclasticus (strain ATCC 51982 / DSM 14932 / B316); OX = 515622 GN=que A PE=3 SV=1
MSENREIGLSTADYYFDLPQELIAQDPMEKRDECKLLVMDKETGNVEHHVFNEVINYLQPGDCLVLNNTKVIPARLLGVKEETGAAVEILLLKRKEADVWETLVKPGKKLRPGAKVSFGDGILKAEIMDIVDEGNRLVKFYYDGIWEEVLDRLGEMPLPPYITHKLQDKNMYQTVYAKYEGSAAAPTAGLHFTDELLDKIREKGVDIAFVTLHVGLGTFRPVKVTNVKEHHMHTEWYQVTQEAADKINKAKESGHRVICVGTTSCRTIESAAGEDGTLSAASGDTSIFIYPGYKFKLMDGLITNFHLPESTLVMLVSAFAGREHVLNAYETAIKEKYRFFSFGDACLFI

SEQ ID NO: 64554 - protein, 349 aa, Butyrivibrio proteoclasticus
  REGION 1..349: note = tr|A0A1I5R042|A0A1I5R042_9FIRM S-adenosylmethionine:tRNA ribosyltransferase-isomerase; OS = Butyrivibrio proteoclasticus OX=43305 GN=queA PE=3 SV=1
MAENKELGLSTSDYYFDLPEELIAQDPMEKRDECRLLVVDKETGETEHHKFNEIINYLEPGDCLVLNNTKVIPARLLGEKEGTGAAVEILLLKRKEADVWETLVKPGKKLRPGARVSFGGGILKAEILDIVDEGNRLVKFYYDGIWEEVLDRLGEMPLPPYITHKLQDKSMYQTVYAKYEGSAAAPTAGLHFTEKLLEDIKAKGVDMAFVTLHVGLGTFRPVKVDNVLEHHMHTEWYQVTQEAADKINKAKENGHRIICVGTTSCRTIESAADENGHLTACSGDTSIFIYPGYKFKVLDQLITNFHLPESTLVMLVSALAGREHVLAAYEEAIKERYRFFSFGDACFFK

SEQ ID NO: 64555 - protein, 359 aa, Butyrivibrio sp.
  REGION 1..359: note = tr|A0A1G6BLF4|A0A1G6BLF4_9FIRM S-adenosylmethionine:tRNA ribosyltransferase-isomerase; OS = Butyrivibrio sp. INlla16 OX=1520807 GN=queA PE=3 SV=1
MTITNKGANDPNLGLRTSDYYFDLPEELIAQDPLPARDDAKLLVMNKKTGNIEHKIFHDIIDYLKPGDCLVLNDTKVIPARLLGTKKDTGAAVEILLLKRRENDIWETLVKPGKKLRPGAEVTFGEGLLNAKILDIVEEGNRLVQFSYEGIFEEVLDKLGEMPLPPYITHKLQDKNMYQTVYAKYEGSAAAPTAGLHFTNDLLKKIQDKGIDLAYVTLHVGLGTFRPVKVTNVLEHHMHTEWYQVNAEAAEKINKAKESGHRVICVGTTSCRTIESAADENGHIEPCADNTSIFIYPGYNFKVTDCLITNFHLPESTLVMLVSALAGRENVLNAYEEAISKRYRFFSFGDACFFTDDEI

SEQ ID NO: 64556 - protein, 349 aa, Butyrivibrio sp.
  REGION 1..349: note = tr|A0A1H5W8J5|A0A1H5W8J5_9FIRM S-adenosylmethionine:tRNA ribosyltransferase-isomerase; OS = Butyrivibrio sp. Su6 OX=1520810 GN=queA PE=3 SV=1
MAENKELGLSTSDYYFDLPEELIAQDPMEKRDECRLLVVDKKTGETEHHKFNEIINYLEPGDCLVLNNTKVIPARLLGEKEGTGAAVEILLLKRKEADVWETLVKPGKKLRPGARVSFGGGILKAEILDIVDEGNRLVKFYYDGIWEEVLDRLGEMPLPPYITHKLQDKNMYQTVYAKYEGSAAAPTAGLHFTEKLLEDIKAKGVDMAFVTLHVGLGTFRPVKVDNVLEHHMHTEWYQVTQEAADKINKAKENGHRVICVGTTSCRTIESAADENGHLSACSGDTSIFIYPGYKFKVLDQLITNFHLPESTLVMLVSALAGREHVLAAYEEAIKERYRFFSFGDACFFK

SEQ ID NO: 64557 - protein, 354 aa, unidentified
  source 1..354: note = Bythopirellula goksoyri
  REGION 1..354: note = tr|A0A5B9Q6F5|A0A5B9Q6F5_9PLAN S-adenosylmethionine:tRNA ribosyltransferase-isomerase; OS = Bythopirellula goksoyri OX=1400387 GN=queA PE=3 SV=1
MEPWIDYELPADLIAQQPLAHRADARLMVLDRSTDSIDHYHIRDLANLLHSGDRLVLNDTKVIPAQLRGIRDSTGGRWQGLYLGANSNGDWRIVCKTRGHLHPPEQIKLVDRDGRTRATLWLLEQIEEGQWLARPTEDRPTLELLEEFGHVPLPPYIRKGNMVDSDIADYQTVFARNPGAVAAPTAGLHFTPDLLRALEQSGVELSAVTLHVGLGTFRPITVDDPLQHPMHAEWGELNTVAAQELTTTRAEGGRIIAVGTTVTRVLESVVAAQKLDRQKTSSIGPWQGETDLFIHPPYEFQLVDALLTNFHFPRTTLLLLVQALGGTELVRRAYEEAIREEYRFYSYGDAMLIV

SEQ ID NO: 64558 - protein, 349 aa, unidentified
  source 1..349: note = Caballeronia arationis
  REGION 1..349: note = tr|A0A158A1X0|A0A158A1X0_9BURK S-adenosylmethionine:tRNA ribosyltransferase-isomerase; OS = Caballeronia arationis OX=1777142 GN=queA PE=3 SV=1
MFTLSDFDFNLPPELIAQTALTERSASRLLEVDNRTTPAAFTDRQFAELPNLIEPGDLLVFNDTKVLKARFLGKKASGGRIEVLVERLTGPTTALAQIRASKSPAPGTVLTLADAFDVTVGERVEPFYTLHFPTDCLTLIEQYGRLPLPPYIEHDPDAVDETRYQTVYAANPGAVAAPTAGLHFDDALFARLDARGVERATLTLHVGAGTFQPVRVEKIDEHKMHSEWYQLPQSLVDRIAAVKARGNRVIAVGTTSMRALEAAARDAANENRPLAAAVAETDIFITPGYEFRVVDRLVTNFHLPKSTLLMLVSAFAGMDTIRDAYRHAIEQRYRFFSYGDAMLLTRRPR

SEQ ID NO: 64559 - protein, 348 aa, unidentified
  source 1..348: note = Caballeronia arvi
  REGION 1..348: note = tr|A0A158J6V7|A0A158J6V7_9BURK S-adenosylmethionine:tRNA ribosyltransferase-isomerase; OS = Caballeronia arvi OX=1777135 GN=queA PE=3 SV=1
MFTLSDFDFNLPPELIAQSALAERSASRLLEVSNDMTQTRLIDRRFSELPNLIDAGDLLVFNDTKVLKARFLGKKASGGRVEVLVERLAGATTALAQIRASKSPAEGSTIRLADAFDVTVGERVEPFYTLHFPAECLTLIEQYGRLPLPPYIEHDADAYDETRYQTVYAANPGAVAAPTAGLHFDDALFAELDAKGVERATLTLHVGAGTFQPVRVENIAEHKMHSEWYDLPQSLVDRIAAVKARGNKVIAVGTTSMRALEAAARDAADAGKPLAGSQAETDIFITPGYEFRVVDRLVTNFHLPKSTLLMLVSAFAGMDTIRDAYRHAIKQRYRFFSYGDAMLLTRKN

SEQ ID NO: 64560 - protein, 348 aa, unidentified
  source 1..348: note = Caballeronia calidae
  REGION 1..348: note = tr|A0A158B4W7|A0A158B4W7_9BURK S-adenosylmethionine:tRNA ribosyltransferase-isomerase; OS = Caballeronia calidae OX=1777139 GN=queA PE=3 SV=1
MFTLSDFDFNLPPELIAQSALAERSASRLLEVDNGTTPAALVDRRFSELPDLIESGDLLVFNDTKVLKARFLGQKASGGRVEVLVERLTGATTALAQIRASKSPTQGSTIRLADAFDVTVGERVEPFYTLHFPAECLTLIEQHGRLPLPPYIEHDADAYDETRYQTVYAANPGAVAAPTAGLHFDDALFAELDARGVERATLTLHVGAGTFQPVRVENIAEHKMHSEWYDLPQSLVDRIAAVKARGNKVIAVGTTSMRALEAAARDAAVAGRPLAATQAETDIFITPGYEFRVVDRLVTNFHLPKSTLLMLVSAFAGMETIRAAYRHAIDERYRFFSYGDAMLLTRQK

SEQ ID NO: 64561 - protein, 348 aa, unidentified
  source 1..348: note = Caballeronia catudaia
  REGION 1..348: note = tr|A0A158A7E5|A0A158A7E5_9BURK S-adenosylmethionine:tRNA ribosyltransferase-isomerase; OS = Caballeronia catudaia OX=1777136 GN=queA PE=3 SV=1
MFTLSDFDFNLPPELIAQSALTERSASRLLEVSGGMPQTRLTDRRFSELPNLIGAGDLLVFNDTKVLKARFLGQKASGGRVEVLVERLTGATTALAQIRASKSPAEGSTIRLADAFDVIVGERVEPFYTLHFPAECLTLIEQYGRLPLPPYIEHDADAYDETRYQTVYAANPGAVAAPTAGLHFDDALFAELDARGVERATLTLHVGAGTFQPVRVENIAEHKMHSEWYDLPQALVDRIAAVRARGNKVIAVGTTSMRALEAAARDAASAGKALAGSQAETDIFITPGYEFRVVDRLVTNFHLPKSTLLMLVSAFAGMETIRDAYRHAIEQRYRFFSYGDAMLLTRKN

SEQ ID NO: 64562 - protein, 351 aa, unidentified
  source 1..351: note = Caballeronia choica
  REGION 1..351: note = tr|A0A158KFP4|A0A158KFP4_9BURK S-adenosylmethionine:tRNA ribosyltransferase-isomerase; OS = Caballeronia choica OX=326476 GN=queA PE=3 SV=1
MFTLSDFDFNLPPELIAQTALAERSASRLLEVDHRTTPATLTDRQFAELPDLIDAGDLLVFNDTKVLKARFLGQKASGGRIEVLIERLTGATTALAQIRASKSPAPGTVLTLADAFDVTVGERVEPFYTLHFPADCLTLIEQYGRLPLPPYIEHDPDAFDETRYQTVYAANPGAVAAPTAGLHFDAKLFERLDARGVERATLTLHVGAGTFQPVRVEKIAEHKMHSEWYELPQALVDKIAATKARGNRVIAVGTTSMRALEAAARDAANAGRPLAAANAETDIFITPGYAFRVVDRLVTNFHLPKSTLLMLVSAFAGMETIREAYRHAIDERYRFFSYGDAMLLTRQAPGQ

SEQ ID NO: 64563 - protein, 347 aa, unidentified
  source 1..347: note = Caballeronia cordobensis
  REGION 1..347: note = tr|A0A158EQY1|A0A158EQY1_9BURK S-adenosylmethionine:tRNA ribosyltransferase-isomerase; OS = Caballeronia cordobensis OX=1353886 GN=queA PE=3 SV=1
MFTLSDFDFNLPPELIAQSALAERSASRLLDVSGGPTTTRLVDRRFSELPNLVDAGDLLVFNDTKVLKARFFGQKASGGRVEVLVERLTGATTALAQIRASKSPAEGGTIRLADAFDVTVGERVEPFYTLHFPAECLTLIEQYGRLPLPPYIEHDADAYDETRYQTVYAANPGAVAAPTAGLHFDDALFAELDARGVERATLTLHVGAGTFQPVRVENIAEHKMHSEWYDLPQSLAERIAAVKARGNKVIAVGTTSMRALEAAARDAAQAGKPLAATQAETDIFITPGYEFRVVDRLVTNFHLPKSTLLMLVSAFAGMETIRDAYKHAIEQRYRFFSYGDAMLLTRA

SEQ ID NO: 64564 - protein, 343 aa, unidentified
  source 1..343: note = Caballeronia fortuita
  REGION 1..343: note = tr|A0A157ZFS3|A0A157ZFS3_9BURK S-adenosylmethionine:tRNA ribosyltransferase-isomerase; OS = Caballeronia fortuita OX=1777138 GN=queA PE=3 SV=1
MFTLSDFDFNLPPELIAQSALAERSASRLLDVSGGKLVDRRFSELPGLLDAGDLLVFNDTKVLKARFLGQKASGGRVEVLVERLTGATTALAQIRASKSPAEGTTIRLADAFDVTVGERVEPFYTLHFPAECLTLIEQYGRLPLPPYIEHDADAYDETRYQTVYAANPGAVAAPTAGLHFDDALFAELEKRGIERATLTLHVGAGTFQPVRVENIAEHKMHSEWYDLPQSLVDRIAAVKARGNKVIAVGTTSMRALEAAARDAAQANRPLSATQAETDIFITPGYEFRVVDRLVTNFHLPKSTLMMLVSAFAGMETIRDAYRHAIEQKYRFFSYGDAMLLTRA

SEQ ID NO: 64565 - protein, 351 aa, unidentified
  source 1..351: note = Caballeronia glathei
  REGION 1..351: note = tr|A0A069PW37|A0A069PW37_9BURK S-adenosylmethionine:tRNA ribosyltransferase-isomerase; OS = Caballeronia glathei OX=60547 GN=queA PE=3 SV=1
MFTLSDFDFNLPPELIAQTALAERSASRLLEVDNRTSPATLTDRRFSELPGLIDAGDLLVFNDTKVLKARFLGKKASGGRIEVLIERITGATTALAQIRASKSPAPGTTLTLADAFDVTVGERVEPFFTLHFPADCLTLIERYGRLPLPPYIEHDPDAVDETRYQTVYAANPGAVAAPTAGLHFDDALFAALDERGVARATLTLHVGAGTFQPVRVENIAEHRMHSEWYELPQTLVDRIAATKARGNRVIAVGTTSMRALEAAARDAAVANRPLAAAAAETDIFITPGYEFRVVDRLITNFHLPKSTLLMLVSAFAGVETIREAYRHAIEARYRFFSYGDAMLLTRQSTGI

SEQ ID NO: 64566 - protein, 348 aa, unidentified
  source 1..348: note = Caballeronia glebae
  REGION 1..348: note = tr|A0A157ZAW9|A0A157ZAW9_9BURK S-adenosylmethionine:tRNA ribosyltransferase-isomerase; OS = Caballeronia glebae OX=1777143 GN=queA PE=3 SV=1
MFTLSDFDFNLPPELIAQSALAERSASRLLDVDNRTAPATLTDRRFSELPDLLAPGDLLVFNDTKVLKARFFGQKASGGRVEVLVERLTGATTALAQIRASKGPTEGSTIRLADAFDVTVGERVEPFYTLHFPAECLTLIEQHGRLPLPPYIEHDADAYDETRYQTVYAANPGAVAAPTAGLHFDDALFAELEKRGVERATLTLHVGAGTFQPVRVENIAEHKMHSEWYDLPQSLVDRIAAVKARGNKVIAVGTTSMRALEAAARDAAQAGRPLSATQAETDIFITPGYAFRVVDRLVTNFHLPKSTLLMLVSAFAGMDTIRDAYRHAIEEKYRFFSYGDAMLLTRRD

SEQ ID NO: 64567 - protein, 348 aa, unidentified
  source 1..348: note = Caballeronia grimmiae
  REGION 1..348: note = tr|A0A069P6P0|A0A069P6P0_9BURK S-adenosylmethionine:tRNA ribosyltransferase-isomerase; OS = Caballeronia grimmiae OX=1071679 GN=queA PE=3 SV=1
MFTLSDFDFNLPPELIAQSALAERSASRLLEVDNRSTPATLTDRRFSELPDLVEPGDLLVFNDTKVLKARFFGQKASGGRVEVLVERLTGATTALAQIRASKSPAAGSTIRLADAFDVTVGERVEPFYTLHFPADCLTLIEQYGRLPLPPYIEHDADAYDETRYQTVYAANPGAVAAPTAGLHFDDALFARLDARGVERATLTLHVGAGTFQPVRVENVTEHKMHSEWYALPQTLVDRIAAVKARGNRVIAVGTTSMRALEAAARDAAAAGRPLSATSAETDIFITPGYEFRVVDRLVTNFHLPKSTLMMLVSAFAGMDTIRDAYRHAIEQRYRFFSYGDAMLLTRSA

SEQ ID NO: 64568 - protein, 349 aa, unidentified
  source 1..349: note = Caballeronia humi
  REGION 1..349: note = tr|A0A158EXI9|A0A158EXI9_9BURK S-adenosylmethionine:tRNA ribosyltransferase-isomerase; OS = Caballeronia humi OX=326474 GN=queA PE=3 SV=1
MFTLSDFDFNLPPELIAQTALAERSASRLLEVDNRTSPATLTDRQFAELPNLIDSGDLLVFNDTKVLKARFLGQKASGGRIEVLVERLTGPTTALAQIRASKSPAPGTVLKLADAFDVTVGERVEPFYTLHFPADCLTLIEQYGRLPLPPYIEHDPDVYDETRYQTVYAANPGAVAAPTAGLHFDDALFAKLDARGIERATLTLHVGAGTFQPVRVEKIDEHKMHSEWYALPQSLVDKIAATKARGNRVIAVGTTSMRALEAAARDAANAGRPLAAASAETDIFITPGYEFRVVDRLVTNFHLPKSTLLMLVSAFAGMETIREAYRHAIDQRYRFFSYGDAMLLTRQAR

SEQ ID NO: 64569 - protein, 344 aa, unidentified
  source 1..344: note = Caballeronia hypogeia
  REGION 1..344: note = tr|A0A157Z249|A0A157Z249_9BURK S-adenosylmethionine:tRNA ribosyltransferase-isomerase; OS = Caballeronia hypogeia OX=1777140 GN=queA PE=3 SV=1
MFTLSDFDFNLPPELIAQSALAERSASRLLDVSGTTFIDRRFSELPGLLDAGDLLVFNDTKVLKARFFGQKASGGRVEVLVERLTGATTALAQIRASKSPVGGTTIRLADAFDVTVGERVEPFYTLHFPAECLTLIEQYGRLPLPPYIEHDADAYDETRYQTVYAANPGAVAAPTAGLHFDDALFAALDAKGVERATLTLHVGAGTFQPVRVENIAEHKMHSEWYDLPQSLVDRIAAVKARGNKVIAVGTTSMRALEAAARDAAEAGRPLSATQAETDIFITPGYEFRVVDRLVTNFHLPKSTLMMLVSAFAGMDTIRDAYRHAIKQRYRFFSYGDAMLLTRKS

SEQ ID NO: 64570 - protein, 348 aa, unidentified
  source 1..348: note = Caballeronia jiangsuensis
  REGION 1..348: note = tr|A0A038H726|A0A038H726_9BURK S-adenosylmethionine:tRNA ribosyltransferase-isomerase; OS = Caballeronia jiangsuensis OX=1458357 GN=queA PE=3 SV=1
MFTLSDFDFNLPPELIAQSALAERSASRLLEVDNRATPATLIDRRFSELPDLIAPGDLLVFNDTKVLKARFFGQKASGGRVEVLVERLTGATTALAQIRASKSPGEGTTIRLADAFDVTVGERVEPFYTLHFPAECLTLIEQYGRLPLPPYIEHDADAYDETRYQTVYAANPGAVAAPTAGLHFDDALFAELDARGVERATLTLHVGAGTFQPVRVENIAEHKMHSEWYDLPQSLVDRIAAVKARGNSVIAVGTTSMRALEAAARDAANAGRPLAATQAETDIFITPGYGFRVVDRLVTNFHLPKSTLLMLVSAFAGMETIRDAYRHAIEEKYRFFSYGDAMLLTRRD

SEQ ID NO: 64571 - protein, 348 aa, unidentified
  source 1..348: note = Caballeronia megalochromosomata
  REGION 1..348: note = tr|A0A149PZY4|A0A149PZY4_9BURK S-adenosylmethionine:tRNA ribosyltransferase-isomerase; OS = Caballeronia megalochromosomata OX=1399969 GN=queA PE=3; SV = 1
MFTLSDFDFNLPPELIAQSALAERSASRLLEVDNRTTPATLIDRRFSELPGLIASGDLLVFNDTKVLKARFFGQKASGGRVEVLVERLTGATTALAQIRASKSPVEGSTIRLADAFDVTVGERVEPFYTLHFPAECLTLIEQYGRLPLPPYIEHDANAYDETRYQTVYAANPGAVAAPTAGLHFDDALFAELDARGVERATLTLHVGAGTFQPVRVENIAEHKMHSEWYDLPQSLADRIAAVKARGNKVIAVGTTSMRALEAAARDAADAGRPLAATQAETDIFITPGYAFRVVDRLVTNFHLPKSTLLMLVSAFAGMDAIREAYRHAIEQRYRFFSYGDAMLLTRRD

SEQ ID NO: 64572 - protein, 350 aa, unidentified
  source 1..350: note = Caballeronia mineralivorans
  REGION 1..350: note = tr|A0A0J1CPS3|A0A0J1CPS3_9BURK S-adenosylmethionine:tRNA ribosyltransferase-isomerase; OS = Caballeronia mineralivorans PML1(12) OX=908627 GN=queA; PE = 3 SV=1
MFTLSDFDFNLPPELIAQTALTERSASRLLDVNNRAATASFTDRHFTELPSLLEPGDLLVFNDTKVLKARFLGQKASGGRIEVLVERLTGATTALAQIRASKSPLPGTKLVLAEAFEVTVGERVEPFYTLHFPADCLTLIEQYGRLPLPPYIEHDPDAFDETRYQTVYAANPGAVAAPTAGLHFDPALFAALDARGVERATLTLHVGAGTFQPVRVENLAEHRMHSEWYRLPQTLADKIVATKARGNRVIAVGTTSLRALEAAARDAAKAGRPLSETSAETDIFITPGYEFRVVDRLVTNFHLPKSTLMMLVSAFAGMDAIRAAYAHAIEERYRFFSYGDAMLLTRQAAA

SEQ ID NO: 64573 - protein, 348 aa, unidentified
  source 1..348: note = Caballeronia pedi
  REGION 1..348: note = tr|A0A157Z4S2|A0A157Z4S2_9BURK S-adenosylmethionine:tRNA ribosyltransferase-isomerase; OS = Caballeronia pedi OX=1777141 GN=queA PE=3 SV=1
MFTLSDFDFNLPPELIAQSALTERSASRLLEVDNRATPATFVDRRFAELPGLIAPGDLLVFNDTKVLKARFLGQKASGGRVEVLVERLTGATTALAQIRASKSPAEGSTIRLADAFDVTVGARVEPFYTLHFPAECLTLIEQYGRLPLPPYIEHDADAYDETRYQTVYAANPGAVAAPTAGLHFDDALFAELDARGVERATLTLHVGAGTFQPVRVENIAEHKMHSEWYELPQSLVDRIAAVKARGNKVIAVGTTSMRALEAAARDAADAGRALAATQAETDIFITPGYAFRVVDRLVTNFHLPKSTLLMLVSAFAGMDTIREAYRHAIEQRYRFFSYGDAMLLTRRD

SEQ ID NO: 64574 - protein, 348 aa, unidentified
  source 1..348: note = Caballeronia peredens
  REGION 1..348: note = tr|A0A158G9P8|A0A158G9P8_9BURK S-adenosylmethionine:tRNA ribosyltransferase-isomerase; OS = Caballeronia peredens OX=1777132 GN=queA PE=3 SV=1
MFTLSDFDFNLPPELIAQSALAERSASRLLEVDNRAQPATLVDRRFSELPDLVDTGDLLVFNDTKVLKARFFGQKASGGRVEVLVERLSGATTALAQIRASKSPAEGSTIRLADAFDVTVGERVEPFYTLHFPAECLTLIEQFGRLPLPPYIEHDADAYDETRYQTVYAANPGAVAAPTAGLHFDDALFARLDARGVERATLTLHVGAGTFQPVRVENIAEHKMHSEWYDLPQSLADRIAAVKARGNRVIAVGTTSMRALEAAARDAANAGRPLAGSQAETDIFITPGYEFRVVDRLVTNFHLPKSTLLMLVSAFAGMDTIRDAYRHAIEQRYRFFSYGDAMLLTRRD

SEQ ID NO: 64575 - protein, 348 aa, unidentified
  source 1..348: note = Caballeronia ptereochthonis
  REGION 1..348: note = tr|A0A158BJY8|A0A158BJY8_9BURK S-adenosylmethionine:tRNA ribosyltransferase-isomerase; OS = Caballeronia ptereochthonis OX=1777144 GN=queA PE=3 SV=1
MFTLSDFDFNLPPELIAQSALAERSASRLLEVDNRTSPATLVDRRFSELPDLVEPGDLLVFNDTKVLKARFFGQKASGGRVEVLVERLTGATTALAQIRASKSPAQGSVIRLADAFDVTVGERVEPFYTLHFPAECLTLIEQYGRLPLPPYIEHDADVYDETRYQTVYAANPGAVAAPTAGLHFDDALFVELDARGVERATLTLHVGAGTFQPVRVENIAEHKMHSEWYDLPQSLVDRIAAVKARGNRVIAVGTTSMRALEAAARDAAQAGRPLAATQAETDIFITPGYEFRVVDRLVTNFHLPKSTLLMLVSAFAGMDAIREAYRHAIEARYRFFSYGDAMLLTRAA

SEQ ID NO: 64576 - protein, 347 aa, unidentified
  source 1..347: note = Caballeronia sordidicola
  REGION 1..347: note = tr|A0A242MMN3|A0A242MMN3_9BURK S-adenosylmethionine:tRNA ribosyltransferase-isomerase; OS = Caballeronia sordidicola OX=196367 GN=queA PE=3 SV=1
MFTLSDFDFNLPPELIAQTALTERSASRLLEVDNSAASPAFTDRQFTELPGLLEPGDLLVFNDTKVLKARFLGQKASGGRIEVLVERLTGATTALAQIRASKSPQPGTKIVLADAFEVTVGERVEPFYTLHFPADCLTLIEQYGRLPLPPYIEHDPDAYDETRYQTVYAANPGAVAAPTAGLHFDANLLEALDARGMERATLTLHVGAGTFQPVRVENLAEHKMHSEWYRLPQALADKIAATKARGNSVIAVGTTSMRALEAAARDADEAGRPLAETSAETDIFITPGYQFRVVDRLVTNFHLPKSTLMMLVSAFAGMDPIRAAYAHAIEKRYRFFSYGDAMLLTRQ

SEQ ID NO: 64577 - protein, 347 aa, unidentified
  source 1..347: note = Caballeronia sordidicola
  REGION 1..347: note = tr|A0A242M5T2|A0A242M5T2_9BURK S-adenosylmethionine:tRNA ribosyltransferase-isomerase; OS = Caballeronia sordidicola OX=196367 GN=queA PE=3 SV=1
MFTLSDFDFNLPPELIAQTALTERSASRLLEVDNSAASPAFTDRQFTELPGLLEPGDLLVFNDTKVLKARFLGQKASGGRIEVLVERLTGATTALAQIRASKSPQPGTKIVLADAFEVTVGERVEPFYTLHFPADCLTLIEQYGRLPLPPYIEHDPDAYDETRYQTVYAANPGAVAAPTAGLHFDANLLEALDARGMERATLTLHVGAGTFQPVRVENLAEHKMHSEWYRLPQALADKIAATKARGNSVIAVGTTSMRALEAAARDADQAGRPLAETSAETDIFITPGYQFRVVDRLVTNFHLPKSTLMMLVSAFAGMDPIRAAYAHAIEKRYRFFSYGDAMLLTRQ

SEQ ID NO: 64578 - protein, 349 aa, unidentified
  source 1..349: note = Caballeronia telluris
  REGION 1..349: note = tr|A0A158K657|A0A158K657_9BURK S-adenosylmethionine:tRNA ribosyltransferase-isomerase; OS = Caballeronia telluris OX=326475 GN=queA PE=3 SV=1
MFTLSDFDFNLPPELIAQTALTERSASRLLDVDNHTTPAALTDRQFAELPTLIEPGDLLVFNDTKVLKARFLGKKASGGRIEVLVERLTGPTTALAQIRASKSPAPGTVLTLADAFDVTVGERVEPFYTLHFPAECLTLIEQYGRLPLPPYIEHDPDAIDETRYQTVYAANPGAVAAPTAGLHFDAALFDRLDARGVERATLTLHVGAGTFQPVRVEKIDEHKMHSEWYQLPQSLVDKIAATKARGNRVIAVGTTSMRALEAAARDAANENRPLAAAVAETDIFITPGYEFRVVDRLVTNFHLPKSTLLMLVSAFAGMETIRDAYRHAIEQRYRFFSYGDAMLLTRQPR

SEQ ID NO: 64579 - protein, 344 aa, unidentified
  source 1..344: note = Caballeronia temeraria
  REGION 1..344: note = tr|A0A158B5G4|A0A158B5G4_9BURK S-adenosylmethionine:tRNA ribosyltransferase-isomerase; OS = Caballeronia temeraria OX=1777137 GN=queA PE=3 SV=1
MFTLSDFDFNLPPELIAQSALAERSASRLLEVTGGTLVDRRFSELPGLIDAGDLLVFNDTKVLKARFFGQKASGGRVEVLVERLTGATTALAQIRASKSPVEGTTIRLADAFDVTVGERVEPFYTLHFPAECLTLIEQYGRLPLPPYIEHDADAYDETRYQTVYAANPGAVAAPTAGLHFDDALFAELEKRGVERATLTLHVGAGTFQPVRVENIAEHKMHSEWYDLPQSLVDRIAAVKARGNKVIAVGTTSMRALEAAARDAAEAGRPLSATQAETDIFITPGYAFRVVDRLVTNFHLPKSTLLMLVSAFAGMDTIRDAYRHAIEQKYRFFSYGDAMLLTRRD

SEQ ID NO: 64580 - protein, 349 aa, unidentified
  source 1..349: note = Caballeronia terrestris
  REGION 1..349: note = tr|A0A158JXM8|A0A158JXM8_9BURK S-adenosylmethionine:tRNA ribosyltransferase-isomerase; OS = Caballeronia terrestris OX=1226301 GN=queA PE=3 SV=1
MFTLSDFDFNLPPELIAQTALTERSASRLLEVDTRTTPDTLTDRQFAELPNLIDAGDLLVFNDTKVLKARFLGQKASGGRIEVLVERLTGPTTALAQIRASKSPGPGTVLKLADAFDVTVGERVEPFYTLHFPADCLTLIEQYGRLPLPPYIEHDPDAYDETRYQTVYAANPGAVAAPTAGLHFDDALFAKLDARGVERATLTLHVGAGTFQPVRVEKIDEHKMHSEWYALPQALVDRIAATKARGKRVIAVGTTSMRALEAAARDAANAGRPLAAASAETDIFITPGYEFRVVDRLVTNFHLPKSTLLMLVSAFAGMETIREAYRHAIEQRYRFFSYGDAMLLTRQAR

SEQ ID NO: 64581 - protein, 348 aa, unidentified
  source 1..348: note = Caballeronia turbans
  REGION 1..348: note = tr|A0A158GA82|A0A158GA82_9BURK S-adenosylmethionine:tRNA ribosyltransferase-isomerase; OS = Caballeronia turbans OX=1777134 GN=queA PE=3 SV=1
MFTLSDFDFNLPPELIAQSALAERSASRLLEVDNRITPATLVDRRFSELPDLIAPGDLLVFNDTKVLKARFFGQKASGGRVEVLVERLTGATTALAQIRASKSPAEGTTIRLADAFDVTVGERVEPFYTLHFPAECLTLIEQYGRLPLPPYIEHDADAYDETRYQTVYAANPGAVAAPTAGLHFDDALFAELDARGVERATLTLHVGAGTFQPVRVENIAEHKMHTEWYDLPQSLVDRIAAVKARGNKVIAVGTTSMRALEAAARDAASAGRPLAATQAETDIFITPGFEFRVVDRLVTNFHLPKSTLLMLVSAFAGMETIRDAYRHAIEEKYRFFSYGDAMLLTRRD

SEQ ID NO: 64582 - protein, 350 aa, unidentified
  source 1..350: note = Caballeronia udeis
  REGION 1..350: note = tr|A0A158JDP0|A0A158JDP0_9BURK S-adenosylmethionine:tRNA ribosyltransferase-isomerase; OS = Caballeronia udeis OX=1232866 GN=queA PE=3 SV=1
MFTLSDFDFNLPPELIAQTALTERSASRLLDVDNRAATAAFTDRHFTELPNLLEPGDLLVFNDTKVLKARFLGQKASGGRIEVLVERLTGATTALAQIRASKSPLPGTKLVLADAFEVTVGERVEPFYTLHFPADCLTLIEQYGRLPLPPYIEHDPDSFDETRYQTVYAANPGAVAAPTAGLHFDPALFAALDARGVERATLTLHVGAGTFQPVRVENLAEHKMHSEWYRLPQELADKITATKARGNRVVAVGTTSLRALEAAARDAAVAGRPLAQTSAETDIFITPGYQFRVVDRLVTNFHLPKSTLMMLVSAFAGMDAIRAAYAHAIQERYRFFSYGDAMLLTRQAAA

SEQ ID NO: 64583 - protein, 350 aa, unidentified
  source 1..350: note = Caballeronia udeis
  REGION 1..350: note = tr|A0A3M0V740|A0A3M0V740_9BURK S-adenosylmethionine:tRNA ribosyltransferase-isomerase; OS = Caballeronia udeis OX=1232866 GN=queA PE=3 SV=1
MFTLSDFDFNLPPELIAQTALTERSASRLLDVNNRAATASFTDRHFTELPSLLEPGDLLVFNDTKVLKARFLGQKASGGRIEVLVERLSGATSALAQIRASKSPLPGTKLVLAEAFEVTVGERVEPFYTLHFPADCLTLIEQYGRLPLPPYIEHDPDAFDETRYQTVYAANPGAVAAPTAGLHFDPALFGALDARGVERETLTLHVGAGTFQPVRVENLAEHRMHSEWYRLPQSLADKIAATKARGNRVIAVGTTSLRALEAAARDAAEAGRPLSETSAETDIFITPGYEFRVVDRLVTNFHLPKSTLLMLVSAFAGMDAIRAAYAHAIEERYRFFSYGDAMLLTRQAAA

SEQ ID NO: 64584 - protein, 346 aa, Caenimonas sp.
  REGION 1..346: note = tr|A0A562ZMY0|A0A562ZMY0_9BURK S-adenosylmethionine:tRNA ribosyltransferase-isomerase; OS = Caenimonas sp. HX-9-20 OX=2596921 GN=queA PE=3 SV=1
MRQFTLGDFDFALPPELIAQHPAAERSGSRLLDGTQGTPIDRSFRELPALLQPGDLLVFNDTQVIKARLFGEKPTGGKLELLVERVLQDHEVVAHMKVSKKPPIGTVLRMDGGFNATLLGRWPEEDGPLFRFAFSSEPHALMEQHGHVPLPPYITHEDTPEDARRYQTVFARAPGAVAAPTAALHFDAEVLAALEARGVQRASVTLHVGAGTFQPVKTDNIAEHRMHSEWYEVPPATQQAIADLRARGGRLVAVGTTTVRTLESWARSGQASADTSIFITPGFRFREVNVLLTNFHLPKSTLLMLVSAFAGYEHAMGLYHHAIAAGYRFFSYGDAMLLARTDTPPT

SEQ ID NO: 64585 - protein, 348 aa, Caenispirillum bisanense
  REGION 1..348: note = tr|A0A286GY46|A0A286GY46_9PROT S-adenosylmethionine:tRNA ribosyltransferase-isomerase; OS = Caenispirillum bisanense OX=414052 GN=queA PE=3 SV=1
MRVDAFDFDLPRDRIADRPVSPRDSARCLHVRPDGLDDRIMRDLPDLLQPGDVMVFNDTRVIPARLLGRRGEAKVEVTLHMRLADDTWRAFAKGAKKLKPGQTITFAEGFEALVEDKDGGDVRLKFDRGGQALMDALKAHGHIPLPPYMGRDDDERDRTDYQTVYAAPEKEGAVAAPTAGLHFTPDLLARLEARGVSRVFVTLHVGAGTFLPVTADDTAEHRMHAEIGEVTPEAAAAINAARAGGGRVVAVGTTALRLLESAADESGVLHPFSGPTDIFITPGWRFRMVDRLVTNFHLPRSTLFMLVSAFCGLTRMQAAYAHAVETGYRFYSYGDGSLLERCDEDIPA

SEQ ID NO: 64586 - protein, 351 aa, unidentified
  source 1..351: note = Caenispirillum salinarum
  REGION 1..351: note = tr|K9HJ73|K9HJ73_9PROT S-adenosylmethionine:tRNA ribosyltransferase-isomerase OS=Caenispirillum salinarum AK4 OX=1238182 GN=queA PE=3 SV=1
MRVDAFDFDLPRDRIADRPASPRDSARCLRVTCDGLADFIMRDLPDMLQPGDVMVFNDTRVIPARLAGRRGEAKVEVTLHMRLDDDTWRAFAKGAKKLKVGQTIDFADGFSALVEERDGGDVRLKFNRGGQALMDALKDHGHIPLPPYMGREDDESDRTDYQTVYSAPEKEGAVAAPTAGLHFTPELLERLDKRGVTRVFVTLHVGAGTFLPVTADDTADHKMHSEIGEITPEAAEAIEAARARGGRVVAVGTTALRLLESAADAETGAVKPFSGPTDIFITPGWRFRAVDKLMTNFHLPKSTLFMLVSAFSGLNRMKAAYAHAIQSGYRFYSYGDGSLLDRCDADLSVSE

SEQ ID NO: 64587 - protein, 342 aa, Caldalkalibacillus thermarum
  REGION 1..342: note = tr|F5LAQ4|F5LAQ4_CALTT S-adenosylmethionine:tRNA ribosyltransferase-isomerase OS=Caldalkalibacillus thermarum (strain TA2.A1) OX=986075 GN=queA PE=3 SV=1
MRVDEFDFELPEELIAQKPLPDRASSRLLHLDRQTGAIFHHQFTDIVQLLTAGDVLVLNDTKVMPARLLGVKEETGAKVEVLLLKQIEGDSWETLVKPAKRVKPGVTLRFGDGRLRAVCTGVTDAGGRYIRFEYQGIFQEILAELGQMPLPPYIKEQLDDPDRYQTVYARHEGSAAAPTAGLHFTPAILQALEDKGVILTYITLHVGLGTFRPVQAERVEEHQMHAEFFQMPQETAQVLNQAKAEGRRIIAVGTTSVRTLETVVRAQNGRFGACSGWTDIFIYPGFRFQAIDGMLTNFHLPKSTLIMLVSAFAGKETIMQAYREAVKQRYRFFSFGDAMLIL

SEQ ID NO: 64588 - protein, 341 aa, Caldanaerobacter subterraneus
  REGION 1..341: note = sp|Q8RAN0|QUEA_CALS4 S-adenosylmethionine:tRNA ribosyltransferase-isomerase OS=Caldanaerobacter subterraneus subsp. tengcongensis (strain DSM 15242 / JCM 11007 / NBR C 100824 / MB4) OX=273068 GN=queA PE=3 SV=1
MKRSEFYFDLPEELIAQEPLEDRASSRLMILDRRTGEIKHDIFKNITKYLKEGDCLVLNDTKVIPARLIGQREDSGGKVELLLLRRTSMNEWEVLVKPGKRAKVGKRVVFGNGELVAEIIDTTEAGGRIARFYYDGVFEEVLDRLGEMPVPPYIKKKLKDKNRYQTVYAKYEGSAAAPTAGLHFTEELLDEIRNMGVKTVFITLHVGLGTFRPVKEEIIENHKMHEEFYIVTEEAAKAINEARKNGGRIIAVGTTSTRTLETVADESGYIHPKSGWTDIFIYPGYKFKAIDGMITNFHLPESTLIMMVSAFAGKENIMRAYKVAIENKYRFFSFGDAMLII

SEQ ID NO: 64589 - protein, 341 aa, Caldanaerobacter subterraneus
  REGION 1..341: note = tr|A0A117LA37|A0A117LA37_9THEO S-adenosylmethionine:tRNA ribosyltransferase-isomerase; OS = Caldanaerobacter subterraneus OX=911092 GN=queA PE=3; SV = 1
MKRSEFYFELPEELIAQEPLEDRASSRLMILNKKTGEIEHDIFKNITKYLKPGDCLVLNNTKVIPARLIGRREDSGGKIEFVLLKRISNNEWEILVKPGRRAKIGSKFVFGNGELIAEILDTTEVGGRIVRFYYEGVFEEVLDKLGEMPVPPYIKKKLKNKDRYQTVYAKYEGSAAAPTAGLHFTEELLEKIRQMGVKTVFITLHVGLGTFRPVKEEVIENHKMHEEFYIVTKEAAEEINETRKSGGRIIAVGTTSTRTLETVADEDGYIKEKSGWTDIFIYPGYKFKAIDGMITNFHLPESTLIMMVSAFAGKENIMRAYKIAVEKKYRFFSFGDAMLII

SEQ ID NO: 64590 - protein, 341 aa, Caldanaerobius fijiensis
  REGION 1..341: note = tr|A0A1M4TXI0|A0A1M4TXI0_9THEO S-adenosylmethionine:tRNA ribosyltransferase-isomerase; OS = Caldanaerobius fijiensis DSM 17918 OX=1121256 GN=queA; PE = 3 SV=1
MNVHDFYYELPQELIAQEPLERRDSSRLMVLHRKDGSIEHKIFRDIVQFLNPGDCLVLNDTRVIPARLIGHKKDTGGIIEFLLLRKTALDTWEVLVKPGRRAKIGTRFVFGDGELEAEVIDNTDAGGRIAKFYYEGVFEEILDKLGQMPLPPYIKKSLKDKERYQTVYSKHEGSAAAPTAGLHFTNELLDVIREKGVHVVFITLHVGLGTFRPVKVEKIEEHRMHSEFYVVTDEVAKTLNDARKKGGRIICVGTTSVRTLETVADDSGVIHSSSGWTDIFIYPGYKYKVVDGLITNFHLPESTLIMLVCAFGGYDHVMRAYRVAVEERYRFYSFGDAMLII

SEQ ID NO: 64591 - protein, 341 aa, Caldanaerovirga acetigignens
  REGION 1..341: note = tr|A0A1M7JJK9|A0A1M7JJK9_9FIRM S-adenosylmethionine:tRNA ribosyltransferase-isomerase; OS = Caldanaerovirga acetigignens OX=447595 GN=queA PE=3 SV=1
MDVKEFYYELPEELIAQEPLPERDKSRLMVVRRETRSFEHRIFENIIDYLEEGDCLVLNDTRVIPARLLGTRKDTGGKIEFILLKRIEKDKWEILVKPGRRAKLGSEFTFGDGRLRAKVLDYTDAGGRIVEFYYEGIFEHVLDELGKMPLPPYIKKELEEKERYQTVYARKPGSAAAPTAGFHFTKDLLNKIEQKGVRVCHITLHVGLGTFRPVKEEKVEQHKMHHEYFEVDDETARIINATKQQGKRVIAVGTTSTRTLETVADENGFVKGQSGWTDLFIYPGYRFKVVDGLVTNFHLPESTLLMLVCAFADKELIMTAYNEAIKEKYRFYSFGDAMLIL

SEQ ID NO: 64592 - protein, 341 aa, unidentified
  source 1..341: note = Calderihabitans maritimus
  REGION 1..341: note = tr|A0A1Z5HTP6|A0A1Z5HTP6_9THEO S-adenosylmethionine:tRNA ribosyltransferase-isomerase; OS = Calderihabitans maritimus OX=1246530 GN=queA PE=3 SV=1
MRVADFDYQLPEELIAQEPVEPRDSSRLMILHRKTGKIEHRIFRDIVEYLRPGDVMVLNNTRVIPARLYGRKAETGAQVEVFLLTHREGDCWETLVRPGKKVKPGNSIIFGNGELVGKVVGYTEAGGRLIQFQYDGSWEAVINRLGRTPLPPYIRTAKEYRERYQTVYALHEGSVAAPTAGLHFTPELLEQIKKRGIKVVFLLLHVGLGTFQPVKTDRVEDHRMHAEYYRLSSDTAETINHARRKGGRVIAVGTTTVRTLETVADEEGNVRSGEGWTDIFIYPGHRFRAVDALVTNFHLPRSTLLMLVSAFAGRDKIMEAYREAIDKNYRFYSFGDAMLIL

SEQ ID NO: 64593 - protein, 342 aa, unidentified
  source 1..342: note = Caldibacillus debilis
  REGION 1..342: note = tr|A0A150LG63|A0A150LG63_9BACI S-adenosylmethionine:tRNA ribosyltransferase-isomerase; OS = Caldibacillus debilis OX=301148 GN=queA PE=3 SV=1
MKTEEFDFDLPEELIAQTPLKERTSSRLMVLDRKTGGIVHDRFSNIKTYLRPGDCLVLNNTKVMPARLYGEKTDTGAHVEILLLKQRDGDEWETLAKPAKRIKTGSEIRFGNGELTAVCVGTTDFGGRILKFRYEGIFYEILEKLGEMPLPPYIKEKLGDQSRYQTVYAKEIGSAASPTAGLHFSEGLLAEIKEMGVHLAFLTLHVGLGTFRPVTAENIEDHKMHAEFYQFPEETAELLNRVREEGGRIISVGTTSTRTLETVASRHNGKFVPESGWTDIFIYPGYRFQAIDGLITNFHLPKSTLIMLVSAFAGKERIMNAYRTAVRERYRFFSFGDAMLII

SEQ ID NO: 64594 - protein, 342 aa, unidentified
  source 1..342: note = Caldibacillus debilis
  REGION 1..342: note = tr|A0A420VBS9|A0A420VBS9_9BACI S-adenosylmethionine:tRNA ribosyltransferase-isomerase; OS = Caldibacillus debilis GB1 OX=1339248 GN=queA PE=3 SV=1
MKTEEFDFDLPEELIAQTPLKERTSSRLMVLDRKTGGIVHDRFSNIKTYLRPGDCLVLNNTKVMPARLYGEKTDTGAHVEILLLKQREGDEWETLAKPAKRIKPGSEIRFGRGELTAVCVGTTDFGGRILKFRYEGIFYEILEKLGEMPLPPYIKEKLGDQSRYQTVYAKEIGSAASPTAGLHFSEGLLAEIKEMGVHLAFLTLHVGLGTFRPVTAENIEDHKMHAEFYQFPEETAELLNRVREEGGRIISVGTTSTRTLETVASRHNGKFAPESGWTDIFIYPGYRFQAIDGLITNFHLPKSTLIMLVSAFAGKERIMNAYRTAVRERYRFFSFGDAMLII

SEQ ID NO: 64595 - protein, 346 aa, Caldicellulosiruptor bescii
  REGION 1..346: note = tr|B9MMG3|B9MMG3_CALBD S-adenosylmethionine:tRNA ribosyltransferase-isomerase OS=Caldicellulosiruptor bescii (strain ATCC BAA-1888 / DSM 6725 / Z-1320); OX = 521460 GN= queA PE=3 SV=1
MGKWKLSDFHYDLPDELIAQKPVEPRDSSRLMVILPDGRIEHRIFRDIVEYLNEGDCLVLNNSKVIPARLIGQREETGSFIEFLLIKRLDINTWEVMTRPGKKARKGRRFVFGNGELKAEVLHVNREEGTRVVRFYYDGVFEEVLERLGKIPLPPYIKEELDDLSRYQTVYSKVPGSAAAPTAGLHFTEELLSRISKKGVEILYVTLHVGLGTFKPVKVENVEEHKMHEEYYEISEDVTERINRAKELGKRVIAVGTTSCRVLESCCDENGKVKAKKGWTDIFIYPGYEFKVLDGLVTNFHLPDTTLMMLVCAFGGYERIMNAYKIAVDMRYRFFSFGDAMLILRR

SEQ ID NO: 64596 - protein, 345 aa, unidentified
  source 1..345: note = Caldicellulosiruptor changbaiensis
  REGION 1..345: note = tr|A0A3T0D288|A0A3T0D288_9FIRM S-adenosylmethionine:tRNA ribosyltransferase-isomerase; OS = Caldicellulosiruptor changbaiensis OX=1222016 GN=queA; PE = 3 SV=1
MKKWKLSDFHYDLPEELIAQKPVEPRDSSRLMVIHPDGRIDHRIFRDIIEYLNEGDCLVLNNSKVIPARLIGQREDTGSFIEFLLVKRLNIDTWEVMTRPGKKARKGRRFVFGDGRLKAEVLHVNQDEGTRIVRFEYEGVFEDILESLGEIPLPPYIKEKLENVERYQTVYSKVPGSAAAPTAGLHFTEELLDRISKKGVEVLYVTLHVGLGTFKPVKVENIEEHKMHEEYYEISEDVAEKINEAKKLGKRVIAVGTTSCRVLESAAVEKGLVKAQKGWTDIFIYPGYEFKILDGLVTNFHLPDTTLMMLVCAFGGYERIINAYKIAVEQRYRFFSFGDAMLILK

SEQ ID NO: 64597 - protein, 346 aa, Caldicellulosiruptor hydrothermalis
  REGION 1..346: note = tr|E4Q8T1|E4Q8T1_CALH1 S-adenosylmethionine:tRNA ribosyltransferase-isomerase OS=Caldicellulosiruptor hydrothermalis (strain DSM 18901 / VKM B-2411 / 108); OX = 632292GN=queA PE=3 SV=1
MKKWKLSDFHYDLPDELIAQKPVEPRDSSRLMVILPDGRLEHRIFRDIVEYLNEGDCLVLNNSKVIPARLIGQREDTGSFIEFLLVKRLDINTWEVMTRPGKKARKGRKFVFGNGELKAEVLHVNQEEGTRIVRFYYEGVFEEVLERLGKIPLPPYIKEELDDLSRYQTVYSKVPGSAAAPTAGLHFTEELLEKISKKGVEILYVTLHVGLGTFKPVKVENVEEHKMHEEYYEISEDVAERINRAKELGKRVIAVGTTSCRVLESCCDENGKVRAKKGWTDIFIYPGYEFKVLDGLVTNFHLPDTTLMMLVCAFGGYERIMNAYKIAVDMRYRFFSFGDAMLILRR

SEQ ID NO: 64598 - protein, 346 aa, Caldicellulosiruptor kristjanssonii
  REGION 1..346: note = tr|E4S7F9|E4S7F9_CALKI S-adenosylmethionine:tRNA ribosyltransferase-isomerase OS=Caldicellulosiruptor kristjanssonii (strain ATCC 700853 / DSM 12137 / I77R1B); OX = 632 335 GN=queA PE=3 SV=1
MRKWKLSDFHYDLPEELIAQKPVEPRDSSRLMVILPDGTIEHRIFRDIVEYLNEGDCLVLNNSKVIPARLIGQREDTGSFIEFLLVKRLDINTWEVMTRPGKKARKGRKFVFGNGELKAEVLHVNQDEGTRIVRFYYEGVFEEVLERLGKIPLPPYIKEELDDLSRYQTVYSKVPGSAAAPTAGLHFTEELLDRISKKGVEILYVTLHVGLGTFKPVKVENVEEHKMHEEYYEISQDVADKINRAKEVGKRVIAVGTTSCRVLESCSDETGRVKAKKGWTDIFIYPGYNFKVLDGLVTNFHLPDTTLMMLVCAFGGYERIMNAYKIAVDMRYRFFSFGDAMLILRR

SEQ ID NO: 64599 - protein, 346 aa, Caldicellulosiruptor kronotskyensis
  REGION 1..346: note = tr|E4SHD0|E4SHD0_CALK2 S-adenosylmethionine:tRNA ribosyltransferase-isomerase OS=Caldicellulosiruptor kronotskyensis (strain DSM 18902 / VKM B-2412 / 2002); OX = 632348GN=queA PE=3 SV=1
MRKWKLSDFHYDLPDELIAQKPVEPRDSSRLMVILPDGRIEHRIFRDIVDYLNEGDCLVLNNSKVIPARLIGQREDTGSFIEFLLVKRLDINTWEVMTRPGKKARKGRRFVFGNGELKAEVLHVNREEGTRIVRFYYDGVFEEVLERLGKIPLPPYIKEELDDLSRYQTVYSKVPGSAAAPTAGLHFTEELLSRISKKGVEILYVTLHVGLGTFKPVKVENVEEHKMHEEYYEISQDVADKINKAKELGKRIIAVGTTSCRVLESCCDENGKVKAKKGWTDIFIYPGYEFKVLDGLVTNFHLPDTTLMMLVCAFGGYERIMNAYKIAVDMRYRFFSFGDAMLILRR

SEQ ID NO: 64600 - protein, 346 aa, Caldicellulosiruptor lactoaceticus
  REGION 1..346: note = tr|G2PW72|G2PW72_9FIRM S-adenosylmethionine:tRNA ribosyltransferase-isomerase OS=Caldicellulosiruptor lactoaceticus 6A OX=632516 GN=queA PE=3 SV=1
MRKWKLSDFHYDLPEELIAQKPVEPRDSSRLMVILPDGTIEHRIFREIVEYLNEGDCLVLNNSKVIPARLIGQREDTGSFIEFLLVKRLDINTWEVMTRPGKKARKGRKFVFGNGELKAEVLHVNQDEGTRIVRFYYEGVFEEVLERLGKIPLPPYIKEELDDLSRYQTVYSKVPGSAAAPTAGLHFTEELLDRISKKGVEILYVTLHVGLGTFKPVKVENVEEHKMHEEYYEISQDVADKINRAKEVGKRVIAVGTTSCRVLESCSDETGRVKAKKGWTDIFIYPGYNFKVLDGLVTNFHLPDTTLMMLVCAFGGYERIMNAYKIAVDMRYRFFSFGDAMLILRR

SEQ ID NO: 64601 - protein, 346 aa, unidentified
  source 1..346: note = Caldicellulosiruptor obsidiansis
  REGION 1..346: note = tr|D9THW1|D9THW1_CALOO S-adenosylmethionine:tRNA ribosyltransferase-isomerase OS=Caldicellulosiruptor obsidiansis (strain ATCC BAA-2073 / strain OB47) OX=608506; GN = q ueA PE=3 SV=1
MRKWKLSDFHYDLPDELIAQKPVEPRDNSRLMVILPDGTIEHRIFRDIVEYLNEGDCLVLNNSKVIPARLIGQREDTGSFIEFLLVKRLDINTWEVMTRPGKKARRGRKFVFGNGELKAEVLHVNQDEGTRIVRFYYEGVFEEVLEKLGKIPLPPYIKEELEDLSRYQTVYSKVPGSAAAPTAGLHFTEELLEKISKKGVEILYVTLHVGLGTFKPVKVENVEEHKMHEEYYEISQDVADRINRAKELGKRVIAVGTTSCRVLESCSDEAGRVKAQKGWTNIFIYPGYNFKVLDGLVTNFHLPDTTLMMLVCAFGGYERIMNAYKIAVDMRYRFFSFGDAMLILRR

SEQ ID NO: 64602 - protein, 345 aa, Caldicellulosiruptor owensensis
  REGION 1..345: note = tr|E4Q2N5|E4Q2N5_CALOW S-adenosylmethionine:tRNA ribosyltransferase-isomerase OS=Caldicellulosiruptor owensensis (strain ATCC 700167 / DSM 13100 / OL) OX=632518; GN = q ueA PE=3 SV=1
MRKWKLSDFHYDLPDELIAQKPVEPRDSSRLMVILPDGTIEHRIFRDIVEYLNEGDCLVLNNSKVIPARLIGQREDTGSFIEFLLVKRLDINTWEVMTRPGKKARRGRKFIFGNGELKAKVLHVNQDEGTRIVRFYYEGVFEEVLEKLGKIPLPPYIKEELEDLSRYQTVYSKVPGSAAAPTAGLHFTEELLKKIEEKGVEILYVTLHVGLGTFKPVKVENIEEHRMHDEYYEISQEVADRINKAKEFGKRVIAVGTTSCRVLESCSDENGRLKAKKGWTDIFIYPGYEFKVLDGLVTNFHLPDTTLMMLVCAFGGYERIMNAYKIAVEMKYRFFSFGDAMLILR

SEQ ID NO: 64603 - protein, 345 aa, Caldicellulosiruptor saccharolyticus
  REGION 1..345: note = tr|A4XFX0|A4XFX0_CALS8 S-adenosylmethionine:tRNA ribosyltransferase-isomerase OS=Caldicellulosiruptor saccharolyticus (strain ATCC 43494 / DSM 8903 / Tp8T 6331); OX = 3 51627 GN=queA PE=3 SV=1
MRKWKLSDFHYDLPEELIAQKPIEPRDSSRLMVIHPDGRIDHRIFRDIIEYLNEGDCLVLNNSKVIPARLIGQREDTGSFIEFLLVKRLSIDTWEVMTRPGKKARKGRRFVFGDGRLKAEVLHVNQDEGTRIVRFEYEGVFEDILESLGEIPLPPYIKEKLENVERYQTVYSKIPGSAAAPTAGLHFTEELLSRISKKGVQTLYVTLHVGLGTFKPVKVENIEEHKMHEEYYEISEDVAERINEAKRLGKRVIAVGTTSCRVLESAAVEKGLVKAQKGWTDIFIYPGYEFKILDGLVTNFHLPDTTLMMLVCAFGGYERIMNAYKIAVEQRYRFFSFGDAMLILK

SEQ ID NO: 64604 - protein, 342 aa, unidentified
  source 1..342: note = Caldicoprobacter faecalis
  REGION 1..342: note = tr|A0A1I5VIM7|A0A1I5VIM7_9FIRM S-adenosylmethionine:tRNA ribosyltransferase-isomerase; OS = Caldicoprobacter faecalis OX=937334 GN=queA PE=3 SV=1
MKVEDFDYYLPEELIAQSPTEKRDESRLLVYHRDTGKIEHRIFKDIVEYLHKGDCLVINDTRVIPARLLGRRADTGGKIEFVLLNQIDDKRWEVLVKPGRRAQIGSVFVFGDGLLEARVLDRTPEGGRVVEFQYEGVFNEILDRVGIVPLPPYIRKQIDDPERYQTVYARHRGSVAAPTAGLHFTIPLLEKIQASGVNIVRITLHVGLGTFRPVKVDNVEEHRMHEEYYRISEEAARVINDTKVRGGRVIAVGTTSTRALESSADDSGRVHPTEKGCTDLFIYPGYKFKVVDALITNFHLPKSTLLMLVSAMCSREEILRVYQEAIKERYRFFSFGDAMLIL

SEQ ID NO: 64605 - protein, 342 aa, Caldicoprobacter oshimai; identical to SEQ ID NO: 64604
  REGION 1..342: note = tr|A0A2W4MUY6|A0A2W4MUY6_9FIRM S-adenosylmethionine:tRNA ribosyltransferase-isomerase; OS = Caldicoprobacter oshimai OX=551788 GN=queA PE=3 SV=1

SEQ ID NO: 64606 - protein, 361 aa, Caldilinea aerophila
  REGION 1..361: note = tr|I0I5J1|I0I5J1_CALAS S-adenosylmethionine:tRNA ribosyltransferase-isomerase OS=Caldilinea aerophila (strain DSM 14535 / JCM 11387 / NBRC 104270 / STL-6-O1); OX = 9265 50 GN=queA PE=3 SV=1
METALFDYELPESYIAQQPAEPRDSSRLMVLHRADGRIEHRIFREIGEYLRAGDLLVANDSRVIPARLHGRKSTGGEVEIFLLRQRDEAGKVWECLVRGRGLKEGTKVHLNEELFAEITAVTPTGARIVEFSASVHPYLDVLGEVPLPPYITQYTGDRERYQTVYSRPEGSVAAPTAGLHFTPELLMQLRQQGVLFETVTLHVGLDTFKPVQSERVEDHHIHTEWAELSSATARRINETTLAGGRIVAVGTTTVRTLEWAATAAQGLDPYDTQACPWQRVAAFMGDVSLFIYPGYRFRAVDALITNFHLPRSSLLMLVSAFIAQAHPEDVDAGRRILLNAYEEAKRTGYRFFSFGDAMLIL

SEQ ID NO: 64607 - protein, 357 aa, unidentified
  source 1..357: note = Caldilineae bacterium
  REGION 1..357: note = tr|A0A3M1HUY2|A0A3M1HUY2_9CHLR S-adenosylmethionine:tRNA ribosyltransferase-isomerase; OS = Caldilineae bacterium OX=2420332 GN=queA PE=3 SV=1
MRTADFDYELPQELIAQTPIEPRDHARMLVLNRADGAISHQHIYDLPHYLRAGDLLVLNDTRVIPARLVGRKDTGGRVEVFLLKRLADGTWEALVRGRHLTEGKKIHITGPQDQAITATIEAVGEGPLRTVSFHPAIDDILPEVGQIPLPPYIHTPLADPERYQTIFSRHEGSVAAPTAGLHFTPELMLQLRQLGVRFAYVTLHVGLDTFRPVREEDPAQHRMHREWLSIPPETARAVNETRLQGNRIVAVGTTVVRALETAAKIALGLAPCDPAPAGLACGWQTIAAWTGETDLYILPGHHFRAVDVLLTNFHLPRSTLLMLVSAFAGKANIDRAYAEAIARRYRFFSFGDAMLIL

SEQ ID NO: 64608 - protein, 357 aa, unidentified
  source 1..357: note = Caldilineae bacterium
  REGION 1..357: note = tr|A0A3M1EZ66|A0A3M1EZ66_9CHLR S-adenosylmethionine:tRNA ribosyltransferase-isomerase; OS = Caldilineae bacterium OX=2420332 GN=queA PE=3 SV=1
MRLSDFDYHLPPHLIAQKPLEPRHASRLMVVERATGRIAHRRFTDLPDYLRRGDVLVANDSRVMPARLFGRKETGGKMELLLLKRLGDRRWEALAGGKRLNEGVRFRITGGDLSGRIVEVLDGGRRVVQFDQPLSPRLHTVGHTPLPPYIHEPLADPERYQTIFSRVEGSAAAPTAGLHFSAEMLLALRQKGVALEYVTLHVGLDTFKPVEVEEIERHPIHSEWASLSAETARRINEAKLAGGRLLAVGTTAVRTLETAALRSAGVTGSLREASRLQVDLCPWRPVAAFEGQTDLYIYPGFRFRAVDMLLTNFHLPKSSLLMLVSAFGGLDLIRRAYEEAIAAEYRFYSFGDAMLVV

SEQ ID NO: 64609 - protein, 350 aa, unidentified
  source 1..350: note = Caldimicrobium thiodismutans
  REGION 1..350: note = tr|A0A2N7PKQ3|A0A2N7PKQ3_9BACT S-adenosylmethionine:tRNA ribosyltransferase-isomerase; OS = Caldimicrobium thiodismutans OX=1653476 GN=queA PE=3; SV = 1
MPQIPKEFHLDYYDYSLPENLIAYYPPKERTESKLLVIDRKTKKFYFHEKFSEIENYFQEGDLLVLNNTKVFPARIKVRKKTGGEVELLLFKKPQGFFFETEALIKGKRLKPKMELFSEDRELKITLLESLSSGKFRIRLESSNLPLETIMEKVGKAPLPPYIKREPEELDLLRYQTVFAEKEGSIAAPTAGFHFDKALLERLQNRGIRIIYITLHVGYGTFAPIKVKDIRLHRVEPEYVEVSEEAVKEVVSALEEKRRVIACGTTVTRTLEFLARKEFKPYKGLCDLYIYPPFEFKVVSALITNFHLPKSSLLLLVCAFAGRDLILKAYEEAIKRGYRFYSYGDATFII

SEQ ID NO: 64610 - protein, 350 aa, unidentified
  source 1..350: note = Caldimicrobium thiodismutans
  REGION 1..350: note = tr|A0A0U4W471|A0A0U4W471_9BACT S-adenosylmethionine:tRNA ribosyltransferase-isomerase; OS = Caldimicrobium thiodismutans OX=1653476 GN=queA PE=3; SV = 1
MTSIPPEFDINSYDYPLPEENIAYYPPKERVSSRLLVIERERGNLFFHEKFSELEVYLQEGDLLVLNDTKVFPARIKAVKKTGGIVEILLFNKPKGKSFETQGLVKGKRLKPGMSLSVPDGEIEIHLLEDLRGGRFKLRLETTGDDLERAIESIGKAPLPPYIKREPEDLDLLRYQTVFASKEGSIAAPTAGFHFDPPLLKKLKAKGVEIKFITLHVGYGTFAPIKVRDIRKHKIEPEYVEVSHETVSAIKKAKAQGRRVIGVGTTTARTLEFIAKYGLKPFKGLCDLYIYPGFEFRILSALITNFHLPRSSLLLLVCAFAGRDLILRAYKEAIQRGYRFYSYGDATFII

SEQ ID NO: 64611 - protein, 341 aa, unidentified
  source 1..341: note = Caldisalinibacter kiritimatiensis
  REGION 1..341: note = tr|R1CPR9|R1CPR9_9CLOT S-adenosylmethionine:tRNA ribosyltransferase-isomerase OS=Caldisalinibacter kiritimatiensis OX=1304284 GN=queA PE=3 SV=1
MKTRDFYFDLPEELIAQHPLKNRESSRLMVLDKNTGAIEHKVFADIIDYLNEGDCLVLNDTRVIPARLFGKREKTGGKVEFLLLNRLEGDKWETLVKPGRKAKIGTKIVFGDGLLKAKVIDIVEGGARIVKFEYDGIFEEVLDRLGEMPLPPYIKEKLEDKERYQTVYSKKEGSAAAPTAGLHFTNELLDKIKKKGVNIAYITLHVGLGTFRPVKVENIEEHDMHSEYYEISEEAAKLINETRENGGSVIAVGTTSTRTLESVAAGDGKVSAKKGWTDIFIYPGYKFKIVDKLITNFHLPESTLVMLVSALAGKENVLNAYNEAIEERYRFFSFGDAMFIK

SEQ ID NO: 64612 - protein, 342 aa, unidentified
  source 1..342: note = Caldiserica bacterium
  REGION 1..342: note = tr|A0A2H9MBA8|A0A2H9MBA8_9BACT S-adenosylmethionine:tRNA ribosyltransferase-isomerase; OS = Caldiserica bacterium CG02_land_8_20_14_3_00_36_38; OX = 1973932 GN=queA PE=3 S V=1
MNLEDLDFNLPHELIAQHPIYPRDYSKLMVLNRNTQEISHKKFYEILEFFKKGDILVLNDSKVIKARFYGSNEKTGGKREIFLLKQIDKFKWKAFASPNKRVHEGDNILISKKPLIKVKIEKKEVNEDTLIFETNNLSMEEVLKNFGEVPLPPYIKGKIEDESEYQTIYASIPGSVASPTAGLHFTEKLIKELENKGVIIEYVTLHVGPGTFKPIQEKSIEKHLMHEEEFFISEETAKNINNAKAKGGKLYACGTTVIRSLETTSTKEGILKPMDGKTKLFIKPGYNFKIVDAIITNFHFPRTTLLALVMSFSGKELVLSAYSNAIKEKYRFFSFGDAMLII

SEQ ID NO: 64613 - protein, 341 aa, Caldisericum exile
  REGION 1..341: note = tr|I0GJC5|I0GJC5_CALEA S-adenosylmethionine:tRNA ribosyltransferase-isomerase OS=Caldisericum exile (strain DSM 21853 / NBRC 104410 / AZM16c01) OX=511051 GN=queA PE= 3 SV=1
MANLDFLDYNLDKELIAQHPIYPRDHARLMVVHRDTGEIEHRKFYNIVEYLKKGDCLVLNNSKVLKARFLGTNIRTGGKREIFLLKYLSYKKWLALTSPNDRVHVGDEILVSKDPEVKVRVLLKGEFGENTVEFESALEMEEVLKYGEVPLPPYIKAKVNLEEYQTVYANLLGSVASPTAGLHFTKELLKQIEEMGVCVKYITLHVGLGTFKPIKEDDLNKHKMHEEEFFISKDTAKTVNEVKANGGRIIAVGTTVVRALETASTRNHILKPYSGSTRLFIKPGYPFKMVDALITNFHFPKTTLLALVCAFASTELTLKAYNIAVKERYRFYSFGDAMLIL

SEQ ID NO: 64614 - protein, 341 aa, Caldisericum exile
  REGION 1..341: note = tr|A0A2J6X763|A0A2J6X763_9BACT S-adenosylmethionine:tRNA ribosyltransferase-isomerase; OS = Caldisericum exile OX=693075 GN=queA PE=3 SV=1
MGNLDFLDYYLDKELIAQHPIYPRDHARLMVVHRDTGEIEHRKFYNIVEYLKKGDCLVLNNSKVLKARFLGTNRKTGGKREIFLLKYLSNKQWLALTSPNDRVHVGDEIIVSKDPEIVVKVISKGEFGENIIDFESALPMEEILKYGEVPLPPYIKAKVNLEEYQTVYASLLGSVASPTAGLHFTKELLKQIEEMGVCITYITLHVGLGTFKPIKEDDLNKHKMHEEEFFISEEAAKVINDARAIGGRIVAVGTTVVRVLETASTRNHILKPYSGSTRLFIKPGYPFKIVDALVTNFHFPKTTLLALVGAFASTELILKAYNIAVKERYRFYSFGDAMLIL

SEQ ID NO: 64615 - protein, 342 aa, Caldisericum sp.; identical to SEQ ID NO: 64612
  REGION 1..342: note = tr|A0A1J5BN93|A0A1J5BN93_9BACT S-adenosylmethionine:tRNA ribosyltransferase-isomerase; OS = Caldisericum sp. CG2_30_36_11 OX=1805053 GN=queA PE=3; SV = 1

SEQ ID NO: 64616 - protein, 339 aa, Calditerrivibrio nitroreducens
  REGION 1..339: note = tr|A0A2J6WK00|A0A2J6WK00_9BACT S-adenosylmethionine:tRNA ribosyltransferase-isomerase; OS = Calditerrivibrio nitroreducens OX=477976 GN=queA PE=3; SV = 1
MSYLLKDYDFELPEELIAQYPAEKREESNLMIVDRSKKDFFITKFKNIVDYLPEKSFLVVNNTKVLKSRIYAQKISGGRVEIFFIEKIDDRSFKAMTRGKLKDGDILKINDSITLKILGSCEDNLRIVELSGIDIYSLLDKFGHIPLPPYIKREDNSHDETRYQTVYAQNPGSVAAPTAGLHFTEELIDQIRLKHDIVEITLNVGIGTFRPVKTENIKEHQMHSEKFFIPEESFKRINSLKSQGYKLISVGTTSTRCLEAVAKDGLLQSYGESETDIFIKPGYKFQIIDHLITNFHLPKSTLFILVSTFAGLDLMKKAYTYAIEKRMRFFSYGDAMLII

SEQ ID NO: 64617 - protein, 339 aa, Calditerrivibrio nitroreducens
  REGION 1..339: note = tr|E4TJ15|E4TJ15_CALNY S-adenosylmethionine:tRNA ribosyltransferase-isomerase OS=Calditerrivibrio nitroreducens (strain DSM 19672 / NBRC 101217 / Yu37-1); OX = 768670 G N=queA PE=3 SV=1
MSHLLKDYDFELPEELIAQYPAEKREESNLMVVDRSKNDFFITKFKNIVDYLPEKSFLVVNNTKVLKSRIYAQKISGGRVEVFFIEKIDDHIFKAMTRGRLKDGDILKINDSITLKILGSCEDNLRIVELSGIDIYNLLDKFGHIPLPPYIKREDDSHDETRYQTVYAQKPGSVAAPTAGLHFTEELIERIRQKHEILEITLNVGIGTFRPVKTENIQEHQMHSEKFFIPEESFKRINLLKSNGHKLISVGTTTTRCLEAVAKDGLLQSYGESETDIFIKSGYKFQIIDHLVTNFHLPKSTLFILVSTFAGLDLMKKAYAYAIEKRMRFFSYGDAMLII

SEQ ID NO: 64618 - protein, 343 aa, Caldithrix abyssi
  REGION 1..343: note = tr|H1XP87|H1XP87_9BACT S-adenosylmethionine:tRNA ribosyltransferase-isomerase OS=Caldithrix abyssi DSM 13497 OX=880073 GN=queA PE=3 SV=1
MKLSEIKYEVPEELIAQYPLEKRDESRLMVLNRKKQSWEHRIFRDVVDYLQEGDALVVNETKVFPARVIGIKDKTDAQVELLLLRQLEDTMWEVLVKPARKVRVGNRIQITNDFGCDVIDNTTSGGRVVRFDYNGSDFFEVLGRVGTSPLPPYIKREADEIDKEYYQTVYAKKIGAVAAPTAGLHFTDELLEKIKAKGVKVVPIVLHVGLGTFRPIKVEDVTRHNMDSEYYEVPEEAAHDINEVKLNGGRIIAVGTTTVRTLETVANADNLAKASSGWTDKFIYPPYQFKLVDGMITNFHLPASTLVLLVAAFAGKDFILKAYQEAVKEKYRFYSYGDAMLIV

SEQ ID NO: 64619 - protein, 342 aa, Caldithrix sp.
  REGION 1..342: note = tr|A0A523HJW3|A0A523HJW3_9BACT S-adenosylmethionine:tRNA ribosyltransferase-isomerase; OS = Caldithrix sp. OX=1962856 GN=queA PE=3 SV=1
MKLSDFKYKLPEKLVAQFPAEKRDRSRLMVLNREQQTIEQRVFKDIVDYFEKGDCLVVNETKVFPARLMGTKDKTDAQVEIFLLRELENGLWEVLVRPARKVRVGNRLSVNDKLYCDVIDNTVSGGRVVRFNYIGDFFEIIDKIGQSPLPPYINREPEQLDKQRYQTVYSRVRGAVAAPTAGLHFTKPLLKKIEQKGVKITPIILHLGLGSFRPVVVEDLSRHKMDSEYFEVTQATADIINQTRKEGGRVFTVGTSTTRALETAVTSEGWTKPAQGWTDKFIFPPYEFKITDAMITNFHLPSSTLLILVCALAGRDFVFKAYRKAIREKYNFYSYGDAMLIV

SEQ ID NO: 64620 - protein, 342 aa, Caldithrix sp.
  REGION 1..342: note = tr|A0A523HTU7|A0A523HTU7_9BACT S-adenosylmethionine:tRNA ribosyltransferase-isomerase; OS = Caldithrix sp. OX=1962856 GN=queA PE=3 SV=1
MKLSDFKYRLSDKMIAQYPAEKRDKARLMVLNRENQTIEMKVFSDITKHFKKGDCLVINETKVFPARLMGTKDKTDAQVEIFLLRELENGLWEVLVKPARKVRVGNRLSVNNKLYCDVIDNTVSGGRVVRFNYNGDFYEIVEKIGQSPLPPYINREPEPSDKQRYQTVYSEVRGAVAAPTAGLHFTKPLLRKLEQKGVQVVRIVLHLGLGSFRQVVVEDLSRHKMDSEYYEVYAKTADVINQTRKEGGRVFAVGTSTTRALETAVTSEGYAKMGRGWTDKFIYPPYEFKVVDCLITNFHLPSSTLLMLACASGGRDFVFKAYRKAIREKFRFYSYGDAMLIE

SEQ ID NO: 64621 - protein, 241 aa, unidentified
  source 1..241: note = Calditrichaeota bacterium
  REGION 1..241: note = tr|A0A3M1AEE1|A0A3M1AEE1_9BACT S-adenosylmethionine:tRNA ribosyltransferase-isomerase (Fragment) OS=Calditrichaeota bacterium OX=2212469; GN = D6813_02875 PE=3 SV=1
MKLSDFKYKLPEKLIAQYPAEKRDQSRLMVLNREKQSIEETVFAEIHKYFNEGDCLVINETKVFPARLMGTKDKTEAKVEIFLLRQLENGLWEVLVRPARKVRVGNRLSINNKLYCDVIDNTVSGGRVVRFNYIGDFFEIVDKIGQSPLPPYIHREPEPLDKERYQTVFARVRGAVAAPTAGLHFTKELLKKIEKKGVKIVPIVLHLGLGSFRPVVVEDLSRHKMDSEYYEIPEESAEKIN

SEQ ID NO: 64622 - protein, 342 aa, unidentified
  source 1..342: note = Calditrichaeota bacterium
  REGION 1..342: note = tr|A0A3M1ADK4|A0A3M1ADK4_9BACT S-adenosylmethionine:tRNA ribosyltransferase-isomerase; OS = Calditrichaeota bacterium OX=2212469 GN=queA PE=3 SV=1
MKLSDFKYNLPEKLIAQYPSEKRDKSRLMVLDRETQKIEDKIFSDVVDYINPGDCLVINETKVFPARLMGTKDKTDAKVEIFLLRELENGLWEVLVKPARKVRVGNRLSIGNELVCDVIDNTVSGGRVVRFRYDGDFFEIVERLGQSPLPPYVKREPEPLDKERYQTVYARVRGAVAAPTAGLHFTEDILKKLRKKGVKIVPVVLHLGLGSFRPVVVEDLSRHKMDSEYYEISEESAEIINTTMKEGGKIVAVGTSTVRALETQVTSEGWVKPEKGWTDKFIYPPYEFKIVDRLITNFHLPASTLLMMVCAFAGRDFIFKAYRRAIKEKYRFYSYGDAMLIL

SEQ ID NO: 64623 - protein, 343 aa, unidentified
  source 1..343: note = Calditrichales bacterium
  REGION 1..343: note = tr|A0A524LSG1|A0A524LSG1_9BACT S-adenosylmethionine:tRNA ribosyltransferase-isomerase; OS = Calditrichales bacterium OX=2528038 GN=queA PE=3 SV=1
MKLSDFKYDLPEKLIAQYPSDKRGGSRMMVLDRNDQSIKDTNFSNVVDFLQDGDAIVLNETKVFPARLIGFKEKTNAQVEVLLLRQLEDTMWEVLVKPARKVRIGNRLVIADKIGCDVIDNTISGGRVVKFDDNGKDFFDLVEEIGDSPLPPYIKRPTEAIDKERYQTIYAKKIGAVAAPTAGLHFTDDTLSRLKAKGVEIIPLVLHVGLGTFRPVQVEDLSRHQMDSEYYELSQESAERINAVRKKGGRIIAVGTTTVRVLETVAIPDKTVKASSGWTDKFIFPPYTFKSVDGMITNFHQSQSTLYILVCTFCGYDLAKTAYEKAIKAQYKFFSYGDAMLVL

SEQ ID NO: 64624 - protein, 341 aa, Caloramator australicus
  REGION 1..341: note = tr|I7KAC6|I7KAC6_9CLOT S-adenosylmethionine:tRNA ribosyltransferase-isomerase OS=Caloramator australicus RC3 OX=857293 GN=queA PE=3 SV=1
MKVKEFYFHLPEELIAQKPLEKRDESRLMVLDRRTGEIEHKIFKEIIDFLNPGDCLVLNNSRVIPARLFGVKEDTMARAEFVLVKRLDRDRWEALVKPGKKVKTGSKFIFGNGELSCTILDNTDFGGRIIEFHYDGVFEEVLDKLGEMPLPPYIKEKLEDKERYQTVYSKVEGSAAAPTAGLHFTEELLERIKEKGINIAFLTLHVGLGTFRPVKVENIEEHKMHAEFYNLDEENAKIINETKKNGKRVIAVGTTSCRTLETIADEDGFVKASSGWTDIFIYPGYRFKILDGLITNFHLPESTLIMLVSAFAGKENIMRAYNIAVKERYRFFSFGDAMFIK

SEQ ID NO: 64625 - protein, 341 aa, Caloramator fervidus
  REGION 1..341: note = tr|A0A1H5W0R3|A0A1H5W0R3_9CLOT S-adenosylmethionine:tRNA ribosyltransferase-isomerase; OS = Caloramator fervidus OX=29344 GN=queA PE=3 SV=1
MKVKDFYFDLPQELIAQKPLEQRDMSRLMILDKTTGDIEHRIFKDIVEYLNPGDCLVLNNSRVIPARLFGVKKNTLAKVEFVLLKRIDKDKWETLVKPGKKAKIGTRFVFGNGELECTILENTDYGGRVVEFHYDGIFENVLDKLGEMPLPPYIKEKLDDKERYQTVYSKVEGSAAAPTAGLHFTNELLEKIKQKGVKIAFLTLHVGLGTFRPVKVENVEEHKMHAEFYNIDEQNAQIINQTKKEGKRVIAVGTTSCRTLETVADANGYVKASSGWTDIFIYPGYKFKIIDGLITNFHLPESTLIMLVSAFAGRENIMRAYNIAVKEKYRFFSFGDAMFIK

SEQ ID NO: 64626 - protein, 342 aa, Caloramator mitchellensis
  REGION 1..342: note = tr|A0A0R3JWT2|A0A0R3JWT2_9CLOT S-adenosylmethionine:tRNA ribosyltransferase-isomerase; OS = Caloramator mitchellensis OX=908809 GN=queA PE=3 SV=1
MMKVKDFYFDLPEELIAQEPLNERDKSRLMIIDRKSGEITHSIFRDIIDYLEAGDCLVLNNSRVIPARLFGVKDDTGARAEFVLLKRIDKDRWETLVKPGKKVKIGSSFTFGNGELRCKIIGNTDFGGRIVEFEYEGIFENVLDVLGEMPLPPYIKSKLEDKERYQTVYSKVQGSAAAPTAGLHFTEELLERIKQKGVKIAFVTLHVGLGTFRPVKVENISEHKMHEEFYNLDEENAKIINETKKSGKRIIAVGTTSCRTLETIADEDGLVKPMSGWTDIFIYPGYRFKILDGLITNFHLPESTLIMLVSAFAGKDLIMNAYETAVKERYRFFSFGDAMFIK

SEQ ID NO: 64627 - protein, 341 aa, Caloramator proteoclasticus
  REGION 1..341: note = tr|A0A1M4WTQ2|A0A1M4WTQ2_9CLOT S-adenosylmethionine:tRNA ribosyltransferase-isomerase; OS = Caloramator proteoclasticus DSM 10124 OX=1121262; GN = queA PE=3 SV=1
MNVKDFYFDLPEELIAQTPIEPRDMSRLMVLDKKTGEIEHRIFRDIIEFLNEGDCLVLNNSRVIPARLFGVKEDTGANVEFVLLKRIDKDKWETLVKPGKKARIGSKFIFGDGELRCEVLDNTESGGRIIEFKYEGVFEQILDRLGNMPLPPYIKAELKDRERYQTVYSKVEGSAAAPTAGLHFTNELLEKIKNKGVKIAYLTLHVGLGTFRPVKVENIEEHKMHSEFYMIDEENAKIINNTKKNGKRIIAVGTTSCRTLETASDENGYVKPQSGWTDIFIYPGYNFKCVDCLITNFHLPESTLIMLVSALAGREKVLNAYNTAVREKYRFFSFGDAMFIK

SEQ ID NO: 64628 - protein, 341 aa, unidentified
  source 1..341: note = Caloramator quimbayensis
  REGION 1..341: note = tr|A0A1T4WUL9|A0A1T4WUL9_9CLOT S-adenosylmethionine:tRNA ribosyltransferase-isomerase; OS = Caloramator quimbayensis OX=1147123 GN=queA PE=3 SV=1
MNVHDFYFDLPEELIAQEPLKERDSSRLLVLHREDGRIEHRIFRDVIEYLEEGDCIVLNNSRVIPARLFGVREGTGAKMEFVLLKRIDKDRWETLVKPGKKAKIGSKFIFGDGELKCTILENTQAGGRIIEFEYEGIFEHILDKLGQMPLPPYIKKQLKDKERYQTVYSKVEGSAAAPTAGLHFTEKLLGDIEKKGVKIAYVTLHVGLGTFRPVKVENIEEHKMHSEFYLIDEKNANIINETKEKGKRVFAVGTTSCRTLETASDITGKIKPQSGWTDIFIYPGYKFKIVDSLITNFHLPESTLIMLVSALSGRENIMKAYDIAVKEKYRFFSFGDAMLIL

SEQ ID NO: 64629 - protein, 341 aa, Caloramator sp.
  REGION 1..341: note = tr|A0A5B7TDS4|A0A5B7TDS4_9CLOT S-adenosylmethionine:tRNA ribosyltransferase-isomerase; OS = Caloramator sp. E03 OX=2576307 GN=queA PE=3 SV=1
MKVHDFYFELPEELIAQEPLKERDASRLLVLHREDGKIEHRIFRDIVEYLDEGDCLVLNNSRVIPARFFGVKEDTGAKMEFVLLKRIDKNRWETLVKPGKKAKIGARFLFGDGELKCTILENTEAGGRIIEFEYDGVFEEILDKLGQMPLPPYIKRQLKDKERYQTVYSKVEGSAAAPTAGLHFTKELLDRIEKKGVKIVYVTLHVGLGTFRPVKVEDIKNHKMHSEFYIIDDKTAEIINETKKKNKRVFAVGTTSCRTLETAADDNGIIHGKSGWTDIFIYPGYKFKAVDCLITNFHLPESTLIMLVSALAGREKIMEAYNIAVKERYRFFSFGDAMLII

SEQ ID NO: 64630 - protein, 341 aa, Caloranaerobacter azorensis
  REGION 1..341: note = tr|A0A096DQR6|A0A096DQR6_9CLOT S-adenosylmethionine:tRNA ribosyltransferase-isomerase; OS = Caloranaerobacter azorensis H53214 OX=1156417 GN=queA; PE = 3 SV=1
MRRQDFYFDLPEELIAQYPIEKRDSSRLMVLDKETGAIEHKEFKDIIDYLNKGDCLVLNDTRVIPARLFGKKKDTGGKIEFLLLNRVEKDKWQVLVKPGKRARIGTTFVFGDGLLKADVLDIDEEGVRIVEFKYDGIFEEVLDKLGEIPLPPYIKQKLEDRERYQTVYSKKEGSAAAPTAGLHFTDELLEKIKEKGVEIVYITLHVGLGTFRPVKVDNLDEHKMHSEFFEVSDKAANTINEIKKKGGKIIAVGTTTTRTLESSSNSEGLVIPKRGWTDIFIYPGYKFKVIDKLITNFHLPESTLIMLVSALAGRENVLRAYNIAVKEKYRFFSFGDAMLIK

SEQ ID NO: 64631 - protein, 341 aa, Caloranaerobacter azorensis
  REGION 1..341: note = tr|A0A1M5TRG3|A0A1M5TRG3_9CLOT S-adenosylmethionine:tRNA ribosyltransferase-isomerase; OS = Caloranaerobacter azorensis DSM 13643 OX=1121264; GN = queA PE=3 SV=1
MRRQDFYFDLPEELIAQYPIEKRDSSRLMVLDKKTGAIEHKEFRDIIDYLNKGDCLVLNDTRVIPARLFGQKEDTGGKIEFLLLNRVEKDKWQVLVKPGKRARIGTTFVFGDGLLKADVLDIDEEGVRIVEFKYDGIFEEVLDKLGEIPLPPYIKQKLEDRERYQTVYSKKEGSAAAPTAGLHFTDELLEKIKEKGVEIVYITLHVGLGTFRPVKVDNLDEHKMHSEFFEVSDKAANTINEIKKKGGKIIAVGTTTTRTLESSSNSEGLVVPKKGWTDIFIYPGYKFKIIDKLITNFHLPESTLIMLVSALAGRENVLRAYNIAVKEKYRFFSFGDAMLIK

SEQ ID NO: 64632 - protein, 341 aa, Caloranaerobacter sp.
  REGION 1..341: note = tr|A0A0P8V1D6|A0A0P8V1D6_9CLOT S-adenosylmethionine:tRNA ribosyltransferase-isomerase; OS = Caloranaerobacter sp. TR13 OX=1302151 GN=queA PE=3 SV=1
MRRQDFYFDLPEELIAQCPIEKRDSSRLMILDKKTGAIEHKEFKDIIDYLNEGDCLVLNDTRVIPARLFGQKEKTGGKIEFLLLSRIEKDKWEVLVKPGKRAKVGTTFVFGDGILKADVLDIGEEGIRIVEFKYDGIFEEVLDRLGEVPLPPYIKEKLEDKERYQTVYSKKEGSAAAPTAGLHFTEELLERIKEKGVEIVYITLHVGLGTFRPVKVDKLDEHKMHSEFFEVSEEAANKINEIKKKGGKIIAVGTTTTRTLESTSNNEGFVVPKKGWTDIFIYPGYKFKVIDRLITNFHLPESTLIMLVSALAGKENVLRAYNIAVKEKYRFFSFGDAMLIK

SEQ ID NO: 64633 - protein, 390 aa, unidentified
  source 1..390: note = Calothrix brevissima
  REGION 1..390: note = tr|A0A1Z4JW92|A0A1Z4JW92_9CYAN S-adenosylmethionine:tRNA ribosyltransferase-isomerase; OS = Calothrix brevissima NIES-22 OX=1973478 GN=queA PE=3; SV = 1
MKHQVTPNNINQPLNPEVTNVELDCSLAGYDYELPPELIAQNPVVPRDSSRLLVINSRSIHHIFRELPEILQSGDLLVMNNSRVIPARLYGRKSTGAEVEVLLLEERRHNCWLALVKPGKRFKRGSQIIFEPREAEAKAAISPSSPSSLTATVLETDPATGGRLLQFELPEEVSLVQVLDVFGEVPLPPYITASEADDEQYQTVYAKHPGAIAAPTAGLHFTPELLEKLRDRGINQAFITLHVGVGTFRPVEVEDVTSHQMHEEWIEVPASTVEQIRATKAAGGRIIAVGTTAVRALEGAAQSGSLQPFCGKTDLFIYPGYKWQVVEGLITNFHLPRSSLLMLVSALIGRQRLLDVYQEAIASRYRFYSFGDAMLILPEAVINLNSPRQI

SEQ ID NO: 64634 - protein, 384 aa, unidentified
  source 1..384: note = Calothrix desertica
  REGION 1..384: note = tr|A0A3S1B2M1|A0A3S1B2M1_9CYAN S-adenosylmethionine:tRNA ribosyltransferase-isomerase; OS = Calothrix desertica PCC 7102 OX=232991 GN=queA PE=3 SV=1
MQQDLEQLNFNPTSTDGEKYCDLDRSTAGYDYDLPEELIAQNPAVPRDSSKLLVVNSTSKNNISSPLHHIFRDLPDILRPGDLLIMNDTKVLSARLHGRKSTGAKLEVLLLEEREQNCWLALVKPGKRFKIGSQIFFEAPGFDGKLTATVIDSDKATGGRVLKFDVPSAQSLVQLLDTFGEVPLPPYITQSQASDEQYQTVYANTPGAVAAPTAGLHFTPELLDTLEKKGINRAFITLHVGVGTFRPVEVEDVTTHTMHSEWIEVPPATVEKIKATQQKGGRIIAVGTTVVRALEGAAAETGEIREFCGKTNLFIYPGFKWRVIEGLITNFHLPRSSLLMLVSALIGRKNLLNIYKEAINEKYRFYSFGDAMLILPEKEKSCSS

SEQ ID NO: 64635 - protein, 349 aa, unidentified
  source 1..349: note = Calothrix desertica
  REGION 1..349: note = tr|A0A3S1CS03|A0A3S1CS03_9CYAN S-adenosylmethionine:tRNA ribosyltransferase-isomerase; OS = Calothrix desertica PCC 7102 OX=232991; GN = DSM106972_026100 PE=3 SV=1
MKAPFSFTLPNELAASLPPERRGIARDHVRLMVINRDNYEVEHSKFNHLGAFLRPNDLLVFNSSRTLPAAIDGYEVTHGQLVQVRLAQHLPDDNWLALLLCQPGENFACPLQSGMQIKFSPELSAVVLERDNNIPRLWKLRFSVGGTQLIDKIYKLGQPIRYEYVSAPWDLDYYQTVYATEPGSAEMPSAGRAFTWELMFSLKRQLIQTAYITLHTGLSSYMDDELDAKHPASEEEYLISESTANKINQTRAVGGRIIAVGTTVVRALESVVDLSSKVHAGHGYTRLHVTSEHKLKAVDGLLTGLHEPEASHLDLLTGFLPKQVIRSAYEQAVKERYLWHEFGDLNLII

SEQ ID NO: 64636 - protein, 387 aa, unidentified
  source 1..387: note = Calothrix elsteri
  REGION 1..387: note = tr|A0A2A2TQ34|A0A2A2TQ34_9CYAN S-adenosylmethionine:tRNA ribosyltransferase-isomerase; OS = Calothrix elsteri CCALA 953 OX=987040 GN=queA PE=3 SV=1
MTRELKAENLDLTPILVDKYYDLERSTAGYDYQLPEELIAQNPAVPRDSSKLLVVDSTTTGEENPPLNKIFRDLPEILRSHDLLIMNDTKVIPARLYGRKSTGADVEVLLLEERQHNCWLALVKPGKRFKIGSQIFFEGRIGNDEDAQFASLTATVIDSDASTGGRVLKFNLPNGKSLVQLLDRFGEIPLPPYITNSKAADDQYQTVYAQTPGAVAAPTAGLHFTPELLEKLEQKGINRAFITLHVGVGTFRPVEVEDVTTHIMHEEWIEVPSETVEQIRATKAAGGRIIAVGTTAVRALEGATAECGGELQAFCGKTNLFIYPGYNWEVVEGLITNFHLPRSSLLMLVSALIGRERLLRIYEHAIASQYRFYSFGDAMLILPEGVS

SEQ ID NO: 64637 - protein, 403 aa, Calothrix parasitica
  REGION 1..403: note = tr|A0A1Z4LX69|A0A1Z4LX69_9CYAN S-adenosylmethionine:tRNA ribosyltransferase-isomerase; OS = Calothrix parasitica NIES-267 OX=1973488 GN=queA PE=3; SV = 1
MMNYGKSNPLNSEIDSDSSSYSLNQDSTDINLDRSLDGYDYNLPPELIAQNPVVPRDSSRLLVVDSLDTGIKYIPEHRIFRDLSVILRPHDLLVMNDTKVIPARLYGRKSTGAQIEVLLLEEKQQNCWLALVKPGKRFKKGSEIVFTAKTNNLESNNPQELVATVLETDEATGGRLLKFYVPPGMSLIQLLEVFGEVPLPPYITASEAQSQQYQTVYAENPGAVAAPTAGLHFTPELLEKLEETGINRAFVTLHVGVGTFRPVEVEDVTTHEMHGEWIEVPVETVEKIRDTKAKGGRIIAVGTTVIRALEGAAKEGELQPFCGETNLFIYPGYQWKVVEGLITNFHLPRSSLLMLVSALIGRERLLSIYREAIESRYRFYSFGDAMLILPEAVNSEQRIGNRE

SEQ ID NO: 64638 - protein, 384 aa, Calothrix sp.
  REGION 1..384: note = tr|A0A1Z4G0C6|A0A1Z4G0C6_9CYAN S-adenosylmethionine:tRNA ribosyltransferase-isomerase; OS = Calothrix sp. NIES-2098 OX=1954171 GN=queA PE=3 SV=1
MKQQITQANLNDTSNIGVEDVNLDCSLAGYDYELPPELIAQNPVLPRDSSRLLVVNSRSIHHIFRDLPEILRSGDLLIMNNTKVIPARLYGNKSTGAEIEVLLLEERQQNCWLALVKPGKRFKRGAKIIFEPRGRGTEEVISPSSLTATVLETDEATGGRLLKFELPEGVSLVQLLAEFGEIPLPPYITASQASDEQYQTVYAKTPGAIAAPTAGLHFTPELLEKLRDRGIDRAFITLHVGVGTFRPVEVEDVTSHQMHEEWIEVPASTVEQIRATKAAGGRIIAVGTTAVRALEGAAQSGDLQPYCGKTDLFIYPGYKWRVVDGLITNFHLPRSSLLMLVSALIGRERLLKIYQEAIASRYRFYSFGDAMLILPEAVTASSSQ

SEQ ID NO: 64639 - protein, 440 aa, Calothrix sp.
  REGION 1..440: note = tr|A0A1Z4NLS8|A0A1Z4NLS8_9CYAN S-adenosylmethionine:tRNA ribosyltransferase-isomerase; OS = Calothrix sp. NIES-3974 OX=2005462 GN=queA PE=3 SV=1
MPVFSLQFSYSSYIFCNLGVFQKPMQPQSSPSELASDSKQQATDLDLDHNLMGYDYELPSQMIAQNPVVPRDRSRLLVVNSPLTGVTTPPIHTIFRNLPEFLQPGDLLVMNKTKVIPARLYGYKNTGAIIEVLLLEERSRDTWLALVKPGRRFKIGSQIMFVPPGVIHQSKGETEDLDWDDGEENQLPEFDPNQSYLKATVIDSDANTGGRILQFDLPGGVSSLIEILHQYGEIPLPPYIKNSTARDEQYQTVYADTPGSVAAPTAGLHFTPELLENLQKMDVGQAFVTLHVGVGTFRPVEVEDVTTHVMHEEWIEVTQETVDQVRSTLAQGGRIIAVGTTAVRSLEGAASISGELQAYCGKTNLFIYPGYKWRVVDGLITNFHLPRSSLMMLVSALIGRKRLLNLYQEAIRQEYRFYSFGDAMLILPEGREYKKLVCNS

SEQ ID NO: 64640 - protein, 394 aa, Camelimonas lactis
  REGION 1..394: note = tr|A0A4R2GQH3|A0A4R2GQH3_9RHIZ S-adenosylmethionine:tRNA ribosyltransferase-isomerase; OS = Camelimonas lactis OX=659006 GN=queA PE=3 SV=1
MCFVFENQHFRKPLRVKVDLFDFELPESAIAVRPAEPRDAARLLRVVPSQDGASPELTDWQVHDLPGLLRPGDLLVLNDTRVIPARLSGLRLRGDNASRIEATLHMREAPDAWRAFARPAKRLAVGDLIRFGAQGASADDHGAACALGQLEARVEEKGESGEVLLRFSLSGAYLDEALELVGVMPLPPYIASKRPEDARDRLDYQTVYAREDGAVAAPTAGLHMTPRLFDDLKAAGVDHAFVTLHVGAGTFLPVKADDTDDHRMHAERGVISAETAARIAATRAAGGRIVAVGTTSLRLLESAAAADPQGAVRAWSGATDIFITPGFQFRAVDVLMTNFHLPRSTLFMLVSAFSGLPAMRAAYAHAIAAGYRFYSYGDASLLFRADAGATAPSI

SEQ ID NO: 64641 - protein, 340 aa, Caminibacter mediatlanticus
  REGION 1..340: note = tr|A0A4P9DY09|A0A4P9DY09_9PROT S-adenosylmethionine:tRNA ribosyltransferase-isomerase; OS = Caminibacter mediatlanticus TB-2 OX=391592 GN=queA PE=3; SV = 1
MESDLLVSNYDYDLPEELIAKYPITPRDEAKLLVYDRKKDKIIHTKFKNILDFVGDKRFIFNDTKVIKARIFGKKESGGRVELLLNRPFNNDFLVYIRGKVKRGTKLFFDRGLVAEVKELLEDGSRIVKFKCKMKNGEWKILDFYELVNILEEIGHIPLPPYIKRKDEEIDEKEYQTIFAKKEGAVAAPTASLHFTKNLLDKIEKKAYLTLHVGAGTFKPVEVEDIRFHKMHSEFFEIPKNTAKILDSNEEIVAVGTTATRTIEYYARTKKLKGECDLFLHPLNPPIRVNHLITNFHLPKSTLIMLVASFIGRKKTLEIYEIAKKEKYRFYSYGDAMLII

SEQ ID NO: 64642 - protein, 340 aa, Caminicella sporogenes
  REGION 1..340: note = tr|A0A1M6M242|A0A1M6M242_9CLOT S-adenosylmethionine:tRNA ribosyltransferase-isomerase; OS = Caminicella sporogenes DSM 14501 OX=1121266 GN=queA; PE = 3 SV=1
MKTSDFYFDLPQELIAQVPLEKRDMSRLMVLDKKTGDVEHKIFKDIIEYLDEGDCLVLNDTRVIPARLFGQKDTGANVEFLLLRRIDKDRWQTLVKPGKRAKVGSKFTFGDGELRGEIVDLAEEGTRIIKFSYEGIFEEVLDKLGNMPLPPYITEKLEDRERYQTVYSKHSGSAAAPTAGLHFTENLLKKIKDKGVKIAFITLHVGLGTFRPVKVENINEHKMHSEFYIVSKETADIINETKKNGGKIISVGTTATRALETAASDNGHMKECSGWTDIFIYPGYRFKVIDRLITNFHLPESTLIMLVSALAGRENVLNAYKIAVKEKYRFFSFGDAMFIK

SEQ ID NO: 64643 - protein, 342 aa, Campylobacter avium
  REGION 1..342: note = tr|A0A222MWF3|A0A222MWF3_9PROT S-adenosylmethionine:tRNA ribosyltransferase-isomerase; OS = Campylobacter avium LMG 24591 OX=522484 GN=queA PE=3; SV = 1
MKIMLNEDLLLKNYDYKLDESLIAKYPVLPKEEARLLVYYRKTDELKHLKFKDLNQILPQCSIIFNDSKVIKARIYGHKISGAKVELFFHKALNNFEFIVQLRARVKKDDVLLFAEGLKARVIELLPDGLRKVEFFKEKKLEHKELLEFLEKNGHIPLPPYIKRADEKADEKEYQSIFAKNLGSVAAPTASLHFSKELLKELEKKHKLYYLSLHIGAGTFKNVECENINEHKMHEEAFFIDENLEKILLSEEKILAVGTTVARTIENFQRTGQKTGLCSLFLHPKNPPQRIDYLLTNFHLPKSSLIMLVSAFIGRKKTLELYELAMKERYRFYSYGDAMLIL

SEQ ID NO: 64644 - protein, 339 aa, unidentified
  source 1..339: note = Campylobacter blaseri
  REGION 1..339: note = tr|A0A2P8R212|A0A2P8R212_9PROT S-adenosylmethionine:tRNA ribosyltransferase-isomerase; OS = Campylobacter blaseri OX=2042961 GN=queA PE=3 SV=1
MNDLDLISSYDYELPKELISSKPTLPKENARLLVYDRKKDLISHYKFGDLVEILPPCDIIFNDTKVVKARVYGVKDTGGKVELLLNTPLEDSKFNVYIKGHVKIGTILNFNKNLKAKVIEINSDGTRIVSFSFKNSPLSTDEIFNFFNNIGHIPLPPYIKRDDNNDDEIWYQSIFAKHLGAVAAPTASLHFSDEMANELKKTHELHYLTLHVGAGTFKAIKCENIHEHNMHSEYFNIPSKTAEILKTNKPILGVGTTVTRVVEEFARNGKQNGYCKLFLNHSNRPIRLNYLLTNFHLPKSTLIMLVSSFLGLEKTMEIYEIAIKERYKFYSYGDGMLIL

SEQ ID NO: 64645 - protein, 341 aa, Campylobacter coli
  REGION 1..341: note = tr|W8KZN7|W8KZN7_CAMCO S-adenosylmethionine:tRNA ribosyltransferase-isomerase OS=Campylobacter coli RM4661; OX = 1183379 GN=queA PE=3 SV=1
MKDLLLSSYDYTLPNELIATYPVHPKEDAKLLVFERKNNQISHTTFKNLQDFLPDCALFFNDTKVIKARIYGNKSSGGKIELFLHQPCLDSQDSLFLAQIKGRVKKDEILSFEQNLKVKVIELLDDGLRKVHFFQNDEVLNTFKLYELLDTIGHIPLPPYIKRSDEKSDLEDYQSIFAKNLGAVAAPTASLHFSENMLENLKKRHEIYHLTLHVGAGTFKSVECENLENHKMHSEFFDIPRKACEAIDSQKKILGVGTTVTRTIEYYARTKQNQGFCDLFLHPHNPPLRQDYLLTNFHLPKSTLIMLVSAFIGRQNCLKLYDIAIKEKYRFYSYGDAMLIL

SEQ ID NO: 64646 - protein, 341 aa, Campylobacter coli; identical to SEQ ID NO: 64645
  REGION 1..341: note = tr|A0A3Z9WH51|A0A3Z9WH51_CAMCO S-adenosylmethionine:tRNA ribosyltransferase-isomerase; OS = Campylobacter coli OX=195 GN=queA PE=3 SV=1

SEQ ID NO: 64647 - protein, 352 aa, Campylobacter concisus
  REGION 1..352: note = tr|U2EF33|U2EF33_9PROT S-adenosylmethionine:tRNA ribosyltransferase-isomerase OS=Campylobacter concisus UNSW3 OX=1242966 GN=queA PE=3 SV=1
MNKIATQTATQAMSDINDISSYDYFLPNELIAKEPVLPKEEARLLVYFKKTKEIKHYKFKDLSSLIPEDAAVIFNNTKVVKARILGHKQSGGACEVMLNQPLNDNKFSVYIRGRVSVGSILNFADSINVNVLELNDDGSRVVNFTKDGVILDTARLFSELEKIGHVPLPPYIKRADTKDDESWYQSIFAKNSGAVAAPTASLHFSEQMLEQIKAKHEVAYITLHVGAGTFKGVECQNINDHKMHSEFYELSKKAQEIINSNKPILGVGTTVTRCVEEFARSKQPSGFCKLFLNLNNRPIRQNYLLTNFHLPKSTLIMLVTSFIGLEETMRIYKTAVSEKYRFYSYGDGMLVI

SEQ ID NO: 64648 - protein, 340 aa, Campylobacter concisus
  REGION 1..340: note = sp|A8Z6M6|QUEA_CAMC1 S-adenosylmethionine:tRNA ribosyltransferase-isomerase OS=Campylobacter concisus (strain 13826) OX=360104 GN=queA PE=3 SV=1
MSDINDISSYDYFLPEMLIAKEPVLPKEEARLLVYLKKTKEIKHYKFKDLASLIPDDAAVIFNNTKVIKARILGHKQSGGACEVMLNQPLGDNKFSVYVRGRVSVGSVLNFADDIKVNVLELNDDGSRVVNFTKNGVILDTAQLFSELEKIGHVPLPPYIKRADTKDDESWYQSIFAKNSGAVAAPTASLHFSEQMLERIKAKHDIAYITLHVGAGTFKGVECQNINDHKMHSEFYELSEKAQEIISSNKPILGVGTTVTRCVEEFARSKQSSGFCKLFLNLNNKPIRQNYLLTNFHLPKSTLIMLVTSFIGLEETMRIYETAVSEKYRFYSYGDGMLVI

SEQ ID NO: 64649 - protein, 339 aa, Campylobacter cuniculorum
  REGION 1..339: note = tr|A0A1W6BWJ4|A0A1W6BWJ4_9PROT S-adenosylmethionine:tRNA ribosyltransferase-isomerase; OS = Campylobacter cuniculorum DSM 23162 = LMG 24588; OX = 1121267 GN=queA PE=3 SV=1
MHKDLKLHNYDYHLPKELIATYPITPKEDAKLLIYERKKDKITHTYFGKLPEFLPPCAIFFNDTKVIKARIFGTKTSGAKIELFLHQAYTEFEFLVQIKGRVKAGEILSFEKNLQAEILELLKDGRRKVRFKQNHTFLDSTKLYELLNLIGHIPLPPYIKRKDELSDESDYQSIFAKNLGAVAAPTASLHFSQEMLNLLKQKHEIYYLTLHIGAGTFKNVECENLKEHIMHTESFFIDDKAAKLIKSKTPILGVGTTTTRSIEYFFRTGIQSGTCDLFLHPFNKPLRQNYLLTNFHLPKSTLIMLVSSFIGREKTLELYKIAIEKRYRFYSYGDAMLIL

SEQ ID NO: 64650 - protein, 343 aa, Campylobacter curvus
  REGION 1..343: note = tr|A7GXR3|A7GXR3_CAMC5 S-adenosylmethionine:tRNA ribosyltransferase-isomerase OS=Campylobacter curvus (strain 525.92) OX=360105 GN=queA PE=3 SV=1
MQTNKDINDISSYDYDLPKELIANEPVLPKEQARLLVYFRQTGNIEHLKFKDLCELIPGDTAVVFNDTKVIKARILGHKRSGGACEVMLNQPLGDAKFSCYVKGRVSAGKILEFADGVSAEILELNSDGTRIVEFSKNGVSLDTAMLFKELEKIGHIPLPPYIKRADTKEDESWYQSVFAAHSGAVAAPTASLHFSEDMLKRIKAKHESAYLTLHVGAGTFKGVECEDIRSHVMHSEFYEIPQDTQELINSDKKILGVGTTVTRCVEEFARSKNASGFCKLFLNLNNPPIRQNYLLTNFHLPKSTLIMLVTSFIGLDETMRIYKAAIEEKYRFYSYGDGMLVL

SEQ ID NO: 64651 - protein, 339 aa, Campylobacter fetus
  REGION 1..339: note = tr|A0A0E1GIV4|A0A0E1GIV4_CAMFE S-adenosylmethionine:tRNA ribosyltransferase-isomerase; OS = Campylobacter fetus subsp. fetus 04/554 OX=1240980; GN = queA PE=3 SV=1
MSDIFSLSSYDYKLPQDLIAAAPTMPKEEARLLVYDRQKDSVCHLKFKNLSEILPECAIIFNDTKVIKARIYGRKDSGAEIQMLLNQPLQNSLFSCYIRGKVKVGTKLKFDLGVEAEVLELKDDSSRIVKFKKNEQILNTSEIYNILSHIGHVPLPPYIKREDTPDDEIWYQSIFAKNEGAVAAPTASLHFNDQMLDDLNKTHDISYITLHVGAGTFKGVEHCDIREHKMHSEFYCISKKAKNIIDSDIKLLGVGTTVTRCIEYYYRTKQPKGFCDLFLHPDNKPLRQDFLLTNFHLPKSTLIMLVASFIGLEKTMEIYKQAVENRYKFYSYGDGMLII

SEQ ID NO: 64652 - protein, 339 aa, Campylobacter fetus
  REGION 1..339: note = sp|A0RPZ6|QUEA_CAMFF S-adenosylmethionine:tRNA ribosyltransferase-isomerase OS=Campylobacter fetus subsp. fetus (strain 82-40) OX=360106 GN=queA PE=3 SV=1
MSDIFSLSSYDYKLPQDLIATAPTMPKEEARLLVYDRQKDSVFHLKFKNLSEILPECAIIFNDTKVIKARIYGRKDSGAEIQMLLNQPLQNSLFSCYIRGKVKVGTKLKFDLGVEAEVLELKDDSSRIVKFKKNEQILNTSEIYNILSHIGHVPLPPYIKREDTPDDEIWYQSIFAKNEGAVAAPTASLHFNDQMLDDLNKTHDISYITLHVGAGTFKGVEHCDIREHKMHSEFYCISKKAKNIIDSDIKLLGVGTTVTRCIEYYYRTKQPKGFCDLFLHPDNKPLRQDFLLTNFHLPKSTLIMLVASFIGLEKTMEIYKQAVENRYKFYSYGDGMLII

SEQ ID NO: 64653 - protein, 338 aa, unidentified
  source 1..338: note = Campylobacter geochelonis
  REGION 1..338: note = tr|A0A128EE12|A0A128EE12_9PROT S-adenosylmethionine:tRNA ribosyltransferase-isomerase; OS = Campylobacter geochelonis OX=1780362 GN=queA PE=3 SV=1
MSDINSLSSYDYELPARLIANKPVLPKESAKLLVYERKSGEISHLTFGDLSKILPPCDVVFNDTKVIKARIYGKKESGGKIELLLNSPLQDAFSAFIKGRVKVGSVLEFDEGLKAIVKELLDDGSRVVQFFANSKALDTSEIYQICEKIGHVPLPPYIKRQDSKEDESWYQSIFAKNNGAVAAPTASLHFSDEMILELKKTHDIHYLTLHVGAGTFKGVENDDITKHTMHSEFYHIPQDTAHVLDSDTPILGVGTTVTRCVENYARDGRLDGACKLFLNLNNKPIRQNYLLTNFHLPKSTLIMLVSAFIGLEKTMEIYKIAIENNYRFYSYGDGMLII

SEQ ID NO: 64654 - protein, 339 aa, Campylobacter gracilis
  REGION 1..339: note = tr|C8PLH2|C8PLH2_9PROT S-adenosylmethionine:tRNA ribosyltransferase-isomerase OS=Campylobacter gracilis RM3268 OX=553220 GN=queA PE=3 SV=1
MADLNLVGSYDYELPSELIASAPVMPKQSARLLIYDRAKQQITHAHFGDLADALPPCDIIFNDTRVIKARLFGHKNSGGKIELLLNSPLEGNKFSAYIRGSVKVGSELKFQSGLEARVCELMEGGLRIVQFECGGKALNTHDVFEICERIGHVPLPPYIKRADTKQDVSWYQSIFAREQGAVAAPTASLHFNDAMLNDLRKRHEIYFITLHVGAGTFKPVEVADLREHKMHGELYSIPPQTTQILKSERKILGVGTTVTRTIENFARNGQSSGICELFLHPGNPPIRQNFLLTNFHLPKSTLIMLVASFIGLERTLELYRIAVEKRYRFYSYGDGMLVL

SEQ ID NO: 64655 - protein, 339 aa, Campylobacter helveticus
  REGION 1..339: note = tr|A0A1V0RF72|A0A1V0RF72_9PROT S-adenosylmethionine:tRNA ribosyltransferase-isomerase; OS = Campylobacter helveticus OX=28898 GN=queA PE=3 SV=1
MHEDLKLCNYDYFLPKEQIASHPIYPKEAAKLLIYEREKDKVTHSHFANLMHFLPDCAIFFNDTKVIKARIYGKKESGGKIELFLHSSVGEFEFIAQIKGKVKKDEILYFEKGLSAEILELYDDGLRKVCFRQNETTLSTPALYALLEKIGHIPLPPYIKRADTLKDESDYQSIFAKNLGAVAAPTASLHFSKMMLEELKKRHEIHTLTLHIGAGTFKSVECEDIREHKMHSEIFHIDENAKACIDSKKAILGVGTTATRSIEHYARSGICSGKCDLFLHPLNRPIRQNFLLTNFHLPKSTLIMLVSAFIGREKTLALYKEAIELNYRFYSYGDAMLII

SEQ ID NO: 64656 - protein, 339 aa, unidentified
  source 1..339: note = Campylobacter hepaticus
  REGION 1..339: note = tr|A0A424Z109|A0A424Z109_9PROT S-adenosylmethionine:tRNA ribosyltransferase-isomerase; OS = Campylobacter hepaticus OX=1813019 GN=queA PE=3 SV=1
MKDLLLSSYDYNLANDLIALYPSYPKEDTKLLVFKRANSKITHTTFRNLQDFLPDCAIFFNDTKVIKARIYGTKKSGAKIELFLHQNFHTQDLFLVQIKGRVKQDEILYFQENLQAQIIELLDNGFRKVQFFQNNKIINTSSLYQILDKIGHIPLPPYIKRKDENSDLQDYQSIFAKNLGAIAAPTASLHFNQNILKKLSQKHKFYHLTLHVGAGTFKSVECENIKDHHMHSEFFNIPKNACKVIDSTQAILGVGTTVTRSIEYYARTKQNKGFCDLFLHPNNPPIRQNYLLTNFHLPKSTLIMLVSAFIGREQCLKLYELAMKEKYRFYSYGDAMLIL

SEQ ID NO: 64657 - protein, 340 aa, Campylobacter hominis
  REGION 1..340: note = tr|A7I2A8|A7I2A8_CAMHC S-adenosylmethionine:tRNA ribosyltransferase-isomerase OS=Campylobacter hominis (strain ATCC BAA-381 / LMG 19568 / NCTC 13146 / CH001A); OX = 360 107 GN=queA PE=3 SV=1
MLIDLDLVESYDYELPRELIANAPVMPKEAARLLVYNRANGEISHLHFGDLAEILPDCAIIFNDTKVIKARIFGHKDSGGKIELLLNSPLGEGKFSVYVRGSVKIGAILEFDKNLKAEILELFDDGLRVARFSQNSHILETHELFKILDEIGHVPLPPYIKRADTKDDESWYQTIFAKNEGAVAAPTASLHFSDEMLADLKAKHDIYYLTLHVGAGTFKPVEVANIKDHKMHGEYYSIPERTAKLLDSEREILGVGTTCTRTIEFYARTHKIGGICELFLHPNNPPIRQNHLLTNFHLPKSTLIMLVASFIGLEKTLELYKIAVEKKYRFYSYGDGMLIL

SEQ ID NO: 64658 - protein, 340 aa, Campylobacter hyointestinalis
  REGION 1..340: note = tr|A0A381CLS8|A0A381CLS8_CAMHY S-adenosylmethionine:tRNA ribosyltransferase-isomerase; OS = Campylobacter hyointestinalis OX=198 GN=queA PE=3 SV=1
MNNQVFALSSYDYELPSDLIATSPTIPKEDGKLLVYDRNKDQIFHYKFGDLAKILPPCNIIFNDTKVIKARIYGTKQSGGKIELLLNSPLNDNKFSCYIKGKTSVHTILNFDLNLKAEVLELGDDASRVVRFTKDGKVITISELYEILASIGHVPLPPYIKREDSKDDENWYQSIFAKNPGAVAAPTASLHFSPEMLTNLKKNHEISYITLHVGAGTFKGVGSDDIRDHKMHSEFYDIPKNTEGIINSNAKILGVGTTVTRCIEYYARTKQANGFCDLFLHPQNRPQRQDYLLTNFHLPKSTLIMLVASFIGLEKTMEIYKIAVENRYKFYSYGDSMLII

SEQ ID NO: 64659 - protein, 344 aa, Campylobacter hyointestinalis
  REGION 1..344: note = tr|A0A2S5J718|A0A2S5J718_CAMHY S-adenosylmethionine:tRNA ribosyltransferase-isomerase; OS = Campylobacter hyointestinalis subsp. hyointestinalis; OX = 91352 GN=queA PE=3 S V=1
MSKKMNNQVFALSSYDYKLPSDLIATSPTIPKEDGKLLVYDRNKDQIFHYKFGDLAKILPPCNIIFNDTKVIKARIYGTKQSGGKIELLLNSPLNDNKFSCYIKGKTSVHTILNFDLNLKAEVLELGDDASRVVRFTKDGKVITISELYEILASIGHVPLPPYIKREDSKDDENWYQSIFAKNPGAVAAPTASLHFSPEMLTNLKKNHEISYITLHVGAGTFKGVGSDDIRDHKMHSEFYDIPKNTEGIINSNAKILGVGTTVTRCIEYYARTKQANGFCDLFLHPQNRPQRQDYLLTNFHLPKSTLIMLVASFIGLEKTMEIYKIAVENRYKFYSYGDSMLII

SEQ ID NO: 64660 - protein, 338 aa, unidentified
  source 1..338: note = Campylobacter iguaniorum
  REGION 1..338: note = tr|A0A076F9W3|A0A076F9W3_9PROT S-adenosylmethionine:tRNA ribosyltransferase-isomerase; OS = Campylobacter iguaniorum OX=1244531 GN=queA PE=3 SV=1
MNSIFDISSYDYELPKELIANAPTLPKEDARLLVYDRKNDKISHLKFKNLSEILPPCDIIFNDTKVVKARIFGKKDSGASIELLLNSPLNDNKFSCYIRGKVREQTRLYFDDLEAEVLELFEDGSRIVKFSQNQKELCVSELYEILEHIGHVPLPPYIKRADQKEDESWYQSIFAKNQGAVAAPTASLHFDEKILNELKQNHNISYITLHVGAGTFKGVEASDIREHKMHSEFYDIPNLAADLISSNKPILGVGTTVTRSVEYFARTKQKSGFCNLFLNPDNRPIRQNYLLTNFHLPKSTLIMLVASFIGLEKTMELYKIAVENRYKFYSYGDGMLII

SEQ ID NO: 64661 - protein, 339 aa, Campylobacter insulaenigrae
  REGION 1..339: note = tr|A0A0A8H0B4|A0A0A8H0B4_9PROT S-adenosylmethionine:tRNA ribosyltransferase-isomerase; OS = Campylobacter insulaenigrae NCTC 12927 OX=1031564; GN = queA PE=3 SV=1
MSEDFLLSNYDYTLPNELIANFPILPKENARLLVYIRKKNEILHLHFKDLASILPPCAIVFNDTKVIKARIYGQKETGSKIELFINNPFKNDTFAVQIKGKVKENQELYFKENLKAKVLKLNDDGTRIVEFFSKNIKLKHHQVFSILDCIGHIPLPPYIKRADQDSDIINYQSIFAKKEGAVAAPTASLHFSEEMIQNLRKKHDIYTTTLHVGAGTFKSVECQDLRAHKMHSEYFHIDKNTCNLINSKEKLLAIGTTVTRCIEYYIRTKKNEGFCDLFLHPQNKIQRVDYLLTNFHLPKSTLIMLVASFIGRKTTLEIYQEAIDKKYRFYSYGDGMLII

SEQ ID NO: 64662 - protein, 342 aa, Campylobacter jejuni
  REGION 1..342: note = sp|Q9PHT9|QUEA_CAMJE S-adenosylmethionine:tRNA ribosyltransferase-isomerase OS=Campylobacter jejuni subsp. jejuni serotype O:2 (strain ATCC 700819 / NCTC 11168) OX=1 92222 GN=queA PE=3 SV=1
MNKDLLLSSYDYTLANELIANYPTNPKEDARLLVFDRKNKEIFHTTFKNLQDFLPNCAIFFNDTKVIKARIYGNKASGGKIELFLHQPFLNSHNPLFLAQIKGRIKKDEILYFKEDLKVRVVELLNDGLRKVQFFQNDKTLDTSNLYNLLDKIGHIPLPPYIKREDEKSDLKDYQSIFAKNLGAVAAPTASLHFSETMLENLRKKHEIYHLTLHVGAGTFKSVECENIQEHKMHSEFFNIPQQACEIIDSKQAILGVGTTVTRTIEYYTRTKTKNGFCDLFLHPQNPPIRQNHLLTNFHLPKSTLIMLVSAFIGREQCLKLYELAIKEKYRFYSYGDAMLIL

SEQ ID NO: 64663 - protein, 342 aa, Campylobacter jejuni
  REGION 1..342: note = sp|A1VYT7|QUEA_CAMJJ S-adenosylmethionine:tRNA ribosyltransferase-isomerase OS=Campylobacter jejuni subsp. jejuni serotype O:23/36 (strain 81-176) OX=354242; GN = queAPE=3 SV=1
MNKDLLLSSYDYTLANELIANYPANPKEDARLLVFDRKNKEIFHTTFKNLKDFLPDCAIFFNDTKVIKARIYGNKASGGKIELFLHQPFLNSHNPLFLAQIKGRVKKDEILYFKEDLKARVVELLDDGLRKVQFFQNDKTLDTSNLYNLLDKIGHIPLPPYIKREDEKSDLKDYQSIFAKNLGAVAAPTASLHFSETMFENLRKKHKIYHLTLHVGAGTFKGVECENIQEHKMHSEFFNIPQQACEIIDSKQAILGVGTTVTRTIEYYARTKTKSGFCDLFLHPQNPPIRQNHLLTNFHLPKSTLIMLVSAFIGREQCLKLYKLAIKEKYRFYSYGDAMLIL

SEQ ID NO: 64664 - protein, 340 aa, Campylobacter lanienae
  REGION 1..340: note = tr|A0A381D9W2|A0A381D9W2_9PROT S-adenosylmethionine:tRNA ribosyltransferase-isomerase; OS = Campylobacter lanienae OX=75658 GN=queA PE=3 SV=1
MMKNNIFDLDSYDYELPSSLIASSPANPKESANLLVYQRSNNKITHTKFGNLMEFLPDCDIIFNDTKVIKARIYGKKSSGGAVELLLNQPLGQGKFSTLIKGRVKAGTILEFDNGLSCEVIELLDEYRIVKFNQNGNEIKTENLYQILNQIGHIPLPPYIKRADQKSDEIWYQSIFAKNDGAVAAPTASLHFSQQMIQDIKNKHNISYITLHVGAGTFKGVEVSDIREHKMHSEIYTISDEAINTINSNKPILGVGTTVTRCIEYFYRTRVKDGLCDLFLHPANPPQRQNYLLTNFHLPKSTLIMLVASFVGLENVKQIYKQAIEKEYKFYSYGDAMLVI

SEQ ID NO: 64665 - protein, 338 aa, Campylobacter lanienae
  REGION 1..338: note = tr|A0A562Y546|A0A562Y546_9PROT S-adenosylmethionine:tRNA ribosyltransferase-isomerase; OS = Campylobacter lanienae OX=75658 GN=queA PE=3 SV=1
MSDIFALSSYDYELPSHLIATTPAKPKESANLLIYDRSNSKITHTKFGNLMEFLPPCDIIFNDTKVIKARIYGKKSSGGAVELLLNQPLGDGKFSTLIKGRIKAGSVLEFDNGLSCEICDILNEYRVVKFYKNSKLLDTPNLYQILDQIGHIPLPPYIKRDDEKSDEIWYQSVFAKNSGAVAAPTASLHFSDEMIENLKSKHNISYITLHVGAGTFKSVESSDIREHKIHSEIYSMSDQAIQAINSDRAILGVGTTVTRCVEYFYKNGVKNGLCDLFLHPANPPKRQNYLLTNFHLPKSTLIMLVASFVGLDNVKEIYKQAIEKEYKFYSYGDAMLVI

SEQ ID NO: 64666 - protein, 342 aa, Campylobacter lari
  REGION 1..342: note = tr|A0A0A8H4T7|A0A0A8H4T7_CAMLA S-adenosylmethionine:tRNA ribosyltransferase-isomerase; OS = Campylobacter lari subsp. concheus LMG 11760 OX=1031536; GN = queA PE=3 SV=1
MKMIDKDLLLSSYDYDLPNELIANFPILPKENAKLLVYERCKDQISHLHFKDLARILPPCEIIFNDTKVIKARIYGNKESGSKIELFINHPLKNNKFLVQIRGKVKEGQILYFENSLKAKIKKLHDDGTREVEFFNDEKELSHHEVFEVLEKIGHIPLPPYIKRADEVQDSINYQSIFAKNQGAVAAPTASLHFDEAMINELKKNHNIHTITLHVGAGTFKGVECEDIRDHKMHSEFFHIDNETCALIDSSKKILGVGTTVTRCIEYYHRKKLKEGFCDLFLHPQNTPQRLDYLLTNFHLPKSTLIMLVAAFIGREKTLELYYEAIKNNYRFYSYGDGMLII

SEQ ID NO: 64667 - protein, 342 aa, Campylobacter lari
  REGION 1..342: note = tr|A0A0A8HVW0|A0A0A8HVW0_CAMLA S-adenosylmethionine:tRNA ribosyltransferase-isomerase; OS = Campylobacter lari NCTC 11845 OX=1388749 GN=queA PE=3; SV = 1
MKMIDKDLLLSSYDYNLPNQLIANFPILPKENAKLLVYERYKDQISHLHFKNLAKILPPCEIIFNDTKVIKARIYGTKESGSKIELFINHPLKNNDFLVQIRGKVKEGQILYFENSLKIKIKKLHSDGTREVEFFNDEKKLNHHEVFKILEKIGHIPLPPYIKRADEAQDSINYQSIFAKNQGAVAAPTASLHFDEAMIDELKKNHNIHTITLHVGAGTFKGVECEDIREHKMHSEFFHIDDETCALIDSSKKILGVGTTVTRCIEYYHRKKIKEGFCDLFLHPQNTPQRLDYLLTNFHLPKSTLIMLVAAFIGREKTLELYHEAIKNNYRFYSYGDGMLII

SEQ ID NO: 64668 - protein, 340 aa, unidentified
  source 1..340: note = Campylobacter ornithocola
  REGION 1..340: note = tr|A0A1C2FTL1|A0A1C2FTL1_9PROT S-adenosylmethionine:tRNA ribosyltransferase-isomerase; OS = Campylobacter ornithocola OX=1848766 GN=queA PE=3 SV=1
MINKDLLLSSYDYDLPSELVANFPILPKENAKLLVYERCKDQISHLHFKDLAKILPPCEIIFNDTKVIKARIYGTKESGSKIELFINHPLKNNDFLVQIRGKVKEGQILYFENSLKVKIKKLHDDGTREVEFFNGDKKLNHHEVFEILEKIGHVPLPPYIKRSDEAQDNINYQSIFAKNQGAVAAPTASLHFDEAMIDGLKINHNIHTITLHVGAGTFKGVECEDIREHKMHSEFFHIDDEVCALINSSKKILGVGTTVTRCIEYYHRKKTKEGFCDLFLHPQNTPQRLDYLLTNFHLPKSTLIMLVAAFMGREKTLELYHKAIENNYRFYSYGDGMLII

SEQ ID NO: 64669 - protein, 340 aa, Campylobacter peloridis
  REGION 1..340: note = tr|A0A5C7DZV1|A0A5C7DZV1_9PROT S-adenosylmethionine:tRNA ribosyltransferase-isomerase; OS = Campylobacter peloridis OX=488546 GN=queA PE=3 SV=1
MIDKDLLLSSYDYNLPNNLIANFPILPKENAKLLVYKRYKDQISHLHFKDLVKILPPCAIVFNDTKVIKARIYGYKESSSKVELFINHPLKNNDFLVQIRGKVKEGQILYFENSLKAKIKKLHDDGTREVEFFINEKELNHHEVFEILEKIGHVPLPPYIKRADEEQDNINYQSIFAKNQGAVAAPTASLHFDETMINELKKNHDIYTITLHVGAGTFKGVECEDIREHKMHSEFFHIDDKTCALIDSSKKILGVGTTVTRCIEYYHRKKIKEGFCDLFLHPQNTPQRLDYLLTNFHLPKSTLIMLVASFIGREKTLELYYEAIKNNYRFYSYGDGMLII

SEQ ID NO: 64670 - protein, 342 aa, Campylobacter peloridis
  REGION 1..342: note = tr|A0A0A8GRQ6|A0A0A8GRQ6_9PROT S-adenosylmethionine:tRNA ribosyltransferase-isomerase; OS = Campylobacter peloridis LMG 23910 OX=1388753 GN=queA; PE = 3 SV=1
MKMTNKDLLLSSYDYNLPNNLIANFPILPKENAKLLVYERYKDQISHLHFKDLVKILPPCVIVFNDTKVIKARIYGKKENGNKIELFINHPLKNNDFLVQIRGKVKEDQELYFDNSLKAKIKKLRNDGTREVEFFINEKKLNHHEVFEILEKIGHVPLPPYIKRADEEQDNINYQSIFAKNQGAVAAPTASLHFDETMIKKLKENHDIYTITLHVGAGTFKGVECEDIREHKMHSEFFYIDDKTCTLIDSSKKILAIGTTVTRCIEYYFRQKRNEGFCDLFLHPQNTPQRIDYLLTNFHLPKSTLIMLVASFIGREKTLELYHEAIKNNYRFYSYGDGMLII

SEQ ID NO: 64671 - protein, 339 aa, unidentified
  source 1..339: note = Campylobacter pinnipediorum
  REGION 1..339: note = tr|A0A1S6TQQ7|A0A1S6TQQ7_9PROT S-adenosylmethionine:tRNA ribosyltransferase-isomerase; OS = Campylobacter pinnipediorum subsp. pinnipediorum; OX = 1660067 GN=queA PE=3 SV= 1
MNDINALSSYDYNLPNELIANEPIMPKEDARLLVYHKNSKKIQHLKFGDLADILPKCAVIFNDTKVIKARIIGKKQSGGQTEIMLNQPLGDGKFSAYIRGKVNQGSMLIFDNEINAEVLKLNDDGTRVVSFLKSNKKLDTNEVFKELEIIGHIPLPPYIKRADTKEDESWYQSIFAQNSGAVAAPTASLHFSNEMLEKIKNTHKTSYITLHVGAGTFKGVESENINEHKMHSEFFSIPQATLDIINSDTPILGVGTTVTRCIEEYARSKKDSGFCNLFLNLNNPPIRQQYLLTNFHLPKSTLIMLVSSFIGLDETMEIYKTAIEKKYRFYSYGDGMIII

SEQ ID NO: 64672 - protein, 339 aa, unidentified
  source 1..339: note = Campylobacter pinnipediorum
  REGION 1..339: note = tr|A0A1S6U8A3|A0A1S6U8A3_9PROT S-adenosylmethionine:tRNA ribosyltransferase-isomerase; OS = Campylobacter pinnipediorum subsp. caledonicus; OX = 1874362 GN=queA PE=3 SV=1
MNDINALSSYDYNLPNELIANEPIMPKEDAKLLVYHKNSKKIQHLKFGDLADILPECAVIFNDTKVIKARIIGKKQSGGQTEIMLNQPLGDGKFSAYIRGKVNQGSMLIFDNDINAEVLKLNDDGTRVVSFLKSNKKLDTNEIFKELEIIGHIPLPPYIKRPDTKEDESWYQSIFAQNSGAVAAPTASLHFSNEMLEKIKKAHKTSYITLHVGAGTFKGVESENINEHKMHSEFFSIPQATLDIINSNTPILGVGTTVTRCIEEYARSKKESGFCNLFLNLNNPPIRQQYLLTNFHLPKSTLIMLVSSFIGLDETMEIYKTAIENKYRFYSYGDGMIII

SEQ ID NO: 64673 - protein, 342 aa, Campylobacter rectus
  REGION 1..342: note = tr|A0A3P1XB52|A0A3P1XB52_CAMRE S-adenosylmethionine:tRNA ribosyltransferase-isomerase; OS = Campylobacter rectus OX=203 GN=queA PE=3 SV=1
MSQILNPNLLDAYDYELPPELIANFPTLPKEDARLLVYERASEKISHLKFGDLPEILPPCDIIFNDTKVVKARIFGKKQSGGETELLLNSPLADGKFSVYIKGKVRAGSILNFSENLTAEVCELFKDGSRTVKFSQSGRLLDAAALYKILSHIGHVPLPPYIKRSDTKDDESWYQSVFAKNEGAVAAPTASLHFSDEMIAGLAKDREIAYLTLHVGAGTFKGVESEDITQHKMHAEFYDIPQDTQNLINSDKPLLGVGTTVTRCVEEFARSGKASGECRLFLNLNNKPIRQNYLLTNFHLPKSTLIMLVTSFVGLEQTMRIYKTAVEQKYKFYSYGDAMLVI

SEQ ID NO: 64674 - protein, 342 aa, Campylobacter rectus
  REGION 1..342: note = tr|B9D1J1|B9D1J1_CAMRE S-adenosylmethionine:tRNA ribosyltransferase-isomerase OS=Campylobacter rectus RM3267 OX=553218 GN=queA PE=3 SV=1
MSQILNPNSLDAYDYELPQGLIANFPTLPKEDARLLVYERAGEKISHLKFGDLPEILPPCDIIFNDTKVVKARIFGKKQSGGETELLLNSPLADGKFSVYIKGKVRAGSILNFSENLTAEVCELFKDGSRTVKFSQNGRLLDAAALYKILSHIGHVPLPPYIKRSDTKDDESWYQSVFAKNEGAVAAPTASLHFSDEMIAGLAKDREIAYLTLHVGAGTFKGVESEDITRHKMHAEFYDIPQDTQNLINSDKPLLGVGTTVTRCVEEFARSGKASGECRLFLNLNNRPIRQNYLLTNFHLPKSTLIMLVTSFVGLRQTMRIYKTAVEQKYKFYSYGDAMLVI

SEQ ID NO: 64675 - protein, 342 aa, Campylobacter showae
  REGION 1..342: note = tr|C6RCU4|C6RCU4_9PROT S-adenosylmethionine:tRNA ribosyltransferase-isomerase OS=Campylobacter showae RM3277 OX=553219 GN=queA PE=3 SV=1
MSRILNPNSLDAYDYDLPPELIANFPTFPKENARLLVYERASEKISHLKFGDLPKILPPCDIIFNDTKVVKARIFGKKDSGGETELLLNSPLADAKFSVYIKGKVRAGSILNFGENLTAEVCELFEDGSRTVKFSQNGELLDTAALYKILSHIGHVPLPPYIKRSDTKDDESWYQSVFAKNEGAVAAPTASLHFSDEMIARLAKDREIAYLTLHVGAGTFKGVESEDITQHKMHAEFYDIPQDTQNLIRSNRPILGVGTTVTRCVEEFARSGKSSGECRLFLNLNNKPIRQNYLLTNFHLPKSTLIMLVTSFVGLRQTMRIYKTAVEQKYKFYSYGDAMLVV

SEQ ID NO: 64676 - protein, 342 aa, Campylobacter showae
  REGION 1..342: note = tr|M5IIL0|M5IIL0_9PROT S-adenosylmethionine:tRNA ribosyltransferase-isomerase OS=Campylobacter showae CSUNSWCD OX=1244083 GN=queA PE=3 SV=1
MSQILNPNSLDAYDYELPPELIANFPTFPKEDARLLVYERASGKISHLKFGDLPEILPPCDIIFNDTKVVKARIFGKKQSGGETELLLNSPLADGKFSVYIKGKVHAGSVLNFDENLTAEVCELFGDGSRTVKFSQNDQLLDAAALYRVLSHIGHVPLPPYIKRSDTEDDESWYQSVFAKNEGAVAAPTASLHFSDEMIARLAKGREIAYLTLHVGAGTFKSVESEDITQHKMHAEFYDIPQDTQNLIRSNRPILGVGTTVTRCVEEFARSGKSSGECRLFLNLNNKPIRQNYLLTNFHLPKSTLIMLVTSFIGLEQTMRIYKTAVEQKYKFYSYGDAMLVI

SEQ ID NO: 64677 - protein, 340 aa, Campylobacter sp.
  REGION 1..340: note = tr|A0A420VNG0|A0A420VNG0_9PROT S-adenosylmethionine:tRNA ribosyltransferase-isomerase; OS = Campylobacter sp. P255 OX=1979368 GN=queA PE=3 SV=1
MNDKDLLLSSYDYNLPSELIANFPILPKENAKLLVYERYKDQITHLHFKDLAQILPPCEIIFNDTKVIKARIYGNKESGSKIELFINHPLKEDNFLVQIRGKVKEGQILYFENKLQAKIKKLHQDGTREVEFYNEQKTLTHHEVFKILENIGHVPLPPYIKRADEAQDNINYQSIFAKNQGAVAAPTASLHFDEAMINELKKSHSIHTITLHVGAGTFKGVECEDIREHKMHSEFFCISDATRALIDSSKKILGVGTTVTRCIEYYYQNKIQEGYCDLFLHPQNTPQRLDYLLTNFHLPKSTLIMLVASFIGREKTLELYHEAIKNQYRFYSYGDGMLII

SEQ ID NO: 64678 - protein, 339 aa, Campylobacter sp.
  REGION 1..339: note = tr|A0A1X9T253|A0A1X9T253_9PROT S-adenosylmethionine:tRNA ribosyltransferase-isomerase; OS = Campylobacter sp. RM8964 OX=1660074 GN=queA PE=3 SV=1
MKNNIFDLDSYDYELPSSLIASSPANPKESANLLVYQRSNNKITHTKFGNLMEFLPDCDIIFNDTKVIKARIYGKKSSGGAVELLLNQPLGQGKFSTLIKGRVKTGTILEFDNELSCEVIELLDEYRIVKFYQNNRLVDTACLYQILNTIGHVPLPPYIKREDQKSDEIWYQSIFAKNDGAVAAPTASLHFSPQIIQNLKSKHNISYITLHVGAGTFKGVEVSDIREHKMHSEIYTISDEAINTINSNKPILGVGTTVTRCIEYFYKTGVKDGLCDLFLHPANPPQRQNYLLTNFHLPKSTLIMLVASFVGLDNIKEIYKQAIEKNYKFYSYGDAMLVI

SEQ ID NO: 64679 - protein, 339 aa, Campylobacter sputorum
  REGION 1..339: note = tr|A0A381DIM8|A0A381DIM8_9PROT S-adenosylmethionine:tRNA ribosyltransferase-isomerase; OS = Campylobacter sputorum biovar sputorum OX=32024 GN=queA; PE = 3 SV=1
MIDLLKTSSYDYFLPQEFIAKEPVLPRENAKMLVYDRKKDTILHKHVKDLPEILPECSIVFNDTKVVKARAYGVKSSGGKVEILLNAPLINGNFGAYIKGRVKVGSEIALSDSFKFIVKSLFDDGLREVEFYLKDKKLNTTEVFNEMDCIGHVPIPPYIKRDDNKNDEIWYQSIFAKYQGAVAAPTASLHFSSELVDKLKINYDIYTLTLHVGAGTFKGIESEDITKHKMHEEWYHLPQNTINLINSTDKILGIGTTVTRVIEDFARNGRSSGVCELFLNPFNKPIRQDYLLTNFHLPKSTLIMLVCSFIGFEKTMEIYDIAIKNNYRFYSYGDCMLVL

SEQ ID NO: 64680 - protein, 340 aa, Campylobacter subantarcticus
  REGION 1..340: note = tr|A0A0A8H8U8|A0A0A8H8U8_9PROT S-adenosylmethionine:tRNA ribosyltransferase-isomerase; OS = Campylobacter subantarcticus LMG 24374 OX=1388751; GN = queA PE=3 SV=1
MNDKDLLLSSYDYNLPSELIANFPILPKENAKLLVYKRCKNQITHLHFKNLAQILPPCEIIFNDTKVIKARIYGNKESGSKIELFINHPLKNNDFLVQIRGKVKEGQILYFENKLQVKIKKLHQDGTREVEFYNEQKTLTHHEVFKILEEIGHVPLPPYIKRADEAQDNINYQSIFAKNQGAVAAPTASLHFDEAMINELKKNHSIHTITLHVGAGTFKSVECEDIREHKMHSEFFYISDATRALIDSSKKILGVGTTVTRCIEYYYQNKIQEGYCDLFLHPQNTPQRLDYLLTNFHLPKSTLIMLVASFIGREKTLELYHEAIKNQYRFYSYGDGMLII

SEQ ID NO: 64681 - protein, 341 aa, Campylobacter upsaliensis
  REGION 1..341: note = tr|A0A381DWL6|A0A381DWL6_CAMUP S-adenosylmethionine:tRNA ribosyltransferase-isomerase; OS = Campylobacter upsaliensis OX=28080 GN=queA PE=3 SV=1
MTMCEDLKLSNYDYFLPKELIATHPVQPKEAARLLIYEREKDKITHSTFANLEQFLPDCAIFFNDTKVIKARIYGKKESGGKIELFLHSSVSECEFNAQIRGRVKKGEILHFKEGLSAEILELYADGLRKVCFKQDENLLNTSKLYALLEKIGHIPLPPYIKRADTLKDTQDYQSIFAKNLGAVAAPTASLHFSKAMLKSLKKRHEIHTITLHIGAGTFKSVECEDIREHQMHSEFFHINEAAKACIDSKKAILGVGTTATRSIEYYARTGLCSGACDLFLHPFNKPLRQNFLLTNFHLPKSTLIMLVSSFIGREKTLALYKEAVSLQYRFYSYGDAMLIL

SEQ ID NO: 64682 - protein, 339 aa, Campylobacter upsaliensis
  REGION 1..339: note = tr|A0A3X8R4H8|A0A3X8R4H8_CAMUP S-adenosylmethionine:tRNA ribosyltransferase-isomerase; OS = Campylobacter upsaliensis OX=28080 GN=queA PE=3 SV=1
MCENLKLSNYDYFLPKELIATHPAQPKEAARLLIYEREKDKITHSTFANLEQFLPDCAIFFNDTKVIKARIYGKKESGGKIELFLHSSVSECEFNAQIRGRVKKGEILHFKEGLSAEILELYADGLRKVCFKQDENLLNTSKLYALLEKIGHIPLPPYIKRADTLKDTQDYQSIFAKNLGAVAAPTASLHFSKAMLESLKKRHEIHTITLHIGAGTFKSVECEDIREHQMHSEFFHINEAAKACIDSKKAILGVGTTATRSIEYYVRTGLCSGACDLFLHPFNKPLRQNFLLTNFHLPKSTLIMLVSSFIGREKTLALYKEAVSLQYRFYSYGDAMLIL

SEQ ID NO: 64683 - protein, 342 aa, Campylobacter ureolyticus
  REGION 1..342: note = tr|A0A2I1NB73|A0A2I1NB73_9PROT S-adenosylmethionine:tRNA ribosyltransferase-isomerase; OS = Campylobacter ureolyticus OX=827 GN=queA PE=3 SV=1
MKKMNKLDNINSYDYYLPNELIATAPIMPKEEAKLLVYDRKNNSISHHKFGDLPEILPQCDIIFNDTKVIKARIYGTKQSGGKIELLINCPLNDGKFSVYIKGKVKPFDKLYFNENLIAKVLEIFDDGSRIVEFYSGDKILNLSEVFEILNKIGHIPLPPYIKRNDTKDDEIWYQSVFAKHSGAVAAPTASLHFSDEMLEVLRKQHEIYYLTLHVGAGTFKGVEFEDINKHIMHSEYFNIPNDTAEILKSNRPILGVGTTVTRVVEDYARNHVLSGECKLFLNYKNRPIRQNYLLTNFHLPKSTLIMLVTAFIGYEKTMEIYKVAVDEKYRFYSYGDAMLVI

SEQ ID NO: 64684 - protein, 339 aa, Campylobacter ureolyticus
  REGION 1..339: note = tr|S3YHJ7|S3YHJ7_9PROT S-adenosylmethionine:tRNA ribosyltransferase-isomerase OS=Campylobacter ureolyticus ACS-301-V-Sch3b OX=883165 GN=queA PE=3 SV=1
MNKLDNINSYDYYLPNELIATTPIMPKEEAKLLVYDRKNNSISHHKFGDLPEILPQCDIIFNDTKVIKARIYGTKQSGGKIELLINRPLSDGKFSVYIKGKVKPFDKLYFNENLIAKVLEIFDDGSRIVEFYSGNKILNLSEVFEILNKIGHIPLPPYIKRDDTKDDEIWYQSVFAKHSGAVAAPTASLHFSDEMLEILRKQHEIYYLTLHVGAGTFKGVEFEDINKHIMHSEYFNIPNNTAEILKSNRPILGVGTTVTRVVEDYARNHVLNGECKLFLNYKNRPIRQNYLLTNFHLPKSTLIMLVTAFIGYEKTMEIYKVAVDEKYRFYSYGDAMLIL

SEQ ID NO: 64685 - protein, 339 aa, Campylobacter volucris
  REGION 1..339: note = tr|A0A5C8L061|A0A5C8L061_9PROT S-adenosylmethionine:tRNA ribosyltransferase-isomerase; OS = Campylobacter volucris OX=1031542 GN=queA PE=3 SV=1
MNEDFLLSNYDYSLPNELIANFPILPKENARLLVYERKKDQISHLYFKDLNSILPQCDIIFNDTKVIKARIYGHKDTGSKIELFINNPFANESFLVQIRGKVKKDQILYFEQNLQAKILQLNNDGTRIVEFFTHQKKLNHQEVFDILDHIGHIPLPPYIKRADENSDSINYQSIFADKKGAVAAPTASLHFSEDMIKQLKKNHNIHTITLHVGAGTFKSVECDNIKDHKMHSEFFQINDETCKIIDSNQALLGVGTTVTRCVEYYSRYKIKEGFCDLFLHPHNKPQRLNYLLTNFHLPKSTLIMLVSAFIGREKTLQIYTQAIKNKYRFYSYGDSMLII

SEQ ID NO: 64686 - protein, 339 aa, Campylobacter volucris
  REGION 1..339: note = tr|A0A5C7DQE9|A0A5C7DQE9_9PROT S-adenosylmethionine:tRNA ribosyltransferase-isomerase; OS = Campylobacter volucris OX=1031542 GN=queA PE=3 SV=1
MNEDFLLSNYNYSLPNELIANFPILPKENARLLVYERKKDQISHLYFKDLNSILPQCDIIFNDTKVIKARIYGHKDTGSKIELFINNPFANDSFLVQIRGKVKKDQILYFEQNLQAKILQLNNDGTRIVEFFTHQKKLNHQEVFDILDHIGHIPLPPYIKRADENSDSINYQSIFADKKGAVAAPTASLHFSEDMIKQLKKNHNIHTITLHVGAGTFKSVECDNIKDHKMHSEFFKINDETCKIIDSNQALLGVGTTVTRCIEYYSRYKIKEGFCDLFLHPYNKPQRLNYLLTNFHLPKSTLIMLVSAFIGREKTLEIYTQAIKNKYRFYSYGDGMLII

SEQ ID NO: 64687 - protein, 349 aa, unidentified
  source 1..349: note = Campylobacteraceae bacterium
  REGION 1..349: note = tr|A0A1V4R9N8|A0A1V4R9N8_9PROT S-adenosylmethionine:tRNA ribosyltransferase-isomerase; OS = Campylobacteraceae bacterium 4484_166 OX=1956165; GN = queA PE=3 SV=1
MSLKRVARKSIRFYTKNYDFFLPKDLIASKPVYPADEAKLLIFDRKTKKTTHDTFKNIINYLPQNLSVYLNNTKVIKARIYGFKPTKGKIELLVLRYLDDIKCLVYIKGKVQKDMELLFEDNLIAKVIDILDDGSKIVHFYQNNQKIKFDNLVTILDKIGHVPLPSYIKRDDDIEDIKDYQTIFAKTYGAVASPTASLHFTQELFNRFKEKFDINYLTLHIGAGTFKPVDVEDIREFKIHKECYDIPKTTIESLQNKTTKKMAIGTTVTRTIEYYNKTKLSSGLCDLFLHPHNKPQITDILLTNFHLPRSTLIMLVASFVGVEQTIKLYDEAIKKDYRFYSYGDAMLVV

SEQ ID NO: 64688 - protein, 341 aa, unidentified
  source 1..341: note = Campylobacterales bacterium
  REGION 1..341: note = tr|A0A258WZH9|A0A258WZH9_9PROT S-adenosylmethionine:tRNA ribosyltransferase-isomerase; OS = Campylobacterales bacterium 16-40-21 OX=1970501 GN=queA; PE = 3 SV=1
MTKDPLLTSSYEYHLPDGLIATHPVHPRDHARLLVYNRNDRSITHTRFDRLNDFLPKECAIIFNDTKVIKARLYGKKESGGAVELLINRPLNAHTINVYIKGRVKINTILYFDANVTAIVKALHEDGSREVTFYLNDVRLRFEELLPLLDKIGHIPLPPYLGREDNSEDEREYQSVFAAHEGAVAAPTASLHFTDELFELVCSSHPHAFVTLHVGSGTFKPVECATITDHPMHSEYFEISDAALQLIQSSTPLLSIGTTSTRTIEYHTRTGELHGEANLFLHPHNPPQRVDHLITNFHLPQSTLLMLVASFVGLEETHRLYQEAIDEKYRFFSYGDAMLIL

SEQ ID NO: 64689 - protein, 350 aa, unidentified
  source 1..350: note = Scalindua sp.
  REGION 1..350: note = tr|A0A286U1Q9|A0A286U1Q9_9BACT S-adenosylmethionine:tRNA ribosyltransferase-isomerase; OS = Candiadtus Scalindua japonica OX=1284222 GN=queA PE=3; SV = 1
MNTTPYKTSNYDYDLPKNLIAQYPITKRDESRLLVLHKKSSRIEHRKFHEIIEYLNCGDVLVLNDTKVSPARIHGTRTTGGKVEGLIIKELEENTWEVLLQSNHRLKENEVLNFDNGVKGQILWRNETGSWIIRSEDREKFIKMIESSGRMPLPPYIKRDSNNKSHGIHDEERYQTIYAKTTGAIAAPTAGLHFTSKLLEEITCKGINIVYITLHVGLGTFKPIHKEDFRQHTIHKEFYNIPEEAIDTINKAKSHGKRIIATGTTTCRALETIAKNQTTGKNSGWTNLFIYPPYKFKLTDSLITNFHLQRSTLLLLVSAFAGRENIATSYEEAISHSYRFYSYGDCMLIL

SEQ ID NO: 64690 - protein, 353 aa, unidentified
  source 1..353: note = Unknown
  REGION 1..353: note = tr|A0A1F4S8Q9|A0A1F4S8Q9_9BACT S-adenosylmethionine:tRNA ribosyltransferase-isomerase; OS = candidate division WOR-1 bacterium RIFOXYB2_FULL_36_35; OX = 1802578 GN=queA PE =3 SV=1
MPTFNSNILKTSDFDYYLPFDFIAQFPVTKRDESRLMVLSRRESSLEHRFFSDIVDCLSSGDLLVLNDTKVIPANLVGRKAEGIARIEVLLAKHVEKSEWLCLVKPGKRLKVGSKVIFSSYLTGEVLKKLESGEQIIRFNGELDRFMKEKGEIPLPPYITDLRQQPADHKLQEMTNRYQTVYAQKDGATAAPTAGLHFTPELLARIESKGVEIKKITLHTGLGTFKPVYTEYIKDHKMHEEDFEISVDVLRSIKKAKRVIAVGTTTVRTLETLAHSNRLNALNDIYGSTDIFIYPGFKFKVVDAMITNFHVPKSTLLMLVSAFAGREFILNAYKEAIDNYYRFFSFGDAMLIF

SEQ ID NO: 64691 - protein, 374 aa, unidentified; identical to SEQ ID NO: 63949
  source 1..374: note = Unknown
  REGION 1..374: note = tr|A0A2M7WYG4|A0A2M7WYG4_9BACT S-adenosylmethionine:tRNA ribosyltransferase-isomerase; OS = candidate division WWE3 bacterium CG_4_9_14_3_um_filter_43_9 OX=1975082 GN=q ueA PE=3 SV=1

SEQ ID NO: 64692 - protein, 80 aa, unidentified
  source 1..80: note = [Bacteroides] periocalifornicus
  REGION 1..80: note = tr|A0A0Q4B4I4|A0A0Q4B4I4_9BACT S-adenosylmethionine:tRNA ribosyltransferase-isomerase (Fragment) OS=Candidatus [Bacteroides] periocalifornicus; OX = 1702214 GN=AL399_09 355 PE=3 SV=1
TLSSALSRERNAHSAAGTNYWVDFDWDAADVSFAEILESVGELPIPPYLNRDTEESDKTSYQTVYSKIKGSVAAPTAGLH

SEQ ID NO: 64693 - protein, 349 aa, unidentified
  source 1..349: note = [Bacteroides] periocalifornicus
  REGION 1..349: note = tr|A0A0Q4BA51|A0A0Q4BA51_9BACT S-adenosylmethionine:tRNA ribosyltransferase-isomerase; OS = Candidatus [Bacteroides] periocalifornicus OX=1702214; GN = queA PE=3 SV=1
MKLSQFQFDLPQELVARYPTEERDKARLMVGTRRNGKIEHKQFKDLLHYLGDGDTLVMNDTKVFPARLHGKKEKTQADIEVFLLRELNAESRLWDVLVDPARKIRIGNKLYFGEGDMMVAEVVDNTTSRGRTLRFLYDGPHEEFRARLFELGETPLPKSVGRPPEPVDVERYQTIYAEHEGAVAAPTAGLHISRELLKRLQIKGVNLGFITLHVGLGNFRRIEVEDLSKHKADAEQIVITQAAADLINNTLDKGKQVCAVGTTVVRTLESSVTTDNRVLSFSGWTNKFIFPPYAVQLPTMLVTNFHLPCTAQMMTVASFTGYEFMREMYEIAVREKYQFGTYGDAMLVL

SEQ ID NO: 64694 - protein, 352 aa, unidentified
  source 1..352: note = Abawacabacteria bacterium
  REGION 1..352: note = tr|A0A1F4XJZ0|A0A1F4XJZ0_9BACT S-adenosylmethionine:tRNA ribosyltransferase-isomerase; OS = Candidatus Abawacabacteria bacterium RBG_16_42_10; OX = 1817814 GN=queA PE=3 SV =1
MGKDSQEISPSYKLDSYDFNVPEELIAKEPIEPRDHARLLMYNRADQSITHHYFYELPELLPKNLALVLNNSKVFLARTMARKKESTSTSNIEVLFVRDLGNHRWETLMRPGKRMREGQHVIFADGSEAKLISKGDAVCVLEWNNTKPQEFFEKYGQLPLPPYLAGSHAKKSDYQTVYANSIGSSAAPTAGLHFTDVLLRKLAKSHPLHYVTLHVGLGTFKPVQTEDIREHTMHEEYVELSGEVARALNEGGDEDGGKMKICAVGTTSLRTLETAFKNNNFHELHGVTDLYLYPGKKLQAVDMLITNFHTPKSSLFILVASIVGLDEAKRIYQEAIDKKYRFFSFGDAMLIV

SEQ ID NO: 64695 - protein, 343 aa, unidentified
  source 1..343: note = Abyssubacteria bacterium
  REGION 1..343: note = tr|A0A3A4P4M0|A0A3A4P4M0_9BACT S-adenosylmethionine:tRNA ribosyltransferase-isomerase; OS = Candidatus Abyssubacteria bacterium SURF_5 OX=2093360; GN = queA PE=3 SV=1
MKLSDFDYELPQELIAQHPRQTRGQSRLMVINRSDGSIRVGTFNDILTYLQPGDALVLNDTKVFPARLRARKSSTGAAIELLLLNEVKPGEWEALVRPGRRVEVGTRLSLIGARQADTVEVAADCGKTKILRFYVEDVRRLCWRIGEIPLPPYIKRRTEPADHARYQTVFAKRVGAAAAPTAGLHFTTELLKELRDRDVQLEYVTLHIGLGTFQPLEYEEVEKNMLHQEAYALTEKTASRLNEARKRKKKIVAVGTTTLRLLETVVNENCLFEPKNGFSDIFIYPGHTCRSADALVTNFHLPRSSLLLLVSAFAGRDLILRAYKRAIQERFLFYSYGDAMLIL

SEQ ID NO: 64696 - protein, 343 aa, unidentified
  source 1..343: note = Abyssubacteria bacterium
  REGION 1..343: note = tr|A0A419F6L7|A0A419F6L7_9BACT S-adenosylmethionine:tRNA ribosyltransferase-isomerase; OS = Candidatus Abyssubacteria bacterium SURF_17 OX=2093361; GN = queA PE=3 SV=1
MKLSDFDYDLPPELIAQHPAPRRGHSRLMVVDRASNSIRIGTFPEIIGHFGSGDALVLNDTKVFPARLRARKVETGAHVELLLLNEIEKGTWEAMARPGRRLKAGTLLSIEGARQADTVEVVEDRGAIKTLKFSVGDVRRLCWRVGEIPLPPYIRREAESDDIHRYQTVFARREGASAAPTAGLHFTSELLKELSDKGVSVEFVTLHIGLGTFQPLEHEEVEKNTIFPERYRMTAKTARRLNEVRRREGRVIAVGTTTLRLLETVVTEKGEYEAGEGIADIFIYPGHTFRSADALITNFHLPRSSLLLLVCAFAGRDLIMRAYETAVKEQFRFYSYGDAMLIL

SEQ ID NO: 64697 - protein, 358 aa, unidentified
  source 1..358: note = Accumulibacter aalborgensis
  REGION 1..358: note = tr|A0A1A8XZ57|A0A1A8XZ57_9PROT S-adenosylmethionine:tRNA ribosyltransferase-isomerase; OS = Candidatus Accumulibacter aalborgensis OX=1860102; GN = queA PE=3 SV=1
MLTLDDFDFDLPSALIAQHPTAERTASRLLQVTDQALHDHRFGDLPELIAAGDLLVFNDTRVIRARLFGRKESGGRIEVLIERISDARHALAQIRASKSPKPGSRILLEDAITLIVRERSGEQGEFFALELAGEGDLWALIEKHGRLPLPPYITHAAGSDDEKRYQTVFARHPGAVAAPTAGLHFDDALLAQLGERGIEAAWLTLHVGAGTFQPVRVHSVAEHRMHAERFEIPPATIAAIARTHARGGQVIAVGTTSLRALEAAAQGGELHAGPAETDIFITPGYPFRVVDRLITNFHLPKSTLLMLVSAFAGMDAIRSAYRHAISHGYRFFSYGDAMFLDRRESPRAALSDLSNTCQ

SEQ ID NO: 64698 - protein, 343 aa, unidentified
  source 1..343: note = Accumulibacter sp.
  REGION 1..343: note = tr|A0A533QIX8|A0A533QIX8_9PROT S-adenosylmethionine:tRNA ribosyltransferase-isomerase; OS = Candidatus Accumulibacter sp. OX=2053492 GN=queA PE=3; SV = 1
MLTLDDFDFDLPAELIAQEPAAERSGSRLLQVCGSGISDHRFNELPALLSAGDLLVFNDTRVIRARLLGRKASGGRIEVLVERIVDARHAVAQIRASKSPRPGSLILLEDAITLRVCGRSGEQGEFFALELAGDGDLWRLVERHGRLPLPPYITHAAADADEERYQTVFARSPGAVAAPTAGLHFDAALLQRLAGHAVGAAWLTLHVGAGTFQPVRVRNLAEHRMHSERFEIPAATVDAIARTRSGGGRVVAVGTTSLRALEAAAQSGELRAGAGETDLFITPGYEFRIVDRLLTNFHLPKSTLLMLVSAFAGREPVRRAYEHAIRQRYRFFSYGDAMLLARQ

SEQ ID NO: 64699 - protein, 400 aa, unidentified
  source 1..400: note = Acididesulfobacter guangdongensis
  REGION 1..400: note = tr|A0A519BHL8|A0A519BHL8_9DELT S-adenosylmethionine:tRNA ribosyltransferase-isomerase; OS = Candidatus Acididesulfobacter guangdongensis OX=2597225; GN = queA PE=3 SV=1
MKLEDFNYFFDEKLIAKYPLKNRDESKLLAVNVKKFTVEHKKFYDIIDYINPGDVITVNSSYVKKARIFGKRETGGKVEIFILDFPNKITFPLTLKCLLKTHKKIKKNERITVLSSNGEKNTACDNRHTSEYFDFKEDFKEDRNRKNEDSCCDNYNNYNNGNQNNNFFITASNYLGESTWEIIIQNENDYNFIFDNCAAVPLPPYIKRPTDKNDEIYYQTIYAKEASGFSVAAPTAGLHFTENLINKIKNKGGIFTDISLNIGLGTFAPVREKDIENHNMHEERYKISEKTANIINNALKNGNKLIATGTSSVRCLESSTGNDGTVRPESDAITSLYIYPGYKFKITKNLITNFHQPKSSLFIMLSALIGLDKMKILYEEAMNNDYKFFSYGDAMFLYNI

SEQ ID NO: 64700 - protein, 396 aa, unidentified
  source 1..396: note = Acididesulfobacter diazotrophicus
  REGION 1..396: note = tr|A0A519BN69|A0A519BN69_9DELT S-adenosylmethionine:tRNA ribosyltransferase-isomerase; OS = Candidatus Acididesulfobacter diazotrophicus OX=2597226; GN = queA PE=3 SV=1
MDLEDFNYLFDEKLIAKYPLKNRDESKLLAVDIKKFKIEHRKFYDIIDYINPGDVIAVNSSYVKKARIFGKRKTGGKVEIFVLDFPNEITFPLKLKCLIKTHKKIKENELIIISPINNNKINNKKNTANSTNTTNILEYTDFEENSNDNDNTNNVNDNDHEISITASNCFGKGEWEIIIQNENDYNFIFDNCSAVPLPPYIKRQTDKNDEVYYQTIYANKDSGFSVAAPTAGLHFTEKLINKIKNKGGIFTDISLNIGLGTFEPVRERNITNHNMHEERYKISKETANAINNAVKNGNKIIATGTSSVRCLESSTDVDGAVHSENDAITSLYIYPGYKFKITKNLITNFHQPKSSLFIMISALIGLDKMKILYEEAINNDYKFFSYGDAMFLYNID

SEQ ID NO: 64701 - protein, 373 aa, unidentified
  source 1..373: note = Acidulodesulfobacterium ferriphilum
  REGION 1..373: note = tr|A0A519BC81|A0A519BC81_9DELT S-adenosylmethionine:tRNA ribosyltransferase-isomerase; OS = Candidatus Acidulodesulfobacterium ferriphilum; OX = 2597223 GN=queA PE=3 SV=1
MELDLFDYKFDEKLIAKYPLKKRDEARLLAVDVKNFKMEHKKFYDITNYINKNDAVIVNNSFVKKARIFGRRQTGGKVEIFITEFPFNISFPLRLNALIKSHKTVKEGEKILITEENKTENKAGEEGDRENTFIKSGNYLKITALKNHGNGNYDILINNKEDGDFLFDKCAGIPLPPYLKRSPENIDESYYQTVYADNLSGFSVAAPTAGLHFTDDLINKINGKGGIFANVSLNIGLGTFMPVREKDISKHNIHPETYTISEKTARLINETLKSGNKIIITGTSSVRCLESGADSGGILIPAAEKSTSLYIRPGYKFKITKNLITNFHQPKSSLFIMICALIGIDKTKAVYEEAVKNGYSLFSYGDAMYLYNI

SEQ ID NO: 64702 - protein, 331 aa, unidentified
  source 1..331: note = Actinomarina minuta
  REGION 1..331: note = tr|S5DQK5|S5DQK5_9ACTN S-adenosylmethionine:tRNA ribosyltransferase-isomerase OS=Candidatus Actinomarina minuta OX=1389454 PE=3 SV=1
MPFKSSIFDYHLPPESINQNPYKDPNKSQLLIANTRDIITFENLPSIINTPSLFILNKSTVKNVRVKTNKLTGGSIEIFFLEILEDKIAKCLIKSSDKKHLNKHYKLNIFDFEIININNDTFHIKTSLNIEQILSKHGKTPLPPYIEDDEYKYKYYNNQFSNGGFSVASPTAGLHFTNDLIERLKKDGHEFVYINLDVNIDTFKPVTSEYLEHHNIHEEKYRVLDGDFNKILKAKDLGVDIYCVGTTSLRTIETVYLTNNLVGKTDYFIFPDTKINIPDYLITNFHAPKSSLLSIVSAVYGKEWIDLYKYALDSDMKFLSFGDAVIFEVNE

SEQ ID NO: 64703 - protein, 332 aa, unidentified
  source 1..332: note = Actinomarinales bacterium
  REGION 1..332: note = tr|A0A520VS36|A0A520VS36_9ACTN S-adenosylmethionine:tRNA ribosyltransferase-isomerase; OS = Candidatus Actinomarinales bacterium OX=2510331; GN = EVA29_02195 PE=3 SV=1
MIKTKTDTLNYDLSKKNIAQTRYENPNESKLLIADTKEIITFKELKNILPKKSVLVFNKSTVEDVRIKTTKKDTGGKIEIFILNKISNNLCECLLKFNGTKNIGTTLNTVNFEFKIMDKKDEIFIIKTSSSINNIIKNYGLTPLPPYIKDNKSQYKYYKTDYSKGGFSIAASTAGLHFNKEIIDKFKKDGIVIKYINLDIGLGTFKPINTEYINEYEIHKESYSMYEKDYIHLLKLKENGYVIISIGTTVLRTLETIALNGKFHGDTNLYITPGFNFKIVDFLITNFHAPKSTLLSIVLTIYGKKWKELYMYAQKKKLKFLSFGDAVLFKIK

SEQ ID NO: 64704 - protein, 331 aa, unidentified
  source 1..331: note = Actinomarinales bacterium
  REGION 1..331: note = tr|A0A520VZV0|A0A520VZV0_9ACTN S-adenosylmethionine:tRNA ribosyltransferase-isomerase; OS = Candidatus Actinomarinales bacterium OX=2510331; GN = EVA27_02250 PE=3 SV=1
MPFESKVYNYILPKESINQNPYTEPNLSKLLIADTKLIIEFKDISSIIKKPSLFILNKSQVQSVRVVSKKSTGGKIEVFVLDIQSPYIAKCLIKSTDKKVLNKKYKLQKFNFEIIRILNDTYEIKFNIPVTEIIKSHGQIPLPPYIKDDSSKYEYYNNQFAEGGFSVASPTAGLHFSNQQINKLTNEGHQFIFINLDVNIDTFKPITERYLEDHKIHKENYQISKNDFEIILNAKNSNIDIYCVGTTSLRAIESAYLTGELSSSTDYFIYPDTKINIPNYLITNFHAPNSSLLSIVDCIYGSQWKDLYNFAIDSELKFLSFGDAVLFNVNE

SEQ ID NO: 64705 - protein, 345 aa, unidentified
  source 1..345: note = Aegiribacteria bacterium
  REGION 1..345: note = tr|A0A1V4N050|A0A1V4N050_9BACT S-adenosylmethionine:tRNA ribosyltransferase-isomerase; OS = Candidatus Aegiribacteria bacterium MLS_C OX=1775674; GN = queA PE=3 SV=1
MKLDDFRYDLPPELIAQRPLEDRSSSRLLAARVFDHGLRDMFFRQLPEILHSGDLLVLNDTRVFRARLKGRKAATGGMVEVFLLKRFEDDLWKAMVRPGRSAKAGAVFDFGGRLSCTVEERLEHGRAMVRFSAGGNLSETLEAEARVPLPPYIRREPEELDRHRYQTVFASAKGAVAAPTAGLHFTRELLDRLAEGGVDRTFVTLHVGPGTFQPLRFAEISRNRLEPEEYYVPAASLESIRSARSRGGRIVAVGTTTTRILETVDLDSTGPLSGETDMFIFPPYSFRNVDVLITNFHLPESSLLCLVAAFMGYDFMMRAYTHAVENSYRFYSYGDAMIIEKEPAG

SEQ ID NO: 64706 - protein, 322 aa, unidentified
  source 1..322: note = Aerophobetes bacterium
  REGION 1..322: note = tr|A0A497E2E6|A0A497E2E6_9BACT S-adenosylmethionine:tRNA ribosyltransferase-isomerase (Fragment) OS=Candidatus Aerophobetes bacterium OX=2030807; GN = DRJ00_07235 PE=3SV=1
MKLEDFDYHLPRQLIAQKPVFPRDSCRLLVLHKKEGRIEHRKFYQILEFLREGDVVVLNNTRVIPARLMGRKKKTGGKAELFLLRKRGDEDWECLLKPAKRIREGAQIFFPGSSLLATVVRREEGARGIVRFSVSGNVEEVIAQVGRLPLPPYIKRRGGPTSEDEESYQTVYAKEKGAVAAPTAGLHFTPSLLEKMKEKGIKVVEITLHTGWASFKPLDKERIQDNKIAEEYFKVSGEAALAINEAKKSGFRVVAVGTTTTRALETQAEPSGTLRQGEGWTSLFIYPGYRFKVVDALLTNFHMPRSSLILLVCAFAGREKIL

SEQ ID NO: 64707 - protein, 345 aa, unidentified
  source 1..345: note = Aerophobetes bacterium
  REGION 1..345: note = tr|A0A523S3K1|A0A523S3K1_9BACT S-adenosylmethionine:tRNA ribosyltransferase-isomerase; OS = Candidatus Aerophobetes bacterium OX=2030807 GN=queA; PE = 3 SV=1
MKLEEFDYYLPKELIAQQPFISRDSSRLLVLHRDRDEIEHKRFYEIVEFLQKGDLLVLNNTRVIPARLKGRKKETGGKVEIFLLQKKRMSSWECLLKPAGRIREGTQIYFSQTRLMARVVSKDQGAKAVVEFTPSKGVEEILAEIGQIPLPPYIKRDKDPSLEDRKRYQTVYAKEEGAVAAPTAGLHFTYSLFERIKEEGIKVVEITLHTGWASFKPLSREEVEKNKIPEEYFMINKEAAAAINEVKKGKGRIVAVGTTTTRTLETQATYSGQVKPGEGWTNLFIYPGYKFKVIEGLLTNFHMPKSSLILLVAAFAGKKKLLAAYREAVKENYHFLSFGDAMLII

SEQ ID NO: 64708 - protein, 305 aa, unidentified
  source 1..305: note = Amesbacteria bacterium
  REGION 1..305: note = tr|A0A0G1XU80|A0A0G1XU80_9BACT S-adenosylmethionine:tRNA ribosyltransferase-isomerase; OS = Candidatus Amesbacteria bacterium GW2011_GWB1_48_13; OX = 1618362 GN=UY28_C0012 G0039 PE=3 SV=1
MSIDSRTGALSHHIFRDLPSLLTAGDVLVFNDSAVFPARLIGRKPTGGKVEILLLHRLPDGNWKYISRPGFKSGHKVIISPDFWANIIDSEILKLSSNDEKLITKYGHTPLPPYIPDSAPEKILRRRYQTVYARNKGSAAAPTAGLHFTPRLLSLLKNNGIELEFLTLHVGLGTFKPPTVQQIAEGRLHSEQFLLKKDTARRLSQAKSSGRRIIAVGTTTTRVLETLSSTSGNLSPDSGQTDIFIKSPYRFKFVDGLITNFHLPGSSLLMLVSAFASSDIISRAYQTAIKRNYRFYSFGDAMLII

SEQ ID NO: 64709 - protein, 331 aa, unidentified
  source 1..331: note = Amesbacteria bacterium
  REGION 1..331: note = tr|A0A1F4YIY8|A0A1F4YIY8_9BACT S-adenosylmethionine:tRNA ribosyltransferase-isomerase; OS = Candidatus Amesbacteria bacterium RIFCSPHIGHO2_01_FULL_48_32b OX=1797253 GN= queA PE=3 SV=1
MKLGEFDYQLPKELIAQEPVRPRDRSRLMIVNRLARTIEHDYFYNLPKYLRRDDLLVFNDTKVFPARLVGKKESGGRVEILLLTSEGGGWRFIGKNIGRAKRVIFGNGLEGEIVRPGVIKFNVDSNRLTVLIDRIGYTPVPPYIHPRGAWPEPKLRRMYQTVYAREFRLRAGGMGSAAAPTAGFHFTKKMLAKIPKKIFVTLWVGLGTFAPVREENIEEHKMHEERFSISSGTRAEILRAKKGGERIVAVGTTSVRVLESDWTRNETNIFIYPGYKFKYVDTMITNFHLPKSTLLILVCAFAGKELVMKAYEEAIKKKYRFYSFGDAMLVV

SEQ ID NO: 64710 - protein, 343 aa, unidentified
  source 1..343: note = Aminicenantes bacterium
  REGION 1..343: note = tr|A0A1F5AUV8|A0A1F5AUV8_9BACT S-adenosylmethionine:tRNA ribosyltransferase-isomerase; OS = Candidatus Aminicenantes bacterium RBG_13_59_9; OX = 1797268 GN=queA PE=3 SV=1
MLVSDFNYNLPPELIAQRPLPRRDDSRMMVLRRRESEIIHARFKDLPQYLGPGDVLVLNAIKVIPAKTWGKADRREVEFLFLEEKQKGLWEVLCRPAKRVKAGGKIFFSPGLEGEVAGMGPRGKRLLRFSSGDVSKELQEIGYAPLPPYIKRGKKDPGLREFDLKRYQTVFARREGAIAAPTAGLHFTPETMASLREKGVLIMTVNLEVGQATFQPVEAERVEDHRMLSEEYSIGASAARSINQAKKESRPVTAVGTTVVRALESAWRDGRLRSGSRSTDIFIHPGFKFQAVDRLLTNFHLPKSTLLMLVSGFAGRDLVLKAYSEAVRERYRFFSYGDCMLIL

SEQ ID NO: 64711 - protein, 343 aa, unidentified
  source 1..343: note = Aminicenantes bacterium
  REGION 1..343: note = tr|A0A523ZVE4|A0A523ZVE4_9BACT S-adenosylmethionine:tRNA ribosyltransferase-isomerase; OS = Candidatus Aminicenantes bacterium OX=2052149 GN=queA; PE = 3 SV=1
MLVADFDYELPAGLIAQKPLPERQQSLMMILHRETGEIIHSRFSEFPAYLQKDDVLVLNTSKVIPARVYGKIEGKEIEFLFLKELGDGLWEVLCRPAKKVRLGDAVVFSDEFEAKIASIGPEGKRTIQFTSGDILPKLKKVGFAPLPPYIKRKSKNSELRAMDIKRYQTVFAEHDGAIAAPTAGLHFTPDILKEIAARGAAIVRITLDVGLATFQPVRVTKIENHQMLEEDYTISPSASRIINSAKKESRPLTAVGTTSVRALESAFQEGKIQPGKGSTRLFIYPGYSFKAVDRLLTNFHLPKSTLLMMISAFAGLDFIKRAYEEAVRQEYRFYSYGDCMLII

SEQ ID NO: 64712 - protein, 348 aa, unidentified
  source 1..348: note = Amoebophilus sp.
  REGION 1..348: note = tr|A0A1Q3W696|A0A1Q3W696_9BACT S-adenosylmethionine:tRNA ribosyltransferase-isomerase; OS = Candidatus Amoebophilus sp. 36-38 OX=1895716 GN=queA; PE = 3 SV=1
MKLSSFKFTLPSKLIASHPVENREESRLMVVHKATGKIEHKTFKDVLDYFGQDDTLVLNDTKIFPAKLYGSKEKTGAQIEVFLLRELESGEHLWDTLVEPARKIRVGNKLYFGDGELVAEVLDNTTSRGRTLKFLFEGTREEFYDIVDQLGLVPLPNQLKRKPEPEDRDRYQTVYAKKIGAVVPPGAGLHFTSHLLKRLELKGVNILPVTLHIGLNILKVIDVEDLTKYKTGSEYFTISDDTVTAVNTALDTKKQVCAVGTSTAKALETSVSVAGRLKPADGWTNKLIFPPYDFKICTSLISNFHLPESMPLVNATAFGGYELIMEAYQVAIKEKYRFFVYGDAMLIL

SEQ ID NO: 64713 - protein, 411 aa, unidentified
  source 1..411: note = Amulumruptor caecigallinarius
  REGION 1..411: note = tr|A0A4Q0UAM9|A0A4Q0UAM9_9BACT S-adenosylmethionine:tRNA ribosyltransferase-isomerase; OS = Candidatus Amulumruptor caecigallinarius OX=2109911; GN = C7K11_02305 PE=3 SV=1
MNVKDIDISAFDYELPDARIAKHPLARREQCLLLMRDHDGSLSTHIFAELPRLLPDDTMLVYNATRVINARLRFRKQPSATDGGAATQGALIEIFCLEPYSPRDYAVNFASTDGCDWICLVGNSKKWKSGILSLPLEIDGRSVTLNAKRIDRVGNSSVIRFSWSDPTVTFATIIGAAGEIPIPPYLNRSTEESDSTDYQTVYGHIDGSVAAPTAGLHFTDDVLAEIDSRGIPRHEVTLHVGAGTFQPVKSDTIGEHPMHNEFFAVDRHVIEALAQSDRRVIAVGTTSVRTLESLYHLGCMKHAGIEGDEVPQWYPYDPAHPHLSARESMEALLRHLDATSTPTIVASTRLIIAPGYTPGIVKGMVTNFHQPRSTLLLLVSAFTGGNWRTMYDYALAGDYRFLSYGDACLIL

SEQ ID NO: 64714 - protein, 349 aa, unidentified
  source 1..349: note = Amulumruptor caecigallinarius
  REGION 1..349: note = tr|A0A4Q0U816|A0A4Q0U816_9BACT S-adenosylmethionine:tRNA ribosyltransferase-isomerase; OS = Candidatus Amulumruptor caecigallinarius OX=2109911; GN = queA PE=3 SV=1
MKLSQFNFNLPKELIAYTPADERDEARLMVINRATGEIEHHVFKEIINYFDDGDVMVFNDTKVFPARLFGNKEKTNALIEVFLLRELNEENKLWDVLVEPARKIRIGNKLYFGDDDSMVAEVIDNTTSRGRTLRFLYDGPHEEFKEELFKLGETPLPYYIDRKPTADDAERYQTIFAQHEGAVVAPAAGFHFSRELMKRLEIRGVKPEYLTLHIGLGIFREIDVEDLTKHRMDSEQVNITQHLVDVVNDAKDHNKQVCAVGTSALRGLASAVSMGGHIKTYTGWTNKFIFPPYDFSVTTSLVTNFHLPYSTMLMMVCAFGGYDLVMKAYKEAIKEKYRFGAYGDAMLII

SEQ ID NO: 64715 - protein, 353 aa, unidentified
  source 1..353: note = Annandia adelgestsuga
  REGION 1..353: note = tr|A0A3S9J7S2|A0A3S9J7S2_9ENTR S-adenosylmethionine:tRNA ribosyltransferase-isomerase; OS = Candidatus Annandia adelgestsuga OX=1302411 GN=queA; PE = 3 SV=1
MHLKNFYFKLSKNMISQHPIINKNKKKLMILDSIKKKVYHGKFNNIINILNKGDLLILNNTRVIPARIFAKKISGGKIEILIEKILNNNMVLGKIKSNKKIKINTFLIINYENNIYATIKSKYNIFYKIKFISSITVWNIIKIYGKIPLPPYIKKKIDKKNKNEYQTIYSSKYGSIASPTAGLHFDKILFKNLIKKGIKIIFITLHIGSGTFQSIKSLNIKNHKIHKEQCIVTKNVIKKIIKCKLKGNRIVAVGTSTLRALESTVFKSKYIISLKKETNIFIYPGYKYKIVDALITNFHLPCSTLIILVSSFAGYYNIMSSYRIAIKNKYKFFSYGDSMFIIHNPKAFLDKIN

SEQ ID NO: 64716 - protein, 355 aa, unidentified
  source 1..355: note = Aquarickettsia rohweri
  REGION 1..355: note = tr|A0A429XIA8|A0A429XIA8_9RICK S-adenosylmethionine:tRNA ribosyltransferase-isomerase; OS = Candidatus Aquarickettsia rohweri OX=2602574 GN=queA; PE = 3 SV=1
MQLSEFDFELPKNLIAKHPIYPRGNSKLLYLDNSAKIFDYKFPEIINLFKKGDLLIFNNSKVIPAYLVGKVNNSFNISKEIVIYLNREITPNKWLAFAKPKKLLSLNKEIIFTNNLKGEVVKILNSGEITLKFNYSNPILLNKICNIGMMPIPPYLKRKPEETDNQDYQTVFAKEYGSVAAPTAGLHFTNSLLDKIKSIGVKINFIRLDVGSGTFLPVKSKNIFEHKMHLEKFFIPQETAEAINKTKQDGNRVICVGTTTLRAIESSSDSNGFIKYQNSETNIFITPGYQFKVVDCLITNFHTPKSTLLMLISAFSGINNIKLLYTHAIKNNYRFFSYGDACWLDRIKNNYTTNS

SEQ ID NO: 64717 - protein, 343 aa, unidentified
  source 1..343: note = Arthromitus sp.
  REGION 1..343: note = tr|A0A1B7LMY5|A0A1B7LMY5_9CLOT S-adenosylmethionine:tRNA ribosyltransferase-isomerase; OS = Candidatus Arthromitus sp. SFB-turkey OX=1840217; GN = queA PE=3 SV=1
MDINLFDFHLPSECIAQKPLKNRQDSKMMVVNRNNDTIEHKNFCDIIDYLNKDDVLVLNNTRVISARIKGINIESNGKMEMLLVRNVKDNIWEIMCKPGKRALIGKKFLFGDGKLEIEIIDIKDDGNRIAEFKFNGNIYEILNEIGEVPLPPYIKEKLNDSERYQTVYSDKIGSIAAPTAGLHFTDNLLNEIKLKGIKIVYITLHVGLGTFMPVKVNDLNEHKMHSEYYEIKKEVVDIINVAKKNGNRVISVGTTTMRTLETVASKSDDGLLFESYGYTDIFIKPGYNFKIVDSLITNFHLPKSTLLILISAFYDRNKILDAYSEAILNGYRFFSFGDSMFII

SEQ ID NO: 64718 - protein, 340 aa, unidentified
  source 1..340: note = Arthromitus sp.
  REGION 1..340: note = tr|G2IHL1|G2IHL1_9CLOT S-adenosylmethionine:tRNA ribosyltransferase-isomerase OS=Candidatus Arthromitus sp. SFB-rat-Yit OX=1041504 GN=queA PE=3 SV=1
MDIALFDFDLPERLIAQKPLKNRDASKLMVVDRKNGNIVHSEFVNVINYMNKDDVLVLNDTRVFPARIYGESSYGGKIEVLLVKNIEGKIWEVMCKPGKRALVGKKFHFINGKIEMEVIGINPDGNRIVNFTYDGEIYDILNKNGTIPLPPYIKDVLEDKEKYQTVYSNKIGSIAAPTAGLHFTNELLLKIRNKGVKIVYITLHVGLGTFLPVKTNDIDNHNMHSEYYEISNEAAEFINLAKSKGNKIVSVGTTTVRVLETVFSKNGKCVGEKGYTDIFIKPGYKFSAVDSLITNFHLPKSTLIILISAFYNREKILTAYEEAILNEYRFFSFGDSMIII

SEQ ID NO: 64719 - protein, 361 aa, unidentified
  source 1..361: note = Atelocyanobacterium thalassa
  REGION 1..361: note = tr|A0A086CII6|A0A086CII6_9CHRO S-adenosylmethionine:tRNA ribosyltransferase-isomerase; OS = Candidatus Atelocyanobacterium thalassa isolate SIO64986 OX=1527444 GN=queAPE=3 SV=1
MNDDYSLSNYNYHLPSELIAQNPLVPRDSSRLLVVNSSNTHVHSFFNELPKWLLPGDLLVFNDTRVVPARLYGQKTTGAKVEVLLLEEKEPFTWIVLVKPGKRFKIGSKILFTAVLDEFKQDYLLEATVIDHDEKTGGRVLKFNVSSKSEFWEALERIGHLPLPPYLTNSSANPSQYQTIYAQKPGAVAAPTAGLHFTQELLQNLQKKGINQAYVTLHVGLGTFRPVNTDNIKEHTMHQEWIEVSNQTIQKINKTKSSGGRVIAVGTTVVRALEGMADVTSIDNKYDIKSFSGKTNIFIYPGYKWHLVDGMITNFHLPKSSLLMLVSALIGRDRLLELYKIAIEEKYRFYSFGDGMLVLLS

SEQ ID NO: 64720 - protein, 342 aa, unidentified
  source 1..342: note = Atribacteria bacterium
  REGION 1..342: note = tr|A0A1F5BZL0|A0A1F5BZL0_9BACT S-adenosylmethionine:tRNA ribosyltransferase-isomerase; OS = Candidatus Atribacteria bacterium RBG_16_35_8; OX = 1797290 GN=queA PE=3 SV=1
MKLEEFDYYLPSGFIAQKPIKPRDRSRLMVLNRSRNEIQHKIFKDIKDYLKKGDLLVLNNTKVLPARLYGFKEKTKGKVEILLLESKKDRYWEVLVRPGKIVHTDTKIIFGPELEGIVEGKNEEKGSYFIQFNFKGNFKEILNKIGKMPIPPYIKEELKTGNDYQTVYAAQDGSIAAPTAGLHFTKSLLGDLTHKGIEIVYLTLHVGRGTFEPIRTSKVEEHKMDSEFYSVSSNVAQKIDQARSEKRRVISVGTTTTRTLESAFDFNQGRIVSGSNWSDIFIFPGYKFKVVDVLITNFHLPQSTPLMLVAAFTGKNFLLKAYQEAIRERYRFYSFGDAMIIV

SEQ ID NO: 64721 - protein, 342 aa, unidentified
  source 1..342: note = Atribacteria bacterium
  REGION 1..342: note = tr|A0A1V5T3N8|A0A1V5T3N8_9BACT S-adenosylmethionine:tRNA ribosyltransferase-isomerase; OS = Candidatus Atribacteria bacterium ADurb.Bin276; OX = 1852833 GN=queA PE=3 SV=1
MILTDQFNFHLPDELIAQRPVVPRDQCRLMVINRLSQEIEHRRFFDLGHYLKPKDLIVINDSRVIPARFYTQKNPTGGKVEILFLHRHQELWACMLNHSRRVKEGTILSLPEHPEIFWQVEGREKDWWLLRPSFPPEKEDEIFFNYGTTPTPPYIKTPNVKLEEYQTIYAQRKGSVAAPTAGLHFTQSLIDQLKNLGIQFASLTLHVGLGTFFPVKTSTIEEHHMHSEWYEVDQKTAEMIQETKKNEGRVIAVGTTVVRVLESIYRQRGRIVEQSGETDIFIYPGFQFQVINAMITNFHIPRSTLFMLVCAFAGTEFMKAAYRGAVEKHYRFFSFGDATFIM

SEQ ID NO: 64722 - protein, 349 aa, unidentified
  source 1..349: note = Aureabacteria bacterium
  REGION 1..349: note = tr|A0A3A4QTK7|A0A3A4QTK7_9BACT S-adenosylmethionine:tRNA ribosyltransferase-isomerase; OS = Candidatus Aureabacteria bacterium SURF_26 OX=2093366; GN = queA PE=3 SV=1
MRTEEFNYSLPESLIAQQPAKNRHDSRLMVLYYKSKKVVHSTFRDICSFLSPAHLLVVNDTKVFPARLLGRKESGGAVEILLVREVDGLRWEAMVQPSARVKEGTPVAIDGWNKQVSVEERLPGGSRLVQFPDECEPLDIAFQYGHMPLPPYIKRDVSDKEQSAFDFQRYQTIFARDAGSVAAPTASLHFTDTVLAELQERSVGIQHITLHVGPGTFKPVKTDTITDHVMDYEYYAVSQETERNINTHISNGGTVCGVGTTVVRTLEAISDESGRIHAGNGKTDLFIYPGYSFKIVRNMLTNFHLPKSTLLMLVCALAGSDFVLSAYHEAIREKYRFYSYGDAMLLLNQ

SEQ ID NO: 64723 - protein, 382 aa, unidentified
  source 1..382: note = Azambacteria bacterium
  REGION 1..382: note = tr|A0A1F5C6K3|A0A1F5C6K3_9BACT S-adenosylmethionine:tRNA ribosyltransferase-isomerase (Fragment) OS=Candidatus Azambacteria bacterium RIFCSPLOWO2_01_FULL_37_9 OX=179 7297 GN=A2907_02845 PE=3; SV = 1
MKLSDFNYNLPQNFIAQKPTKPRDHCRLLILDRETGDIKHKKFFEISQFIKNGDVLVFNDSKVIPARLHGNKITGLPSVALAKEGGNVEILLIKKISSDTWEALLKNFKEKEFGKKIIIAKNFIASPEKNIDGGLWQIKFNQLAGGKDKNLDKLIYKYGQTPLPPYIKKMAKLSDYQTIYAKREGSVAAPTAGLHFTKKLLNSLKKQGAKLETITLHIGLGTFAPIKDNNIEKHKIHSEYAEISAKTAKAINKARSEGRRIIAVGTTSARTLEAFAMSTDNQQQTSNNKNKQKFRQSDDRQTGGILPFGKLWVDIFIKPGYKFKIVDGMITNFHLPETSLMILVSAFAGRPAGRHGRKNILKAYQEAINKKYKFFSFGDAML

SEQ ID NO: 64724 - protein, 353 aa, unidentified
  source 1..353: note = Baumannia cicadellinicola
  REGION 1..353: note = tr|A0A088N2E6|A0A088N2E6_9GAMM S-adenosylmethionine:tRNA ribosyltransferase-isomerase; OS = Candidatus Baumannia cicadellinicola OX=186490 GN=queA; PE = 3 SV=1
MRVADFSFDLPKHLIARHPQQERSACRLLSLDGPSGTVKHQVFTDIIDLLFIGDLLVFNNTRVIPARLFGRKISGGKVEVLVERVLDNKRVFAYVRTSKTPKVGTLLLLGDDESIYATIVARHNVLFELIFDDQRDVLTLLNDAGHIPLPPYIDRPDDATDRELYQTVYSKRPGAIAAPTAGLHFDEQLLSALRAKGVDMVFLTLHVGAGTLQPIRVENLKQHQMHSEYTEVSRTVVDAVLACKARGNRVVAVGTTSVRSLESAIVSNGANAIIAPFLGDTSIFIYPGYHFRIIDALITNFHFPKSTPIMLVSAFAGYHHTFAAYRQAINLAYRFFSYGDAMFITRNPSACDQ

SEQ ID NO: 64725 - protein, 248 aa, unidentified
  source 1..248: note = Berkelbacteria bacterium
  REGION 1..248: note = tr|A0A2M6YC23|A0A2M6YC23_9BACT S-adenosylmethionine:tRNA ribosyltransferase-isomerase (Fragment) OS=Candidatus Berkelbacteria bacterium CG08_land_8_20_14_0_20_39_8 O X=1974511 GN=queA PE=3 SV=1
LSEKIFFSQSLQAEVVKKDGKNGVLKFNLSGNVFWQIVNKIGKTPIPPYIKNLELSERELKSKYQTVFAENFGSAAAPTAGLHFTSELIGKLKSSGIQFATVDLHVGLGTFFPIDENEVKAKKLHSEVYSIPLETTKKILTTKKSGGRIFAVGTTVARSLESASSEISSEKSFSGKTDIFIQPGDKFRVVDSLITNFHLPKSSLMMLVAAFIESKTNFDGREKLLEIYKYAINEKYRFYSFGDVMLLI

SEQ ID NO: 64726 - protein, 376 aa, unidentified
  source 1..376: note = Berkelbacteria bacterium
  REGION 1..376: note = tr|A0A554LGU2|A0A554LGU2_9BACT S-adenosylmethionine:tRNA ribosyltransferase-isomerase; OS = Candidatus Berkelbacteria bacterium Licking1014_96; OX = 2017149 GN=CEN92_175 P E=3 SV=1
MQTKKFDYYLPKKLIAQKPISPRDHSRLLVLKKRMGKIIHDHFYNLGHYLRKGDVVVLNNTKVIPARLITDQGKEIFLLKSLDKNDSKWLCLTRCKGSSFIKFAGSTLVGRIDQKIIKFNLRGREFWKEVEKIGEVPTPSYVKSHKKYRKAKKDFYQTIFAKKKGSIAAPTAGFHFTQKLVDRLKKKGVKVAFITLHVGLGTFASIRAERVEEHQMHAEWFELSKYTADLLNRAKREGHRIVAVGTTAARVLESCAITPLPHQNFFLLIPCSGETKIFIKPGYKFKFVDALITNFHLPCSTPLLLASAFIEDHHRKLSFRDPSIARVEKSRSDEISHCVRNDRGKNEGIRILLQSYREAIKKKYRFYSFGDAMLIV

SEQ ID NO: 64727 - protein, 339 aa, unidentified
  source 1..339: note = Borkfalkia ceftriaxoniphila
  REGION 1..339: note = tr|A0A4Q2K6B7|A0A4Q2K6B7_9FIRM S-adenosylmethionine:tRNA ribosyltransferase-isomerase; OS = Candidatus Borkfalkia ceftriaxoniphila OX=2508949; GN = queA PE=3 SV=1
MKKSDYYYDLPEELIAQTPAEPRDSSRLLVYDRATNTTEHRIFREITEYLRAGDVLVVNNTKVLPARLFAFTKNGGRVEILLLKRLDLTHWEVLVRPGKKAKTGVELFISEELSLVVKDRTETGERIVEFLFDGVFEDIVSRAGTVPLPPYIHEKLEDPDRYQTVYCKTDGSAAAPTAGLHFTEELLAKIKGMGVEVAEVLLHVGLGTFRPVKEDDLTDHKMHSEFYRVDEKAAETVNAAKREGRRVIAVGTTSVRTLESVADENGFLRPCSGDTEIFIYPPYRFKCVDALVTNFHLPESTLIMLISALMGRENALAVYREAIEKKYRFFSFGDAMFIK

SEQ ID NO: 64728 - protein, 358 aa, unidentified
  source 1..358: note = Brocadia caroliniensis
  REGION 1..358: note = tr|A0A1V4AWQ9|A0A1V4AWQ9_9BACT S-adenosylmethionine:tRNA ribosyltransferase-isomerase; OS = Candidatus Brocadia caroliniensis OX=1004156 GN=queA; PE = 3 SV=1
MNSTASKPSNFYPKLSDYNYDLPRELIAQRPLENREDARLLILCRRTGKIEHRKFYEITEYLRPGDLLVLNNTKVIPALLQGKRISGANLELLLIEEREENQWRALIKSNAKLKIDEEIYLGDRILSAKLLRKNQDGSWLIQFDKNCHIKDMLIRIGKMPLPPYIKRTENNSSLCSSDKERYQTVFAQKEGAIAAPTAGLHFSQRTLERVKKHGVEIGFVTLHVGLGTFLPIKTDDIQKHHMHAEYYECPGEMIEKIKETKEHQHRVIAVGSTSCRVLESVAMNNNPPHTSGWTNLFIYPPYHFQHVDVLLTNFHLPKSTLLVLVCAFAGRENILNAYEIAKKEGYRFFSYGDCMMIV

SEQ ID NO: 64729 - protein, 359 aa, unidentified
  source 1..359: note = Brocadia sapporoensis
  REGION 1..359: note = tr|A0A1V6LY29|A0A1V6LY29_9BACT S-adenosylmethionine:tRNA ribosyltransferase-isomerase; OS = Candidatus Brocadia sapporoensis OX=392547 GN=queA PE=3; SV = 1
MDFTAKKPVQFYSKLSDYTYDLPRELIAQHPLENREDARLLILYRNSGRIEHRRFYEITEYLCPGDFLVLNNTKVIPALLTGKRISGASLELLLTEEGEEENQWKVLIKSNAKLKAGEEIIVADNVLPAKLLMKNEDGSWLIQFDKNHPIKDLLVQTGKMPLPPYIKRTGKNGTCYSSDKERYQTVFAQNEGAIAAPTAGLHFSHDTLEKLKNQGVEIGFVTLHVGMGTFMPMKTEDIQKHQMHKEHYECSQEIMEKIKKTKERRNRVIAVGSTSCRVLESVAINNQTPQTSGRTNLFIYPPYHFQYVDVLLTNFHLPKTTLLVLVCAFAGRENILNAYEIAKNRGYRFFSYGDCMMII

SEQ ID NO: 64730 - protein, 367 aa, unidentified
  source 1..367: note = Brocadiaceae bacterium
  REGION 1..367: note = tr|A0A5C6D8F0|A0A5C6D8F0_9BACT S-adenosylmethionine:tRNA ribosyltransferase-isomerase; OS = Candidatus Brocadiaceae bacterium S225 OX=2528033; GN = queA PE=3 SV=1
MHKDFFVLKGHFLSEKIMSEASYKISNYDYNLPKHLIAQYPTTKRDESRLLVLHKESSKIEHRRFYEIIEYLNCGDVLVLNDTKVSPARILGTRTTGGRVECLIIREVEENTWEVLLQSNHRLKENEFLTFDDSVKGKILYRNDTGSWIIRVEDKKKFTEMLESSGRMPLPPYIKRNSNNKSQGIHDDERYQTIYAKKVGAIAAPTAGLHFTTNLLREISCKGIKIVYITLHVGLGTFKPIHKEDFRQHTIHKEFYNISEETVSTINKAKSLGKKIIATGTSTCRVLETIAKNHTTEKSSGWTKLFIYPPYKFKLTDSLITNFHLQRSTLILLASAFAGRENIATSYEEAISLNYRFYSYGDCMLIL

SEQ ID NO: 64731 - protein, 351 aa, unidentified
  source 1..351: note = Brocadiaceae bacterium
  REGION 1..351: note = tr|A0A5C6EY70|A0A5C6EY70_9BACT S-adenosylmethionine:tRNA ribosyltransferase-isomerase; OS = Candidatus Brocadiaceae bacterium B188 OX=2528032; GN = queA PE=3 SV=1
MQFYSKLSDYTYDLPRELIAQHPLENREDARLLILYRNSGRIEHRRFYEITEYLCPGDFLVLNNTKVIPALLTGKRVSGASLELLLTEEGEEENQWKVLIKSNAKLKAGEEIIVADNVLPAKLLMKNEDGSWLIQFDKNHPIKDLLARTGKMPLPPYIKRTGKNGICYSSDKERYQTVFAQNEGAIAAPTAGLHFSHDTLEKIRNQGVEIGFVTLHVGMGTFMPMKTDDIQKHQMHKEHYECSQEIMEKIKRTKERQNRVIAVGSTSCRVLESVAINNQTPQISGWTNLFIYPPYHFQHVDVLLTNFHLPKTTLLVLVSAFAGRENILNAYEIAKNRGYRFFSYGDCMMII

SEQ ID NO: 64732 - protein, 348 aa, unidentified
  source 1..348: note = Brocadiae bacterium
  REGION 1..348: note = tr|A0A524HK40|A0A524HK40_9BACT S-adenosylmethionine:tRNA ribosyltransferase-isomerase; OS = Candidatus Brocadiae bacterium OX=2517210 GN=queA PE=3; SV = 1
MKTELFNYDLPSELIAQRPADVRSESRLLLVDRCRPDFIDSRFSSIGEYLRHGDCLVLNDTRVLPARFYAARKSGASLEGLFLKENPAGIWHVMLKGARKVKTGEIIILKGPQNDELEAEVIEKNDAGLCLLKVHSVLAPETLLNSIGFAPLPPYIKRKGDPEVDMIDRQRYQTVYARSAGAVAAPTAGLHFTDELMDSLKKSGVMFANVTLHVGAGTFKPVTAEDIDEHEIHEELYFLDGENADVINQAKSNGGRIIAVGTTAVRTLETTADNSSVNPGTGQTRLFIKPGYQFKIVNAMVTNFHLPKSTLLALVSAFAGLDKTMAAYRHAVEMRYRFYSYGDAMLIL

SEQ ID NO: 64733 - protein, 347 aa, unidentified
  source 1..347: note = Buchananbacteria bacterium
  REGION 1..347: note = tr|A0A1G1YLS1|A0A1G1YLS1_9BACT S-adenosylmethionine:tRNA ribosyltransferase-isomerase; OS = Candidatus Buchananbacteria bacterium RIFCSPLOWO2_01_FULL_39_33 OX=1797543 G N=queA PE=3 SV=1
MPLKRFDYQLPSQLIGQRPVKPRDSARLLILNKKNGQIEHKKFYHIINYLKPGDVLVLNNSRVIPARLIGQKETGGKIEIFLLKKMSLRGSLSDCGNPMLEKNTWQCLIGGKIKVGEKILFPKNIKAKIIKKYDDQSWLVEFNASAKKLLASGQTPLPPYIKKMAKLADYQTVYAKTSGSVAAPTAGLHFTKRLINKLKKQGVIIEYITLHIGLGTFQPIKSRYIQDHKIHSEWATLNKKTADKLNQAKKSGRSIIAVGTTTLRTLEAFSDDRGKLKPQSGWLNIFIYPGYKFKFVKTLITNFHLPKSTLLVLVSALVGEKLIKKSYQAAIKKKYKFFSFGDAMFIR

SEQ ID NO: 64734 - protein, 312 aa, unidentified
  source 1..312: note = Buchananbacteria bacterium
  REGION 1..312: note = tr|A0A1G1XQW9|A0A1G1XQW9_9BACT S-adenosylmethionine:tRNA ribosyltransferase-isomerase (Fragment) OS=Candidatus Buchananbacteria bacterium RBG_13_36_9 OX=1797530 GN=A 2Y82_03930 PE=3 SV=1
AGLVRGDVLVFNNSKVIPARLIGRKPTGGKVEILLLRQIKPNIWECLVGNLPIKKQVGTEIIFAPNSRMEQVLHPTHIRGRKEHLLFSGKIISRAKDTAQIKFNLSGQKLMTEIFKLGQMPTPPYIKRIAKANEYQTFFAEKLGSVAAPTAGLHFTPRIFKKLKRKGVQIEFVTLHVGLGTFQPIKADDITKHQIHEEYFELDKATAKRLNQAKQGKRRIIAVGTTTVRVLETCSSKNSLLKPQNSHTKIYICPGYKFKFVDSMITNFHLPKSSLLLLISAFAGTNFIKKAYQYAIKKKYRFYSFGDVMLIK

SEQ ID NO: 64735 - protein, 356 aa, unidentified
  source 1..356: note = Burkholderia pumila
  REGION 1..356: note = tr|A0A0J7JQ47|A0A0J7JQ47_9BURK S-adenosylmethionine:tRNA ribosyltransferase-isomerase; OS = Candidatus Burkholderia pumila OX=1090375 GN=queA PE=3; SV = 1
MKFVRRSRVTVHVMFTLSDFDFNLPPALIAQSALTERSASCLLDVSGNTFIDRRFSELPNLLDAGDLLVFNDTKVLKARFFGQKASGGRVEVLIERLAGATTALVQIRASKSPTEGSTIKLADAFDVTVGERVEPFYTLHFPSDCLTLIEQYGRLPLPQYIEHDADSYDETLYQTVYAANPGAVAAPTAGLHFDDALFAALDAKGVERATLTLHVGAGTFQPVRVENIAEHKMHSEWYDLPQTLVDRIAAVKARGNKVIAVGTTSARALEAAARDAAQAGKPLAATQAETDIFITPGYEFRVVDRLVTNFHLPKSTLMMLVSAFANMDTIRDAYKHAIEQKYRFFSYGDAMILTRA

SEQ ID NO: 64736 - protein, 348 aa, unidentified
  source 1..348: note = Burkholderia verschuerenii
  REGION 1..348: note = tr|A0A0L0MAG4|A0A0L0MAG4_9BURK S-adenosylmethionine:tRNA ribosyltransferase-isomerase; OS = Candidatus Burkholderia verschuerenii OX=242163 GN=queA; PE = 3 SV=1
MFTLSDFDFNLPPELIAQSALTERSASRLLEVDNRATPVTLTDRHFSDLPNLVDAGDLLVFNDTKVLKARFFGQKASGGKIEVLIERLTGATTALAQIRASKSPLQGSTIRLADAFDVTVGERVEPFYTLHFPADCLTLIEQYGRLPLPHYIAHDADAYDETRYQTVYAANPGAVAAPTAGLHFDDALFARLDARGVERATLTLHVGAGTFQPVRVENIAEHKMHSEWYDLPQSLVDRIAAVKARGNRVIAVGTTSMRALEAAARDAADAGRPLAATQAETDIFITPGYAFRVVDRLVTNFHLPKSTLMMLVSAFAGMETIREAYRHAIEQRYRFFSYGDAMLLTRQS

SEQ ID NO: 64737 - protein, 344 aa, unidentified
  source 1..344: note = Carbobacillus altaicus
  REGION 1..344: note = tr|A0A2R6Y5B4|A0A2R6Y5B4_9BACL S-adenosylmethionine:tRNA ribosyltransferase-isomerase; OS = Candidatus Carbobacillus altaicus OX=2163959 GN=queA; PE = 3 SV=1
MMDVSLFDYDLPVELIAQSPPKERGSSRLMVLNRATGKIEHAHFSALGRYVNPGDVLVINDSKVIPARLLGQKKETGGMIEVLLIKPRHEADTWDVLVRPARRVRIGTRLFFGNDQELEAVVKERLPDGGAVVTFRYEGDWESLLDRLGEMPLPPYIREKLSDPSRYQTVYAAHAGSVAAPTAGLHFTEAHLQALVKEGVQLARLTLHVGIGTFRPVKVDQVEAHTMHSERFTIPEETVQRIHEAKAAGRRVIAVGTTSLRTLEGAYHTYGRLFAHSGETDIFIYPGFTFHVVDALLTNFHLPRSTLLMLVSAFATREQILAAYQEAMKKQYRFFSFGDAMLIV

SEQ ID NO: 64738 - protein, 348 aa, unidentified
  source 1..348: note = Cardinium hertigii
  REGION 1..348: note = tr|A0A2Z3LH15|A0A2Z3LH15_9BACT S-adenosylmethionine:tRNA ribosyltransferase-isomerase; OS = Candidatus Cardinium hertigii OX=247481 GN=queA PE=3; SV = 1
MKLSNFKFELPKDLIAQYPIESKEAARLMVVHKNSGQIEHKTIKELASYFEKGDTLVANDSKVLPCKLYGYKEKTNAEVEVILLRKLSHEHALWDTIVEPARKIRIGNKIYFGNGELVAEIIDNTTSRGRTLKLLFEGGESDFYALIEQIGHVPLPPQIGRSSTPEDSLYYKTLFAKNIGSIVLPAAGLHFTPYLLKYLELCNISVTCVTLHIGLGELKTIDMEDLTKVKAASERFIITEEAAHVVNQSLAKQKKVCAVGTSVLKAIESSVSVSCHLKANNGWTNKFILPSYPFKICNALLTTFHLPFSSSLVNIAAFGGDELVLAAYAEAIKEKYRFFLYGDAMLII

SEQ ID NO: 64739 - protein, 348 aa, unidentified
  source 1..348: note = Cardinium hertigii
  REGION 1..348: note = tr|A0A3N2QCA9|A0A3N2QCA9_9BACT S-adenosylmethionine:tRNA ribosyltransferase-isomerase; OS = Candidatus Cardinium hertigii OX=247481 GN=queA PE=3; SV = 1
MKLSNFKFELPAHNIAQYPMHPKEDARLMVLHKDSGQIEHKTLKDLPSYFSEGDTLVANDSKVLPCKLYGYKEKTNAKVEVLLLRKLNNENALWDTIVEPARKIRIGNKIYFGNGELVAEIIDNTTSRGRTLKLLFDGTEEEFYALIDQIGHMPLPNQIERPSTLDDRTYYQTIFAQNIGSIVLPAAGLHFTPYLLKYLELQNISVVSVTLHIGLGELKIIDMEDLTKVKASSERFIITQESADVVNQSIANQKKVCAIGTSVLRAIESSVSVSCKLKANNNWTNKFILPSCSFKICNALLTTFHLPSSISLVSVAAFGGEELVLAAYAEAIDKHYRFFLYGDAMLII

SEQ ID NO: 64740 - protein, 380 aa, unidentified
  source 1..380: note = Cerribacteria bacterium
  REGION 1..380: note = tr|A0A317JN14|A0A317JN14_9BACT S-adenosylmethionine:tRNA ribosyltransferase-isomerase; OS = Candidatus Cerribacteria bacterium 'Amazon FNV 2010 28 9' OX=2081795 GN=queAPE=3 SV=1
MLLSDFDYHLPDNRIAQTPIEPRDHSKLLVINRRTGQLSDDHFYELADLLTANDVLVVNDTKVFPARLFVQRVGTGHCPVPTKTIELLLEKEVEVTAKSITWATLTKPGLKLGDTIVIPNTNATGVCIQVNEYTREVKFDVNREQFFVLLDKWAKTPIPPYIHWEKDDEKHLRERYQTVYASRQGAVAAPTAGLHFTPELLKKLDQKGVVIEKVTLHVGLGTFLPVKTDDVTTHPMHSEWYELCDDVATHLNEAKQRGKRIIAVGTTTVRVLETCADSSYYLTPHTGNTQIFIYPPYQFKFVDALITNFHTPKSTLLMLVSAFVSAPNTPQCLKIENCKLKIAPLPSFSTFATSLMGKAYQRALENGYRFYSFGDAMLIE

SEQ ID NO: 64741 - protein, 349 aa, unidentified
  source 1..349: note = Chryseobacterium massiliae
  REGION 1..349: note = tr|A0A3D9AUI3|A0A3D9AUI3_9FLAO S-adenosylmethionine:tRNA ribosyltransferase-isomerase; OS = Candidatus Chryseobacterium massiliae OX=204089 GN=queA; PE = 3 SV=1
MKTSDFNFDLPAELLAEHPSEHRDEARLMVLDRKTQTIEHKLFKDVVDYFEEDDLFIFNNTKVFPARLYGNKEKTGAKIEVFLLRELDKETRVWDVLVDPARKIRIGNKLFFTEDESLVAEVIDNTTSRGRTLRFLFDGSYEEFRAKLKELGETPLPKYIKRDVEPEDAERYQTIYAKVEGAVAAPTAGLHFSKHLMKRLEIKGINFAEVTLHVGLGTFNPIEVEDLSKHKMESEEIFIDEKNAQIINNAVDANRRVCAVGTTTMRTLETSVSSNKKISAFHGWTNKFIYPPHDFGVANCMITNFHTPKSTLIMMIAAFAGRDFVMHAYEEAVKEKYKFYSYGDAMLIL

SEQ ID NO: 64742 - protein, 346 aa, unidentified
  source 1..346: note = Chrysopegis kryptomonas
  REGION 1..346: note = tr|A0A0P1NW54|A0A0P1NW54_9BACT S-adenosylmethionine:tRNA ribosyltransferase-isomerase; OS = Candidatus Chrysopegis kryptomonas OX=1633643 GN=queA; PE = 3 SV=1
MKLSDFNYQLPKNLIAKYPVEPRDSARLLVLDRKNKTIEDKVFTDIIDYLEEGDSLVLNKTKVFPARLIGRKEKTGAKIEILLLRELNPEEHLWDVLVEPARKVRIGNKIYFGDNNEVYCEVIDNTTSRGRTLKFHYEGDFFKFIEKYGQVPLPPYIKRQPEEGDKEWYQTVYAEVVGSVAAPTAGLHLSKKMLKRIEKERVKNVPIVLHIGIGTFRKVEVEDLSKHRMDSEYFEIPAESARLINETIDKKKSVVAVGTSVVRALESSVSADGHVKPYKGWTDKFIYPPYEFKIVNKLITNFHAPESTPLMLVAAFAGLDFLMQAYKHAIKNGYRFLSYGDAMLII

SEQ ID NO: 64743 - protein, 343 aa, unidentified
  source 1..343: note = Cloacimonas sp.
  REGION 1..343: note = tr|A0A1V4R183|A0A1V4R183_9BACT S-adenosylmethionine:tRNA ribosyltransferase-isomerase; OS = Candidatus Cloacimonas sp. 4484_140 OX=1956163 GN=queA; PE = 3 SV=1
MKKFVVSDFDYHLPDGMIAQYPTENREESKLMIVNRKENSISIDVFKNILNYLNINDFLVMNETKVIPARLVGKKPSGGKIEVLLLEQVDEHTWKCLVKPGRRLKIGSEMILGDLLHGKIIEWGDKGERLIRFSYDGDFFKIIDEIGRVPLPPYIKREATDLDAERYQTVFADKQGSVAAPTAGLHFTPQLLNTLKSNGISSAKVNLRIGLDTFRPVMVEHIEDHTMHTEYCSIHQAESVKINNAMEKGKNIAAVGTTSVRTLESFAEGRHIASGNKHTDIFIYPGYSFKIVDKLITNFHLPRSTLLMLVSAFAGYEFIMKAYQKAIDENFRFYSYGDAMLIL

SEQ ID NO: 64744 - protein, 347 aa, unidentified
  source 1..347: note = Cloacimonas sp.
  REGION 1..347: note = tr|A0A3D5U5W7|A0A3D5U5W7_9BACT S-adenosylmethionine:tRNA ribosyltransferase-isomerase; OS = Candidatus Cloacimonas sp. OX=2053534 GN=queA PE=3 SV=1
MTPDLNRREAFSYHLPTELIAQYPAEKRENSRLMHLHTGDQSINHRLFVELPSLLRSGDLLVLNNSKVFPARLFGRKDNGTKIEVLLLNPSSEPDKWKCLLYPAKRIKQEQYITFSNNMKGWVYPQRIDDVYEIKLEYKGDFWQEIESIGHIPLPPYIARPDESSDKTRYQTVYARQHGSVAAPTAGLHFSKDLIHKCKDMGVQFTELTLHVGIGTFRPVKTELITEHTMHSECVEILPETAKTINKAKAEGRRIISVGTTSVRGLESFWEAGKLQSGNRWTDIFIYPGYTFKVPDAIITNFHLPESTLLMMVSAFAGFEFIRKAYQVAIAERYRFFSYGDAMYIEL

SEQ ID NO: 64745 - protein, 136 aa, unidentified
  source 1..136: note = Cloacimonetes bacterium
  REGION 1..136: note = tr|A0A496ZQL0|A0A496ZQL0_9BACT S-adenosylmethionine:tRNA ribosyltransferase-isomerase (Fragment) OS=Candidatus Cloacimonetes bacterium; OX = 2030808 GN=DRI23_10655 PE=3SV=1
MNDLTKTSSYWYHLPTELVAQYPVENRSESRLLKLDKITGAVSHHTFSDIIDFLETGDVLVINKTKVIPARLFGSKSTGAKVEVFLLNQLEEDTWECLVKPGRRLQIGAKINFSENFKAEIIDHAEEGGRIVKFIW

SEQ ID NO: 64746 - protein, 345 aa, unidentified
  source 1..345: note = Cloacimonetes bacterium
  REGION 1..345: note = tr|A0A2N2L1J1|A0A2N2L1J1_9BACT S-adenosylmethionine:tRNA ribosyltransferase-isomerase; OS = Candidatus Cloacimonetes bacterium HGW-Cloacimonetes-2; OX = 2013734 GN=queA PE =3 SV=1
MCPDLFDINAYDYDLPKELIAQYPLEERTESRLMVLNRAARSIVDRKFKDIRDYLMPGDLLVLNSSKVFPARLFGTKHNGTRIEVLLMNEIEPGIWKAMVHPGKRLKEKQILVFSPRLSGEIGLPDEDGFREIAFSVDGDFWEELNQVGHIPLPPYIERLDVTEDKGRYQTVYAKHTGSIAAPTAGFHFSEDLIDDLKRDGIKIAELVLHVGIGTFRPVKTERIDQHKMHSEYCVIDQDLADLYRETRATGGRVIAVGTTSLRTMESFYKDGEIIAGSAWTDIFLHPGKKVQSIDALITNFHLPKSTLLMLVSAFAGYEMTREAYHRAVTEAYRFFSYGDAMFIY

SEQ ID NO: 64747 - protein, 270 aa, unidentified
  source 1..270: note = Coatesbacteria bacterium
  REGION 1..270: note = tr|A0A1W9S0S8|A0A1W9S0S8_9BACT S-adenosylmethionine:tRNA ribosyltransferase-isomerase (Fragment) OS=Candidatus Coatesbacteria bacterium 4484_99; OX = 1970774 GN=B6D57_0 4215 PE=3 SV=1
MNEGENISLEELDYELPEALIAQRPSEKRDECRLLVYNRTDGEISHHIFHDIVRYLREGDILVLNDAKVIKARLFFRKAETGAEIEVLLLRQIDENRWISLTRPAKRLKIGTELKHESGVLCARVIAVLEGGERLLELNYDGDLLRILEDIGEIPLPPYIKRKGIESDFNDDEYYQTVFAKNLCAIAAPTAGLHFTESLINELMKNGVSVKTITLRVGYGTFKPITTDNIRNHRMEQEDYFIPRKTATDINKGIATGRRIVACGTTVVRA

SEQ ID NO: 64748 - protein, 348 aa, unidentified
  source 1..348: note = Coatesbacteria bacterium
  REGION 1..348: note = tr|A0A1F5FGB5|A0A1F5FGB5_9BACT S-adenosylmethionine:tRNA ribosyltransferase-isomerase; OS = Candidatus Coatesbacteria bacterium RBG_13_66_14; OX = 1817816 GN=queA PE=3 SV= 1
MPISASDYDYELPRERIAQRPAERRDASRLMVLVGNRPPEHRLFTDLPKMLREGDVLVANDSRVIPARIRGVKREGGAEVEALLLRDLGDGRWTALAKPGKRLKLGTRIDFRGELFGEVLAKLEGGLVVLGLAGARPIGEILDEFGEAPLPPYIERPTGADSSDSRRYQTVYSRHPGSVAAPTAGLHFTPDLLERLRARGVEWLTLTLHVGYGTFAPLPEGDLTGHRLHTESYSLGKSTARGVNRARLEGRRVISVGTTAARVLEAASDETGLVTAASGETDLFIHPPYRFRAVDGLLTNFHLPRSSLVMLVAALVGRERILDAYREAIAEGYRFYSYGDATLLLPTG

SEQ ID NO: 64749 - protein, 353 aa, unidentified
  source 1..353: note = Collierbacteria bacterium
  REGION 1..353: note = tr|A0A1J4RXL2|A0A1J4RXL2_9BACT S-adenosylmethionine:tRNA ribosyltransferase-isomerase; OS = Candidatus Collierbacteria bacterium CG1_02_44_10; OX = 1805087 GN=queA PE=3 SV =1
MNISDFHFELPEELIGQQAIEPRDSCRLLVVNRSDQSLNHHIFRDLVDLLDDQCVLVLNDTKVFPARLFGTKETGGKIEILLLKQTSLDTFECIARGKLQVNQRLVFGPSLTCTIQSKEVTGEIHIRFNFSGLDLIAKIDELGKTPLPPYIHSDSKEAELREQYQTVYAREKGSAAAPTAGLHFTPELLNSLQERGVQIEKLTLHVGLGTFKPVTEEQVANKILHSESFTLSSDVADRLNIAKKSGKKIIAVGTTSCRVLETLFDESGNLSGGAGETHIFFQLGYRFKFIDGMITNFHLPSTSLLMLVSALVSFPNSPIHFTNFYDSLMGQAYAEAIKSKYKFFSFGDSMLIV

SEQ ID NO: 64750 - protein, 350 aa, unidentified
  source 1..350: note = Collierbacteria bacterium
  REGION 1..350: note = tr|A0A1F5F3V2|A0A1F5F3V2_9BACT S-adenosylmethionine:tRNA ribosyltransferase-isomerase; OS = Candidatus Collierbacteria bacterium RIFOXYA2_FULL_46_10 OX=1817726 GN=queAPE=3 SV=1
MSLSLHDFQYYLPEKLIAQSPAHPRDSARLLLLNRQTHTISHHRISDLPNLLPPSYDLVVNNTKVFPARLLGHKATGGAVEILLLHKLSSARYHVITRPGLKVDQTIILSPTLSARVTHVAGRIRTLIFSQTDPTLTESLAQLGSMPTPPYIKRLLKDPADYQTVYAKYGFSAAAPTAGLHFTPHLIHTIKQAHAWHELTLNVGLGTFLPVKAEKITDHLMHAESYTLSPSTSLALTHLVHSSRRLLAVGTTTVRALESNLANHPSFTPGTFSTSIFMYPPYRFRATDALLTNFHLPGSTLLMLVSAFVSAPNTKDPFTTFAASLLGKAYAEAVQEGYRFFSFGDAMLIL

SEQ ID NO: 64751 - protein, 345 aa, unidentified
  source 1..345: note = Colwellbacteria bacterium
  REGION 1..345: note = tr|A0A1G1Z4W6|A0A1G1Z4W6_9BACT S-adenosylmethionine:tRNA ribosyltransferase-isomerase; OS = Candidatus Colwellbacteria bacterium RIFCSPHIGHO2_12_FULL_44_17 OX=1797689 G N=queA PE=3 SV=1
MSSQFENLLKRYDYILPPELIAQKPALPRDSAKLLVYNKKNKKVSYDTFFNLPKYLPERAVLVFNETKVVPARLTLMKETGGKVRILYLRTVGNLIEAMVDRRIEIGSRLSLTSKLFFIVTRRGKYYFLKPSFPISRLSSILERYGSTPIPPYIKDSPLSESALRREYQTIFARQEGSVAAPTASLHFTHRLFQKLKRAGFDVRFVTLHVNLGTFASLTEEQVKEKKLHKEWYEISKETARFLNRARKEGRPIIAVGTTVTRTLESASDSRSVLKRLTGETDLFINEKYRFKFIDGLITNFHVPKSSLLMLVSAFVGRDQLFDLYRKAIRKKFRFFSFGDGMLIV

SEQ ID NO: 64752 - protein, 345 aa, unidentified; identical to SEQ ID NO: 64751
  source 1..345: note = Colwellbacteria bacterium
  REGION 1..345: note = tr|A0A1G1Z3Y4|A0A1G1Z3Y4_9BACT S-adenosylmethionine:tRNA ribosyltransferase-isomerase; OS = Candidatus Colwellbacteria bacterium RIFCSPLOWO2_02_FULL_44_20b OX=1797691 G N=queA PE=3 SV=1

SEQ ID NO: 64753 - protein, 346 aa, unidentified
  source 1..346: note = Competibacter denitrificans
  REGION 1..346: note = tr|W6M7X1|W6M7X1_9GAMM S-adenosylmethionine:tRNA ribosyltransferase-isomerase OS=Candidatus Competibacter denitrificans Run_A_D11 OX=1400863 GN=queA PE=3 SV=1
MLQRQDFYFDLPSELIAQQPPAQRGDSRLLALDGATGQVADQRFSDLLELLRPDDLLVFNDTRVIPARLSGRKASGGRVELLVERVLDEQRALVQIRANRAPKPGSLLVFDAGGTAIVVDRQQDLFEIRVDIDQPLPTWLEQHGRLPLPPYITREPTAHDAERYQTVYARQPGAVAAPTAGLHFDQALLTRISEMGVASTFITLHVGAGTFQPIRMEQITEHVMHAERFAITPETCEQIRATQERGGRVIAVGTTTLRALETASDEQGVPQPGPDETRIFIYPGYRFRCVDALITNFHLPESTLLMLVAAFAGRAAILEAYRHAVAAGYRFFSYGDAMFITRAPHN

SEQ ID NO: 64754 - protein, 358 aa, unidentified
  source 1..358: note = Competibacteraceae bacterium
  REGION 1..358: note = tr|A0A433I711|A0A433I711_9GAMM S-adenosylmethionine:tRNA ribosyltransferase-isomerase; OS = Candidatus Competibacteraceae bacterium OX=2053538; GN = queA PE=3 SV=1
MQTQPDPAGSTSEWQRQDFDFELPPELIAQHPPAQRGDSRLLVLHNADGKLQDRRFRDLPELLQPGDLMVFNDTRVIPARLFGRKASGGRIELLVERVLDLQRALVHLRASKPPQIGAHLQFDAGFAATVLARHDDLFEICVDSDQPLSALLEQHGQLPLPPYITRAPTAEDRDRYQTVYARQPGAVAAPTAGLHFDQALLERIAAQGVQRAFITLHVGAGTFRPVRVERLADHVMHAERIEVGPETCQQIRATRARGGRVIAVGTTVVRALETATGEDGVPQPWCGETRIFIRPGYRFRGVDALITNFHLPESTLLMLVAAFAGHAEIMAAYRHAVEQRYRFFSYGDAMFLTRRSVP

SEQ ID NO: 64755 - protein, 345 aa, unidentified
  source 1..345: note = Competibacteraceae bacterium
  REGION 1..345: note = tr|A0A3C1STX8|A0A3C1STX8_9GAMM S-adenosylmethionine:tRNA ribosyltransferase-isomerase; OS = Candidatus Competibacteraceae bacterium OX=2053538; GN = queA PE=3 SV=1
MRRQDFRFDLPAELIAQQPPDRRGDSRLMVLDGASGALEDRRFDELPNLLHPGDLLVFNDTRVIPARLHGRKNSGGRVELLVERLLDQRRALVHLRASKPPKPGGVLAMDAGFSVTVLGRHDDLFEIRTESDQPLLSLLEQHGQIPLPPYIARPPTATDRDRYQTVYARDPGAVAAPTAGLHFDQALLDRLQDLGVAKTFITLHVGAGTFQPVRAERLTDHRMHAERIEVGEDACEQIRAARARGGRVIAVGTTAVRALESVCDERGTPQPQRAETRIFIYPGYRFRCVDALVTNFHLPESTLLMLVAAFAGREAIMNAYRHAVERRYRFFSYGDAMLIAHRSPR

SEQ ID NO: 64756 - protein, 373 aa, unidentified
  source 1..373: note = Contendobacter odensis
  REGION 1..373: note = tr|A0A2G6PG49|A0A2G6PG49_9GAMM S-adenosylmethionine:tRNA ribosyltransferase-isomerase; OS = Candidatus Contendobacter odensis OX=1400860 GN=queA; PE = 3 SV=1
MREQGFNDGSLKPENNQCQSQQTIIAAEPQRQDFYFDLLPELIAQYPLAQRSNSRLLTLDGATGHLEDRLFHELPQLLRSDDLLIFNDTRVIPARLFGRKASGGRIEVLLERLVDEQRALVHIRASKSPKTGGLLILDAGFTATVQGRQDDLFEITVESDESLLSLFEKHGRLPLPPYISREPDAEDRERYQTIYARQPGAVAAPTAGLHFNQALFDELTKLGIEQAFITLHVGAGTFQPLRVERVTEHVMHAERIAVDAAVCERIMATRQRGGRVIAVGTTVVRALETAAANAEGVPQPWCGETRIFIYPGYRFRCVDALITNFHLPESTLLMLVSAFVGRTKILRAYDHAIKQRYRFFSYGDAMFLTRPRF

SEQ ID NO: 64757 - protein, 57 aa, unidentified
  source 1..57: note = Cryosericum odellii
  REGION 1..57: note = tr|A0A398DFW3|A0A398DFW3_9BACT S-adenosylmethionine:tRNA ribosyltransferase-isomerase (Fragment) OS=Candidatus Cryosericum odellii OX=2290917; GN = SMC5_02960 PE=3 SV=1
MHFTPELLDNVRGLGVDIEHVTLDVGLGTFQPVRVDTVEDHHMHTERFTLPEETARA

SEQ ID NO: 64758 - protein, 110 aa, unidentified
  source 1..110: note = Cryosericum odellii
  REGION 1..110: note = tr|A0A398DRM1|A0A398DRM1_9BACT S-adenosylmethionine:tRNA ribosyltransferase-isomerase (Fragment) OS=Candidatus Cryosericum odellii OX=2290917; GN = SMC5_02965 PE=3 SV=1
PEETARAVNAARANHAAVTAIGTTVARTLESCINPDGTVRADNGETSIFIYPPHEFHGFDHLVTNFHLPKSTLLMLVGAYMGMDLMWKAYHEAISERYRFFSFGDAMLIL

SEQ ID NO: 64759 - protein, 348 aa, unidentified
  source 1..348: note = Cyclonatronum proteinivorum
  REGION 1..348: note = tr|A0A345UIH8|A0A345UIH8_9BACT S-adenosylmethionine:tRNA ribosyltransferase-isomerase; OS = Candidatus Cyclonatronum proteinivorum OX=1457365; GN = queA PE=3 SV=1
MKLTDFKYETEGLNIPEFGVEPRDSAKLMVIDRANKTITHEVFSNIHKYFEKGDCLVYNNTKVFPARLKGRKEKTDAYIEVFLLRELQPENMLWDVLVEPARKIRIGNKLYFGDELVAEVVDNTTSRGRTIRFLYDGPNEELYEKLDAVGEMPMPPYIKREPVLEDKDRYQTIFAKERGAVAAPTATMHFTPELVDKLTQKGVIMAPVTLHIGWGTFRAVEVEDLTKHRMDSEYFFIPEESAELINQVRTSKTNKVVAGGTTAVRAIESSITASGLLKPTVGWTDKFIYPPYDFKLTEGLITNFHQPESTLLMLAAAFCEFDFLMHAYEEARKHDYRFFSFGDAMIII

SEQ ID NO: 64760 - protein, 332 aa, unidentified
  source 1..332: note = Cyclonatronum proteinivorum
  REGION 1..332: note = tr|A0A345UGC3|A0A345UGC3_9BACT S-adenosylmethionine:tRNA ribosyltransferase-isomerase; OS = Candidatus Cyclonatronum proteinivorum OX=1457365; GN = queA PE=3 SV=1
MRSFTLSDFDYELPAEHIAQKPAEPRDHARLLVYRRSTGEITDAVFHQLGAFLHPGTTLVMNNSRVEKARLLFGNREVFITHTHNPHTVDAMVRPGRKFKLGREVQLTESIRAMVNHIEDDGLRRLTFNLPLDHPAFEPHRNTPFPPYIAPDESLAGRYQTVYAKPEGSKAAPTAGLHFTTKLLDELREAGHPTAEVTLHVGLGTFAPVKTDDISAHKLHTESWMVGPQAAEKLSAAKHITAVGTTTTRVLESLPDNGRRFSAGAGDTGIYIKPGYRFRHTDSMITNFHLPKSTLLMMIAAFAGYDEMRHIYAHAIQKNYRFYSFGDAMLLI

SEQ ID NO: 64761 - protein, 343 aa, unidentified
  source 1..343: note = Dactylopiibacterium carminicum
  REGION 1..343: note = tr|A0A272EQA5|A0A272EQA5_9RHOO S-adenosylmethionine:tRNA ribosyltransferase-isomerase; OS = Candidatus Dactylopiibacterium carminicum OX=857335; GN = queA PE=3 SV=1
MLSLDDFDYPLPPELIAQHALADRAASRLLLAKPDALEDRAFRDLPQLLRANDLLVFNDSRVLHARLFGQKETGGQVEVMVERPIGDHEVLAMVRASKSPKPGTRLRLMEAFDAEVVGRAGANDEFFQLRFPSDAMAVDYIERHGRLPLPPYIEHAATESDESRYQTVYARELGSVAAPTAGLHFDESLFAELAAMGVRRAFVTLHVGAGTFQPVREQDLSRHKMHRELYSIPQDTVDAVAATRAAGGRVICVGTTSLRAVESAAQAGTLRAGSSETGIFITPGYDFRVADGLITNFHLPKSTLLMLVSALAGMDTIRRAYAHAVEQRYRFFSYGDAMLLERN

SEQ ID NO: 64762 - protein, 335 aa, unidentified
  source 1..335: note = Dadabacteria bacterium
  REGION 1..335: note = tr|A0A1F5IV11|A0A1F5IV11_9BACT S-adenosylmethionine:tRNA ribosyltransferase-isomerase; OS = Candidatus Dadabacteria bacterium RIFCSPHIGHO2_12_FULL_53_21 OX=1797756 GN=q ueA PE=3 SV=1
MKTSDFDYNLPEERIAYRPAAERQNSKLMVLDREKGEITHRKFFELPGLLKPGDLLVLNNTRVIPARLFGRKKSGERAEILLVEKQDSRTWKCLVRNPKEGLVIEFEDGPSGRLFSGEAGVWLVEFSGDADSYIDDSGSMPLPHYIKREPDAEDRVSYQTVYAEKPGAIAAPTAGLHFTPGLLKEIEHGGVRMTHVTLHVGIGTFKPVKTELVREHDMHPEFREIPPATADAVNAAKSRGGRVIAVGTTVMRTLESSVNEAGEVVPCKGETGLFILPGYGFRGADALITNFHLPRSTLLMLVSAFAGREFIFRAYNEALNRDYRFLSYGDAMFIK

SEQ ID NO: 64763 - protein, 334 aa, unidentified
  source 1..334: note = Dadabacteria bacterium
  REGION 1..334: note = tr|A0A520VBF9|A0A520VBF9_9BACT S-adenosylmethionine:tRNA ribosyltransferase-isomerase; OS = Candidatus Dadabacteria bacterium OX=2080303 GN=queA; PE = 3 SV=1
MNLSDYDFDLPKELIADRPRRPRGTSKLLVIEKKTGKIKATTFNRIFDYFTRKDLFIFNDTKVNPVSLSLNDEFGKQYKILLVEEVNKNVWKILIKKPKIKIFKFSGGLECEIFNDPASKEWFIKFNSESKLFIDRFGMMPIPPYLNREPDINDFVDYQTVYAKKEGSIAAPTAGLHFTKDLMKKIRMKDIGLEFLTLHVGMGTFLPIKDKIIENHKMHYEEFFISSKLISEIELTKRRGNRILTVGTTTLRALESYNLFTPPSNSWFKTDIFINQGFEFGLTDALLTNFHLPKSSLLVLISSFLGYELTKVSYEYAIKEKFKFYSYGDAMLIV

SEQ ID NO: 64764 - protein, 342 aa, unidentified
  source 1..342: note = Delongbacteria bacterium
  REGION 1..342: note = tr|A0A348NZV8|A0A348NZV8_9BACT S-adenosylmethionine:tRNA ribosyltransferase-isomerase; OS = Candidatus Delongbacteria bacterium OX=2044594 GN=queA; PE = 3 SV=1
MYEVSDYDFILPKRLIAQKPTGKRDKSRLLTIDRKYGTIGTGIFSEIEKWFDPGDVLVLNETKVIPARLYGRTEDDAEIEILLLREIEENLWEIMVKPGRKVKINGTIFFDGNASCTIQKITAEGNRTAIFECEQNFFDFIETYGKVPLPPYIERDAVELDKNRYQTVYAKVPGAVAAPTAGLHFTDDLLGSLKIKGVNICTIVLHVGAGTFKPIKVKSILDHKMHREYYEVTEQAAELINNAKSRGNKIFAVGTTAARTLETVSDKSGKIAPSKGETDIFIYPGYKFKIVDHLITNFHLPKSSLILLVSAFSSIEMIKKAYDLAIKEEFRFYSYGDAMLIL

SEQ ID NO: 64765 - protein, 343 aa, unidentified
  source 1..343: note = Delongbacteria bacterium
  REGION 1..343: note = tr|A0A2G6P7S6|A0A2G6P7S6_9BACT S-adenosylmethionine:tRNA ribosyltransferase-isomerase; OS = Candidatus Delongbacteria bacterium OX=2044594 GN=queA; PE = 3 SV=1
MRVDDFDYTLPEELIAQKPLENRDLCKMLTVDRKSGETRSLQFRDIKKILKRGDLLVVNETKVIPARFYAKREDNPNSSTVEIFLIKEISLNKWEVLVKPGRRAKVGHSFIFGDDIKGKIVEVLESGNRILYFDYNEDIKYNLFTIGNIPLPPYIKRESNERDISDYQTVFAQKEGAVAAPTAGLHFTRSLLEEIESIGVEIVKIVLHVGIGTFRPVKVDTVEEHEMHNESYEIEVDAAERINKAIDEKRRIIAVGTTSVRTLESGAIGNKVVSGKGNTKIFIYPGYNFKIINGLITNFHLPKSTLIMLVSAFAGRENIMNAYKRAVEEKYRFFSYGDAMLII

SEQ ID NO: 64766 - protein, 343 aa, unidentified
  source 1..343: note = Dependentiae bacterium
  REGION 1..343: note = tr|A0A1V5UAW3|A0A1V5UAW3_9BACT S-adenosylmethionine:tRNA ribosyltransferase-isomerase; OS = Candidatus Dependentiae bacterium ADurb.Bin246; OX = 1852839 GN=queA PE=3 SV=1
MIDVLKTSSYDFNLPASQIATFPVNPPSSAKMLVYNREKNEIFHSTFENILEFLPQDLTIFLNDTKVIKARIFGQKSTGAKLELLLNKPLFMDRYLVMIKGKVKIGTKIFFDENLIAEVLELNEDGTRVVSFFKDENSKKRVDFLSLVEILNKIGHIPLPPYMQRDDKKEDEVNYQTLFAKNYGAVAAPTASLHFTKELLEEIEKKYGLNYLTLHVGAGTFKPVDVEDILSHPMHSEYFEIGIDAKKNLDNAKKVLAVGTTVTRTIEYYARTNKIQGECDLFLNPMNKPIKVDYLLTNFHLPKSTLIMLVASFIGLEKTLELYNIAIKENYRFYSYGDGMLII

SEQ ID NO: 64767 - protein, 343 aa, unidentified
  source 1..343: note = Desantisbacteria bacterium
  REGION 1..343: note = tr|A0A1J4S9X2|A0A1J4S9X2_9BACT S-adenosylmethionine:tRNA ribosyltransferase-isomerase; OS = Candidatus Desantisbacteria bacterium CG1_02_38_46; OX = 1817893 GN=queA PE=3 S V=1
MNIADFEYNLPKELIAQEPADKREDSRLMVVFCKEKKWDHCYFKNLIDYLKSGDILVVNDTRVIPARLKGIKKGDGKVEILLVCQRGINLWDVFVRPGKKVKAGDVIQFGSSLAGVIKEITPGRGRLIEFVTNGDFKKILEEIGEVPLPHYIKRTGPPTQRDKIRYQTIYASKDGAIAAPTAGLHFSDEIMQEIIKKGVEVFTITLHVGPGSFRPIRLNDISMHKMEGEYFEISSNTFQEVMSARKSDRRVIAVGTSTVRALESAVNIPGFNGGSRWTDLYIYPGYKFKTIDALITNFHLPHSTPLVLVCAFAGMELIFKIYQEAIDKCYRFLSFGDAMLILT

SEQ ID NO: 64768 - protein, 333 aa, unidentified
  source 1..333: note = Desantisbacteria bacterium
  REGION 1..333: note = tr|A0A2M7P1A7|A0A2M7P1A7_9BACT S-adenosylmethionine:tRNA ribosyltransferase-isomerase; OS = Candidatus Desantisbacteria bacterium CG_4_10_14_3_um_filter_40_18 OX=197454 4 GN=queA PE=3 SV=1
MKTIEFDYYLPSHLIAQHPVDERDMSRLLVLHKDSGEIEHRNFKDIIEYLSNGDVLILNDTKVIPARLFGYTNQEKPFEVLLVKQLQTNLWEVLVKPIRKARIGLELVFSDELKGVICKYRHGRSVMEFSFLGDFFSVLEMIGHMPLPPYIKRFDNSRDHQQYQTTYAANPGAIAAPTAGLHFTPELLSMIQKKGVQIAYITLHVGIGTFKPIQTQDIHDHQMESEYYIIPDETKEILISNPSRVIAVGTTSVRTIESFFTTNAQAGWTDIFIYPGYRFKRVDVLITNLHTPHSTPLMLASAFAGKDILLETYQEAIEKEYRFYSYGDSMLIV

SEQ ID NO: 64769 - protein, 352 aa, unidentified
  source 1..352: note = Desulfofervidus auxilii
  REGION 1..352: note = tr|A0A127AKB8|A0A127AKB8_9DELT S-adenosylmethionine:tRNA ribosyltransferase-isomerase; OS = Candidatus Desulfofervidus auxilii OX=1621989 GN=queA; PE = 3 SV=1
MEKEWLYKLSSYDYPLPKELIAQEALPQRDKARLLILNRHTGKIVHSEFRHIVNYLGSNDVLVINDTKVIPARLFGKKETGGKVEVLLLDFNPLEGEKKVVITGALLKASRPPRLGQVIYFEDGLKAEVLDYKEGKAKLCFYAKRSFRETLFNIGHMPLPPYIKREDKPEDRRDYQTVYATKEGAIAAPTAGLHFTPKILTALRQKGVEIVRVTLHVGYGTFIPVKVDDIRKHKMHGEYYELKEETAQQLNKAFEAGKKIVAVGTTTTRLLEYLMTRYGKIQPGCGICDLFIFPGYQFKIVQAMITNFHLPKSTLVMLVSAFAGRERILNAYLEAIKKRYRFYSYGDVMFIF

SEQ ID NO: 64770 - protein, 341 aa, unidentified
  source 1..341: note = Desulforudis sp.
  REGION 1..341: note = tr|A0A3A6N0N2|A0A3A6N0N2_9FIRM S-adenosylmethionine:tRNA ribosyltransferase-isomerase; OS = Candidatus Desulforudis sp. OX=2093368 GN=queA PE=3 SV=1
MRVAEFDYELPDELIAQEPLPFRDESRLLVIGRHETGLAHRHFRDIPDYLRPGDLLVVNETRVLPVRLFGHKTTGGRVEVLLLRPVVEGRWEALVRPGRRLPEGTRVEFGPELSGKILSRTEAGGRIIEFEYEGRFEEVLERIGHVPLPPYIKRDLPAEERDRYQTVYARHSGSAAAPTAGLHFTPELLEKVKAMGVSVVSVVLHIGLDTFRPVKVENVHEHRMHSEWYSVPKASSRAITETKRVGGRVIAVGTTVTRCLEAAAGEDGTVSPGAASTDIFIYPGYKFKVIDGLVTNFHLPRSTLLMLVSALVGRERLLEAYREAVRMRYRFFSFGDAMLII

SEQ ID NO: 64771 - protein, 297 aa, unidentified
  source 1..297: note = Desulforudis audaxviator
  REGION 1..297: note = tr|A0A3S8S440|A0A3S8S440_9FIRM S-adenosylmethionine:tRNA ribosyltransferase-isomerase; OS = Candidatus Desulforudis audaxviator OX=471827; GN = Daudx_0738 PE=3 SV=1
MSETVFSAVVNWLEPGDVLVINDTKVMKARLFGKKPTGGKLEIFLLHPLGDSRWEALLKPYPKGGVLLLGDSVRVQVLEKTARSTFVLQFPTPEAAVEAMGKWGETPLPPYIKEPLADQDRYQTVLAKVHGSSAAPTAALHFTPELLQRVRDKGVQVVNFTLHMGVGSFRPIKTEYVADHNLPLEFYHLPEETVVAVQQAKRQGSRVVACGTDAVRALESAALKEFRPGSGWTDLFITPGYRFQVVDRIITNLHLPCSSHLVLVSAFASREFALQAYAYAVREKFRFLSFGDATLII

SEQ ID NO: 64772 - protein, 340 aa, unidentified
  source 1..340: note = Desulfosporosinus infrequens
  REGION 1..340: note = tr|A0A2U3LJW4|A0A2U3LJW4_9FIRM S-adenosylmethionine:tRNA ribosyltransferase-isomerase; OS = Candidatus Desulfosporosinus infrequens OX=2043169; GN = queA PE=3 SV=1
MNVADFDFELPETLIAQHPMEPRDASRLMVVNRDSKRIEHHTFRDLVSLLKKGDVLVLNNTRVIPARMIGEKEGTEAKIEVLLLKRLELDVWEALVKPGKRLKVGQKILFGNGILTCVLLDILENGNRRIRFSYSGVFETILDQLGQMPLPPYITAQLKDQGRYQTVYAKERGSVAAPTAGLHFTPELLNDLQKKGVEIVEILLHVGLGTFRPVKVEDIREHVMHSEYYQVDVKAAEQINRAKQEGRRVIAVGTTAARTLESVSKQGRVVPGVGWTDIFIYPGYSFQIVDALLTNFHFPKSTLLMLVSALAGRELILKAYGIAIAEQYRFYSFGDAMLIL

SEQ ID NO: 64773 - protein, 368 aa, unidentified
  source 1..368: note = Desulfovibrio trichonymphae
  REGION 1..368: note = tr|A0A1J1E390|A0A1J1E390_9DELT S-adenosylmethionine:tRNA ribosyltransferase-isomerase; OS = Candidatus Desulfovibrio trichonymphae OX=1725232; GN = queA PE=3 SV=1
MTPDEADFLLSSYQYELPPEQIAQFPPEKRGSSRLLVMQRAGELALAHKNFNDLPDCLPDKALLVVNNARVLQARLTGARATGGKADFLLLTPLPIVLKRARCDAAAADNAFYAEVKGLLRAGGSVRDGESLHFGAGISVTVLETAPFGVRRVRLSWREDLAASFATAGHIPLPPYIKRPDNEEDAARYQTIYAANSKTGAVAAPTAGLHFTPLLRESLTAKGFEWVEITLYVGYGTFSPVRCEDIRSYNMYKEYIEIQEDAANAIIKARAQGRPVLAVGTTSARALEGVAELCGKVRPYTGWTDIFLCPGKKFRVVDALLTNFHLPKSSLLMLVSAFAGRERVLAAYTEGVRGGYRFFSYGDAMLLR

SEQ ID NO: 64774 - protein, 346 aa, unidentified
  source 1..346: note = Dojkabacteria bacterium
  REGION 1..346: note = tr|A0A2N2F2Z1|A0A2N2F2Z1_9BACT S-adenosylmethionine:tRNA ribosyltransferase-isomerase; OS = Candidatus Dojkabacteria bacterium HGW-Dojkabacteria-1; OX = 2013761 GN=queA PE =3 SV=1
MKIEEFKYNLPEELIAKYPPKKRGTSNLLVLDKESGEITHRKYFNIPEYIQKGDIVVLNETKVINSRTFFFTPKGKRVEVLFLENIGNDIWYVLIGRARNVDIEDTLVNEEGQEVQIQIKERKENGFVVLFTKGSSHILFEKYGHTPLPPYMKREDEESDKERYNTIFSKIQGAVAAPTASLNLTDEILKEIEKRGAKILKVELRVGWGTFAPIREEDIENHKIHTEYINISQEVAEAINNRKGKVWAFGTTVARTLESVAYEQNGKYLLKSYSGDTSLYIYPGYKWKIVDTLVTNFHMPDSSLILLVSSFAGKENIKQAYEEAVSKKYKFLSYGDSMLIGNNLSK

SEQ ID NO: 64775 - protein, 379 aa, unidentified
  source 1..379: note = Dojkabacteria bacterium
  REGION 1..379: note = tr|A0A2M7W3N7|A0A2M7W3N7_9BACT S-adenosylmethionine:tRNA ribosyltransferase-isomerase; OS = Candidatus Dojkabacteria bacterium CG_4_10_14_0_2_um_filter_Dojkabacteria_WS 6_41_15; OX = 2014249 GN=queA PE=3 SV=1
MKESMNLSDYDYQFPQDAIAMYPPEKRGTTKLFVVNTQTGEIEIDQYENLDKHLTAQDVLVRNITKVFHARLFGMAINKTGQSGKQVEVFFTEPHAQSLEEYARRQYDPKEKGYKLEFLTALRGIRLDSIRYIDFGDNLRLKKISKNNDSLTGILYKTDSDFSVEELFTMFEQKGKVPLPPYIKRSTVVSDDERYQTIFAEKLGSVAAPTASLNFTKTLEARLAKQGTAIAEVTLHVGRGTFMPLRHERIEDNILHSEPYFVKNSTITALHLAKQDQKRIIAMGTTTTRTLESIAPQILDANTSHDILSETKLFVYPPFRFKIVDGLLTNFHFPRSSLITLVDAFLQYKRSKLSWRTIYEFAMKNEARLFSYGDSMLIL

SEQ ID NO: 64776 - protein, 347 aa, unidentified
  source 1..347: note = Dormibacter sp.
  REGION 1..347: note = tr|A0A2W5YYV0|A0A2W5YYV0_9BACT S-adenosylmethionine:tRNA ribosyltransferase-isomerase; OS = Candidatus Dormibacter sp. RRmetagenome_bin12; OX = 2599630 GN=queA PE=3 SV=1
MPTDMFDYVLPAGRIAQTPVEPRDASRLLHAEPGGGLSDHVFTDLPDLLRPGDLLVANDTRVRAARLRGRGADGGKEEVLLLTRLDRDRFTALVRPGRRLHDGARVSVGDALSVTIAGPAPGHPGARVVRLDGDGDLEALIAQLGEAPLPPYIRTPLEDAQRYQTVYAAGAPASAAAPTAGLHFTSRVHEALAQRGVGWTALQLDVGLGTFAPITVSDARTHRMHAERCMLPAATAATITAARAGGGRVIAVGTTVVRTLESFVDGVGALHPGTVSTELFITPGHRFGAVDGLLTNFHQPRSSLLVLLAAFLGGDAWRSVYEHALARGYRFLSFGDCMLCWRGGAPS

SEQ ID NO: 64777 - protein, 345 aa, unidentified
  source 1..345: note = Dormibacter sp.
  REGION 1..345: note = tr|A0A2W5ZA09|A0A2W5ZA09_9BACT S-adenosylmethionine:tRNA ribosyltransferase-isomerase; OS = Candidatus Dormibacter sp. RRmetagenome_bin12; OX = 2599630 GN=DLM65_04360 PE=3SV=1
MARPHTRFIAREGLEAAVPAEQRGIARDGVRLLVATRADLSHRRFRDLPEVLEAGDLVVVNTSATVPAALRAEREDGQPARVHLSGWLDPAHWIVEVRRADNRGPDRGGAAGSVLRLPGGVALTLERPHPDSASAPTRLWVVSVTPTTEPVPYLGVHGRPIAYGHLADSLPLSAHQTVYADEPGSAEMPSAGRPFTAELLVRLMAAGITVAPLILHAGVSSPEFHEPPAPERYSVPVSTARLVADTRRAGRRVVAVGTTVVRALETVAADGQIRGGEGWTDLVLEPDRPARVVSGLITGLHLPESSHLLLLEAVAGPKMVADAYATAVDAGYLWHEFGDSMLFLP

SEQ ID NO: 64778 - protein, 355 aa, unidentified
  source 1..355: note = Dormibacteraeota bacterium
  REGION 1..355: note = tr|A0A2W5Y815|A0A2W5Y815_9BACT S-adenosylmethionine:tRNA ribosyltransferase-isomerase; OS = Candidatus Dormibacteraeota bacterium OX=2052315; GN = DLM66_06945 PE=3 SV=1
MTALAPALLDFELPARLEAATPPEERGRGRDDVRLLVTHRAAGRIEHGRFTDLPDLLSAGDLLVVNRSATIPAALSAEVGGEAALLHLSSPRGDGTWVVELRHRDRDGRNSPWLDAAPETTLILPEGATARLLRPTAQGIDPGQKVRLWLAELDLPSSPTMFLNRYGAPIRYGHVDRDRPLAAHQTVFATEPGSAEMPSAGRPFTCELVTALVARGVAIAPLLLHCGVSSMEAHEPPADERFLVPAATAERVNATRRLGGRVVAVGTTVVRALESAALAPGLVLPADGWTELVIGAHHAMTAVDGLLTGWHEPRASHLAVLEAFVGSELLETSYRAALDRGYLWHEFGDSHLLLP

SEQ ID NO: 64779 - protein, 356 aa, unidentified
  source 1..356: note = Dormibacteraeota bacterium
  REGION 1..356: note = tr|A0A2W6B7T2|A0A2W6B7T2_9BACT S-adenosylmethionine:tRNA ribosyltransferase-isomerase; OS = Candidatus Dormibacteraeota bacterium OX=2052315; GN = DLM67_10540 PE=3 SV=1
MTAILSPGTLLDFELPARLEASAPPEVRGSGRGDVRLLVARRTSARIEHRRFEDLPDLLRPGDLLVVNTSATVAAAVAGRVAGAPALLHLSGRVRGDQLVELRRPDPGGRGSSPWLEAEEGAVVELPDGGAAELLRPALPRLGAAGVRLWAARLSLPTFVEAYLGLHGRPIRYGHVDREWPLAAYQTIFSLEAGSAEMPSAARPFTSELVTRLVAGGVGVVPVLLHCGVSSPEAGEPPQSEYYRVPATTAAAVNAARRAGRWIVAVGTTSVRALESAAGAGGELAAAEGWTDLVIGPERGLRTVDALITGWHEPRSSHLGMLEAVGGRSLLEASYQAALENRYLWHEFGDSHLILP

SEQ ID NO: 64780 - protein, 339 aa, unidentified
  source 1..339: note = Edwardsbacteria bacterium
  REGION 1..339: note = tr|A0A1F5RHH4|A0A1F5RHH4_9BACT S-adenosylmethionine:tRNA ribosyltransferase-isomerase; OS = Candidatus Edwardsbacteria bacterium GWF2_54_11; OX = 1817851 GN=queA PE=3 SV=1
MKLSSFDYNLPPELIAKSPAEKRDASRLMVLHRGDGRIEHRRFSDIVEYLRPSDILVVNNTRVIPARLMGHKKRTGGEVEILLLRQEAESRWNCLVRPGRRLMPGAKVGFGDGMMEAEIIEYRPGGQRLVRFTHQGDFYVTLEKVGQVPLPPYIDRGPHQADKDRYQTIYAKDAGAVAAPTAGLHFTPELMERIKAKGVEVLEILLHVGWGTFKGVEADDIREHKMEAEYYNISQAVAVILKNGKLENRRIVAVGTTTSRALESFGQSGQLSDWTEIFIYPPYEFKLVDSMITNFHLPKSTLIMLVSALAGREKVMRAYQEAIQEKYRFYSYGDAMMIV

SEQ ID NO: 64781 - protein, 339 aa, unidentified; identical to SEQ ID NO: 64780
  source 1..339: note = Edwardsbacteria bacterium
  REGION 1..339: note = tr|A0A3D0J485|A0A3D0J485_9BACT S-adenosylmethionine:tRNA ribosyltransferase-isomerase; OS = Candidatus Edwardsbacteria bacterium OX=2053551 GN=queA; PE = 3 SV=1

SEQ ID NO: 64782 - protein, 342 aa, unidentified
  source 1..342: note = Eisenbacteria bacterium
  REGION 1..342: note = tr|A0A1F5RIL3|A0A1F5RIL3_9BACT S-adenosylmethionine:tRNA ribosyltransferase-isomerase; OS = Candidatus Eisenbacteria bacterium RBG_16_71_46; OX = 1817856 GN=queA PE=3 SV=1
MRLEDLDYELPPDRIAQHPAAQRDQARLLVVDRSDGALHDARVAEIGRWLRPGDALALNETRVRPARLRLRRASGGQVELLVVRPDAGGTWRVLARPAKKAPLGERLADAGDALVLEVVEAGDRGERLVRVAAGDLGEALEREGEVPLPPYIHRAPEAADRERYQTVFARVEGAVAAPTAGLHFTPALLAALAAAGVEVVRVLLHVGPGTFRPVTEGDPRRHRMDEEYFEVPDATAAALDAARARGGRVVAVGTTTVRALESACDLHDGALGPGSGWTRKYIVPPYEFRAVDALLTNFHLPRTTLLLLVAAFAGEDLLRRAYAHAIAAGYRFYSYGDAMLVV

SEQ ID NO: 64783 - protein, 347 aa, unidentified
  source 1..347: note = Eisenbacteria bacterium
  REGION 1..347: note = tr|A0A538TI79|A0A538TI79_9BACT S-adenosylmethionine:tRNA ribosyltransferase-isomerase; OS = Candidatus Eisenbacteria bacterium OX=2212470 GN=queA; PE = 3 SV=1
MKTSDFDYELPPELIAQRPAASRDGSRLLVLDRASGAIRHMAFRDLPGLLLAGDLLVVNDTRVIPARLFGTALADREIEILLLREEPAVAPERIWSALARPARALHPGSQLTFVDPSYAALVVGTGERGMRHISFRPTRPDAPPFEAWLSRIGHVPLPPYIERADEPEDRERYQTIFAREAGSVAAPTAGLHFTGETVASMHARGIGTATVTLHVGAGTFRPVATENPADHVLDPEPYRVPPETAAAIRSNPARIIAVGTTSVRSLESWALENRPDDGGWRETGLFILPPFEFRVVTALITNFHLPRSGLLMLVSAFAGRDHVLAAYREAVRESYRFYSYGDAMLVI

SEQ ID NO: 64784 - protein, 362 aa, unidentified
  source 1..362: note = Electronema sp.
  REGION 1..362: note = tr|A0A521G3E8|A0A521G3E8_9DELT S-adenosylmethionine:tRNA ribosyltransferase-isomerase; OS = Candidatus Electronema sp. GS OX=2005002 GN=queA PE=3; SV = 1
MPDNIPEDFRLSSYDYFLPEHLIAQQPADRREQSRLLVLDCTEGQIRHSRFAALGELLRPGDLLVVNNTKVFPARLFGVKDTGGKAELLLLHFPETSSKAGEAAALALVRSSKRPQRGSLIHFAEELQARVEEILPDGKVRITLLYPESANLEQLLEQHGQLPLPPYIRRPEGNSTADSLRYQTEYARHIGSVAAPTAGLHFSHNLLDELKEKGIQQTPVTLHVGYGTFAPVRSSDIREHQIHKEFVRVPVETAEAVNATRAMGGRIWAVGTTTTRTLEFAADETGRITPTEGLCGLYLYPGCRFKAVDNLITNFHLPQSSLLFLVSALVGRTRILAAYAEAVAQGYRFFSYGDAMAIITKP

SEQ ID NO: 64785 - protein, 376 aa, unidentified
  source 1..376: note = Electrothrix communis
  REGION 1..376: note = tr|A0A3S3UGF7|A0A3S3UGF7_9DELT S-adenosylmethionine:tRNA ribosyltransferase-isomerase; OS = Candidatus Electrothrix communis OX=1859133 GN=queA; PE = 3 SV=1
MSQKYNDMAQDAVQDIYRLSSYDYPLPENQIAQQPAKQRDQSRLLVLDCVNNSRQHTQFETLCELISPGDLLVVNNTKVFPARLFGHKETGGKIEILLLHFPSLVKQEEGVCQATTQALIKSSKRPKPGSVLHFSDTLQARVESLLPDGKAEIRLFYPAHADLEQILEKHGEIPLPPYIKRPDGNTTEDAQRYQTNYARHLGSVAAPTAGLHLSNPLIEKLKDAGIGFAEVTLHVGYGTFAPVRCEDIRDHTLHKELIRVPKETAEAINTTRENGGKIWAVGTTTARTLEFAAGHADKKGRLQSVEDLCGLYMYPGYRFKIVDNLITNFHLPKSSLLFLVAALAGKKRVLEAYGEAVEQGYRFFSYGDAMAIITKS

SEQ ID NO: 64786 - protein, 329 aa, unidentified
  source 1..329: note = Electrothrix marina
  REGION 1..329: note = tr|A0A3S3QN26|A0A3S3QN26_9DELT S-adenosylmethionine:tRNA ribosyltransferase-isomerase (Fragment) OS=Candidatus Electrothrix marina OX=1859130; GN = VT99_10243 PE=3 SV=1
MSEECNDTAEDAAQEIYRLSSYDYPLPEDQIAQQPAKQRDQSRLLVLDCVNNSRHHTQFETLCELISPGDLLVVNNTKVFPARLFGHKETGGKIEMLLLHFPAPVKQENGVCQATTPALIKSSKRPKPGSVLHFSDALQAKVEALLPDGKAEVSLFYPAHADLEQLLEKHGEIPLPPYIRRPEGSTTEDAQRYQTNYARYIGSVAAPTAGLHLSNPLIEKLKDAGIGFAEVTLHVGYGTFAPVRCEDIRDHTLHKELIRVPEETAEAINTTRENGGRIWAVGTTTARTLEFAAEYADKKGRLQPIEDLCGLYMYPGYRFKIVDNLITNF

SEQ ID NO: 64787 - protein, 354 aa, unidentified
  source 1..354: note = Endobugula sertula
  REGION 1..354: note = tr|A0A1D2QNR0|A0A1D2QNR0_9GAMM S-adenosylmethionine:tRNA ribosyltransferase-isomerase; OS = Candidatus Endobugula sertula OX=62101 GN=queA PE=3 SV=1
MRRQDFSYSLPDELIAFQPTEKRSGSRLLCLDGHNGSVSHCLFPQLIDQLFAGDVMVFNDTRVIPARVFGRKCSGGKVEILVERILDQHHMLAHVRASKSPKPGTDIVLENGQSLQITGRQDTLFDIQSKTPLLDLLDEMGHMPLPPYIERGDTVEDRSRYQTVYGRHVGAVAAPTAGLHFDDNMIQAIADKGVTIVYVTLHVGAGTFQPVRVDNIDEHVMHSEVISLSATASEIINLAKREGRRVVAVGTTSVRCLESVAQFNGFSEGEVLCAYQGETSIFITPGYPFKVVDALLTNFHLSESTLLMLVSAFAGYQFTMSAYQQAIEEKYRFFSYGDAMFITHNPRAADQGPK

SEQ ID NO: 64788 - protein, 122 aa, unidentified
  source 1..122: note = Endolissoclinum sp.
  REGION 1..122: note = tr|A0A1Z8VQ09|A0A1Z8VQ09_9PROT S-adenosylmethionine:tRNA ribosyltransferase-isomerase; OS = Candidatus Endolissoclinum sp. TMED55 OX=1986641; GN = CBC15_01670 PE=3 SV=1
  VARIANT 52: note = Xaa can be any naturally occurring amino acid
MHSEWAELTNNAISLIIKTKKNGGRVIALGTTVLRVLETAALNGELRAFSGXTDLFITPGFTFNVVDLLLTNFHQPRSTLIMLVAAFAGTNRILEAYEYAKNNGYRFLSYGDACLIENINKV

SEQ ID NO: 64789 - protein, 344 aa, unidentified
  source 1..344: note = Endolissoclinum sp.
  REGION 1..344: note = tr|A0A1Z9Y1B1|A0A1Z9Y1B1_9PROT S-adenosylmethionine:tRNA ribosyltransferase-isomerase; OS = Candidatus Endolissoclinum sp. TMED26 OX=1986636; GN = queA PE=3 SV=1
MKVDLFDYVLPPALIADAPAQPRDSARMLDCTGASLADRGVKDLPAILRPGDLLVFNDTKVLPTRLTGKRGAARVEVTLHKSLGDGQWRAFARPGKRLRLHDEVIFDGGLSARVFGKHESGEVTLDFQCPETELRAALRQIGEMPLPPYIKRAQPQVSDQDDYQTVFARHEGAVAAPTAGLHFTPELLAALAAAGVETAAITLHVGAGTFLPVKTEDTENHEMHYEWGAVTPSTVTRIQRTRAAGGRIISAGTTALRILESAAKDGDLAAFEGETNLFITPGFRFNAVDMLLTNFHLPRSTLMMLVAAFHGRERIMASYAHAIAHAYRFYSYGDCCLLDRRDHV

SEQ ID NO: 64790 - protein, 341 aa, unidentified
  source 1..341: note = Endomicrobium trichonymphae
  REGION 1..341: note = tr|A0A1E5IHV3|A0A1E5IHV3_9BACT S-adenosylmethionine:tRNA ribosyltransferase-isomerase (Fragment) OS=Candidatus Endomicrobium trichonymphae; OX = 1408204 GN=ATZ36_06625PE=3 SV=1
MKRLFIKMTCKDDLLSNYDYEIPEELIAQKPVENRQDSRLFVVNRRTQKFYHRKFSDITEYFSTGDCLIINITKVVPSRLLGRKKSGGKVEVLFLDPCQKDEYYKVLIKPFISVGKKAYFENGYECEIMSKTESGETIVRFNKSGILEFLQEHGIMPLPPYIKRKGGLARELSDFDRERYQTIYAKTLGAIATPTAGLHFTENILKTFKEKGINIATLTLHVGWGTFKSITAAELKNHNMLPEKFTIDKTNAEIINLAINNNKRIAAVGTTSVRALESAAGKVGFSKNDKTFIKDCSEETSIFIYPGYKFKIINTLVTNLHLPKSTPLIMASAFSSREIML

SEQ ID NO: 64791 - protein, 273 aa, unidentified
  source 1..273: note = Endomicrobium trichonymphae
  REGION 1..273: note = tr|A0A1E5IL35|A0A1E5IL35_9BACT S-adenosylmethionine:tRNA ribosyltransferase-isomerase; OS = Candidatus Endomicrobium trichonymphae OX=1408204; GN = ATZ36_15470 PE=3 SV=1
MLFLDPCQKNEYYKVLIKPFIGVGKKAYFENGYECEIMSKMESGETVVKFNKSGVLEFLQEHGIMPLPPYIKRKGELAQELSDFDRQRYQTVYAKTLGAVAAPTAGLHFTENILKTFKENGINIATLTLHVGWGTFKSITSAELKNHNMLPEKFTIDKTNAEIINSAINNNKRIVAVGTTSVRALESAVGKVGFSKTGKAFIKDCSEETSIFICPGYKFKIINTLVTNFHLSKSTPLIMASAFSSREIMLKAYKEAVKEKYRFFSYGDSMLIL

SEQ ID NO: 64792 - protein, 351 aa, unidentified
  source 1..351: note = Enterovibrio luxaltus
  REGION 1..351: note = tr|A0A291BAA9|A0A291BAA9_9GAMM S-adenosylmethionine:tRNA ribosyltransferase-isomerase; OS = Candidatus Enterovibrio luxaltus OX=1927128 GN=queA; PE = 3 SV=1
MQVSDFHFDLPDSLIALYPQPERTTSRLLQLNGNTGELSHKRFTDILDLVETGDLMVFNNTRVIPARMFGHKASGGKIEVLVERILDDKIILAHVRSSKSPKSGTILFMGENNAYEAEIIARHDTLFEIQFNGEQVVLDILNQIGHIPLPPYINRLNENADKERYQTVYNEKPGAVAAPTAGLHFDNNMMMALKSKGVDIAFVTLHIGASTFQPVRVDNVDDHLMHAEYTEVPQHVVNAVNAAKVRGNRVIAVGTTSVRSLESAAQHSRSEGTELKPFFNDTTIFIYPGYKWQLVNALITNFHLPKSTLIMLVSSFAGYGNVMNAYQQAIGNNYRFFSYGDAMFVTRQTWL

SEQ ID NO: 64793 - protein, 295 aa, unidentified
  source 1..295: note = Enterovibrio escacola
  REGION 1..295: note = tr|A0A2A5T5Y4|A0A2A5T5Y4_9GAMM S-adenosylmethionine:tRNA ribosyltransferase-isomerase; OS = Candidatus Enterovibrio escacola OX=1927127; GN = BTN49_0478 PE=3 SV=1
MVFNNTRVVPARMLGRKASGGKIEVLMERMLDDKSIIAHVRSSKSPKLGGQLFLGENDEYEAEMVARHDALFEIRFTGKQAVLDILNHIGHMPLPPYINRPEENSDKERYQTVYNKILGATAAPTAGLHFDENMLVTLKAKGVKISFITLHIGSGTFQPIRVSKIEDHVMYAEYAEVLQDVVDEVNAAKLRGNRVVAVGTTSVRSLESAAYRAPHGKIKVKPYLSDTKIFIYPGYEWQLVDALITNFHLPESTLIMLVSSFAGYDQVMHAYKQAIENKYQFFSYGDAMFVTRKTP

SEQ ID NO: 64794 - protein, 331 aa, unidentified
  source 1..331: note = Entotheonella gemina
  REGION 1..331: note = tr|W4M4Q3|W4M4Q3_9BACT S-adenosylmethionine:tRNA ribosyltransferase-isomerase (Fragment) OS=Candidatus Entotheonella gemina OX=1429439 GN=ETSY2_24585 PE=3 SV=1
MNLNDFNFTLPPERIAQTPAVRRDASRLMIVDRQQQRITHDIFANIGQYLRAHDVLVVNDTKVIPARLHGRKAATGGKVEVFLLHDHGGGIWEVLLKPAARVRPGTVIEIGPLQAEVIERSSGAMIRIKFTPSDIYAALEQVGEVPLPPYIQRHGMDDRHGEDRERYQTVYAQHPGAVAAPTAGLHFTPELLADLEHRGIHRATVTLHVGWGTFQPMRSEKITDHRMAKECYRLVADEAARIRQARANGGRVVAVGTTSTRTLETVVQEAGEVRAKTGWSDLFIYPSYRFRIVDALVTNFHLPQSTLFLLVCAFAGRDLMLEAYHCAIAER

SEQ ID NO: 64795 - protein, 320 aa, unidentified
  source 1..320: note = Entotheonella factor
  REGION 1..320: note = tr|W4LMP0|W4LMP0_9BACT S-adenosylmethionine:tRNA ribosyltransferase-isomerase OS=Candidatus Entotheonella factor OX=1429438 GN=queA PE=3 SV=1
MIVDRQQQRITHDVFANIGHYLRPNDVLVVNDTKVIPARLHGRKAGTGGKVEVFLLHDHGEGMWDVLLKPAARARPETVIDIGPLQAKVIERLPDAMIRVQFTPSDIYDLLEQVGEVPLPPYIQRHGHQDGVEDHPGKDRERYQTVYAQQPGAVAAPTAGLHFTPELLTHLEQLGIRRATVTLHVGWGTFQPIRSAQVTDHRMAKEYYRLIADEAACIRQAQAHGGRVVAVGTTSTRTLETILQEIGEVGAKAGWSDLFIYPSYRFRIVDALVTNFHLPQSTLFLLVCAFAGRDLMLEAYHCAIAERYRFYSYGDAMLIQ

SEQ ID NO: 64796 - protein, 341 aa, unidentified
  source 1..341: note = Eremiobacter sp.
  REGION 1..341: note = tr|A0A2W5XDU5|A0A2W5XDU5_9BACT S-adenosylmethionine:tRNA ribosyltransferase-isomerase; OS = Candidatus Eremiobacter sp. RRmetagenome_bin22; OX = 2599629 GN=DLM53_10575 PE= 3 SV=1
MIEVAQTLEFALPPELEAHEPPEARGIARDGVGMLVSGARRGSNAHASFHDLPDFLEPGDVLVVNTSATLPAALEATSRSGQRIGLHVSTRLAAGLTVVEPRNTAVIEGDVLSLAAGGTVRLLSPYKASQRLWIAAFDLPEPLLTFLAHHGSPIQYPYVRAKWPLEVYQTIFALHPGSAEMPSAGRPFTARVVERLVKKGITIVPLLLHCGVASLERDEPPYSEYFDVSETTVAAVEQARSQHRHVVAVGTTAARALESCFDERGRLVASRGWTDHLITPDVGIRSFDALLTGFHETRSSHLAILQALLGRSGVATAYEAALAHGYLWHEFGDVHLIQQNR

SEQ ID NO: 64797 - protein, 350 aa, unidentified
  source 1..350: note = Eremiobacter sp.
  REGION 1..350: note = tr|A0A2W5XCE7|A0A2W5XCE7_9BACT S-adenosylmethionine:tRNA ribosyltransferase-isomerase; OS = Candidatus Eremiobacter sp. RRmetagenome_bin22; OX = 2599629 GN=queA PE=3 SV=1
MTGRNPFAAETYDYELPQELIAQQPAEQRDASRLFALMACGSRRHLMFSDLPALLRPGDVLVANDTRVLRARFFPKRAGGGAAQVLLLHKSAEPDVWLAMARPGKRVRPGDRLALSADAGIEIVDRAPGGNRLVKFYGIDASEAMRRYGVAPLPPYIRTPPRDADDRYQTVYAASDGSVAAPTAGLHFSEALLAQLTNAGIEWVALTLHVGAGTFRPVKTADVRRHVMHEEYYDISQGAAAAISRAKKEGRRIVAVGTTSLRALEDAAAHGQEGVVSAASGWTSLFVYPGYVFRTVDALITNFHLPRSTLLMLVCALAGTQRVLDAYAEAARLRYRFYSFGDAMYLERAR

SEQ ID NO: 64798 - protein, 349 aa, unidentified
  source 1..349: note = Eremiobacteraeota bacterium
  REGION 1..349: note = tr|A0A2W5YE36|A0A2W5YE36_9BACT S-adenosylmethionine:tRNA ribosyltransferase-isomerase; OS = Candidatus Eremiobacteraeota bacterium OX=2052317; GN = queA PE=3 SV=1
MTGRRAGDYDFELPADLIAQDHAHPRDASRLLIMRGSELVDACFADLPEFLQSGDALVLNETRVIPARLVGELASHTKIEILLLHPARLPRYDGRASRWRALVKPARRARMNQEIYFGQVGSARVIGVQENGMREIEFSLEVPFARFLEEWGQVPLPPYIRNDSRQARQDYQTVFARVPGSVAAPTAGLHFTAGLLERLSARGVDILKIVLDVGLGTFRPMRTESLDDHVMHAESYAIPAETAVALHRVKSEGRRVIAVGTTVVRALEGCISECGELKAGPGITNLFITPGFRFRMVDALITNFHLPRSTLLVLVSAFAGGARVVRAYRHAVTRRYRFFSFGDAMLIFP

SEQ ID NO: 64799 - protein, 334 aa, unidentified
  source 1..334: note = Eremiobacteraeota bacterium
  REGION 1..334: note = tr|A0A2W5YS23|A0A2W5YS23_9BACT S-adenosylmethionine:tRNA ribosyltransferase-isomerase; OS = Candidatus Eremiobacteraeota bacterium OX=2052317; GN = DLM50_03185 PE=3 SV=1
MLALQFELRSELEATVPPEARGVPRDGVAMLVSDRATNVHRSVLFSDLPELLRAGDLLVVNDSQTLPAALPARFGGVSFSLHLSAHIAGHLWTVEPRTDSALQPATVTLPGEGRAELLAQTDEKHRRLWYARMDLPVSAFEYLQRYGKPIRYSYVRADWPLEMYQTIFARKPGSAEMPSAARPFTLRTLNRLARRNISIVPITLHCGVASAERHEPPAAEWMDISPATAARINAAADGGNRTIAVGTSVVRALESAADRHERVTAFTGWTEHIVDGNYRPLAADGLLTGFHEPCASHLALLEAFCRPTFLRVAYSAAIGARMLWHEFGDVHLIL

SEQ ID NO: 64800 - protein, 355 aa, unidentified
  source 1..355: note = Erwinia dacicola
  REGION 1..355: note = tr|A0A1E7YXY0|A0A1E7YXY0_9GAMM S-adenosylmethionine:tRNA ribosyltransferase-isomerase; OS = Candidatus Erwinia dacicola OX=252393 GN=queA PE=3 SV=1
MRVADFTFELPESLIAHYPQAQRSGCRLLSLNGPIGVLSHGVFTDLLHKLNPGDLLVFNNTRVIPARIFGRKTSGGKIEVLIERMLDDTRVLAHVRSSKAPKPSTALLLGDDESVQATMVARHDALFEIEFNDARPVLDILNAIGHMPLAPYIDRQDEDADRELYQTVYSQKPGAVAAPTAGLHFDEPLLEALREKGIETAFVTLHVGAGTFQPVRVDIIKDHIMHAEYAEVPQDVVDAVLACKARGNQVIAVGTTSVRSLESAAQTAQDALIGPFFGDTKIFIYPGYHYQVIDALVTNFHLPESTLIMLVSAFAGYRHTMLAYQQAVAEQYRFFSYGDAMFITRNPEAYAEIPC

SEQ ID NO: 64801 - protein, 650 aa, unidentified
  source 1..650: note = Falkowbacteria bacterium
  REGION 1..650: note = tr|A0A0G0NFD9|A0A0G0NFD9_9BACT Multifunctional fusion protein OS=Candidatus Falkowbacteria bacterium GW2011_GWA2_39_24 OX=1618634 GN=ruvB PE=3 SV=1
MNRLVDNSFKEGDLDLTLRPQRLADYVGQEKVKSNLRILIEAAKQRNEPIEHVLLYGAPGLGKTTLAHIIANELGGNIRVTSGPVIEKAGDLAAILTNLAEGDILFIDEIHRLNKNIEEILYPAMEDYMLDIIIGKGPSAKTLRLDLSKFTIIGATTKASLISSPLRDRFGMVYHLDFYEPTDLQQIIQRSAKILSIALDDASANEVARRARRTPRVANRLLKRVRDYCQVKNADLIDLDSCRQALSMLEIDDLGLDSVDRRILELIIDKFNGGPVGLGTMAAATGEDIATLEEVYEPYLMQLGFLDRSPRGRVATDAAYRHLRDTSRLLVLHRDSGVLEHKQFFNVLDYLQSGDVLVLNNSKVIPARLLGQKADTKGKTEVFLSKRQGNQTNEVWECLLKGKNLNTGSIIKLDQDLIATVMTKQGDVWLVEFNKTGADFMTTIEQIGQTPLPPYIRKQLTDKDKETYQTVYAADDQKGSVAAPTAGLHFTPELLQKITDKGVRIEYLTLHVGLGTFLPVKTEYLEDHHMHAEWVEVKKETIQKIQEAKASQKKIVAVGTTTCRSLEAVWQEQDNMNAVKDFSAWVDIFIYPGYKFRVVDSLITNFHLPKSTLLMLVSALAGKDKIDRAYQEAIDQEYRFFSYGDAMFIC

SEQ ID NO: 64802 - protein, 386 aa, unidentified
  source 1..386: note = Falkowbacteria bacterium
  REGION 1..386: note = tr|A0A0G0PVS8|A0A0G0PVS8_9BACT S-adenosylmethionine:tRNA ribosyltransferase-isomerase; OS = Candidatus Falkowbacteria bacterium GW2011_GWF2_39_8; OX = 1618642 GN=queA PE=3SV=1
MKLKDFDYNLPQELIAQEPINPRDHSRLLVLDKRTGKIEHRHFFEIGEFLQVGDVLVLNDSKVFPARLIGEKAESGGKAEVFLLKRITSLDPFLPGQQKAPSLINGGRDLWQCLLSGRSCKVGMKIKFSNKLEAVIEKNNLDGTWQVRFNIAEEKFMKLIEKIGQVPLPPYIKRSLKATEQSELKLKDKKTYQTVFANEKKAGSVAAPTAGLHFTEALIKKLKKQGVQFEQVTLHVGLGTFASVKTEKITEHKMHSEWAEVDKGTLIRLLQAKKEGRRIITVGTTATRTLETVWQTVKPYDKRNMIHDFTGWTDIFIYPGYEFKAIDGIITNFHVPKSTLLMLVSALAQNGHKSKKTGLKKVLFAYDEAIKKGYRFFSYGDAMLVK

SEQ ID NO: 64803 - protein, 339 aa, unidentified
  source 1..339: note = Fermentibacter daniensis
  REGION 1..339: note = tr|A0A163VNC1|A0A163VNC1_9BACT S-adenosylmethionine:tRNA ribosyltransferase-isomerase; OS = Candidatus Fermentibacter daniensis OX=1729713 GN=queA; PE = 3 SV=1
MRREDIWFDLPEGLIAQHPAGERTGSRLLVADRSARTVSDRRFSDLPDLLTPGDLLVFNDTRVTKVRLRGRRRDTSGRAEVLLLERTGDYSWRVMLKPSRRCRAGTVLDFECGLRGEVLEVHGPGRASIAFHAPGDLKDAMDRAGDVPLPPYIRRETVPDDLERYQTVYAAADGAVAAPTAGLHFDEEMLRRLASRGIESAKLTLHVGPGTFEPLRNDDIDSNTLEPERFVIGEECSEAVSRAIDEGRRIVAVGTTTTRVLETAGRGIRPSSGRTSLFIRPPYDFQVAGGLLTNFHLPGSSLLCLVSAFMGLDFMHEAYSRAISGEYRFYSYGDAMLIT

SEQ ID NO: 64804 - protein, 341 aa, unidentified
  source 1..341: note = Fermentibacteria bacterium
  REGION 1..341: note = tr|A0A496U9D9|A0A496U9D9_9BACT S-adenosylmethionine:tRNA ribosyltransferase-isomerase; OS = Candidatus Fermentibacteria bacterium OX=2044591; GN = queA PE=3 SV=1
MLTKSDLMYDLPEELIAQHPPKVRGTCRLMVLNRKDRSFHEEKFSRIREYIKPEDALVLNDTRVIRARLSGKREDTGGTVEFLLLQELSPLVWKTMVRPGRQCRTGNVFHFNHSLKATVVQELGKGRAVVEFSSGGNTSELIEKSGTVPIPPYIKRLPDELDSVRYQTVFAENDGAVAAPTAGLHFTPEMLQSIEDTGTSINRLTLHVGPGTFQPLRRELLAENTMEEERYSISSETLESLRRCRQKGGRIVAAGTTVTRTLESIDISSQTSLSGSTSIFIHPPYRFRNVDVLLTNFHLPGSSLISLVGSFAGLDLIMDAYTKAIESKFMFYSYGDAMLII

SEQ ID NO: 64805 - protein, 161 aa, unidentified
  source 1..161: note = Fermentibacteria bacterium
  REGION 1..161: note = tr|A0A496UJZ8|A0A496UJZ8_9BACT S-adenosylmethionine:tRNA ribosyltransferase-isomerase (Fragment) OS=Candidatus Fermentibacteria bacterium; OX = 2044591 GN=DRQ25_10135 P E=3 SV=1
FTPDILTSLQSAGVNNVHVTLHVGPGTFQPLRRETLEENHLDPEEYYISAASLSAIRKARRAGGRIVAVGTTTTRVLESIDLESSESLSGETEIFIFPPYRFRNVDALITNFHLPGSSLLCLVAAFMGYEFMMEAYQHAIDESYRFYSYGDAMLIEQESGK

SEQ ID NO: 64806 - protein, 357 aa, unidentified
  source 1..357: note = Filomicrobium marinum
  REGION 1..357: note = tr|A0A0D6JHG6|A0A0D6JHG6_9RHIZ S-adenosylmethionine:tRNA ribosyltransferase-isomerase; OS = Candidatus Filomicrobium marinum OX=1608628 GN=queA; PE = 3 SV=1
MRTDLFDFELPEDLIALRPLSPRDASRLLVVKPGEPPADRMFCDLPSLLRPGDCLVFNDTRVVPAALLGQRIRGDQVSEVHFNLHARVDERHWRAFARPAKRLADGDRIRFVKSAGETDATPLEATVKAKGEGGEVTLAFDQAGPDLDSAIALVGQMPLPPYIAARRAADDTDRVNYQTIYATREGAVAAPTAGLHFTQELLSALYDKGMCSQFVTLHVGAGTFLPVKVENTEDHRMHAEWGEVSSEVAAALNAVKSNGGRIVAVGTTALRLLESAADDHGIIQTVSGDTDIFITPGYRFKAVDILLTNFHLPKSTLFMLVCALAGTDTMTKAYAHAVAERYRFYSYGDASLLFRAE

SEQ ID NO: 64807 - protein, 355 aa, unidentified
  source 1..355: note = Firestonebacteria bacterium
  REGION 1..355: note = tr|A0A1F5USH5|A0A1F5USH5_9BACT S-adenosylmethionine:tRNA ribosyltransferase-isomerase; OS = Candidatus Firestonebacteria bacterium RIFOXYC2_FULL_39_67 OX=1817861 GN=que A PE=3 SV=1
MKATAYDYNLPKEQIAQLPLELRAACKLMVLRKDAQTIEHSRFDNIKNYLKPGDLLVINNTKVVPAKLLLYRDKALGKIDALLVSKETGGKELWRVILSKRKGMEPGTILLTEKKELTALIKSLIDDEFLIEFTDTTGESLSESIKEIGFAPLPPYIKRKDKNTEKAFKNKDKIDYQTVFARFDGSIAAPTAGMHFTPDLMQELKQFGVEFVEITHHIGKGTFKPIKTDEIENHHMDKEYFEIDADSADRINKAKLAGRRVITVGTSSTRAIETSCIDPKQGLIAPGKAWTGLFITDGYKYKVIDAIITNFHLPKSTNLVMTCVFGGKEYILKAYNEAVAQNYRFYSYGDAMFLS

SEQ ID NO: 64808 - protein, 355 aa, unidentified
  source 1..355: note = Firestonebacteria bacterium
  REGION 1..355: note = tr|A0A1F5UEZ9|A0A1F5UEZ9_9BACT S-adenosylmethionine:tRNA ribosyltransferase-isomerase; OS = Candidatus Firestonebacteria bacterium GWA2_43_8; OX = 1817858 GN=queA PE=3 SV= 1
MKVTAYDYNLPKEQIAQLPLELRAACNLMVLRKDAQTIEHSRFDNIKNYLKPGDLLVINNTKVVPAKLLLYRCKTLGKIDALLVSKETGGKELWRVILSKRKGMEPGVTLLTEKKELTAVIKGLIDDEFLIEFVDTTGESLSESIKEIGFAPLPPYIKRKDKSTEKAFKNKDKCDYQTVFARFDGSIAAPTAGMHFTPDLMLELKDFGVEFVEITHHIGKGTFKPIKTDEIENHHMDKEYFEIDADSADKINKAKLAGRRVITVGTSSTRALETACIDPVKGLIAPGKAWTGLFITDGYKYKVIDAIITNFHLPKSTNLVMTCVFGGKEYILKAYNEAVAQNYRFYSYGDAMFLS

SEQ ID NO: 64809 - protein, 345 aa, unidentified
  source 1..345: note = Fischerbacteria bacterium
  REGION 1..345: note = tr|A0A1F5VUX8|A0A1F5VUX8_9BACT S-adenosylmethionine:tRNA ribosyltransferase-isomerase; OS = Candidatus Fischerbacteria bacterium RBG_13_37_8; OX = 1817863 GN=queA PE=3 SV= 1
MDISEFDYSLDKKLIAQQPLSRREASKMMILNRDTGRITHSFFYDFLSFVSQEYILVLNNTKVFPARLYAHTAEGKEIEVLLVKELTDGVWETMAKPLKKIKKHATLYFDDGIHSCTVTDFTSRNRLIVTISPSNDFWDFIERYGKPPLPPYIKRLSNEYSETDWNRYQTVFAQKTGSIAAPTAGFHFSPEILNALQEKNIHITYITLHVGSATFQPLRVTNITEHTMENEYFEMSVESFNKIKNAKEAGKKILAVGTTSVRTIESVDFTRSITESLKGWTNLFIYPGYEFKMTDAMLTNFHLPKSTLLMLVYAFASKKYMFAAYQEAMQHEYRFYSYGDCMLIL

SEQ ID NO: 64810 - protein, 361 aa, unidentified
  source 1..361: note = Fokinia solitaria
  REGION 1..361: note = tr|A0A2U8BSP6|A0A2U8BSP6_9RICK S-adenosylmethionine:tRNA ribosyltransferase-isomerase; OS = Candidatus Fokinia solitaria OX=1802984 GN=queA PE=3; SV = 1
MNIATEEFYFHLPQELIARYPVTPRDSSKLLYMNKTGVLQDLSFKDVVKLLKKNDVLVLNDTKVIPSMLKCSTKDSNTRVRIDILKHYHDHDILYCNALVTPRKHCRPNTILQCISNKNTTLELSVEDIQQNIVTLKVHSSKSFHDIMREYGNVPLPPYILKARSAHNIIEKQETDKDNYQTVYAKYDGSIAAPTAGLHFTDTLLAEISKIGVKICYITLHVGLGTFLPINTSLLNEHKMHEETFEVTQETIDILRNAKENHSRIVAVGTTSIRVLEHIALRNISTASIGTTDIFISPGYKFKTVNSIITNFHMSKSTPLVLVCAAAGKEQIFNMYKHAIDGKYRMLSYGDACMIDVVTNE

SEQ ID NO: 64811 - protein, 341 aa, unidentified
  source 1..341: note = Frackibacter sp.
  REGION 1..341: note = tr|A0A1H8B6N3|A0A1H8B6N3_9FIRM S-adenosylmethionine:tRNA ribosyltransferase-isomerase; OS = Candidatus Frackibacter sp. WG12 OX=2017977 GN=queA; PE = 3 SV=1
MKVADFDYHLPEELIAQEPMNPRDESRLMIVDRNSDEIEERVFKEIIDFFESGDTIVLNNTKVIPARLYGFKEETGGKVEFLLLTEVGLDTWEVLVRPGKKVKIGTRVVFGDRDLIAEVKERTEFGGRVVKFEYDGVFAEILDKLGEMPLPPYITKELEEREQYQTVFAKKRGAAAAPTAGLHFTEEVLSKLEEKGVNIVYITLHVGLGTFRPVRAEKVEEHDMHAEYYEVSQETAEIINKTKEEGKRVFAVGTTVTRTLETVGNEGGYVKADKGWTDIFIYPGYEYRVVDALLTNFHLPKSTLIMLVSAFCGQDLVMEAYQKAVEDEYRFYSFGDAMLII

SEQ ID NO: 64812 - protein, 67 aa, unidentified
  source 1..67: note = Frackibacter sp.
  REGION 1..67: note = tr|A0A139CSB9|A0A139CSB9_9FIRM S-adenosylmethionine:tRNA ribosyltransferase-isomerase (Fragment) OS=Candidatus Frackibacter sp. T328-2; OX = 1785949 GN=AWU54_797 PE=3 S V=1
GWTDIFIYPGYEYRVVDALLTNFHLPKSTLIMLVSAFCGQDLVMEAYQKAVEDEYRFYSFGDAMLII

SEQ ID NO: 64813 - protein, 384 aa, unidentified
  source 1..384: note = Fukatsuia symbiotica
  REGION 1..384: note = tr|A0A2U8I3G5|A0A2U8I3G5_9GAMM S-adenosylmethionine:tRNA ribosyltransferase-isomerase; OS = Candidatus Fukatsuia symbiotica OX=1878942 GN=queA PE=3; SV = 1
MRVTDFSFTLPESLIAHSPYSQRSGCRLLSLDGQSGCVTHGIFTDLLQTLQRGDLLVFNNTRVIPARLFGRKASGGKLEILVERVLDDHRVLAHVKTSKAPKPGTALLLGDDQPVDMTAVGTVIPATVLARHDSLFELRFDDQRDVFTLLHTIGHMPLPPYINRPDEAVDRELYQTVYSERPGAVAAPTAGLHFDQPLLDALRAKGIEMAFVTLHVGAGTFQPVRVENVEQHVMHAEYVEVPQAVVDAVLTCKARGKRVIAVGTTSVRSLESAARNAEENAVHNSKNAAIVPFLGDTRIFIYPGYHYRLVDALITNFHLPESTLIMLVSAFAGYKNTMKAYQQAIGEKYRFFSYGDAMFISRNPLAAQEEIKHSILEPIRDRCE

SEQ ID NO: 64814 - protein, 340 aa, unidentified
  source 1..340: note = Gallionella acididurans
  REGION 1..340: note = tr|A0A139BSJ8|A0A139BSJ8_9PROT S-adenosylmethionine:tRNA ribosyltransferase-isomerase; OS = Candidatus Gallionella acididurans OX=1796491 GN=queA; PE = 3 SV=1
MRTDEFDFVLPDRLIAQHPPEQRGASRLLHVHAGVLGDCRFADLIRLVRPGDVLVLNDTRVIKARMSGSKESGGKVEVLVERVLDAHEVLAQVRASHAPKPASRLLLAGGLTVEVLERAGEFFRLRFPAGEPVLDLLERYGKLPLPPYITHAATDQDERRYQTVFAREAGAVAAPTAGLHFDDAMLQALRDHGVNIVYVTLHVGAGTFQPVRAELIHEHAMHSERYAISQATVDAIARARATGGRVIAGGTTSLRALESAAGTGLLQAGSGETEIFITPGYRFNAVDVLLTNFHLPRSTLLMLVCAFGGMNEMLAAYRHAVEREYRFFSYGDAMLIERKP

SEQ ID NO: 64815 - protein, 348 aa, unidentified
  source 1..348: note = Gastranaerophilales bacterium
  REGION 1..348: note = tr|A0A292RGD6|A0A292RGD6_9BACT S-adenosylmethionine:tRNA ribosyltransferase-isomerase; OS = Candidatus Gastranaerophilales bacterium HUM_9; OX = 1916320 GN=queA PE=3 SV=1
MKVSEFDYDLPEELIAQTPSQKRDYSKMLVVNPADNTLEDKHFFDIVDYLDDNCVLILNNTKVIPARLYGYKSTGAKIEIFLLKQKDNKQWEVLIKPSKRVKVGTEITISDKLSATVIKPLEDAGKWLVQLSYEGDIYGVLSEVGNVPLPPYIERKMTSEELKKLDYERYQTVYAKNEGSVAAPTAGLHFTTEILNKLKAKGVQIGYVTLSVGLGTFRPVMCDDVLDHKMDSEEYEISEETAKLINDAKAQGKKIVAVGTTSVRTLESAYKEFGKIQACRSASTLFIYPPYEFKVVDKLITNFHLPKSTLLMLVSALTSKECIFNAYKHAIENKYRFYSYGDCMFINK

SEQ ID NO: 64816 - protein, 347 aa, unidentified
  source 1..347: note = Gastranaerophilales bacterium
  REGION 1..347: note = tr|A0A292S0S5|A0A292S0S5_9BACT S-adenosylmethionine:tRNA ribosyltransferase-isomerase; OS = Candidatus Gastranaerophilales bacterium HUM_17; OX = 1916220 GN=queA PE=3 SV=1
MFLSEFDYELPEELIAQRPSDKRENSRMMVLNRDEHKILNKHFYDIVDLLDENHVLILNDTKVIPARLYGYKDTGAKIEVFLLKERENKNWEVLIKPSKRVRVGTVIKISEELSCEVKMPLPDDGKWLVQMIYEGDIFEILHRVGNIPLPPYIERKMSNEELKKLDFERYQTVYAREEGSVAAPTAGLHFTQEILKKLEDKGVQVGYVTLNVGIGTFRPVKCDNILEHHMDSETFEIKQETADLINQAKAEGKKLVAVGTTTVRTLESAYKMFGEIKACKGASELFIYPPYKFGVVDKLITNFHLPKSTLLMLVSALAGKDFVFEAYKKAIEEKYRFYSYGDCMFIN

SEQ ID NO: 64817 - protein, 347 aa, unidentified
  source 1..347: note = Glassbacteria bacterium
  REGION 1..347: note = tr|A0A1F5YL79|A0A1F5YL79_9BACT S-adenosylmethionine:tRNA ribosyltransferase-isomerase; OS = Candidatus Glassbacteria bacterium RIFCSPLOWO2_12_FULL_58_11 OX=1817867 GN=q ueA PE=3 SV=1
MPDSGLRTADFDYELPPELIAQHPAKERDASRLLVLHRASGKIEHRSFSDLPEYLSSTDLLVLNNTRVFPARLTGTLSGGAAFEALLVRRLEGPRWLALVRPGRRLKPGKHLALGEGLELALEDFGAQEGERIISLSAPAGKDPLELVEKLGHVPLPPYIGRPDTAEDRERYQTVYARVSGAVAAPTAGLHFTPELLQKLEQAGIGRLEVTLHVGPGTFRPVTAENISGHRMDAEYYEIAEKTWTRIKEVKAGGGRVLAVGTTAVRALESAAADQPPRLAGWTELFITPGFTFRAADIMLTNFHLPRSTLLMLVSALAGKELIDRAYREAVRERYRFYSYGDAMLIL

SEQ ID NO: 64818 - protein, 357 aa, unidentified
  source 1..357: note = Glomeribacter gigasporarum
  REGION 1..357: note = tr|G2JAM8|G2JAM8_9BURK S-adenosylmethionine:tRNA ribosyltransferase-isomerase OS=Candidatus Glomeribacter gigasporarum BEG34 OX=1070319 GN=queA PE=3 SV=1
MYTLADFDFDLPPEFIAQTPLAKRSASRLLEVIHASPHQEDDAPPARLVDRQFAELPACLQPGDLLVFNDTKVLKARLFGRKASGGKVEVLIERVLDARTALAQVRASKRPAVGTTLKLADAFDVTVGARVEPFHTLHFPDDCLTLIERYGRLPLPPYIEHDPDATDEMRYQTIFAKHSGAVAAPTAGLHFDDTTFEALEAHGIRRATLTLHVGAGTFQPVRVNNLAEHKMHREWYQLPQSLIDQIAATQAAGRAVIAVGTTSMRALEAAARDADRAQRALTATAAETDIFITPGYRFQIVDRLVTNFHLPKSTLLMLVSAFAGMQAIRFAYRHAIEQRYRFFSYGDAMLLTRKDNE

SEQ ID NO: 64819 - protein, 342 aa, unidentified
  source 1..342: note = Goldbacteria bacterium
  REGION 1..342: note = tr|A0A2N1W3R5|A0A2N1W3R5_9BACT S-adenosylmethionine:tRNA ribosyltransferase-isomerase; OS = Candidatus Goldbacteria bacterium HGW-Goldbacteria-1; OX = 2013807 GN=queA PE=3SV=1
MNKFNLENYDYELPEGLIAQLPSPQRDKSRLIVVDKHTGVLEHRLFEDITNYLKPGDCLVLNDTRVIPARIYGRTKTGAAIELLLLSFKEGQWEAIMGNSRRVKEGDSVILDGNITAVIKQKNGKTVMVDFSAGREEVMKAFQKHGKIPLPPYIKEDDSAFHRERYQTVYASKEGATAAPTAGLHFTPELINRIKKSGVSVEYITLHTGLGTFAPVTETDIREHKIHNEEYEISQAAACAINGVKKSGSRIIAVGTTSLRTLESACSEGKIVSGKGNTSIYIYPGYEFKAVDCLITNFHLPRTTLLALVYAFAGEKNTKNAYKTAIENKYRFFSYGDAMLIK

SEQ ID NO: 64820 - protein, 322 aa, unidentified
  source 1..322: note = Gottesmanbacteria bacterium
  REGION 1..322: note = tr|A0A1F6BDR9|A0A1F6BDR9_9BACT S-adenosylmethionine:tRNA ribosyltransferase-isomerase; OS = Candidatus Gottesmanbacteria bacterium RIFOXYB1_FULL_47_11 OX=1798401 GN=que A PE=3 SV=1
MSFNTGDFDYHLPVSHIAQVPIVPREAARLMVVDRKTGTITHTYVAHFPDYLHQGDVLVINNTKVFHARLKSGNKELFLVRTIGGNRWQAIGKKLIPGETIVFAQDFRATILEKHNNGTVVVEFGQGDVIALANKYGEVPVPPYIKTIPKDADYQTAYAKIIGSVAAPTAGFHLTKALLQTIKNRGVEIVEITLHVGLGTFLPIKTASLEAHPMHSEWVEIKPDAAEAIKRAKRVVAVGTTTVRALEGTGGKPYMGDINLFIKPEYKFCVVDGMLTNFHLPKSTLIVLVSAFADRKLILHAYKEAIEHGYRFYSFGDAMFLA

SEQ ID NO: 64821 - protein, 380 aa, unidentified
  source 1..380: note = Gracilibacteria bacterium
  REGION 1..380: note = tr|A0A328EBX7|A0A328EBX7_9BACT S-adenosylmethionine:tRNA ribosyltransferase-isomerase; OS = Candidatus Gracilibacteria bacterium GN02-873; OX = 1914866 GN=BLM37_03410 PE=3SV=1
MFSLSDYRFDLPAELIAETAAHPAHAAKLLVVSQKNSQILSEATFWELDQFLDENSVLFFNNSKVLRARIPLRNQTLFRDGEEKTLKDGEIFFLKNRDKNHFEALVRPGKKFRIGTKIFLGNFELTVTENTDSGRILHISGGEIFALLDQFGELPLPPYIEYSSEKEADYQNIFAKKNGSVAAPTAGLHFSEALLYKLKNPREFVTLHIGLGTFKTIDTDDIRAYEIHSETAEIHHEIFGKIFEYKKNHQKIVAVGTTACRTLESLPSLWKNLTDEEKNIFDENVRNFWEKISEKAEKNWITEYIFSEDFIEFSTRAYITPGYDFAVIDELITNFHLPESSLLVLVSAMIGQENLLKIYDHAIREKYRFFSFGDGMYLKK

SEQ ID NO: 64822 - protein, 350 aa, unidentified
  source 1..350: note = Gracilibacteria bacterium
  REGION 1..350: note = tr|A0A2U7P9A4|A0A2U7P9A4_9BACT S-adenosylmethionine:tRNA ribosyltransferase-isomerase; OS = Candidatus Gracilibacteria bacterium HOT-871 OX=1540872; GN = queA PE=3 SV=1
MNLSEFDYDLPEELIAQEAIEPRDHSKLLKINPNSKKIEQKLFFEILEDLGKNDVLVLNKTRVINARLKGFIENDKTKICEIFLHKQISDKIWDCLIYPGRKLKPGKKVFFYLENKFILKAEIKDFSDSGRIVEFDKGGIEFLEIIEKIGKIPLPPYIKDNHQESGRYQTVFNEISGSVAAPTAGLHFTEELLEKLEKKGVKIEKVLLHVGLGTFKNVETENILEHKMHSEYIELDEKTAENLNNYKKSGKRIIAVGTTSIRVLESFANNTGTLESGKKDTNIFIYPGYNWKFVDAIITNFHLPKSTLLMLVSSFAGKEFIKDVYNYAIKNKFRFFSFGDAMFIEEKEKI

SEQ ID NO: 64823 - protein, 354 aa, unidentified
  source 1..354: note = Gullanella endobia
  REGION 1..354: note = tr|A0A143WQJ7|A0A143WQJ7_9ENTR S-adenosylmethionine:tRNA ribosyltransferase-isomerase; OS = Candidatus Gullanella endobia OX=1070130 GN=queA PE=3; SV = 1
MHVTNFSFELPDTLIACYPQEKRSACRLLSLDGPTGAISHKIFTDLLEKLEPGDLVVFNNTLVIPARLFGKKISGGKIEVLIEKILDDKRVLAHVRASKAPKLDTTILLGDNNNIITTVVAYHDSLFELFFNDTRDVITLLNDVGHIPLPKYINRLDNAIDRNLYQTVYGNRYGAVAAPTAGLHFDKPLLAALHDKGIKIAFITLHIGAGTFQPVRVNEIEQHQMHSEYTEVTQEVVDAILACKARGNRVVAVGTTSVRSLESAAVTENNKVIAPFSGNTRIFIYPGYQFRIIDILITNFHLPKSTLIMLVSAFAGYRHTLAAYREAVDKAYRFFSYGDAMFITRNPAASKEKI

SEQ ID NO: 64824 - protein, 357 aa, unidentified
  source 1..357: note = Hamiltonella defensa
  REGION 1..357: note = tr|A0A249DZC5|A0A249DZC5_9ENTR S-adenosylmethionine:tRNA ribosyltransferase-isomerase; OS = Candidatus Hamiltonella defensa (Bemisia tabaci); OX = 672795 GN=queA PE=3 SV=1
MRLSDFSFELPESLVAQYPLEKRSDCRLLCLNGETGTMTEGVFTDLLYQLEQGDLLVLNNTRVIPARVFGRKPSGGKLEILVERILSPNRVLAHLKSSKTPKLGAQFLLGDTANIPVTLMARHASLFELRFDVREDLLMLLQSIGHIPLPPYIPRADEPKDHELYQTVYSQHLGAVAAPTAGLHFDKPLLKALKDRGIETAFVTLHVGAGTFQPVKTDNITEHVMHAEYAEVSQEVVDAVLACKARGKRVVAVGTTSVRSLETAAQKTKNSFLTPFSGETSIFIYPGYQYQIVDALITNFHLPKSTLIMLVCAFAGYQNTLRAYQKAIDEKYRFFSYGDAMFITHNPKAAQENRVKK

SEQ ID NO: 64825 - protein, 357 aa, unidentified
  source 1..357: note = Hamiltonella defensa
  REGION 1..357: note = tr|A0A2D3SZQ3|A0A2D3SZQ3_9ENTR S-adenosylmethionine:tRNA ribosyltransferase-isomerase; OS = Candidatus Hamiltonella defensa OX=138072 GN=queA PE=3; SV = 1
MRLSDFSFELPESLVAQYPLEKRSDCRLLCLNGETGTMTEGVFTDLLYQLEQGDLLVLNNTRVIPARVFGRKPSGGKLEILVERILSPNRVLVHLKSSKTPKLGAQFLLGDTANIPVTLMARHASLFELRFDVREDALMLLQSIGHIPLPPYIPRADEPKDHELYQTVYGQHLGAVAAPTAGLHFDNPLLNALKARGIETAFVTLHVGAGTFQPVKTDNITEHVMHSEYAEVSQEVVDAVLACKARGKRVVAVGTTSVRSLETAAQKTKNSFLTPFSGETSIFIYPGYQYQIVDALITNFHLPKSTLIMLVCAFAGYQNTLRAYKKAIDEKYRFFSYGDAMFITHNPKAAQENRVKK

SEQ ID NO: 64826 - protein, 338 aa, unidentified
  source 1..338: note = Harrisonbacteria bacterium
  REGION 1..338: note = tr|A0A1G1ZTE8|A0A1G1ZTE8_9BACT S-adenosylmethionine:tRNA ribosyltransferase-isomerase; OS = Candidatus Harrisonbacteria bacterium RIFCSPLOWO2_02_FULL_45_10c OX=1798410GN=queA PE=3 SV=1
MEAYDYQFPQELIAQQPAVPRDSARLLVYNRKTDSAAFNTFKNLSKYLPPKAVLVFNETKVIPARVELQKATGGKVKILYLERIGGLIKVMADRQINIDSRLFLKKKPVFLIEKQTEQFYFLKPLFLIQRLNNFFETNGVAPLPPYIKHSPLGEAQIKREYQAVFAKYLGSIAAPTASLHFTKSLLRTLKQRGFSIEFVTLHVNLGTFAPLTDAQLQNGKLHQEYYEISSRTAERLNRFKKDGRQIVAVGTTVVRTLESASDTAGILKKLSGATDLFIRPGYRFNLVDSLITNFHVPRSSLLMLAAAFSGREELFKLYQKAIQRKFRLFSFGDGMLII

SEQ ID NO: 64827 - protein, 356 aa, unidentified
  source 1..356: note = Hoaglandella endobia
  REGION 1..356: note = tr|A0A143WTM7|A0A143WTM7_9ENTR S-adenosylmethionine:tRNA ribosyltransferase-isomerase; OS = Candidatus Hoaglandella endobia OX=1778263 GN=queA PE=3; SV = 1
MRVADFFFKLPNNLIARYPQAERSACRLLSLDGQTGEITHRIFTDLLTILVAGDLLVFNNTRVIPARLFGRKFSGGKIEVLVERVLDDNRVLAHVRTSNTPKAGDTILLGDNQTIDVTMVARYETLFELRFNNTNNVLTLLNESGHIPLPPYIDRPDETMDRELYQTVYGDRPGAVAAPTAGLHFDEPLQAALRAKGIEMAFLTLYVGTGSFQPVRVENIEQHKMHAERAEVPQEVVDAVLACKARGNRVIAVGTTSVRSLESAAAAAGKKILVPFFGDTRIFIYPGYRFHIIDALITNFHLPASTLIMLVAAFAGYRHTLAAYREAVAQGYHFFSYGDAMFITQNNLAAKLGWYA

SEQ ID NO: 64828 - protein, 331 aa, unidentified
  source 1..331: note = Hydrogenedentes bacterium
  REGION 1..331: note = tr|A0A2M6Z649|A0A2M6Z649_9BACT S-adenosylmethionine:tRNA ribosyltransferase-isomerase; OS = Candidatus Hydrogenedentes bacterium CG07_land_8_20_14_0_80_42_17 OX=1974588GN=queA PE=3 SV=1
MFDPRYEYILPPDRIAYYPAEKRDESRLMLVDCENNLMSDQGKFKDVKRFFRDGDILVLNNTKVFKARLFGARRSGGKVEALLLEQNSSRVKALLKPMTRLKIGEKIKFGEFEAEFIGKTSDGIGILEFGDKSAAEVLKKCGKIPLPPYIKRPAEKIDEERYQTVIASEGDSAAAPTAGLHFTENLISELNRIGVKIVYVTLDVSYATFAPLREGQTKLHTERYKIPEDTVSALSNLSGEGRIIAVGTTVVRTLESFAMTGIKEGETDIFIRPGFDFKFVSAMITNFHLPSSSLLMLVHAFSGDIIFNAYEKALEWNFRFFSYGDCMMILR

SEQ ID NO: 64829 - protein, 341 aa, unidentified
  source 1..341: note = Hydrogenedentes bacterium
  REGION 1..341: note = tr|A0A2A5E9Q5|A0A2A5E9Q5_9BACT S-adenosylmethionine:tRNA ribosyltransferase-isomerase; OS = Candidatus Hydrogenedentes bacterium OX=2030809 GN=queA; PE = 3 SV=1
  VARIANT 18: note = Xaa can be any naturally occurring amino acid
  VARIANT 20: note = Xaa can be any naturally occurring amino acid
  VARIANT 23: note = Xaa can be any naturally occurring amino acid
  VARIANT 103: note = Xaa can be any naturally occurring amino acid
MKTDILDYSLPSKCIAQXPXEKXDASRLLVVDRQAGTFKEDEFAHIGQYLNPGDSLVLNDTRVIRARLQGHKPTGGKVEIFLLHEISPGEWEALVRPSARIKXGTIISIGDDSLHAVVNDPLPGGRRSVHFEESNVIARLEEAGEIPLPPYIHREDREPIDAERYQTVYAEHPGAVAAPTAGLHFTPELLDSLEHKGIHRTSLTLHVGYGTFKPVQVDRLEDHTVDPEDFDFPESTADLLNETRTAGHRVVAVGTTSTRVLETQFVDGAFRPGHGITKCYIFPPYPFRAVDTLITNFHLPKSSLLALVCAFGGTELILEAYRHAAKNDFRFYSYGDAMLVL

SEQ ID NO: 64830 - protein, 340 aa, unidentified
  source 1..340: note = Hydrothermae bacterium
  REGION 1..340: note = tr|A0A496U7C2|A0A496U7C2_9BACT S-adenosylmethionine:tRNA ribosyltransferase-isomerase; OS = Candidatus Hydrothermae bacterium OX=2250085 GN=queA; PE = 3 SV=1
MLKIDLFDFELPEELIAQYPVPKREMARLLVLHRKTGLIEHRVFKDIILYFKEGDLLVLNKTKVIKARLYGRRDDTGGKLEFLVTKIFEERRFEALAKPGRRAKQGVKIRIGKDILLEIKEITEGKRIVEIKHGPEIYTLLDKYGKVPLPPYIKREPRGEDEEWYQTVFAEIPGSIAAPTAGLHFTQEILTQLKQKGVLIEYILLHVGTGTFKPIKTKDITQHKMDAEYYEIPEKVLENIVKIKQSKGRLIACGTTTVRALESWSYDNTRSKGWTSLFIYPGYSFKVVDGMVTNFHLPKSTPLLMVSALAGRENIMKAYKEAVALKYRFFSYGDAMLIIP

SEQ ID NO: 64831 - protein, 343 aa, unidentified
  source 1..343: note = Izimaplasma sp.
  REGION 1..343: note = tr|A0A2A1ZR63|A0A2A1ZR63_9BACT S-adenosylmethionine:tRNA ribosyltransferase-isomerase; OS = Candidatus Izimaplasma sp. ZiA1 OX=2024899 GN=queA PE=3; SV = 1
MNVNDYFYELPEELIAQVPLKTRSDSKLLVLNKLNGEIKHKKFTDIIDYLHKGDVLVVNDTSVIPARLYGVKEETKALIEVLLLSQIEGDVWEALVKKAKKIKVGTIISFGEGVLKAKCTKVLNDGLRHFEMIYKGVFYEVLGSLGEMPLPPYIHEKLEDQNRYQTVYNRVKGSAAAPTAGLHFTKDLLKKIEDKGVILTSVTLHVGLGTFRPVQVEKIEDHEMHSEFYMMSKKTADILNDAKQENRRIIAVGTTSLRTLETIMTEQKTFKEISAFSQIFIYPGYEFKAIDALITNFHLPKSTLLMLVSALSSKEIIFNAYKEAIKNNYRFFSFGDSMFISNE

SEQ ID NO: 64832 - protein, 342 aa, unidentified
  source 1..342: note = Izimaplasma sp.
  REGION 1..342: note = tr|A0A088T2G0|A0A088T2G0_9BACT S-adenosylmethionine:tRNA ribosyltransferase-isomerase; OS = Candidatus Izimaplasma sp. HR1 OX=1541959 GN=queA PE=3; SV = 1
MKVEDFNYHLPEELIAQTPLKDRSASRLLVLDKNTGNISHDQFSNILDYLSKDDVLVLNNTSVIPARLYGIKEETNAAIEILLLKQKEEDIWECLVKKAKKIKLGTIISFGEGLIKAKCVKLGEDGIRELKMIYEGVFYEILDVLGEMPLPPYIHEKLENQDRYQTVYNKYKGSAAAPTAGLHFTKDLLKKISDKGVIITYVTLHVGLGTFRPVQVEDVTSHKMHTEYYEMDRETAKILNQAKVDKRKIIAVGTTSLRTLETVLRDYDNFIETSGWSDIFIYPGYKFKAIDELITNFHLPKSTLLMLVSALTSKEMIMNAYSEAIKEKYRFFSFGDSMIIKG

SEQ ID NO: 64833 - protein, 344 aa, unidentified
  source 1..344: note = Jacksonbacteria bacterium
  REGION 1..344: note = tr|A0A351IR34|A0A351IR34_9BACT S-adenosylmethionine:tRNA ribosyltransferase-isomerase; OS = Candidatus Jacksonbacteria bacterium OX=2053562 GN=queA; PE = 3 SV=1
MNTSLFDYHLPKELIAHEPITPRDSARVFVVEGEVRHHDFFYNIGKYVKKGDILVRNVTKVFPARLYATKMTGGKVEILLVRPLDGSRWECLVGGRAKDGMEVRFDCRDVPLARLSETPQGGVSMIWIIDFGQNIDNLGTLIETAGQTPVPPYIHTDMAEQELRDRYQTIYAHKSGSVAAPTAGLHFTDELIDQLKRQGIEFLDIILHVGIGTFLPVKTKNVEDHSMHAEYVDISNEVAQKICSAKYEGRRLIAIGTTTTRALEACADTLLLGKGYTGEVNIFITPGYEFRMIDGLVTNFHLPKSTLLMLVSAFAGRENILSCYQEAIALGYTFYSFGDAMLIS

SEQ ID NO: 64834 - protein, 358 aa, unidentified
  source 1..358: note = Jettenia caeni
  REGION 1..358: note = tr|I3IQM4|I3IQM4_9BACT S-adenosylmethionine:tRNA ribosyltransferase-isomerase OS=Candidatus Jettenia caeni; OX = 247490 GN=queA PE=3 SV=1
MNVIVPKSVEICTKLADFDYDLPKDLIAQQPLENRDDARLLILYRNTGKIEHRKFYEITDYLSDGDLLVLNNTKVIPARIRGNKTSGASIELLFIEELEENQWKVLIKSRAKLREKEEIRIDSKIISVNLLGRSEDGAWYVEFNKDVDIKRIMNKIGEMPLPPYIKRKKDSNALYSLDQERYQTVFAKKAGAIAAPTAGLHFSQNILKNIKTLGTEIEFITLHVGLGTFLPIKTEDIRNHQMHKEYYECSEEVVKKIKKTKEKNNRVIATGSTACRVLETVAVNGKAPQLSGWTSLFIHPPYHFQYVDILLTNFHLPKTTLLLLVSAFAGRENIMNAYEIAKSKGYRFFSYGDCMMII

SEQ ID NO: 64835 - protein, 358 aa, unidentified
  source 1..358: note = Jettenia ecosi
  REGION 1..358: note = tr|A0A533QIR6|A0A533QIR6_9BACT S-adenosylmethionine:tRNA ribosyltransferase-isomerase; OS = Candidatus Jettenia ecosi OX=2494326 GN=queA PE=3 SV=1
MNVIVPKSVEICTKLADFDYDLPKDLIAQQPLENRDDARLLILYRNTGKIEHRKFYEITDYLSDGDLLVLNNTKVIPARIRGNKTSGASIELLFIEELEENRWKVLIKSRTRLREKEEIRIDSRVISVNLLERSEDGAWYVEFNKDVDVKRLMNQMGEMPLPPYIKRKKDSNALYSLDQERYQTVFAEKTGAIAAPTAGLHFSQNILKNIKTLGTEIEFITLHVGLGTFLPIKTEDIRDHQMHKEYYECSEEIIQKIKKTKEKNSRVIATGSTSCRALETVAMNGKTPQLSGWTSLFIHPPYHFQYVDILLTNFHLPKTTLLLLVSAFAGRENIMNAYETAKSKGYRFFSYGDCMMII

SEQ ID NO: 64836 - protein, 348 aa, unidentified
  source 1..348: note = Kapabacteria sp.
  REGION 1..348: note = tr|A0A1M3L736|A0A1M3L736_9BACT S-adenosylmethionine:tRNA ribosyltransferase-isomerase; OS = 'Candidatus Kapabacteria' thiocyanatum OX=1895771; GN = queA PE=3 SV=1
MKLSEFKFTVPKASVAKFPSDPREASKMMVVNRETGEIEDREFKDILSFFDKGDVIVVNETKVFPARLFGKKEKTNAKIEVMLLRELKAQERIWDVLVEPARKVRIGNKIYFDNNRFYCEIIDNTTSRGRTVRFSYDGDLHQVIERIGQMPLPEYIKREPTELDKETYQCVFANPDKVGSIAPPTSGLHFSEKLLKAAEKKGVKVARVTLNIGQGIFETIEVEDLTKHRMYSEYFEISKDAADTINKALKSKKNVYAVGCSVVRALESSVLTSGIVKPNRGWTDKFIHPPYEFKIANRFITNFHLPASPSLLLATAYAGGKDTIFKAYKRAMKSEYRFFAYGDAMLII

SEQ ID NO: 64837 - protein, 424 aa, unidentified
  source 1..424: note = Kapabacteria sp.
  REGION 1..424: note = tr|A0A1M3KYY8|A0A1M3KYY8_9BACT S-adenosylmethionine:tRNA ribosyltransferase-isomerase; OS = 'Candidatus Kapabacteria' thiocyanatum OX=1895771; GN = queA PE=3 SV=1
MRYAPHSERLHTTGNYIMDLSRYTYDLPEQRIARHPLEERDSSRLLVADVEEGTIRHRVFSDIADLLPEGSMLVVNRTRVIAARLQLFKPTGGRVEVFLVNPVAPSPDPAIVLASREPSDWECLIGGRHVLQDMVLVDRISGDANLRAVVLSKTDGEATVRLQWSTGGTLSAILEEYGSVPLPPYLHRDAEESDKERYQTVFAREEGSVAAPTAGLHFTPRVMDALGEKGVATAAVTLHVGMGTFKPVSAADVRDHVMHRERIGIARTELERIVEHTAHDEAWITVVGTTSLRTLESVYLFGARLVRDGFDTDGLDIGQWDALDTTLTSVSRHDAFDAVLEWMKANDMETCWGTTAVMLLPGAAIRSCDALVTNFHQPGSTLLLLVAALCGEPFWRTIYGTALADGYRFLSYGDSSLIMRRSLR

SEQ ID NO: 64838 - protein, 361 aa, unidentified
  source 1..361: note = Kentron sp.
  REGION 1..361: note = tr|A0A451C6B8|A0A451C6B8_9GAMM S-adenosylmethionine:tRNA ribosyltransferase-isomerase; OS = Candidatus Kentron sp. G OX=2126341 GN=queA PE=3 SV=1
MRVSEFDYHLPAELIAQYPSERRTASRLLVLGGNGGPEAATDTFQETEFSAIARFLSPGDLMVFNDTRVIPARLFGKKSTGGKVEILTERVLDERRILAQVRASKPPRPGMSMEIMPPGITDTANGVAGAGLVVRERVGAFFVLETIGNHEVRELLQDFGSVPLPPYIRRSTERFDAERYQTVYAKREGAVAAPTAGLHFDETLLARLRSKGIEFTFVTLHVGAGTFSPVRVDRVETHRMHAEYLEVSEAACAAINRTRRAGGRIVAVGTTSVRALETAWRDGEARPFQGETDIFIYPGYLFHCVDALITNFHLPGSTLLMLVAAFAGRERVLAAYRYAVRGRFRFYSYGDAMAIFRQGRT

SEQ ID NO: 64839 - protein, 362 aa, unidentified
  source 1..362: note = Kentron sp.
  REGION 1..362: note = tr|A0A450UQA5|A0A450UQA5_9GAMM S-adenosylmethionine:tRNA ribosyltransferase-isomerase; OS = Candidatus Kentron sp. H OX=2126337 GN=queA PE=3 SV=1
MRVSDFDYHLPTELIAQFPSEERTGSRLLALDADTGELQETRFSAIAGFLSPGDLLVFNDTRVIPARLFGRKATGGKVEILVERVMDERRLLAQVRASKPPRPGMAIEILRPETSPPATAPARGASGPGEATGATLTVRGRAGDFFILESTGDPAIKPLLRAFGAVPLPPYICRSAGTHDEERYQTVYARREGAVAAPTAGLHFDEALLTALRSKGVELAFVTLHVGAGTFSPVRVDRIEGHKMHAEYLEVSAAACERIHRTRRAGGRIVAVGTTSVRVLETAWRAGELRPFQGETDLFIYPGYRFRCVDALITNFHLPGSTLLMLVAAFAGRERVMAAYRYAVRRRFRFYSYGDAMVIFRR

SEQ ID NO: 64840 - protein, 344 aa, unidentified
  source 1..344: note = Kerfeldbacteria bacterium
  REGION 1..344: note = tr|A0A2H0YQA4|A0A2H0YQA4_9BACT S-adenosylmethionine:tRNA ribosyltransferase-isomerase; OS = Candidatus Kerfeldbacteria bacterium CG08_land_8_20_14_0_20_43_14 OX=2014246GN=queA PE=3 SV=1
MNNLEKTLKLYDYKVPKSLIAQKPRLPRDKARLLIYDRKTKQTWFDRFCNLAKYLPKNAILVFNQTKVLPARLELIKPTGGKIKILYIKKTRGLIWALCEKNLFVGEKYNLNKKIYFKLISKENNHYIFKPSFSINKLESILIKYGLAPLPPYIKHSPLTESQRKAQYQTIFAKIPGSIAAPTASLHFTKKLFKRLKERGIKITFVTLHVNLGTFAPLTEKNLQTHQLHSEFFEIDKKTAQALNQARQKHQPIIAVGTTVIRTLESSAIGNKLTKLIGDTRLFIQPGYKFKFVDRLITNFHVPRSSLTILVSTLTGRKELLKLYQRAIAKKLRFFSFGDGMLIL

SEQ ID NO: 64841 - protein, 350 aa, unidentified
  source 1..350: note = Kerfeldbacteria bacterium
  REGION 1..350: note = tr|A0A2M7H4A1|A0A2M7H4A1_9BACT S-adenosylmethionine:tRNA ribosyltransferase-isomerase; OS = Candidatus Kerfeldbacteria bacterium CG15_BIG_FIL_POST_REV_8_21_14_020_45_12OX=2014247 GN=queA; PE = 3 SV=1
MDLADFAFNLPEELIAQEPVVGGRDQSRLMVLDRKLGSIQDRSFFELTSLLKAGDVLVFNNSRVLPARLRGEKEPTGGKVELLLLHRQDDESEREVWECMIRSRNTKVDQSITFVGDRDLKGRVIDRASGDTWFVEFNQQGQIFRESLRELGEMPIPPYIKAPTLSEPELRERYQTVYAENEGSAAAPTAGLHFTDLLLDELSERGIELVPITLHVGLGTFSPVRVDDISNHKMHSEYAVITEQSAQRINQAKATGRRIVAVGTTTVRTLESFVKDGQVVADKRWTDIFITPGYDFKIVDAMITNFHLPHSTLLMLVSAFAGTEFIQETYRHAIDQQYRFYSFGDAMLIE

SEQ ID NO: 64842 - protein, 354 aa, unidentified
  source 1..354: note = Kinetoplastibacterium galatii
  REGION 1..354: note = tr|M1L8D6|M1L8D6_9PROT S-adenosylmethionine:tRNA ribosyltransferase-isomerase OS=Candidatus Kinetoplastibacterium galatii TCC219 OX=1208921 GN=queA; PE = 3 SV=1
MSELINISNFNYFLPKNLIAQTPELERSNSRLLHIDSKNNTYDLYFSDLTKILEPGDLLIFNDTKVIKARLKAQKYSGGKIEILVERILDPNTAVAQIKSNSTIKIGTKIIISNIVEVCITSRNSDFFILKFSENINDVLEKYGDIPLPPYIKKNNDNSDETRYQTIFAKNPGAIAAPTAGLHFDQRILKELQLCGIKIAFLTLHVGAGTFQPIRTQDINEHIMHTERYDIPLSTIKSIQSARTNGKRIIAVGTTSARALESAALNPYNYSSIYRNIINPVCNETNLFIKPGYKFKIVDALVTNFHLPKSTLLILVSALAGRDRILEAYEHAVKHNYRFFSYGDAMFIECQNDK

SEQ ID NO: 64843 - protein, 353 aa, unidentified
  source 1..353: note = Kinetoplastibacterium desouzaii
  REGION 1..353: note = tr|M1LTP7|M1LTP7_9PROT S-adenosylmethionine:tRNA ribosyltransferase-isomerase OS=Candidatus Kinetoplastibacterium desouzaii TCC079E OX=1208919 GN=queA; PE = 3 SV=1
MYSQKLETKFFDYIIPNDLIAQNPSDKRSSSRLLHIDKNKNIHDLFFYDIKKLIKPGDLLIFNDTKVIKARLQSFKESGGKSEIMLERILESHQAIVQIKSNKPIKNGSKLFVSKDIYVLVKERQNNFFKVSFSEDIYNVLDKYGTIPLPPYIKKNINPNDEFRYQTIYAKELGAVAAPTAGLHFDQEIIDDLKNQGVKTAFLTLHVGAGTFQPIRTNNFEDHVMHAERYMIPQITIDAIKNTRADGKRIIAVGTTSARALESASLIKDNYDNRNRIIHNATQEETNLYIKPGYKFRIIDALITNFHLPKSTLLLLVSALAERKMIQEAYTHAIKEKYRFFSYGDAMFIEPSK

SEQ ID NO: 64844 - protein, 350 aa, unidentified
  source 1..350: note = Komeilibacteria bacterium
  REGION 1..350: note = tr|A0A1G2BXZ3|A0A1G2BXZ3_9BACT S-adenosylmethionine:tRNA ribosyltransferase-isomerase; OS = Candidatus Komeilibacteria bacterium RIFOXYC1_FULL_37_11 OX=1798555 GN=queAPE=3 SV=1
MKIDLFDYKLPKELIAQKQIKPRDHSRLLILDRTKQKIAHRHFYDLLDYLTANDVLVINQTKVFPARLYGYKTSGGKVEVLLTIQERNGVWSALIGARHMKVGDYIYFQKGLEAKIIKDLDGKTKQIKFNLAGQRLNKLIDQIGHTPLPPYIKTKDSQAVKKDYQTVYAKFSGSAAAPTAGLHFTSSLLEEIKKKGVKIFKVTLHVGLGTFAPVLVDDILQHKIHQEWASIDQSTAQSLNKLKKSGKNIIAVGTTSARTLEAFTNSRRQLASGSKWVDIYIYPGYRYKFVDDLITNFHLPKSSLLFMVSALASRELVLKAYRKAIQLRYRFFSFGDAMFIRNSSTKTKSK

SEQ ID NO: 64845 - protein, 342 aa, unidentified
  source 1..342: note = Komeilibacteria bacterium
  REGION 1..342: note = tr|A0A2M8DR93|A0A2M8DR93_9BACT S-adenosylmethionine:tRNA ribosyltransferase-isomerase; OS = Candidatus Komeilibacteria bacterium CG_4_9_14_0_8_um_filter_36_9 OX=1974473GN=queA PE=3 SV=1
MRLEEFDYNLPAELIAQTPPEQRDQARFLIYDHGNIKHQKFYDLIDILQSGDVLVLNDSKVFPARLHGARVDTASPVEVFLLRDQGQGIWECLIGHARTKPGLQIEFLQDLQASLVEPQEERWLVRFNQTGDQFMETINQIGSTPIPPYIKTEDSQEIRDEYQTVYANKVGSVAAPTAGFHFTDELLEKLKDKGIQIEYVTLHVGLGTFAPVKVDNIKEHKMHSEYYQVDQDVWQRIKKAKEEKRRVVSVGTTATRVLESVAREEKLQDWTDIFIYPGFEFKMIDSLITNFHLPKSTLLMLVSALLEAKGNPDGIKELMRIYQEAINEQYRFYSFGDAMIII

SEQ ID NO: 64846 - protein, 346 aa, unidentified
  source 1..346: note = Kryptonium thompsoni
  REGION 1..346: note = tr|A0A0P1LYT6|A0A0P1LYT6_9BACT S-adenosylmethionine:tRNA ribosyltransferase-isomerase; OS = Candidatus Kryptonium thompsoni OX=1633631 GN=queA PE=3; SV = 1
MKLSEFNYQLPKHLIAKYPVEPRDSARLLVVDRKTKTFEDKVFTDIIDYLEEGDSLVVNKTKVFPAKLIGRKEKTGAKIEILLLRELNPEEHLWDVLVEPARKVRIGNKIYFGDNNEVYCEVIDNTTSRGRTLKFHYEGDFFKFVEKYGLVPLPPYIKRQPEEGDKEWYQTVYAEVIGSVAAPTAGLHFTTRLLKRIEKKGVKIVPIVLHIGIGTFRKIEVEDLSKHRMDSEYFEISPESARMINETIDKRKSVVAVGTSVVRALESSVTADGHVKPYKGWTDKFIYPPYDFKIVNKLITNFHMPESTPLILTAAFAGLDLLMQAYKHAIKSGYRFLSYGDAMLIV

SEQ ID NO: 64847 - protein, 352 aa, unidentified
  source 1..352: note = Kuenenbacteria bacterium
  REGION 1..352: note = tr|A0A1F6GR15|A0A1F6GR15_9BACT S-adenosylmethionine:tRNA ribosyltransferase-isomerase; OS = Candidatus Kuenenbacteria bacterium RIFCSPHIGHO2_12_FULL_42_14 OX=1798563 GN =queA PE=3 SV=1
MKLTLFDYNLPKNLIAQKQVKPRDHSRLLVVGRKTKKLKHDYFYNLDKYLDENDVLVFNDSRVFPARIKFDGGKGEIFLLREMKNGNWEVMGKKLGKNFKFQILNFKINSKLQAQILKRMPDGNYLIKFNLRGRKFREWLEKYGETPLPPYIKTKDSKIIRNNYQTIYARADGSVAAPTAGFHFTKELMSKLRKKGVAMEFVTLHVGQGTFLPVKTDNIEEHKMHAEFAIIDKETAKRLNDYKKAGRRIIAVGTTSCRVLEAMTSEAGESSKLSEVSKVCLKAREKEVNIFIYPGYNFKFVDGIVTNFHLPKSTLLMLVAALIGREFILEVYRQAIKKKYRFYSFGDGMLIK

SEQ ID NO: 64848 - protein, 352 aa, unidentified
  source 1..352: note = Kuenenbacteria bacterium
  REGION 1..352: note = tr|A0A1F6FZZ5|A0A1F6FZZ5_9BACT S-adenosylmethionine:tRNA ribosyltransferase-isomerase; OS = Candidatus Kuenenbacteria bacterium RIFCSPLOWO2_12_FULL_42_13 OX=1798565 GN= queA PE=3 SV=1
MKLTLFDYNLPKNLIAQKQVKPRDHSRLLVVGRKTKKLKHDYFYNLDKYLDENDVLVFNDSRVFPARIKFDGGKGEIFLLREMKNGNWEVMGKKLGKNFKFQILNFKINSKLQAQILKRMPDGNYLIKFNLRGRKFREWLEKYGETPLPPYIKTKDSKIIRNNYQTIYARADGSVAAPTAGFHFTKELMSKLRKKGVAMEFVTLHVGQGTFLPVKTDNIEEHKMHAEFAIIDKETAKRLNDYKKAGRRIIAVGTTSCRVLEAMTSEAGESSKLSEVSKVCLKAREKEVNIFIYPGYNFKFVDGLVTNFHLPKSTLLMLVAALIGREFILEVYRQAIKKKYRFYSFGDGMLIK

SEQ ID NO: 64849 - protein, 348 aa, unidentified
  source 1..348: note = Lambdaproteobacteria bacterium
  REGION 1..348: note = tr|A0A1F6GLS1|A0A1F6GLS1_9PROT S-adenosylmethionine:tRNA ribosyltransferase-isomerase; OS = Candidatus Lambdaproteobacteria bacterium RIFOXYD2_FULL_56_26 OX=1817773 GN= queA PE=3 SV=1
MPLLSEFDYPLPEGAIATAPAEPRDHSRLMRLPPGSGEPLDFYFYDLPNLLQPGSLLVVNDAQVIPARIIGRRASGGAIEALLVRELSPGRWVVKIKKAAKLKPGELLEFGFGRILAQFEGRFEEGDGILSFVSPQTLFDDLEAQGYAPLPPYLLKARGQEEFAPEEDKKSYQTIFAKTKGAVAAPTAGLHMTQPVLEGLQKREIEVVSLNLQVGLGTFEPVRVEEVSEHQMHLERVTIPEATALAFNQAKAQGRKVVALGTTTLRAIESSLQGGELVQGARETGIFIYPPYRFQGVDQLITNFHQPKSTLLMLVCAFAGQERVLKAYKQALDRGYRFFSYGDAMLLG

SEQ ID NO: 64850 - protein, 345 aa, unidentified
  source 1..345: note = Lambdaproteobacteria bacterium
  REGION 1..345: note = tr|A0A1F6GAB9|A0A1F6GAB9_9PROT S-adenosylmethionine:tRNA ribosyltransferase-isomerase; OS = Candidatus Lambdaproteobacteria bacterium RIFOXYD2_FULL_50_16 OX=1817772 GN= queA PE=3 SV=1
MELTDFDFVLPNELIATKPLAERDQSKLMTVPKTGDFLDYQFCDLPHLLEPGSLLVINDAKVLPARLLGQRQTGAQLEALLLEEILPGRWVALVKKAGRLKPGEDIAFAGGAIGARYLGRDAKDRPILEFFNPETLLRDLETYGLAPLPPYIHQARGVEGDREEDLAQYQTQFAKHYGAVAAPTAGLHMTERLLVSLKKQEIELVPVTLMVGPGTFEPVRVTQIKEHQMHAEGFNVPEDSAKKINQAKAQKRPIVALGTTSLRVLEAAAKQGQVEAGGGRTNIFIYPGYQFKMVDRMVTNFHLPKSTLLMLVAALAGRERILAAYQEALKRQYRFYSFGDAMLIG

SEQ ID NO: 64851 - protein, 345 aa, unidentified
  source 1..345: note = Latescibacteria bacterium
  REGION 1..345: note = tr|A0A3D4GZ48|A0A3D4GZ48_9BACT S-adenosylmethionine:tRNA ribosyltransferase-isomerase; OS = Candidatus Latescibacteria bacterium OX=2053570 GN=queA; PE = 3 SV=1
MNLSDYDYDLPDDRIAQYPAEQRDASRLMVLDREDHEIRHQTFRELPGLLSPGDCLVVNETQVSPARLVGNRLGSGGSVELLLIREEGELWEVLARPGRRLKVGAEVEFPGEDLLAKVEGVTPSGRRMVSFHGEAHLLEAVERIGRIPLPPYIKREGEPDDRTRYQTVYARTPGAVAAPTAGLHFTEDLLEAIRSKGVMVAPILLHVGPGTFKPVAVDDPREHEMDSEYYEISEDTADKVNMCRRNGGRVVAVGTTVTRTLESAASHRDGTWVLNAEKGWTSLFIYPPHTFKLTQGLITNFHLPRSTLLMLVSAFAGHEFIMRSYETAKEKDYRFYSYGDAMAIM

SEQ ID NO: 64852 - protein, 344 aa, unidentified
  source 1..344: note = Latescibacteria bacterium
  REGION 1..344: note = tr|A0A3N5X5K5|A0A3N5X5K5_9BACT S-adenosylmethionine:tRNA ribosyltransferase-isomerase; OS = Candidatus Latescibacteria bacterium OX=2053570 GN=queA; PE = 3 SV=1
MRVSDFDFDLPPGLIAQHPLADRAAARMLVIDRAREELRHGAVRHLAEELVPGDLVVVNDSRVFPARLRGTAGEGRPIEALFVRPVEEGERGDWVLLLRPARRVRAGTTLRFEGAGLAGTALRPAEEGEWVARFGGESDVEAALERAGEVPLPPYIRRPATEEDRTRYQTVFARATGSVAAPTAGLHFTDELIGSLESRGIAVRSITLHVGPGTFRPLRGENVENHRMEPEFYRVPEETAIAVRAAREAGGRVVAVGTTVVRALESAAAAGSVGPGAGWTDLFIRPPYRPRAVDALLTNFHLPQSTLFLLVAGFAGRDLAMRAYRTAIDAGYRFYSYGDCTLIV

SEQ ID NO: 64853 - protein, 361 aa, unidentified
  source 1..361: note = Liberibacter americanus
  REGION 1..361: note = tr|U6B4G9|U6B4G9_9RHIZ S-adenosylmethionine:tRNA ribosyltransferase-isomerase OS=Candidatus Liberibacter americanus str. Sao Paulo OX=1261131 GN=queA PE=3 SV=1
MMVKEFDFYLPPSKIALRPVSPRDKARLLVANSDISLRISDHLVRDLPMFLKPNDAIVFNDTKVITAQLRGIRLRHKNDTEVRISCNLHMRVSDNSWRAYIRPAKMVRKGDKIYFFSKDGQSKLDAIIDEKWDQGEILLVFSVSGLELDRNISVVGSIPLPPYIARKRSIDERDYIDYQTTYAKIMGSVAAPTAGLHFTSDLLSEIISIGIETHFITLHVGAATFMPVKVENTDDHLMHSEIGFLDTKTAQALNAVKSRGGRIIAVGTTSLRLLETATTDDGVIIPWSGSTNIFITPGYRFRAVDILISNFHLPKSTLLMLVSAFCGIEETKDIYQHAIANDYRFYSYGDASLLFKNKSMA

SEQ ID NO: 64854 - protein, 363 aa, unidentified
  source 1..363: note = Liberibacter europaeus
  REGION 1..363: note = tr|A0A2T4VY61|A0A2T4VY61_9RHIZ S-adenosylmethionine:tRNA ribosyltransferase-isomerase; OS = Candidatus Liberibacter europaeus OX=744859 GN=queA; PE = 3 SV=1
MMVKEFDFHLPSSRVALRPASPRDSARLMVVRSDLSSPLNISDHFVRDLLMFLNPNDVIVFNDTKVITAQLRGILLRHKNDTETWISCTLHMRVSPNSWFAYVRSIKKVKEGDKIYFFSQDGQFKLEAIITKKCNTGEILLVFSTSGVELDMAIAMVGTIPLPPYISRKRSIDERDYVDYQTTYAKVQGSVAAPTAGLHFTRDLLSKIVASGIKTHFITLHVGAATFMPVRVKDTDDHVMHSELGFIDVKTAQSLNKVKSQGGRIIAVGTTSLRLLETATMEDGTIIPWSGATNIFITPGYRFRAVDILISNFHLPKSTLLMLVSAFCGIEETKKIYQHAIDNSYRFYSYGDASFLFKKDVVS

SEQ ID NO: 64855 - protein, 350 aa, unidentified
  source 1..350: note = Lindowbacteria bacterium
  REGION 1..350: note = tr|A0A1F6LVA6|A0A1F6LVA6_9BACT S-adenosylmethionine:tRNA ribosyltransferase-isomerase; OS = Candidatus Lindowbacteria bacterium RIFCSPLOWO2_12_FULL_62_27 OX=1817870 GN= queA PE=3 SV=1
MTEELYHYDLPPGRIAQTPIERRDMARLLVLRRSDGVILHSSIDRLPEWLNPGDCLVMNDTKVARCRVSGVTPVSRAAEFMAVTTLCRTPDVWEMDAMVCPGRRFRPGSQVRIGGAPDAAALVVDVLATTEIGRRLRVSAAEGAGPLDEVIETMAEVPLPPYIHNSSIPSERYQTCFAREAGSVAAPTAGLHFTPELFARLSRAGIGTAFLTLHVGPGTFRPVTRRELDAGRLHPEVYRLPSEAAASVTCARAAGRRVVAVGTTVCRTLEHIAAKFGEVRADAGATDLFIREGFSFRAVDALLTNFHLPRTSLLMLVCALAGRSLVREAYEAAIGGDYRFYSFGDAMLVL

SEQ ID NO: 64856 - protein, 362 aa, unidentified
  source 1..362: note = Lloydbacteria bacterium
  REGION 1..362: note = tr|A0A1G2DRW7|A0A1G2DRW7_9BACT S-adenosylmethionine:tRNA ribosyltransferase-isomerase; OS = Candidatus Lloydbacteria bacterium RIFOXYC12_FULL_46_25; OX = 1798670 GN=queA P E=3 SV=1
MSILDDYDYHLPKELIANSPASPRDSSRLFVYDTKTGTVTFDIFRNIGTHLPKPSLLVFNNTKVVPARLWLKKELLPTRGGIRAGGGKIEVLLMMNEYRTGDELIKGVVDRKILPGAKLYFQSGDYLEIMKQEEQFFFFRPSVTIPELFELLTKEGVTPIPPYIKNANIPEQVLREKYQSVLAKHAASVAAPTASLHFTEELLFALEKEHIKKTEITLHVGAGTFAPISEENFTNKKLFTEYLAIGNESAAMINHAKEEGTPIIPVGTTAMRTLESSAIKNGSTFTIEECTKPTNIFIYPPYEFKIADGLITNFHVPRSSLMLLVDALLKHKRAPHDILALYDIAIKERFRFYSFGDSMLIL

SEQ ID NO: 64857 - protein, 354 aa, unidentified
  source 1..354: note = Lloydbacteria bacterium
  REGION 1..354: note = tr|A0A1G2CYB3|A0A1G2CYB3_9BACT S-adenosylmethionine:tRNA ribosyltransferase-isomerase; OS = Candidatus Lloydbacteria bacterium RIFCSPHIGHO2_01_FULL_49_22 OX=1798658 GN= queA PE=3 SV=1
MISLDDYNYHLPEGLIANEPASPRDSARLFVYDTKTDKVHFDVFRNIDQYLPKPSLLVFNDTKVVPARLWLSKETGGKIEVLLMMNEFRPGDISIKGVVDRKILPGAKLFFKSGAHLEVERQEEQFFFFNPSVSKGSLWSLLEKEGVTPIPPYIKGNTMSEHTLREKYQSILAKYPASIAAPTASLHFTDRLLEKMKREHITRTEVTLHVGAGTFAPIDEQNFKSKKLFAEYLDITKESAKKINSAKAAGIPIIPVGTTAMRTLESAAIQHSKVEPWSVEQCSKPTNIFIYPPYEFKIADGLITNFHVPRSSLMLLVDALLKHKRAKRDILALYDIAIREKFRFYSFGDGMLII

SEQ ID NO: 64858 - protein, 348 aa, unidentified
  source 1..348: note = Macondimonas diazotrophica
  REGION 1..348: note = tr|A0A4Z0FAY6|A0A4Z0FAY6_9GAMM S-adenosylmethionine:tRNA ribosyltransferase-isomerase; OS = Candidatus Macondimonas diazotrophica OX=2305248; GN = queA PE=3 SV=1
MQAADFDFYLPPEQVAQSPLPDRAAARLLCLEGTSGHWQDRQIRDIPALLLPGDLLVLNDTRVIPARLFGTKSTGGAVELLIERVIDARRAFAHVRASKFPRAGTRIELTGGGALVIGERHDSLVEVAVDGDESLPTLLERVGHTPLPPYIQRPDTAMDRERYQTVFSTHPGAVAAPTAGLHFDQALLDQVVSAGVRLGRLTLHVGAGTFQPVRAEQLAEHQLHAEQVEVSAELCAQIAETRARGGRVVAVGTTVVRALETAAESGELLPYRGETRLFIHPGRNFRFKVVDTLMTNFHLPRSTLLMLVCAFAGREAVLAAYAHAVMSGYRFYSYGDAMWITPAAGVRA

SEQ ID NO: 64859 - protein, 380 aa, unidentified
  source 1..380: note = Magasanikbacteria bacterium
  REGION 1..380: note = tr|A0A2M7VC58|A0A2M7VC58_9BACT S-adenosylmethionine:tRNA ribosyltransferase-isomerase; OS = Candidatus Magasanikbacteria bacterium CG_4_10_14_0_2_um_filter_33_14 OX=197 4636 GN=queA PE=3; SV = 1
MNTSDFDYNLPKERIAQKPLEPRDSSKLFLVDKKNKKVDHKHFFDIVDYFEKGDLLVWNNSKVFKARLFGRLEASDNDVNKDGIPDRALLNQKEVEIFLVRPMENPGVWKILAKPGKRVKPGMNVRFAPDFFCTVIVKEPEGTILVQFEEDDKEVMAKANKYGHIPVPPYVKDEPDQIEVYQTVYSKEEGSVAAPTAGFHFTDDIIQKLKDKGVEFAEVTLHVGLGTFLPVKSERVEDHTMHSEWVEISEETAEKINKAKSEGRRVVAVGTTTVRTLEGIASLERNKLQDTNKSQITISKFEGDINIFIKPGFEFQIVDAMITNFHLPKSTLLMLVSAFAGDRLAGQSPSEGREFMLECYKEAVSLKYRFYSFGDAMFIY

SEQ ID NO: 64860 - protein, 365 aa, unidentified
  source 1..365: note = Magasanikbacteria bacterium
  REGION 1..365: note = tr|A0A0G0ARD5|A0A0G0ARD5_9BACT S-adenosylmethionine:tRNA ribosyltransferase-isomerase; OS = Candidatus Magasanikbacteria bacterium GW2011_GWC2_34_16 OX=1619045 GN=queAPE=3 SV=1
MLTSDFNYNLPKELIAQTPAEKRDESRLLVINRETKEINHRQFFNIIEYLRPGDLLVWNNSKVFKARLKGVLVLDEEVFDLKGKDLTDRILNEPSVEIFLVRPMENFGVWKVLAKPGKKLRLGMKVVFAEDFFAEVITKEEDGTVLVQFQDDDITVRTKANKYGEVPTPPYIKEQGARNKEQLVERYQTVYAKEEGSVAAPTAGFHFTEELIEKLKNKGIEFAEVTLHVGLGTFLPVKVEKVEEHKMHAEWVELTDKNAQLINAAKAEGRRVVVVGTTAVRTLEGIFAKRESLEAFSGDINIFITPGFKFKVVDALITNFHLPESTLIMLVSAFVGDREFTLDCYKKAVEANYRFYSFGDAMFVF

SEQ ID NO: 64861 - protein, 342 aa, unidentified
  source 1..342: note = Magnetobacterium bavaricum
  REGION 1..342: note = tr|A0A0F3GNM9|A0A0F3GNM9_9BACT S-adenosylmethionine:tRNA ribosyltransferase-isomerase; OS = Candidatus Magnetobacterium bavaricum OX=29290 GN=queA; PE = 3 SV=1
MKTDDYTYELPRELIAQEPCRRRQDSRLLVLRRDGGMRHRRFEELIDYLNSGDLLVLNDTKVLPVRLAATDESGRVRDIVIVREVEGDGYQILSRGRYTGRMQISDGFHADVFSGSQAVFYDNGVVLSGSALSDKLWQSGQMPLPPYIERPSSGTDMERYQTVYARAGGSIAAPTAGLHFTDAILQAIRDKGVAIKTITLHVGIGTFRPITSKDLLAHKMDEEHFEIDTHLEEQIRRVKGRGNRVIVVGTTTTRAVEAYMAGWYRMTGRGNGIIKATTDIFITPGFDFKAADALLTNLHMPRSTTLVLACAFAGRQHILDAYREAVARGYRFLSYGDAMLII

SEQ ID NO: 64862 - protein, 306 aa, unidentified
  source 1..306: note = Magnetobacterium bavaricum
  REGION 1..306: note = tr|A0A0F3GN14|A0A0F3GN14_9BACT S-adenosylmethionine:tRNA ribosyltransferase-isomerase; OS = Candidatus Magnetobacterium bavaricum OX=29290; GN = MBAV_004460 PE=3 SV=1
MRHGCFEELIDYLNSGDLLVLNDTKVLPVRLTATDESGRVRDIVIVREVEGNGYKILSRGRYSGRIQISDGFHADISCGVRAVFYDNGMVLSGSALGNKLWQSGQMPLPPYIERSSGETDMERYQTVYARAGGSIAAPTAGLHFTEAILQAIRDKGVAIKAITLHVGIGTFRPITSEDLLAHNMDEEHFEIDTHLEEQIRQVKGRGNRVIVVGTTTTRAVEAYMAGWYRMTGGGNGIIKATTDIFITPGFDFKAADALLTNLHMPRSTTLVLACAFAGRQYILDAYREAVARGYRFLSYGDAMLII

SEQ ID NO: 64863 - protein, 278 aa, unidentified
  source 1..278: note = Magnetoglobus multicellularis
  REGION 1..278: note = tr|A0A1V1P0W8|A0A1V1P0W8_9DELT S-adenosylmethionine:tRNA ribosyltransferase-isomerase (Fragment) OS=Candidatus Magnetoglobus multicellularis str. Araruama OX=890399GN=OMM_10515 PE=3 SV=1
MSFHIKDYDYNLPDERIAQSPADQRDRSRLLVYDRKSRTIKHTYFTNLTNCLNSGDVLVINNTRVIPARLLGKKQTGGKIEVFILDYQKAVIQDGFTQCECMIRSSKPPKTGTRIYFSNKEEAVVLTMPKNGQCIIQFNCDDLLSFLNQVGQTPLPPYIQRVADKKDQDRYQTIYAKNNGAIAAPTAGLHFTPQLIETIKQMGIQMVPITLHVGYGTFMPVRVQDIRKHFMHKEYIEISQDSATKIYQAKQNKQRIVAVGTTSVRALEYVYQRQETFG

SEQ ID NO: 64864 - protein, 359 aa, unidentified
  source 1..359: note = Magnetomorum sp.
  REGION 1..359: note = tr|A0A0M9E9V7|A0A0M9E9V7_9DELT S-adenosylmethionine:tRNA ribosyltransferase-isomerase; OS = Candidatus Magnetomorum sp. HK-1 OX=1509431 GN=queA; PE = 3 SV=1
MVNGLSSVSYHIDNYDYQLPKHLIAQDASMKRDQSRLLVYNRNTKSIEHTVFNKLSDYLQANDLLIVNNTRVIPARLLGKKETGGKIEVFVLDYIRAIQEAEKTGKIQCSCMIKSSKAPRIGSTLYFSSDDQAVVITDPINGRCEIQFLCKSDFLTFLEANGQTPLPPYIQRQAQISDKERYQTIYAKKNGAVAAPTAGLHFTEKLFEKLQKKNINIASITLHVGYGTFMPVRVSDIRKHTMHSEYIEISTHTADLIQKAKKDGQRIIAVGTTSVRTLEYIFKEKGKIEAFSGYCDLFIYPGYSFQVVDSIITNFHLPKSTLMMMISAFAQREQILKVYQNAIDNSYRFFSYGDAMMIV

SEQ ID NO: 64865 - protein, 332 aa, unidentified
  source 1..332: note = Magnetoovum chiemensis
  REGION 1..332: note = tr|A0A0F2J5L8|A0A0F2J5L8_9BACT S-adenosylmethionine:tRNA ribosyltransferase-isomerase; OS = Candidatus Magnetoovum chiemensis OX=1609970 GN=queA; PE = 3 SV=1
MFSFDIPDSLIAQKPRSERDKSRLLVLYRDGSIEHRQFDKIADYLKAGDALVLNDTKVIPVRLKCAKQNGDTIEILLTKKLQKNNYEIMSKGSFSGTAALENGINAQIKQGSEVTFDYTGDIEDTLEEIGMTPLPPYIKREADKEDAHKYQTVYARAKGSIAAPTAGLHFTEALINKIKNKGVNILTITLHIGIGTFKPIRVYNIEEHKMDQEFFEIDSAALEKIQKTKNLGSRVFLVGTSTTRALEAYIKGKFMKWENSNGKIRGFADLFIRPGYDFKAADCIITNFHQPNSTPLLLACAKAGTEKLINAYKEAIAVKYRFYSYGDAMLIL

SEQ ID NO: 64866 - protein, 349 aa, unidentified
  source 1..349: note = Magnetoovum chiemensis
  REGION 1..349: note = tr|A0A0F2IW05|A0A0F2IW05_9BACT S-adenosylmethionine:tRNA ribosyltransferase-isomerase; OS = Candidatus Magnetoovum chiemensis OX=1609970 GN=queA; PE = 3 SV=1
MKTSDFNFNLPDHLLAEHPSENRDEAKLMVLDRKTQTIEHKLFKDVIDYFNEDDLFIFNNTKVFPARLYGNKEKTGAKIEVFLLRELDREARVWDVLVDPARKIRIGNKLFFTEDESLVAEVIDNTTSRGRTLRFLFDGSYEEFRAKLTELGETPLPKYIKRDVEPEDAERYQTIYAEIEGAVAAPTAGLHFSKHLMKRMEIKGINFANVTLHVGLGTFNPIEVEDLSKHKMECEQAIITQDNADIINKAIEENRRVCAVGTTTMRAIETSVSTNRRLSAYEGWTNKFIYPPYDFGIANAMITNFHTPKSTLIMMIAAFAGRDFVMQAYEEAIKNDYKFYSYGDAMLIL

SEQ ID NO: 64867 - protein, 352 aa, unidentified
  source 1..352: note = Margulisbacteria bacterium
  REGION 1..352: note = tr|A0A1F6QNH7|A0A1F6QNH7_9BACT S-adenosylmethionine:tRNA ribosyltransferase-isomerase; OS = Candidatus Margulisbacteria bacterium GWE2_39_32; OX = 1817872 GN=queA PE=3 SV= 1
MHDENFQLSSYEYQLEERYIAQSPAQKRDNSRLMVLDKQHNTINHGLFHDLVHYLNPGDVLVRNNTSVFPARIFGRKETGAKIEFLLLSEKGQDIWEVICRPAKRLKLGDIVFFSNSLAAEIIGFCEEGKRLVKFRYQGDFWEIIDAIGNVPLPPYINLQSTRLSPCELKERYQTVFASKRGSSAAPTAGLHFTEKLLGEIAKKGITVVDVTLHVGLGTFLPVKAEVITDHIMHEEYYEITSSAIQAINQAKASGHRVIAVGTTSVRVLETIADEMITGEITPLSGKTSIFIYPGYQFKVVDGIVTNFHLPGSSLLLLVSAFYNRKSILNAYTIAKAENYRFFSFGDAMFIS

SEQ ID NO: 64868 - protein, 352 aa, unidentified; identical to SEQ ID NO: 64867
  source 1..352: note = Margulisbacteria bacterium
  REGION 1..352: note = tr|A0A2W4ICC0|A0A2W4ICC0_9BACT S-adenosylmethionine:tRNA ribosyltransferase-isomerase; OS = Candidatus Margulisbacteria bacterium OX=2053573; GN = queA PE=3 SV=1

SEQ ID NO: 64869 - protein, 338 aa, unidentified
  source 1..338: note = Marinamargulisbacteria bacterium
  REGION 1..338: note = tr|A0A328R4N0|A0A328R4N0_9BACT S-adenosylmethionine:tRNA ribosyltransferase-isomerase; OS = Candidatus Marinamargulisbacteria bacterium SCGC AG-343-D04 OX=2184343 GN=qu eA PE=3 SV=1
MYTEEFNFDLPETLIAHSPAKNREDSKLMVLDRKSQSIEHCRFSDISHFLPKNSALVLNNTKVFNARLRAKKESGASIELFLLEEVSPSVWKCLAKPAKRLQSGTLLHIADNFSAKVIEKGEFIILEFSFSGSFYDLLELHGEPPLPPYIDASDPKQFADRYQTVFAKHVGSVAAPTAGLHFTPEILSSLSSQGMDINYITLHVGYGTFNPVKADLVKDHRMHSEQFNISMETSDHLSSHKKRGGLIGAVGTTSARTLESAWDGNGFISGQHSSDIFIYPGYRFKTLDFMVTNLHLPKSSLLMLVSAFAGTSFIKKAYAEAIEHKYRFYSFGDAMLIL

SEQ ID NO: 64870 - protein, 347 aa, unidentified
  source 1..347: note = Marinamargulisbacteria bacterium
  REGION 1..347: note = tr|A0A328RTT0|A0A328RTT0_9BACT S-adenosylmethionine:tRNA ribosyltransferase-isomerase; OS = Candidatus Marinamargulisbacteria bacterium SCGC AAA071-K20 OX=2184347 GN=qu eA PE=3 SV=1
MNLSDYNYSLPEDLIAKTPLSKRDQSQLMVLDQGGDSIKHHVFSDILTVLGPNDVLILNNTKVIKARLYAHKKTGGKIELLLERPLENNQYTALVKPAKRVRVGDRLILGPDAELEVTSKDGGMVTIQFHSKESVWDVLERYGFMPIPPYIKTGKETPESFTHNYQTVFADKPGAVAAPTAGLHFTPLLLDQLKQKGVQIETITLHVGYGTFMPIKTESIKDHKMHSERYHVSKDTAERLNKVKSSKRFVAVGTTAVRALESATKNDVIQAGSFETDIFITPGYTFTCVDALITNFHLPQSSLLLLVSAFTSRDFILNAYELAIKHRYRFFSFGDAMFILPKTRNCK

SEQ ID NO: 64871 - protein, 352 aa, unidentified
  source 1..352: note = Marinimicrobia bacterium
  REGION 1..352: note = tr|A0A3M7KF97|A0A3M7KF97_9BACT S-adenosylmethionine:tRNA ribosyltransferase-isomerase; OS = Candidatus Marinimicrobia bacterium PRS2 OX=2483458; GN = queA PE=3 SV=1
MFFGSVEKPPRLSEFELEVPEKLIAKDPLKKRDECKLMVLNRAEQTIEHRQFKDVVDYFNKGDVLVMNNTRVYPARLYAIKDKSDARVEVFLLRELADDLWEAMVKPARKVRIGNKLWFSKKISCDVIDNTVSGGRVLRFESDAKSLYPFIEKVGHSPLPPYIDRESIPSDKIYYQTVYASERGSVAAPTAGIHFTKAILNKMEKKGVKLAYVTLHIGLGTFRPIMVEDLTRHQMDSEYFHVPPETAEIINKAKSHKKLVGVVGTSTARTLETVVVSGFQITARRGWTDKFIYPPYEFKMCDKFITNLHQPKSTLMMLTAAFAKKDFILKAYKEAIKNKYRFYSYGDSMIII

SEQ ID NO: 64872 - protein, 343 aa, unidentified
  source 1..343: note = Marinimicrobia bacterium
  REGION 1..343: note = tr|A0A4Y8IA85|A0A4Y8IA85_9BACT S-adenosylmethionine:tRNA ribosyltransferase-isomerase; OS = Candidatus Marinimicrobia bacterium MT.SAG.3 OX=2552982; GN = queA PE=3 SV=1
MRLVEFQYNLPERFIAQKPLKRRDASKLMVLHKDTGKIEHRKFTNIVDYLDKDDTLVINETKVFPARVQAIKEKTNAKVELFLLRELESNMWEVLVKPARKVRIGNKLKITRDVSCDVIDNTISGGRVVRFSCNGDDVYKIIDKVGAAPLPPYIKRKATATDKKRYQTVYARHTGAVAAPTAGLHFTKPLLEKIKKKGVNVVPIVLNVGLGTFKPVQVEDLSRHRMDSEYFEIPISAADIVNKTMEDGKKIMGVGTTSARAMESVFITENRINPGMGWTDKFIFPPYDFKVINKLITNFHMPGSTLLMLVSAFATRDMIFHAYEVAKRHKYRFYSYGDAMLIL

SEQ ID NO: 64873 - protein, 346 aa, unidentified
  source 1..346: note = Melainabacteria bacterium
  REGION 1..346: note = tr|A0A1F6R9B1|A0A1F6R9B1_9BACT S-adenosylmethionine:tRNA ribosyltransferase-isomerase; OS = Candidatus Melainabacteria bacterium RIFOXYA2_FULL_32_9; OX = 1801611 GN=queA P E=3 SV=1
MHISEFDYNLPKELIAQFPSEKRDYSNLMVLDRSSKTIEHKKFFSIADYLSENDVLVMNNTRVIPARLIGKKSTGANIEIFLLEKKTENIWEVLIKPAKRVKSGTIVEFSEELSAEIIDKSDNDKWVVELKYNGDLNEILNKVGNIPLPPYIMRTLSDSEIRKLDYQRYQTVYAQTPGSVAAPTAGLHFTEDLLGQIRQKGVQVCYVTLNVGLGTFKPVRAEDIRDHKMDKETYEISQETANIINNAKKEGKNIVAVGTTTVRTLETVYKLHSQITQSSGSSDIFIYPGYKFNVVNKLITNFHLPKSTLLMLVSAFTDKGYIYEAYKEAIKKKYRFYSYGDCMFIL

SEQ ID NO: 64874 - protein, 346 aa, unidentified
  source 1..346: note = Melainabacteria bacterium
  REGION 1..346: note = tr|A0A327J380|A0A327J380_9BACT S-adenosylmethionine:tRNA ribosyltransferase-isomerase; OS = Candidatus Melainabacteria bacterium OX=2052166 GN=queA; PE = 3 SV=1
MLVSEFDYNLPEELIAQTPSEKRENSRMMVLDKHAQTIEHKHFYDIVDYLDNNCILVLNNTKVIPARLYAHKETGALIEIFLLKEHDNKQWEALIKPAKRVKEGMTLKVADCLSVKMLERLEEGKWLVELIYDGILYEVLDKVGNIPLPPYIERKMTDDERQSLDYERYQTVYAQNEGSVAAPTAGLHFTKEILEKLKAKGVEIAYVTLTVGLGTFRPVKCDEVTDHKMDSEEFEISQETADAINNAKAKGKKLVAVGTTSVRTLETAYQQFGEIKACKSASRLFIYPPYEFKVVDNLITNFHLPKSTLLMLVSALEGKEFIFRAYEEAIKNKYRFYSYGDCMLLK

SEQ ID NO: 64875 - protein, 187 aa, unidentified
  source 1..187: note = Methylomirabilis lanthanidiphila
  REGION 1..187: note = tr|A0A564ZMJ6|A0A564ZMJ6_9BACT S-adenosylmethionine:tRNA ribosyltransferase-isomerase (Fragment) OS=Candidatus Methylomirabilis lanthanidiphila; OX = 2211376 GN=MELA_02 959 PE=3 SV=1
MSIPLRTADFDYTLLPDLIAQAPVPERDRSRLLVLDRRTGALRHRIFRDLPNYLVPGDLLVVNEAKVLPARLVGQSERQHRVEVLLLGEVEADSSARHADASHWEALLKPSRQVRAGDRLSLAEGTIIAEVIEKRGEGRHLLKLVHDGRLIDLLWRFGQMPVPPYIKRQGLGSRVQGKKEKNPETHP

SEQ ID NO: 64876 - protein, 379 aa, unidentified
  source 1..379: note = Methylomirabilis oxyfera
  REGION 1..379: note = tr|D5MIU7|D5MIU7_9BACT S-adenosylmethionine:tRNA ribosyltransferase-isomerase OS=Candidatus Methylomirabilis oxyfera OX=671143 GN=queA PE=3 SV=1
MSISLRTVDFDYTLPPELIAQAPVPERDRSRLLVLDRNTGALHDRIFRDLPEYLVPGDLLVINEAKVIPARLFGRSERRHQIEVLLLYEVEVDPDMGPAGTDRWEALIKPSRQVRIGDRLALADDTITAEVIEKRGEGRHLLKLVYDGRLADLLWRFGRMPVPPYIKRQGIGYRVEGLEQGFPSPLDPGPYLLDPNTLDRERYQTVYAKHEGAVAAPTAGLHFTPDLIETLTRQGIAVTPITLFVGPGTFRPVRMKEVAQHRMEPERYIIPEQTALAVKAARREGRRVIAVGTTTVRTLEHATVMGEIRAGVGLTDLFIYPGYRFTSIDAIITNFHLPCSTLFMLVSAFAGRETMLAAYREAIARCYRFYSYGDAMLIV

SEQ ID NO: 64877 - protein, 341 aa, unidentified
  source 1..341: note = Methylopumilus rimovensis
  REGION 1..341: note = tr|A0A5B8DJ58|A0A5B8DJ58_9PROT S-adenosylmethionine:tRNA ribosyltransferase-isomerase; OS = Candidatus Methylopumilus rimovensis OX=2588535 GN=queA; PE = 3 SV=1
MLLEEFDFDLPQHLIAQAPLQKRDASRLLVLNKNTKSFSDKNFTEFVDLLNINDLLIFNDTRVIKARLFGKKITGGKVEIMIERILDEHHALAHLKTSKKIFDATIFEINKDVSVKVLRKEKDLFYIEFISDESIYDILEKYGHIPLPSYIERNADKSDENRYQTIYAKESGAVAAPTAGLHFTDKIFKNLNDKKIRYTFLTLHVGAGTFQPVRDNDIDHHQMHSESFNVPDKTIQMIHEAKSKNGRIIAIGTTVLRALESKFSEETIQSGFKETSIFIKPGYKFKIVDALLTNFHLPKSTLFILVSAFSGTDTMKKLYQHAIKNEYRFYSYGDASFIERS

SEQ ID NO: 64878 - protein, 341 aa, unidentified
  source 1..341: note = Methylopumilus universalis
  REGION 1..341: note = tr|A0A5B8CX53|A0A5B8CX53_9PROT S-adenosylmethionine:tRNA ribosyltransferase-isomerase; OS = Candidatus Methylopumilus universalis OX=2588536; GN = queA PE=3 SV=1
MLIEDFNFELPQHLIAQTPLQKRDSSRLLVLNKNTKSFSDKKFTDFVDLLNPNDLLIFNDTRVIKARLFGKKITGGKVEIMIERILDDHHALAHLKTSKKIVDDNIFEINKDVSVKVIKKENDLFYIEFNSNLSSYDILEKYGHIPLPPYIERDADISDEKRYQTIYAKESGAVAAPTAGLHFTDEIFKALDDKKIKYTFLTLHVGAGTFQPVRDNDVNNHQMHSESFNVPDKTIHMINDAKSKNGRIIAIGTTVLRALESLFSEETIQSGFKETSIFIKPGYTFKIVDALLTNFHLPKSTLFILVSAFSGSDTMKRLYQHAIKNEYRFFSYGDATFIERS

SEQ ID NO: 64879 - protein, 347 aa, unidentified
  source 1..347: note = Methyloumidiphilus alinensis
  REGION 1..347: note = tr|A0A2W4R051|A0A2W4R051_9GAMM S-adenosylmethionine:tRNA ribosyltransferase-isomerase; OS = Candidatus Methyloumidiphilus alinensis OX=2202197; GN = queA PE=3 SV=1
MKKSDFYYDLPQRLIAQAPLPERSSSRLLKLEGDTGALQDMMFADLPSLLRPGDLLVFNDTRVIPARLYGHKSSGGKIEILIERIVGNRHALAHVRASKSPTAGTELLIDGGHRLFVTGREDDLFRLESPKLDIAEILNTVGHIPLPPYIEHTDGAEDRERYQTVYARHSGAVAAPTAGLHFDEAMLARLEAMGVDKVYLTLHVGSGTFQPLRVENLDEHRMHAEFCEVGELAVEKINETKAKGGRVVAVGTTVVRTLESASLSGELRPFRGDTQLFIRPGFQFQCVDAMLTNFHLPESTLLTLVCSFAGFEQTMAAYRHAVKQEYRFFSYGDAMFVTPKLRCTTKT

SEQ ID NO: 64880 - protein, 353 aa, unidentified
  source 1..353: note = Microgenomates bacterium
  REGION 1..353: note = tr|A0A3A4ZNM3|A0A3A4ZNM3_9BACT S-adenosylmethionine:tRNA ribosyltransferase-isomerase; OS = Candidatus Microgenomates bacterium OX=2093373 GN=queA; PE = 3 SV=1
MEISKFDYTLPKNLIANAPASPRDSSRLMTINRKTKSIYNKHFYDLIDMFSDSDCLVLNDTKVYPARLFGKRKTGGQVEVLLVNNLHKNVWEILGRNVPSVNQEFNIDKICAKVLEKTENKTVIEFANITNGFDKFLEKHGHTPIPPYIHTKFSEAQLRKKYQTKYARETGSIAAPTAGLHFTNRITKGLLKRHVQIEYVTLHVGLGTFLPVKSNTLEEHSMHSESFSVTRDTVERLNIAKKSGKRIIAVGTTTIRVLESLANNNSELRTNNLSSDTDIFIYPPYKFEFVDALITNFHLPKSTLLALVAAFVSHPNTNDKFVNFNNSLIGKAYKKAIKNNYRFYSFGDAMIIE

SEQ ID NO: 64881 - protein, 357 aa, unidentified
  source 1..357: note = Microgenomates bacterium
  REGION 1..357: note = tr|A0A3A0BB00|A0A3A0BB00_9BACT S-adenosylmethionine:tRNA ribosyltransferase-isomerase; OS = Candidatus Microgenomates bacterium OX=2093373 GN=queA; PE = 3 SV=1
MQLSDFHYELPGELIAQSPAIPRDHSRLMLINRQTAAVSHHFFYDLPKLLPPNYHLIANNTKVFPARLKGFKETGGKVEVLLLKKQSDSQFETIVSPGLKVGQKIVFSESLSAEVIETDDRIRLVKFSQSDPLLTEEISRLGTMPTPPYIKKMLENNNDYQTIYAKYGFSAAAPTAGLHFTSALLAEVSTKYGWSELTLDVGLGTFLPVKVDDVKTHHMHKEAYRLDLPTADRLKTIDHKTQKLCVVGTTTLRALESNAALTDSRIDGFTDIRIVPGSFETDIFIYPPYHFRHADALITNFHLPESTLLMLVSAFCSAPQTTTPFTTFKDSLLGHAYNEAVKEKYRFFSFGDAMLII

SEQ ID NO: 64882 - protein, 362 aa, unidentified
  source 1..362: note = Micropelagos thuwalensis
  REGION 1..362: note = tr|U2XX45|U2XX45_9PROT S-adenosylmethionine:tRNA ribosyltransferase-isomerase OS=Candidatus Micropelagos thuwalensis OX=1397666 GN=ilvD2 PE=3 SV=1
MQVEAFDFDLPDELIALRPASPRDAAKLLHVAPNGHLTDRIIRNLPSYFSKGDALVVNDTRVIPAKLSGTRLSDAAIDAEQNLGAKIELNLIERQGASAWKCLLKPAKKVKQGDVIRFEDTAGITYQATVLEKEQGEALIDFNLSLNKMDELLGLIGSMPLPPYIAGKRQPDDKDNQDYQTLFAEHDGAVAAPTAGLHFTPDLQAKLEVIGVEICRVTLHVGAGTFLPVKVENTANHKMHAEWGEVKPEIAERLNRSKQDGHKICCVGTTSLRLLESAARDDGRIMPFAKATDIFIKPGYRFRAADMLLTNFHLPKSTLFMLVSAFSGLNTMKKAYNHAVQNNYRFYSYGDACLLELADKVN

SEQ ID NO: 64883 - protein, 364 aa, unidentified
  source 1..364: note = Microthrix parvicella
  REGION 1..364: note = tr|R4Z701|R4Z701_9ACTN S-adenosylmethionine:tRNA ribosyltransferase-isomerase OS=Candidatus Microthrix parvicella RN1 OX=1229780 GN=queA PE=3 SV=1
MQLGDFDYPLPDDRIAQVPVDPRDAARLMIDAGAGIPPEDSTVSRLADVVGPGDVVVINTTRVRPARLSMRRSTGGATEVLLLTPIDGSTRWEALVRPSRKVAPGELLMPASASRSPDEFSILVGEDRGAGRREVTLLSDDGPLGGGAELDRALERFGVMPLPPYLDDRERDPSRYQTVFADRPGSAAAPTAGLHLTTEVLSAVRRAGAEVVEVELEVGLGTFRPMTADRVEDHVMHAERYRITPEAWDTIRAAAESTGHGSVLAVGTTTLRALESAARSGELSGTTELFLHRGAEFLVVDRLMTNFHLPRSSLLVLIDAFIGPRWRGLYEAAMERGYRFLSFGDAQLLDRRLPDRGPTVGGDR

SEQ ID NO: 64884 - protein, 364 aa, unidentified
  source 1..364: note = Microthrix parvicella
  REGION 1..364: note = tr|A0A359A6G5|A0A359A6G5_9ACTN S-adenosylmethionine:tRNA ribosyltransferase-isomerase; OS = Candidatus Microthrix parvicella OX=41950 GN=queA PE=3; SV = 1
MQLGDFDYPLPDDRIAQVPVEPRDAARLMIDAGAGIPPEDSTVSRLADVVGPGDVVVINTTRVRPARLSMRRSTGGATEVLLLTPIDGSTRWEALVRPSRKVAPGELLMPASASRSPDEFSILVGEDRGAGRREVTLLSDDGPLGGGAELDRALERFGVMPLPPYLDDRERDPSRYQTVFADRPGSAAAPTAGLHLTTEVLSAVRRAGAEVVEVELEVGLGTFRPMTADRVEDHVMHAERYRITPEAWDTIRAAAESTGHGSVLAVGTTTLRALESAARSGELSGTTELFLHRGAEFLVVDRLMTNFHLPRSSLLVLIDAFIGPRWRGLYEAAMERGYRFLSFGDAQLLDRRLPDRGPTVGGDR

SEQ ID NO: 64885 - protein, 364 aa, unidentified
  source 1..364: note = Moanabacter tarae
  REGION 1..364: note = tr|A0A2Z4AIK5|A0A2Z4AIK5_9BACT S-adenosylmethionine:tRNA ribosyltransferase-isomerase; OS = Candidatus Moanabacter tarae OX=2200854 GN=queA PE=3; SV = 1
MNTRLFDYEIPESSIAQFPTLNRGDAKLLVVDRKTQEITTNRFHDFPYLVPKGSALFRNNARVLQGRIRGNRPSGGKVECLLLRPGRDRDNWWCLLRPGRKLGPGRTFEKRGSFHAQVLEKKPSGEFLVKFNLKDGGDVPSMAEKEGEVPLPHYIRRDQQYKKAVEDRERYQTVYSDPEKTVAAAAPTAGLHFTEFILEELYRKKIQSFDLTLHIGLGTFHPINTDTIEDYSIHREAYEIPPDTLQALKKQRIGPRIAIGTTTVRALEDLSFKTQHKSIGPTSKLGSDSISAEASLLIYPPFEFQLCQALLTNFHLPRSTLMCLVAAFLTPGSTDGISWLKEIYHEALAMNYRFYSYGDAMLIL

SEQ ID NO: 64886 - protein, 343 aa, unidentified
  source 1..343: note = Moduliflexus flocculans
  REGION 1..343: note = tr|A0A081BLT8|A0A081BLT8_9BACT S-adenosylmethionine:tRNA ribosyltransferase-isomerase; OS = Candidatus Moduliflexus flocculans OX=1499966 GN=queA; PE = 3 SV=1
MLVSDFDYLLPPELIAQHPAETREQSRLMVIRRTTGEITHTTFANIVGLLEPSDVLVLNNTKVIPARLLGQKQHTGGRVEIFLLRQLRETLWEALIGGKTAPGMTIVFSNGTLRCRIVHKNQDGSGTVEFEPQPELKEKIYAAGSVPLPPYIKRDDGVLSADHSRYQTVYAAQEGAVAAPTAGLHFSEPLLAQIRQKGIDVIPVTLHVGIGTFRPVKVERVEDHQIHAEWYDISTESAEKIAKALAQRRRIITVGTTSTRLLEAVYAKYGRIQAGSGWADIFIYPGFRFQVTQALITNFHLPKSSLLMLVSAFGGMDLIRKAYQEAIAQRYRFYSYGDAMCIF

SEQ ID NO: 64887 - protein, 350 aa, unidentified
  source 1..350: note = Moranbacteria bacterium
  REGION 1..350: note = tr|A0A2J0LW05|A0A2J0LW05_9BACT S-adenosylmethionine:tRNA ribosyltransferase-isomerase; OS = Candidatus Moranbacteria bacterium CG_4_8_14_3_um_filter_41_13 OX=1974659 GN =COZ86_02500; PE = 3 SV=1
MEMMDMEKYDYTLPKGLIRKEGIEPRDSARLFIYDTKTDTVTFDIFRHIAKYLSPQSLMILNDTRVLPARLWLTKETGGKIEVFVLANEIEDEEYIPVLVDRKTNVGQKLTFPSGDYFEVVGQKENMFFVRVVSHAGESLQTLLHKYGQTPLPHYLEGAKTKEDVLRKRYQTVFAKEGASVAAPTASLHFTDTVFASLAKKNIGIDFVTLDVGLGTFASLTSDNFRTKKLHTEFITLAPGTREHINIAKQAGHPIIAVGTTALRTIESLAKNHQIVFQKDRTDIFIYPPYEFQIADILITNFHLPKTSLMFLVDAFLQDKKAKKNIVELYNRAIENHFSFYSFGDSMLIL

SEQ ID NO: 64888 - protein, 349 aa, unidentified
  source 1..349: note = Moranbacteria bacterium
  REGION 1..349: note = tr|A0A5C7KNG2|A0A5C7KNG2_9BACT S-adenosylmethionine:tRNA ribosyltransferase-isomerase; OS = Candidatus Moranbacteria bacterium OX=2045217 GN=queA; PE = 3 SV=1
MKIVDLEQYNYNLPPECIRKTPLEPRDSARLFVYDTATDTITFDTFRNLAQYLPEQSLMVLNDTRVWPARLWLKKPTGGKIEVLVLVNEWDGKGLIPALVDRKVIVGDTLFFPDGSTLVAREQQEQKFFFQLESTRPLQTLLQEFGTTPIPHYLEGEENGDEFKLRERYQTVFASAGASVAAPTASLHFTDQVFEHLQRKHIETTRITLNVGLGTFAPLREENFQTGKLHGEWVTIPQKTAQALERAKTCKQAIIAVGTTTTRTLETLAKRDVLKALTTEAHLFIYPPYCFQMVDILITNFHLPKTSLMLLVDAFLQSKNAKKGVMELYHEAIRARFSFYSFGDSMLIL

SEQ ID NO: 64889 - protein, 212 aa, unidentified
  source 1..212: note = Muproteobacteria bacterium
  REGION 1..212: note = tr|A0A1F6UMF8|A0A1F6UMF8_9PROT S-adenosylmethionine:tRNA ribosyltransferase-isomerase (Fragment) OS=Candidatus Muproteobacteria bacterium RBG_19FT_COMBO_61_10 OX=181 7761 GN=A2V58_05500 PE=3 SV=1
EILERIGHTPLPPYITRADEPGDRERYQTIFARVPGAVAAPTAGLHFDAAMLARLDAMGVERAFVTLHVGAGTFQPVRVEDISGHRLHAELLTVGEAAAARVNAAKGAGRRVIAVGTTVVRALETAATDGRVGPYAGATDIFIYPGYRFRIVDALLTNFHLPESSLLMLVCAFGGTEHVLDAYRHAVEQKFRFYSYGDAMFVLPQFQAASSK

SEQ ID NO: 64890 - protein, 360 aa, unidentified
  source 1..360: note = Muproteobacteria bacterium
  REGION 1..360: note = tr|A0A1F6U4T2|A0A1F6U4T2_9PROT S-adenosylmethionine:tRNA ribosyltransferase-isomerase; OS = Candidatus Muproteobacteria bacterium RIFCSPLOWO2_01_FULL_60_18 OX=1817768 G N=queA PE=3 SV=1
MRKSDFNYSLPPELVAQYPASPRTASRLLHLDGANSVIQDLRFTDLPALLRAGDLLVFNDTRVIPARLFGRKDSGGHIEVLIERLRDAHRVLAQVRASKPPKPGQKLKLEGGVTAVVQSRDGEFYELAFDADMPVLDILERAGHVPLPPYIGRQDEIADRERYQTVYARRRGAVAAPTAGLHFDAAMLGRLQDMGVDSAFVTLHVGAGTFQPVRVDDIREHRMHAEYLRVTPEVCGKINAAKKEGRRVVAVGTTVVRALETAAKSRDHLKTSLSPEARGVIEMGSGRVKPFEGETDIFIYPGYRFQIVDALLTNFHLPESTLLMLVCAFGGTENVLNAYRHAVKSKYRFYSYGDAMFVGR

SEQ ID NO: 64891 - protein, 163 aa, unidentified
  source 1..163: note = Nealsonbacteria bacterium
  REGION 1..163: note = tr|A0A2G9YXS7|A0A2G9YXS7_9BACT S-adenosylmethionine:tRNA ribosyltransferase-isomerase (Fragment) OS=Candidatus Nealsonbacteria bacterium CG23_combo_of_CG06-09_8_20_1 4_all_38_19 OX=1974721; GN = COX36_00390 PE=3 SV=1
MKSTNQYNYYLPPELIAKQPATPRDSSRLFIYDTKTDEIVFDKFNNLDKYLPKKSFLVMNDTKVLPARVEMKKATGGKVRVLFLVNEIMSSSQYQVLSIEQNTIRIFVDRKVDVGDKLFFDSQYFVTVIGQGEHIFTVQFDFSIGELFRILEKKGTMPIPLYI

SEQ ID NO: 64892 - protein, 344 aa, unidentified
  source 1..344: note = Nitrosoglobus terrae
  REGION 1..344: note = tr|A0A1Q2SMM8|A0A1Q2SMM8_9GAMM S-adenosylmethionine:tRNA ribosyltransferase-isomerase; OS = Candidatus Nitrosoglobus terrae OX=1630141 GN=queA PE=3; SV = 1
MQLSDFYYDLPKNLIADYPPKQRGGSRLLFLDPDSGLLIDQQFSNLSTLLSEKDLLILNDTKVIPARLLGVKTSGGKVEVLIERILNQHLALAHVRPGKTAQAGHRLVLEQSVEVIIGKCILDLVELHFLDPRPLPQILDEVGRIPLPPYIRREMSTLDSERYQTIYASRPGAIAAPTAGLHFNEFLLKQLQAKGVQIGYITLHVGTGTFQPVRVEHIHQHRMHSEYIEISEQVCAQIQATKQQGGRVIAVGTTTVRALESASVSGLLSPYQGETEIFIFPGYRFHTIDALITNFHLPKSTLLMLVCAFAGREKILAAYQHAVKKGYRFFSYGDAMFITSAKTA

SEQ ID NO: 64893 - protein, 339 aa, unidentified
  source 1..339: note = Nitrospira nitrificans
  REGION 1..339: note = tr|A0A0S4LMT2|A0A0S4LMT2_9BACT S-adenosylmethionine:tRNA ribosyltransferase-isomerase; OS = Candidatus Nitrospira nitrificans OX=1742973 GN=queA; PE = 3 SV=1
MHLSEFDFPFDPSLIALQPVSPRDRARLLVVDRATERLTHRHIADLPLILKPGDLLVVNDTKVMAARVPGIKKPIGTPVEILFVRELSEGRWEIMVKGSFRIGQVIEFDQQSRATIVKRDATGTEVIVESPAPVTRLLQERGVMPLPPYIKRTPIHEDRRWYQTVFAKHEGAIAAPTAGLHFTEDLFQRLNVSGIKIAAVTLHVGPGTFKPVTTERIEDHQMGAEAFTISEGTARAIQKTKQAGGRVVAVGTTVVRTLETVAKEKREIVPMSGESRLFITPGFQFKVVDAVMTNFHLPRTTLLMLVSAFAGIEPMRKAYEEVVKERYRFYSYGDAMLIL

SEQ ID NO: 64894 - protein, 339 aa, unidentified
  source 1..339: note = Nitrospira nitrosa
  REGION 1..339: note = tr|A0A0S4L456|A0A0S4L456_9BACT S-adenosylmethionine:tRNA ribosyltransferase-isomerase; OS = Candidatus Nitrospira nitrosa OX=1742972 GN=queA PE=3; SV = 1
MQLSEFDFPFDPSLVASQPVIPRDQARLLFLDRTTQQRRHHHVADLPTLLNPGDLLVVNDTKVLAARVPGIKRPTGTPVEVLFVRDLGGNRWDIMVKGSFRVGQVIEFDQQSRATIVKRDATGTEVLVESLMPVTRLLEERGMMPLPPYIKRAPTQEDGNWYQTLFAKHGGAIAAPTAGLHFTEELFRRLREAGINMATVTLHVGPGTFKPVTTEKIEDHQMGAEIFHVGEETAQAITETKRTGGRVVAIGTTVARTLETVMKENGKMMLLSGESRLFITPGFEFKIVDALMTNFHLPKTTLLMLVSAFAGIEPVRNAYEEAVNERYRFYSYGDVMLIL

SEQ ID NO: 64895 - protein, 341 aa, unidentified
  source 1..341: note = Nitrotoga sp.
  REGION 1..341: note = tr|A0A3E1D9W7|A0A3E1D9W7_9PROT S-adenosylmethionine:tRNA ribosyltransferase-isomerase; OS = Candidatus Nitrotoga sp. SPKER OX=2184312 GN=queA PE=3; SV = 1
MLTDQFNFVLPEHLIAQHPPERRDASRLLCIRGEAREDLVFADLPSLVREHDLLVLNDARVLKARLFGVKESGGKIEVLIERILDEHHALAQVRASHAPKPGSRLLLAGHLPVTVLGREREFFNLRFDSTENVSELLEQYGQLPLPPYITHAANAEDEERYQTVYASQPGSVAAPTAGLHFDDAMLATLRAQGTQLAYLTLHVGAGTYQPVRVDDVRDHVMHSERYAIPQATVNAILQARARGGRIIAVGTTSLRALESAAQLGQLRAGEGETSIFITPGYQFNVVDVLLTNFHLPKSTLLMLVCAFGGMEAMLAAYRHAVERQYRFFSYGDAMLIERQHV

SEQ ID NO: 64896 - protein, 341 aa, unidentified
  source 1..341: note = Nitrotoga sp.
  REGION 1..341: note = tr|A0A3E1D8H3|A0A3E1D8H3_9PROT S-adenosylmethionine:tRNA ribosyltransferase-isomerase; OS = Candidatus Nitrotoga sp. MKT OX=2184311 GN=queA PE=3; SV = 1
MFTDEFNFALPEHLIAQYPPERRNASRLLCVRGEIREDSMFVQLPSLVREHDLLVFNDARVLKARLFGVKESGGKIEVLIERILDEHHALAQIRASHAPKPGSRLLLAGHLPVTVLGREREFFCLRFDSIENISLLLEQYGQLPLPPYITHVANAEDEERYQTVYACQPGSVAAPTAGLHFDDVMLAALRAQGTQLAYLTLHVGAGTFQPVRVDNVRDHVMHSERYVIPQATVDAILQARARGGRIIAVGTTSLRALESAAQQDRLRAGEGETSIFITPGYRFKVVDALLTNFHLPKSTLLMLVCAFGGMDAMLAAYSHAVERQYRFFSYGDAMLIEQKHV

SEQ ID NO: 64897 - protein, 382 aa, unidentified
  source 1..382: note = Nomurabacteria bacterium
  REGION 1..382: note = tr|A0A0G0TN25|A0A0G0TN25_9BACT S-adenosylmethionine:tRNA ribosyltransferase-isomerase; OS = Candidatus Nomurabacteria bacterium GW2011_GWA2_40_9; OX = 1618734 GN=queA PE=3SV=1
MVARFVYVLVNLTAGEYQSAFYLSIFMEYRMMYFIMPTPTSFFDYELPNGLIAQHSVEPRDQSCLMMVDRKTGQRQHKVFYEILNEFHGGDVLVMNNTKVFRARLQTVVHGRGIELFLLRPREDGVWDALVKPGKHVNVGDIVELGEMQGEVVSKTDVVRIRFNQSQTQIVHYANIHGEIPIPPYVEEIPVELDQYQTVYAKETGSVAAPTAGFHFTKELLEKIQQKGIQIQYVTLHVGLGTFRPMKSEIIEEHQMHSEFVTITSQTANAINKAKEEGRRIIAVGTTTVRTLEGVAAYTAENKNLDSLLPPEGFSGDINIFITPGFHFRVIDALITNFHLPKSTLLVLVSAFAGREQILAAYEEAVRQKYRFFSFGDAMFIS

SEQ ID NO: 64898 - protein, 353 aa, unidentified
  source 1..353: note = Nomurabacteria bacterium
  REGION 1..353: note = tr|A0A0G0BDX0|A0A0G0BDX0_9BACT S-adenosylmethionine:tRNA ribosyltransferase-isomerase; OS = Candidatus Nomurabacteria bacterium GW2011_GWF1_31_48; OX = 1618767 GN=queA PE= 3 SV=1
MNIEDFNFDLPESLVGQKAIEPRDSCRLLVLDKDKGGVSHHVFSDLKNILDENCVLVLNDTKVFPARLFGKKETGGQAELLLLKQTGQSTFSAIGKGLPKKGSLLTFGRELTGTVEEKHEDGEVEINFNYSGPELLEKIDQLGSTPLPPYVHSKEKEPLLREQYQTVYARERGSSAAPTAGLHFTDKLLADLMNRGVMIEKVTLHVGLGTFRPVTTEQIRDKVLHSESFFLSQETAQRLNLAKKAGKKIIAVGTTACRLLETLSNEQGMISPGAGETNIFIQPGYKFKFVDGLITNFHLPKTSLLMLVSALVSAPNSPTAFKNFSDSPIGKAYREAIKKEYKFFSFGDAMLIL

SEQ ID NO: 64899 - protein, 330 aa, unidentified
  source 1..330: note = Omnitrophica bacterium
  REGION 1..330: note = tr|A0A3A4JPT2|A0A3A4JPT2_9BACT S-adenosylmethionine:tRNA ribosyltransferase-isomerase; OS = Candidatus Omnitrophica bacterium OX=2035772 GN=queA; PE = 3 SV=1
MRLTDFDYHLPKELIAQYPLKDRKACRLLVLDRNKGTVTHGMFKDFTRFFSPGDALVLNDTKVLSCRLIGKRATGGKVELLLLRERQEGVFEALIKPGRLKAGETILLNGGGLSCEIISRNQVRFIVDSVDQIYRAGVMPLPPYIKRIPEELDAAYYQTVYAKNEGAIAAPTAGLHFTEDLLEEVTACGIKKTFLTLHINAATFKPVKAADVITHQMEREYYHINKEAIRLIEGARKSHSRIIAVGTTSCRAMEAYAASGEEQGYTDLFIYPGYTFRYVDTLLTNFHLPCTTLFILVCAFAGSSLVRKAYKEAVARKYRFYSYGDAMLIL

SEQ ID NO: 64900 - protein, 349 aa, unidentified
  source 1..349: note = Omnitrophica bacterium
  REGION 1..349: note = tr|A0A3B9ZEV4|A0A3B9ZEV4_9BACT S-adenosylmethionine:tRNA ribosyltransferase-isomerase; OS = Candidatus Omnitrophica bacterium OX=2035772 GN=queA; PE = 3 SV=1
MKLSDFDYSLPKELIAQYPLKKRDSCRLMVIDRKSNAVSHRIFSDFAEYVGPHDIVVVNNTKVVPVRFLGVKKDTLGKVDVLLSERLSPRSFRALIKPNLKTGQEVLFNAPAGLGVNGILKARVIDEKVIEFNKNISSKIVEAIGVMPLPPYIKRQPQKLDILSYQTVYAKKPGAIASPTAGLHFTKTILERIRKKKVRIDSVTLHVGLGTFKPVKCENIQEHVMEKEAFHISKKTLQAIAQAKKNGKRIFAVGTTTTRVLETAAELAAKSPSSIVHRPSSQGYTNLFIYPGYQFKMVDALVTNFHLPKTTLFILVCAFAGRDLIMKAYNEAIKEKYRFYSYGDAMLIV

SEQ ID NO: 64901 - protein, 336 aa, unidentified
  source 1..336: note = Omnitrophus magneticus
  REGION 1..336: note = tr|A0A0F0CJJ0|A0A0F0CJJ0_9BACT S-adenosylmethionine:tRNA ribosyltransferase-isomerase; OS = Candidatus Omnitrophus magneticus OX=1609969 GN=queA; PE = 3 SV=1
MKLHDFYYEFPKELIAQAPLKTRDNARLLVLDRKKNEISEIIFKDLAQYFSAGDCLVLNDTKVLPVRLYGHRKTGGRVEIFLLDMPGKKCKALVNPSARIKDGEKITLESGINAVILERTNIGRFLEFDAPIEEVLKTGHVPLPPYIERVDNAFDKESYQTVYAARDGATAAPTAGLHFSGELLEKIKNKGVHIVYVTLHTSYGTFAPVKSENIEEHKMHFEYYEMKEETARIINNVKKTGGKIFGVGTTSCRVLETSAGQDGFVKQGSGETNLFIYPGYEFKTVDSLITNFHLPSSTLLMLVSALAGRDFIMTAYKRAIDLRFRFFSYGDAMLIL

SEQ ID NO: 64902 - protein, 351 aa, unidentified
  source 1..351: note = Ornithobacterium hominis
  REGION 1..351: note = tr|A0A383TYI2|A0A383TYI2_9FLAO S-adenosylmethionine:tRNA ribosyltransferase-isomerase; OS = Candidatus Ornithobacterium hominis OX=2497989 GN=queA; PE = 3 SV=1
MKMKTSDFDFKLPEKLLAERPATYRDEARLMVLDRKTQSIEHKEFKDLINYFDEEDLLIMNNTKVFPARLFGNKEKTGAKIEVFLLRELDPKAKLWDVLVDPARKIRIGNKLFFGDDGELVAEVVDNTTSRGRTLRFLFDGDYKEYRAKLAELGTTPLPKYIKREADEEDEERYQTIYAKEEGAVAAPTAGLHFSKHLLKRLEIKGVNFAEVTLHVGLGTFSPVQVEDLTKHKMESERAHISAETVEKVNRALEEKSKICAIGTTSMRAIESAVSANGKLNEFSGWTNKYIHPPYDFSIANAMVTNFHTPRSTLLMMISAFGGHDLVMKAYKEAVEKEYKFFSYGDAMLIL

SEQ ID NO: 64903 - protein, 340 aa, unidentified
  source 1..340: note = Ozemobacter sibiricus
  REGION 1..340: note = tr|A0A367ZQH3|A0A367ZQH3_9BACT S-adenosylmethionine:tRNA ribosyltransferase-isomerase; OS = Candidatus Ozemobacter sibiricus OX=2268124 GN=queA; PE = 3 SV=1
MKTALFDFDLPPDLIAQVPAPERPASRLLVLDRATGTVSHRRFADLAELIPPGDLLVVNRSRVIPARLFTVPEPGQAAAEIVFVEDLGAGRCLAMVRPGRRFRSGRVHALPGGGRVRVEAVRDDGLRVLQIEGETDSVAVFRRYGEMPLPPYITSRESDPDRYQTVFAREEGSVAAPTAGLHFDAALLDRLRNRGVHIGEILLHVGLGTFKPIETDEIEDHHMHAERYCVEPGLADTFARVRAAGGKIWACGTTSVRTLESAIQSDGTLATGWRETSCFLRPGHVFRAVDHLITNFHLPRSTLLVLVAAFAGLDQILAAYREAVAARYRFFSFGDAMVIL

SEQ ID NO: 64904 - protein, 365 aa, unidentified
  source 1..365: note = Pacebacteria bacterium
  REGION 1..365: note = tr|A0A2H0SYY6|A0A2H0SYY6_9BACT S-adenosylmethionine:tRNA ribosyltransferase-isomerase; OS = Candidatus Pacebacteria bacterium CG10_big_fil_rev_8_21_14_0_10_40_26 OX=197 4767 GN=queA; PE = 3 SV=1
MKLTLNDFDYYLPPERIAKYPAEPRDSSRLLVVDRTTGEIKDDYFYNLGVYLNPGDVIVRNNTKVIPARIVGKKDTGGKLELLLVKKISHTATVETWECLSKPGLKVDQKGIFSDVLQATCTGICEDAYTRTVEFNMAGPEFIAELTRIGITPLPPYIAEAHTDENVFREQYQTIYAKFDGSAAAPTAGLHFTKKLDENLKKHGIHIVEVTLHVGLGTFLPVKTENITEHHMHSEWFELPAETAAAVQKAKDNGNRVIAVGTTSNRVLESCSSLNSEGEFTITPQIADTDIYIYPPYKFVCVDTLITNFHLPKSTLLMLVSAFVSQPNSDELFTKFCESLIGRAYTYAIKNEYRFYSFGDGMIIL

SEQ ID NO: 64905 - protein, 357 aa, unidentified
  source 1..357: note = Pacebacteria bacterium
  REGION 1..357: note = tr|A0A3D4GG72|A0A3D4GG72_9BACT S-adenosylmethionine:tRNA ribosyltransferase-isomerase; OS = Candidatus Pacebacteria bacterium OX=2053589 GN=queA; PE = 3 SV=1
MLTLSDFDYVLPQDRIAQTPAHPRDHSRLMVVNRKHETIDTTNHFYDLPSLLTKNDVLVVNNSKTLPMRTYGTRQSGGKTEVLFVKRLELHSEKEVWEVMTSPGLKPGQEVHFQNTQMHIVCTEDLGYTRKVDVVDYEGSVIEVLHKIGELPTPHYIRKHLDHPEEYQTIYAKPEGSSATPTAGLHFTQSIFDELSKKGIPIIELTLHVGLGTFLPVKTEDIQKHHMHSEWFTLSKKNAEQLNQYKAEGCRIVAVGTTTTRILETCAIVRHDKKDVLTPQTGETSLYLYPPYTFKCVDALITNFHLPKSTLLMLVSAFSEQGKIFHTFKESLIGKAYQQAIKENFRFFSFGDAMVIE

SEQ ID NO: 64906 - protein, 355 aa, unidentified
  source 1..355: note = Pantoea carbekii
  REGION 1..355: note = tr|U3U3M1|U3U3M1_9GAMM S-adenosylmethionine:tRNA ribosyltransferase-isomerase OS=Candidatus Pantoea carbekii OX=1235990 GN=queA PE=3 SV=1
MHVCHFNFQLPKYLIAQYPKTKRSSCRLLSLDGNSGTLMHGIFTDILDKINPGDLLIFNNTRVIPARIYGRKISGGKIEILVERILDDRRILAHVRTSTKTLKPGAILLMGEKNNVIGTILSYYNALFEIIFESDFTVLDILNSIGHIPLPPYINRPDETIDYELYQTVYSTRLGAVAAPTAGLHFDQPLIDALKKKGVEIAFVTLHIGAGTFKKLKITNITEHIMHTEYVEVSQETVNAVIACKTRGNKVIAIGTTSVRSLESAATNCKDTLIAPFIGHTQIFIYPSYQYKVIDTLITNFHLPQSTLIMLVSAFAGYQNTMRAYRTAIIERYRFFSYGDAMYITHNPQAPDEHF

SEQ ID NO: 64907 - protein, 348 aa, unidentified
  source 1..348: note = Paraburkholderia kirkii
  REGION 1..348: note = tr|G4M2N3|G4M2N3_9BURK S-adenosylmethionine:tRNA ribosyltransferase-isomerase OS=Candidatus Paraburkholderia kirkii UZHbot1 OX=1055526 GN=queA PE=3; SV = 1
MFTLSDFDFNLPPELIAQSALTERSASRLLEVDNRRSPATLTDRRFSELPDLLEPGDLLVFNDTKVLKARFFGQKASGGRVEVLVERLTGATTALAQIRASQSPVQGRTIRLADAFDVTVGERVEPFYTLHFPADCLTLIEQYGRLPLPPYIEHDADAYDETRYQTVYAANPGAVAAPTAGLHFDDTLFAELEQRGIERATLTLHVGAGTFQPVRVENIAEHKMHSEWYDLPQSLVDRVMAVKARGNRVIAVGTTSMRALEAAARDAAQAGRTLAGSQAETDIFITPGYEFRIVDRLVTNFHLPKSTLLMLVSAFAGMESIRDAYRHAIKQRYRFFSYGDAMLLTRQK

SEQ ID NO: 64908 - protein, 348 aa, unidentified
  source 1..348: note = Paraburkholderia kirkii
  REGION 1..348: note = tr|A0A0L0LYK5|A0A0L0LYK5_9BURK S-adenosylmethionine:tRNA ribosyltransferase-isomerase; OS = Candidatus Paraburkholderia kirkii OX=198822 GN=queA; PE = 3 SV=1
MFTLSDFDFNLPPELIAQSALAERSASRLLEVDNRTSPATLVDRRFSELPNLVEPGDLLVFNDTKVLKARFFGQKASGGRVEVLVERLTGATTALAQIRASKSPAPGSAIRLAEAFDVTVGERVEPFYTLHFPAECLTLIEQFGRLPLPPYIEHDADAYDETHYQTVYAANPGAVAAPTAGLHFDDALFAALEARGVERATLTLHVGAGTFQPVRVENIAEHRMHSEWYDLPQSLVDRIAVVKAHGNRVIAVGTTSMRALEAAARDAAQAGRPLAATQAETDIFITPGYDFRVVDRLVTNFHLPKSTLLMLVSAFAGMDAIREAYRHAIEEKYRFFSYGDAMLLTRQR

SEQ ID NO: 64909 - protein, 358 aa, unidentified
  source 1..358: note = Parcubacteria bacterium
  REGION 1..358: note = tr|A0A1W9QLQ8|A0A1W9QLQ8_9BACT S-adenosylmethionine:tRNA ribosyltransferase-isomerase; OS = Candidatus Parcubacteria bacterium 4484_255 OX=1970769; GN = queA PE=3 SV=1
MLSLKKFDYKLPINLIAQKPIRPRDHSRLMILNREKKSITHDYFYNINKYIEPNSILVANNSKVIPARLNGEKPTKGKVEILLLKQLENDCWEIILKGKGKTNLKISFNKKLFGVLKKQLSDQTWLMKFSALQEDLLKALKKAGETPTPPYIKRISNLREYQTIYAQHPGSSAAPTAGFHFTKKIIRKLKKAGIDMHFITLHVGLGTFQPVRTENIENHQMHSEWGEIKKPIVQLLNKAKKEQKKIIAVGTTSCRVLEAFSSSNGKLYSGGKWIDLFIYPHDQCGVGASSHDQCGVGASSGYKFKFIDGLITNFHLPKSTLLMLVSAFAGREFIFQAYKEAIKKKYRFYSFGDAMLII

SEQ ID NO: 64910 - protein, 348 aa, unidentified
  source 1..348: note = Parcubacteria bacterium
  REGION 1..348: note = tr|A0A2N5ZTM0|A0A2N5ZTM0_9BACT S-adenosylmethionine:tRNA ribosyltransferase-isomerase; OS = Candidatus Parcubacteria bacterium OX=2053309 GN=queA; PE = 3 SV=1
MKVSDFNFDLPENLIATSPISPRDHSRMLVLDKENGEISHKRFYDILDYFEKGDLLVLNNSKVFPARLLGKVKESERKIEVFLLHPQTKYRWQCLIGGKKIKEGLTIKITDYFEVLVREENGDGTWLVELPMEGKGLMGFLEMNAKIPLPPYIEKQRKLDNKKYNTEKDKKDYQTVFAEADKQGSVAAPTAGLHFTPELLEKIKNKGVNIEYITLHVGMGTFAPVKVDDIESHKMHAEWVEISSKTVKKIRETQNNKNKIIAVGTTSARSLEALGNSDALSAWVDIFIYPGYQFKNVDSIVTNFHLPKSTLIMLVSAMAGKEEVKRAYKEAIEKKYRFYSYGDAMFIK

SEQ ID NO: 64911 - protein, 354 aa, unidentified
  source 1..354: note = Peregrinibacteria bacterium
  REGION 1..354: note = tr|A0A0F9ZBG9|A0A0F9ZBG9_9BACT S-adenosylmethionine:tRNA ribosyltransferase-isomerase; OS = Candidatus Peregrinibacteria bacterium GW2011_GWC2_33_13 OX=1619061 GN=queAPE=3 SV=1
MQLSDFDYFLPKELIASKPAYPRDQSRLMFVDRKKGIIKHYNFHDLPDLLNKNSVLAFNNSKVINARLFGVIEGMRNVEILLTKCLDKDKNIWEILAKGAKYLKNGSVIYFNNHKPILDKLYAIVLNQNSDGSRVIQFTDIKYQKLWMLLPFYGVLPLPPYIKNFHGSEKKYQTIYAKNQGSIAAPTAGLHFTKRIFQNLKSKGISMEYLTLHVGLGTFMEVRTENIKDHIMHEEMFEINKKTAKALNKAKSDAKKIVSIGTTTLRSLESSTFIENGKTVLSPTLSPKSTNIFIYPGYKFKFVDQLVTNFHLPKSTLLMLVSAFAGKDLIFEAYSKAIENKYRFFSFGDAMVII

SEQ ID NO: 64912 - protein, 379 aa, unidentified
  source 1..379: note = Peregrinibacteria bacterium
  REGION 1..379: note = tr|A0A2H0Y2I8|A0A2H0Y2I8_9BACT S-adenosylmethionine:tRNA ribosyltransferase-isomerase; OS = Candidatus Peregrinibacteria bacterium CG08_land_8_20_14_0_20_41_10 OX=19747 83 GN=queA PE=3 SV=1
MLLSDFDYHLPPELIAQNPLSPRDHCRLMLLKRPTESIEHKYFYNLVNLLTARDVLVLNESKVIKARLFGKLNSSTTEKSSEVFLLKQLSPFVWECLARPGHKFKTGTEIDFYNSDNQHPSSLKGKVAQVLTRGMREISFNLTGKAFEQELQKIGQIPLPPYIKNFQGQNEDYQTVYATKKGSVAAPTAGMHFTEELLNKLKNKGVQIEKVILHIGLDTFQPLQVEQIETHQMHAEDFELEEQTAERLNLAKQAGKRIIAVGTTTVRVLETCAIEAKGKGQRAYGKGQIVKGGGEKQKNVPLAPNHLLSAQTGSTSLFIYPSYQFKFVDALLTNFHLPKSSLLLMVSTFAGREFILRAYQEAIQQKYRFYSFGDAMLIE

SEQ ID NO: 64913 - protein, 360 aa, unidentified
  source 1..360: note = Peribacteria bacterium
  REGION 1..360: note = tr|A0A1F7BKW7|A0A1F7BKW7_9BACT S-adenosylmethionine:tRNA ribosyltransferase-isomerase; OS = Candidatus Peribacteria bacterium RIFCSPHIGHO2_01_FULL_55_13 OX=1801917 GN=q ueA PE=3 SV=1
MASYSYELPSELIATTPAHPRDSARLLIYNRKNDRVDLDTFHNIGTYLRKNAVLILNDTKVFPARMILKKSTGGKIEALYLSQQNDHITVLATGKLRPEEILQWEDGHAFTVIKRNGKEAILQPNFPLSTFLSLLEAHGHIPLPPYIEKSPLSESDRRREYQTVFARDSGSIAAPTAGLHFTQELLDVLRSQGISIEYVTLHVHLGTFAPLEEDQWEKKKLHTERYHITADTAERLNAAKKEGRPIVAVGTTTVRTLESACDQNSPVGAWHAKPLRMPLKRSHAYLLSLQKLSGSTSLFLTESSPLHFVDHVITNFHLPGTSLLMLVAAFTGREKLMELYQKAVDEKMRFYSFGDGMLIV

SEQ ID NO: 64914 - protein, 359 aa, unidentified
  source 1..359: note = Phaeomarinobacter ectocarpi
  REGION 1..359: note = tr|X5MPA3|X5MPA3_9RHIZ S-adenosylmethionine:tRNA ribosyltransferase-isomerase OS=Candidatus Phaeomarinobacter ectocarpi OX=1458461 GN=queA PE=3 SV=1
MTDSLDAYDFTLPEELIALRPAQPRDAARLLVVNATKPGAIADAGVRELADFLKSGDVLVANDTRVIHARLRGIRRRGEAEAHIELLLHKPMPDPGHWQAFARPAKRLKPGETVECAEGLKAHIVSRDGGEVVVRLDATGQTLDEAIAIAGEMPLPPYIEGKRKADAQDEEDYQTVFAQADGSVAAPTAGLHFTDRVLKSLTDKGVSQETVTLHVGAGTFLPVKSDTLAAHKMHSEWGEVTAETAQRLNEARQAGGRIVAVGTTSMRLLESAVDEDGVFHPFQAETDIFIKPGHHFHAVDVLMTNFHLPRSTLFVLVSAFAGVATMRQAYQHAIDTGYRFYSYGDSSLLFPHSQDNAAP

SEQ ID NO: 64915 - protein, 352 aa, unidentified
  source 1..352: note = Photodesmus katoptron
  REGION 1..352: note = tr|S3E184|S3E184_9GAMM S-adenosylmethionine:tRNA ribosyltransferase-isomerase OS=Candidatus Photodesmus katoptron Akat1 OX=1236703 GN=queA PE=3 SV=1
MRVSDFYFELPNDLIAQYPKRKRTASRLLQLNGNTGSLRDSSFTALLDLVRQGDLMVFNNTRVMPARMFGRKKTGGKLEVLIERILNRSTVLAHVYCSKLPKISSTLFLGKNDEYEVEVIDCHSALFKLCFNNGESVLNVLNHIGHVPLPPYISRLDTAIDKERYQTVYNLKLGAVAAPTAGLHFDEVFLEKIKKKGIKFAYVTLHIGSGTFYPVKVDKINEHKMHSEYVEVKKITIDAIRSAKARGGRIIAIGTTSARSLESVAQNALKKNTDLMPFCGDTKIFIFPGYKYQLVDCLVTNFHLPKSTLIMLVSALSGYNHVMSAYQYAVKNRYRFFSYGDSMFATRKTCID

SEQ ID NO: 64916 - protein, 339 aa, unidentified
  source 1..339: note = Phycorickettsia trachydisci
  REGION 1..339: note = tr|A0A2P1P8M5|A0A2P1P8M5_9RICK S-adenosylmethionine:tRNA ribosyltransferase-isomerase; OS = Candidatus Phycorickettsia trachydisci OX=2115978; GN = queA PE=3 SV=1
MKNDPLKVSDLDFPLDTKQIALNPLEKRDESRLLVIKGQNLKEIVFKDIVDLFHPGDVLVLNNSKVIKSRIIVSLEGKNIELFLHKQIEENRWQAFAKPAKKLSIGQVFSLGDNKIRVAEKLESGEVILELNLVLSSLEFFDQFGKIPLPPYIKRPSEKSDEEQYQTIFAANSGSVAAPTAGLHFTQEVLDKIKAKGAQVVYITLHVGAGTFLPIKSENVDDHEMHYENYEISQETAQIINDAKRVVAVGTTTLRTLESSCEDGKVIAQKSSTNLFIKPGFKFHVVDLLITNFHLPKSTLLLLVWAFGGRNNMEKAYDYAVKNNFRLFSYGDTSLIYHV

SEQ ID NO: 64917 - protein, 354 aa, unidentified
  source 1..354: note = Phycosocius bacilliformis
  REGION 1..354: note = tr|A0A2P2E7P5|A0A2P2E7P5_9PROT S-adenosylmethionine:tRNA ribosyltransferase-isomerase; OS = Candidatus Phycosocius bacilliformis OX=1445552 GN=queA; PE = 3 SV=1
MLLSEFDFDLPEELIALRPAVPRDSARLLVSQPGQMIEDSVVSALPGFLRAGDVLIFNDTRTIAASLKATRAPRGPIGGPVQIDLNLHQRVDEASWKAFARPAKRVAIGDVLDLAQDLRAEVIDLGEGGEVTLRFSVAGDALAQAIGRVGAMPLPPYIARKRDIDDQDAEDYQTVYARAEGSVATPTAGLHFTPDLLAALDAAGIERHWVTLHVGAGTFLPVKVDKIEDHVMHSEYYEVSQQTAQAIARAKAEGRRVIAVGTTSLRTLETIGQSDGRIKAGSGDTAIFITPGYRFKVVDGLMTNFHLPKSTLLMLVGALIGMEGLRSVYRHAIESRYRFYSYGDASLLWKADPF

SEQ ID NO: 64918 - protein, 350 aa, unidentified
  source 1..350: note = Poribacteria bacterium
  REGION 1..350: note = tr|A0A2D5VF92|A0A2D5VF92_9BACT S-adenosylmethionine:tRNA ribosyltransferase-isomerase; OS = Candidatus Poribacteria bacterium OX=2026781 GN=queA; PE = 3 SV=1
MDLQLDSYDYYLPDDQIAQYPLENRAQSRLLVLDRQTRQYHHTTFSQIGQFLPTDSLLVTNNTKVIPARLIGYKAHTGGKVEVFLVRQKANRLWEVLMKPGRRIRPKTQIVFGSSPCGESALLAARVVAKTATGSYIVRFEFEGDFYQCLNQVGQTPLPPYIKRPPATGDIDRYQCVYAHKAGAVAAPTAGLHFTPDLLARLQQDGIEIATLTLHVGLGTFQPVKVDNILNHQMHAEHFEFSEHTARQINRAKQSDRKIVSVGTTSVRVLETVVCNGQLYPQSGDTEIFIYPGFQFQIVDALITNFHLPKSTLLMLVSALADRTLIMDAYRQAIAEKYRFYSYGDAMLIL

SEQ ID NO: 64919 - protein, 341 aa, unidentified
  source 1..341: note = Poribacteria bacterium
  REGION 1..341: note = tr|A0A2E4DSR0|A0A2E4DSR0_9BACT S-adenosylmethionine:tRNA ribosyltransferase-isomerase; OS = Candidatus Poribacteria bacterium OX=2026781 GN=queA; PE = 3 SV=1
MRLTDFDYNLPKQLIAQDPLEQRDRSRLLVVNRETEKIHHTEFSQVADFLPSPSLLVLNNTKVIPARLIAKKITGGKIEVFLLRQRGKKTWEALIKPGKRVKRGTLLEFADCELTARILTRTDAGNYMVRFRYNGDFNQILEQVGQIPLPPYIKRSPNLEDIDRYQCVYASASGAVAAPTAGLHFTPELIDQLKGRDIEISSLTLHVGLGTFQPIKTSNITKHKMHAEYFEISSRTADQINNARKQGRKIVAVGTTTVRAIESAVVDGQIRPQKGDTDIFIYPNYVFKSVDALITNFHLPKSTLLMLVSALATPELIFSAYQNAIDQEYRFYSYGDAMLIR

SEQ ID NO: 64920 - protein, 370 aa, unidentified
  source 1..370: note = Promineofilum breve
  REGION 1..370: note = tr|A0A160T1R2|A0A160T1R2_9CHLR S-adenosylmethionine:tRNA ribosyltransferase-isomerase; OS = Candidatus Promineofilum breve OX=1806508 GN=queA PE=3; SV = 2
MKVSEFDYDLPPALIAQQPMEPRDASRLLVLDGATGSIDHRRFRDLGDYLRPGDVIVANDTRVIPARLFGRKPTGGQVEILLLERLDGTTWRALVGGRRVGVGLVITLLDHADEPASVTATVIAEGAESLRELRFSAPVETWIDALGYAPLPPYIHAPLADAERYQTIYARPPGSAAAPTAGLHFTPELLLQLRERGILFETVTLHVGLDTFKPVSVAEVAEHNIHTEWARLSAEAARRINEAHLAGGRIIAVGTTTARVLETAALRSAGIGGSLRTISARDATGETSNICPWKPVAAFEGPTDLFIYPGYRFRAVGMLITNFHLPRSSLLMLVAAFAGRETMLAAYRAAVAEGYRFYSFGDAMLIRPNG

SEQ ID NO: 64921 - protein, 359 aa, unidentified
  source 1..359: note = Propionivibrio aalborgensis
  REGION 1..359: note = tr|A0A1A8XHR9|A0A1A8XHR9_9RHOO S-adenosylmethionine:tRNA ribosyltransferase-isomerase; OS = Candidatus Propionivibrio aalborgensis OX=1860101; GN = queA PE=3 SV=1
MLTLDDFDFSLPPELIAQHPTPERSASRLLHMAGDAQHDRQFAELPQLVEPGDLLVFNDTKVIRARLLGQKESGGRIEVMIERIVDRDRAVAQIRASKSPKSGSRIVLENAIVLTVTGRTGEQSEFFALELVGDGDLFELVEQYGHLPLPPYITHAAGPEDETRYQTLFARHAGAVAAPTAGLHFDHATLAQLGERGAELAWLTLHVGAGTFQPVRVNNLAEHHMHTERFEIPQATVDAIARTRARGGRVIAVGTTSLRALEAAAQNGKQGGELQAGAAETDIFITPGYRFRVVDRLITNFHLPKSTLLMLVSAFAGTDIIRAAYRHAIAERYRFFSYGDAMLLEKLDENSHENANNAI

SEQ ID NO: 64922 - protein, 365 aa, unidentified
  source 1..365: note = Puniceispirillum sp.
  REGION 1..365: note = tr|A0A2D4UMQ4|A0A2D4UMQ4_9PROT S-adenosylmethionine:tRNA ribosyltransferase-isomerase; OS = Candidatus Puniceispirillum sp. OX=2026719 GN=queA PE=3; SV = 1
  VARIANT 157: note = Xaa can be any naturally occurring amino acid
  VARIANT 164: note = Xaa can be any naturally occurring amino acid
  VARIANT 170: note = Xaa can be any naturally occurring amino acid
  VARIANT 204: note = Xaa can be any naturally occurring amino acid
MKLDAFDYSLPAEKIATKPVSPRESARLLDLSRGDITDRHIGDMPVLLRADDVLIVNNTQVIPARLEGWRGQAKISVTLHKRESDHIWRVFAKPAKKCRIDDVIIFADDFAATVLGRGEGGDVEVSFINPVNEACLTRLELDACLDRYGSMPLPPYXARPDGAXPADRQXYQTMFARHRGAVAAPTAGLHFTDNLAKAISATGXRILPVTLHVGAGTFLPVTANDIKDHKMHSEWGQISAETATAITEARAKGGRVIAVGTTSLRILEACYQQHGAVIKFAGETDIFITPGYEFGVIDALLTNFHLPKSTLLMLVSAFAGMQKIAMAYRHAIANDYRFFSYGDACFMTRNPSPDIIASIAAIADQ

SEQ ID NO: 64923 - protein, 360 aa, unidentified
  source 1..360: note = Puniceispirillum sp.
  REGION 1..360: note = tr|A0A3R7UFF4|A0A3R7UFF4_9PROT S-adenosylmethionine:tRNA ribosyltransferase-isomerase; OS = Candidatus Puniceispirillum sp. TMED213 OX=1986634; GN = queA PE=3 SV=1
  VARIANT 164: note = Xaa can be any naturally occurring amino acid
  VARIANT 272: note = Xaa can be any naturally occurring amino acid
MSDLPNLLSDFDYLLPEELIAQTPARPRETARLLIAAADGISDHIIADLPKLLRPGDLLVVNDTAVIPAALIGRRGKGKVRINLHRRLKEDSWLAFAKPARKCLPGTEISFADGFSAVVTQKADGGEVTLQFNQFGAALDSCFEQHGQMPLPPYIRRPDGADEXDRDDYQTLFATHAGAVAAPTAGLHFTDELRQKLISAGINFTAVTLHVGAGTFLPVKTEDIHEHKMHTEWGTVSVDTVKAIQQTKATGGRVIAVGTTSLRILEAAFVHXGRLAPFTGETDIFITPGYQFGVIDMLLTNFHLPKSTLLMLVSAFSGYDFIKMVYQHAIVSGYRFFSYGDACLLSCQNRHPLLVKKEPS

SEQ ID NO: 64924 - protein, 338 aa, unidentified
  source 1..338: note = Raymondbacteria bacterium
  REGION 1..338: note = tr|A0A1F7FCL9|A0A1F7FCL9_9BACT S-adenosylmethionine:tRNA ribosyltransferase-isomerase; OS = Candidatus Raymondbacteria bacterium RIFOXYD12_FULL_49_13 OX=1817890 GN=queAPE=3 SV=1
MSLADYDYALPEDRIAQRPAVERDHARLIICDRGAIVHAAFPDIVDLLNSADCLVLNRTKVIPARLMGRRATGGKTEVFLLQQTDANEWITIGRPGRNLRTGARLFFDHDITAEVLDDSLAEGKRLMRFSASREELFSIGAVPLPPYIRRDADALDRERYQTVFAQTEGSSAAPTAGLHFTEALLNRIRAKGVSLAYVTLHVGLGTFRPITVERVEEHAMEKEAYAIDKEACDTINRTMRQGGRVVAVGTTVAKTLETAALACFPLAPAAGASDLFIRPGFTFRVVNALVTNFHMPRSTLLLLVAAFAGKENLFSLYTEALKRQYRFLSYGDATLFIA

SEQ ID NO: 64925 - protein, 413 aa, unidentified
  source 1..413: note = Regiella insecticola
  REGION 1..413: note = tr|G2GWK9|G2GWK9_9ENTR S-adenosylmethionine:tRNA ribosyltransferase-isomerase OS=Candidatus Regiella insecticola 5.15 OX=1005043 GN=queA PE=3 SV=1
MRVDDFSFKLPGSLIAHYPHPQRSGCRLLSLDGQTGRITHGVFTDVLDKLQAGDLLVFNDTRVIPARLFGKKASGGKLEILVERLLDDHRVLAHVKASKALKPGTQLQLGDDKSEHTAIQATVLARLDNLFELRFDDQRDVLTILRAIGHIPLPPYIDRPDEKSDRELYQTVYSQRPGAVAAPTAGLHFDQPLLDALRKKGIEMAFVTLHVGAGTFQPIRVENIEEHSMHAEYAEVPQTVVEAVLACKARGKRVIAVGTTSVRSLESAAMQRAEKNENIPFAFEAAALLAEDIRPNHVVDLRSSGRTPWPPSGNFKDCGYNPGSKALITPFFGDTQIFIYPGYHYQIVDGLITNFHLPKSTLIMLVAAFAGYKNTMAAYQLAIEKEYRFFSYGDAMFISRNPLAAQEKINTGR

SEQ ID NO: 64926 - protein, 413 aa, unidentified
  source 1..413: note = Regiella insecticola
  REGION 1..413: note = tr|E0WS93|E0WS93_9ENTR S-adenosylmethionine:tRNA ribosyltransferase-isomerase OS=Candidatus Regiella insecticola LSR1 OX=663321 GN=queA PE=3 SV=1
MRVDDFSFELPGSLIAHYPHTQRSGCRLLSLDGQNGNITHGVFTDVLDKLQAGDLLVFNDTRVIPARLFGKKASGGKLEILVERLLDKHRVLAHIKASKAPKPGTQLQLGDDKSEHTAIQATVLARLDNLFELRFDDQRDVLTILRAIGHIPLPPYIDSPDEKSDRELYQTVYSQRPGAVAAPTAGLHFDQPLLDALRKKGIEMAFVTLHVGAGTFQPIRVKNIEEHSMHAEYAEVPQTVVEAVLACKARGKRVIAVGTTSVRSLESAAMQRAEKNENIPFAFEAAALLAADIRPNHVVDLRSSGRTPWPPSGNFKDCGYNPGSNALIMPFFGDTRIFIYPGYHYQIVDGLITNFHLPKSTLIMLVAAFAGYKNTMAAYQLAIEKEYRFFSYGDAMFISRNPLAAQEKINTGR

SEQ ID NO: 64927 - protein, 356 aa, unidentified
  source 1..356: note = Rhodobacter lobularis
  REGION 1..356: note = tr|A0A0J9GWE7|A0A0J9GWE7_9RHOB S-adenosylmethionine:tRNA ribosyltransferase-isomerase; OS = Candidatus Rhodobacter lobularis OX=1675527 GN=queA; PE = 3 SV=1
MKLSEFDFDLPEDLIATRPARPRSSARLLVAGPSALQDSRVSALPQFLLPGDRLVLNNTKVLPARLTGARHRDSAQGAVSARIEATLIEPTAGGHWRALLKPLKKVRDGEIIDFGADLHAKLLRRMDGIAELSFNLTGAAFDAALAKAGAMPLPPYIAAKRAADEADRHDYQTVWAEKTGAVAAPTASLHFDDALLAEIAARGVSFTHVTLHVGAGTFLPVKSDDVTDHKMHAEWGEISEAAAQEINETRAQGGRIIPVGTTALRLIETAARSNGTVRPWMGDTDIFIRPGYQFNAADALMTNFHLPKSTLLMLVSALMGRERMLAIYAHAIAERYRFFSYGDASLLLPGALKRHG

SEQ ID NO: 64928 - protein, 342 aa, unidentified
  source 1..342: note = Rickettsiella isopodorum
  REGION 1..342: note = tr|A0A1J8NNQ6|A0A1J8NNQ6_9COXI S-adenosylmethionine:tRNA ribosyltransferase-isomerase; OS = Candidatus Rickettsiella isopodorum OX=1225476 GN=queA; PE = 3 SV=1
MQYKLEDFFYELPEKLIARYPSTQRTDSRLLCLNKKTGAIQHKKFKDSLKLINSGDLLILNNTQVIPARLFANKTTGGKVEILIERILDKRRFLAQLKSSKPLKLGTKLILENGVRLEISARAENIFELIFLVEVPSILELLNKIGHIPLPPYMQRADELFDWERYQTVFASTPGAIAAPTAGLHFDEDLLAQLNAKGVNIVYITLHVGSGTFQPIRSIRFEDHQMHNEPVTVSEAVCEKITLTKQNNKRVIAVGTTVVRSIETAALNGQIKSFLGDTRLFIYPGFQFRCIDALITNFHLPQSTLLMLVCAFAGYESVMPAYQEAIKQNYRFFSYGDAMWIS

SEQ ID NO: 64929 - protein, 338 aa, unidentified
  source 1..338: note = Rickettsiella viridis
  REGION 1..338: note = tr|A0A2Z5UWB9|A0A2Z5UWB9_9COXI S-adenosylmethionine:tRNA ribosyltransferase-isomerase; OS = Candidatus Rickettsiella viridis OX=676208 GN=queA PE=3; SV = 1
MADFFYDLPPELIAAYPTQQRTDSRLMCLNKQTKTVEHKKFKDILTLINPGDLLVLNDTKVIPARLFAHKPTGGKVEILIERILDEERILAHLKSSKSLKIGTQLHLENEIRLEITNRTENLFELQLLDKVDSILALLNAIGHMPLPPYLQRQDENFDKERYQTIFAQTPGAVAAPTAGLHFDEELLTQLRNKGVNIAFITLHVGSGTFQPIRTEKLEDHLMHSETVTVSAEVCQKIAETKRQGKRVIAVGTTTVRSLETVASKGFVAPFQGETKLFIYPGFSFHCVDALITNFHLPTSTLLMLVCAFAGYQSVMHAYQQAINHQYRFFSYGDALWVG

SEQ ID NO: 64930 - protein, 336 aa, unidentified
  source 1..336: note = Riflebacteria bacterium
  REGION 1..336: note = tr|A0A2N1TZZ3|A0A2N1TZZ3_9BACT S-adenosylmethionine:tRNA ribosyltransferase-isomerase; OS = Candidatus Riflebacteria bacterium HGW-Riflebacteria-1; OX = 2013829 GN=queA PE =3 SV=1
MKTELFDFNLPERLIAQTPAERRSGSRLLIYDRKLDRVEHRQFSDIVEYFAPGDLLILNSSKVIPARIFTADTGYEILFVKQLANNCFEAMVRPGRRFKPGKRHQLPGGRVVEVVDVLASGLRVLQAVDGLDVLPVFREFGEMPLPPYITSRASSPDRYQTVYSSLEGSIAAPTAGLHFDDQVFAALAKKQVAVAEVVLHVGLGTFKPIESDSISEHRMHEEIFYVSEKTAELFKQTRQAGHRVWACGTTSVRTLESAIDSNGELKVGWQATDCFITPGYKFRAIDCFITNFHLPRSTLIVLVASFCGREKVLELYEEAIAKEYRFYSFGDSMLLL

SEQ ID NO: 64931 - protein, 341 aa, unidentified
  source 1..341: note = Riflebacteria bacterium
  REGION 1..341: note = tr|A0A2N1UAC0|A0A2N1UAC0_9BACT S-adenosylmethionine:tRNA ribosyltransferase-isomerase; OS = Candidatus Riflebacteria bacterium HGW-Riflebacteria-2; OX = 2013830 GN=queA PE =3 SV=1
MKTDLFDFVLPGHLIAQTPAARRSASRLLVYDRGKDRVEHRQFTDIVEYFAPGDLLILNSSRVIPARIFTVAGQHGGAGYEILFVRQLENHSFEAMVRPGRKFRPGRQHQLPGGRSVDVVAVLDSGLRVLRATDGEDILPVFREFGEMPLPPYITSRESTPDRYQTVYSSIEGSIAAPTAGLHFDDQVFAALAEKQVKVAEVILHVGLGTFKPIEADSIAEHRMHEEVFYVSEQTADLFRQTRQSGGRIWACGTTSVRTLESAMNAAGELTTGWQSTDCFITPGYQFRAVDRFITNFHLPRSTLIVLVAAFCGREKVLELYQEAIAKEYRFYSFGDSMLLL

SEQ ID NO: 64932 - protein, 400 aa, unidentified
  source 1..400: note = Roizmanbacteria bacterium
  REGION 1..400: note = tr|A0A2M8DBL2|A0A2M8DBL2_9BACT S-adenosylmethionine:tRNA ribosyltransferase-isomerase; OS = Candidatus Roizmanbacteria bacterium CG_4_9_14_0_8_um_filter_34_12 OX=197484 0 GN=CO083_05210; PE = 3 SV=1
MKSINQFDYYLPPESIAKQPAVPRDYSRLFVYDTKTNEIVFDKFYNLDKYLPKKSFLVMNDTKVLPARVEMKKATGGKVRVLFLVNEIMSSSQYQVLSIEQNTIRIFVDRKVDVGDKLFFNSQYFVTVTAQEEHIFTVQFDFSIGELFRILEKKGTMPIPLYIKNSPLSRNDLLHKYQTIFARVPVGTRLIGRSAAAPTASLHFTNRLLSKLEKKRINKTFITLHVGMGTFASVTDVNIRQKKLHEEYFEINNETLQLINLMKQERKKLVAVGTTVVRTLESAEISLRQGRGQLESVMKRGHSGEEQSDDSRIKLRRFWTSQNGKDTFISKTDLFIQSGFKFQYVDSLITNFHLPGSSLMMLVEAFLQHKQAKHHLVNLYQIAIKEKFRFYSFGDGMLIR

SEQ ID NO: 64933 - protein, 41 aa, unidentified
  source 1..41: note = Roizmanbacteria bacterium
  REGION 1..41: note = tr|A0A2M7BR45|A0A2M7BR45_9BACT S-adenosylmethionine:tRNA ribosyltransferase-isomerase (Fragment) OS=Candidatus Roizmanbacteria bacterium CG03_land_8_20_14_0_80_39_12OX=1974847 GN=COS52_05170 PE=3; SV = 1
VINHLITNFHLPGSSLMVLVDAFAIKNELRFYSFGDAMLII

SEQ ID NO: 64934 - protein, 345 aa, unidentified
  source 1..345: note = Rokubacteria bacterium
  REGION 1..345: note = tr|A0A0T6A946|A0A0T6A946_9BACT S-adenosylmethionine:tRNA ribosyltransferase-isomerase; OS = Candidatus Rokubacteria bacterium CSP1-6 OX=1640509; GN = queA PE=3 SV=1
MDVALFDYPLPPERIAQYPAEQRDAARLLVCDRAAGRWEDRAFAELPDLLRPGDVLVVNDSRVIPARLLGRLEPEGRPVELLFLKALDPLRWEALARPAKRCRPGAVVVFGDGEVRVRVAAVAGEGRRIVELQGGGSVREVLERYGVPPLPPYITRHQKPGQEDWERYQTVYAARDGSVAAPTAGLHFTPALLDRLRARGIAVETLTLHVGPGTFRPIRSPRVEAHRMEAEEVEISAAAADAINGAKGKGRRIVAVGTTTCRALESAADEQGRVRPMSGPTGLFIYPGHRFKVIDALLTNFHLPRSSLLLLVCAFAGREFVLDAYRHAVEAGYRFYSYGDAMLIQ

SEQ ID NO: 64935 - protein, 344 aa, unidentified
  source 1..344: note = Rokubacteria bacterium
  REGION 1..344: note = tr|A0A1Q7IJB2|A0A1Q7IJB2_9BACT S-adenosylmethionine:tRNA ribosyltransferase-isomerase; OS = Candidatus Rokubacteria bacterium 13_1_40CM_4_67_11; OX = 1805361 GN=queA PE=3SV=1
MDLHDFEYELPPEAIAQAPALERDAARLLLIDRARGALEDHVVRELPELLRPGDCVVVNDSRVIPARVLALDASGHRVELLFAEPQRDGRWRALVRPGRRCRAGAGLVVPGAMEARLRIVAAEPDGPRIVERMDGTIDDLLASHGMLPLPPYIARHAQPTADDRERYQTVYARSPGSVAAPTAGLHFTPSLLDRLRARSIEVHALTLHVGPATFRPIKSERVEDHVLAAERVAIPASVADAVNSARNEGRRVVAVGTTTTRALESAPGADGRVRAHDGAAEAYITPGYRFRVVDALVTNFHLPRSSLLVLVCALAGRELILKAYQHALRAGYRFYSYGDATLIV

SEQ ID NO: 64936 - protein, 356 aa, unidentified
  source 1..356: note = Ryanbacteria bacterium
  REGION 1..356: note = tr|A0A1G2GX40|A0A1G2GX40_9BACT S-adenosylmethionine:tRNA ribosyltransferase-isomerase; OS = Candidatus Ryanbacteria bacterium RIFCSPLOWO2_01_FULL_48_26 OX=1802126 GN=qu eA PE=3 SV=1
MKRSAFGKLLQRYDYKLPPDCIAALPATPRDSAKLMVYDRRSGCTTDTTFRDLPKFIPKGALLVFNNTKVVPARLTLAKPTGGAVRVLFIDLAGKRLRVLADRSINTGTILSFNNRPIFRAYGREGNYLVLTSARRLNLKNFLERHGEAPLPPYIKNSPLTKKEQRRQYQAVFAKTPGSIAAPTASLHFTPELLRVLSSGRGSASGGKKSGIETAFITLHVGLGTFAPLTPENLKTKSLHGEKYSIGKTTARIINQAVREKRPIIAVGTTALRTLESSVDVRGVIKKLNGKTSLFIREGYRFRIADGLITNFHVPRSSLLMLVSAFAGRKNVLKLYRRAIKKGYRFFSFGDGMLVL

SEQ ID NO: 64937 - protein, 356 aa, unidentified
  source 1..356: note = Ryanbacteria bacterium
  REGION 1..356: note = tr|A0A1G2G767|A0A1G2G767_9BACT S-adenosylmethionine:tRNA ribosyltransferase-isomerase; OS = Candidatus Ryanbacteria bacterium RIFCSPHIGHO2_01_FULL_48_27 OX=1802115 GN=q ueA PE=3 SV=1
MPSSLERVLKQYDYMLPERLVAKCPVTPRDAARMLVYQRATDTIRWDTFLHLPKYLPKGAVLVFNKTKVFPARLKLKKETGGTVKILYVKHDARYLYALCDKPLRNGMKLSLGGVVRFAVRAKKEAVYTLVPHMPVSKVMELFLRYGETPIPPYIKNSPLSESRLRKEYQTVFASALGSVAAPTASLHFTKRLLSRIKKSGCDIAFVTLHVNLGTFAPITQIALRTGRLHEEYYEIDARTKTLLESAKRAGRPIIAVGTTVVRTLESAADKKGVLQRPSGFTDLFIREKYQFRFVDGIITNFHVPKSSLLILVAAFAGQKNILDLYQTAIKKKFRFFSFGDGMLILGSKIPNPKAK

SEQ ID NO: 64938 - protein, 347 aa, unidentified
  source 1..347: note = Saccharibacteria bacterium
  REGION 1..347: note = tr|A0A431HJQ2|A0A431HJQ2_9BACT S-adenosylmethionine:tRNA ribosyltransferase-isomerase; OS = Candidatus Saccharibacteria bacterium OX=2026720; GN = queA PE=3 SV=1
MQLSDYDYDLPESAIAIHPPKERGSSRLLVLDKQTGSIVDDVYKNLSQQLQSGDVLVLNNTKVLPARLLAKTETDEERELLLLEKHGQGSDHHTSLVMYRRKIRPGQQLHIGGSTVAVEEVFQNGTAKISSEHDLWQLAEEQGEVPLPPYMHRREEADDRERYQTVFARERGSVAAPTASLNMTPALLETIRSKGVEVVELTLHVGLGTFMPIRVDDVTKHKMHQEYFEVPVVTAQAIARAKQSGRRVIAVGTTVTRTLEYAAADIMAVAEIDRAQPIHGEADIFIYPGYEFKVVDGLLTNYHAPKSTVLMMAAAFADWEHLKAAYEHALAENYAFLSYGDSMLIIE

SEQ ID NO: 64939 - protein, 344 aa, unidentified
  source 1..344: note = Saccharibacteria bacterium
  REGION 1..344: note = tr|A0A4P5ULQ4|A0A4P5ULQ4_9BACT S-adenosylmethionine:tRNA ribosyltransferase-isomerase; OS = Candidatus Saccharibacteria bacterium OX=2026720; GN = queA PE=3 SV=1
MYAMKLSDYNYKLPKERIAQHPPQKRGDAKLLVLDKSTGEVKDKKYADLLSYLNPGDIVVLNNTKVIKARLEAVGADGKKYEILLTEKHGQAEDKYHHKAMYRGKLKEGMDLAIDKYNVRVLGVYEDGTALLESTADFMEIAESLGHVPLPPYMKREDTKEDVERYQTEFAKSEGSVAAPTASLNFTDKLIDKLKARGVEVCYLTLHVGLGTFLPIRTDNIKEHKMHSEWFSIPGSTVKKINKAKNSGNKVLAVGTTVARTLEYASEHILSGKENIEGESDIFIYPGYQFKVVDMLLTNFHAPKSTVLMLAGAFAGWDNLLIAYEKAIKNEYNFLSYGDSMLIR

SEQ ID NO: 64940 - protein, 350 aa, unidentified
  source 1..350: note = Saccharicenans subterraneum
  REGION 1..350: note = tr|A0A3E2BML6|A0A3E2BML6_9BACT S-adenosylmethionine:tRNA ribosyltransferase-isomerase; OS = Candidatus Saccharicenans subterraneum OX=2508984; GN = queA PE=3 SV=1
MTEKILLKDYDYELPPELIAQQPLPGRDDSRMMVLNRSLKTIEHRRFKEIANFFEPGEVLVLNNSRVIPARAWAVKRDGDGKSIEFLFIKEKKPGTWEVLCRPAKKVKEGDSLVFDSNLEARVTGRGPLGHRLLEFNTTEVLARLKEIGVAPLPPYIKRKKGDPRFKKIDAERYQTVYATRDGSIAAPTAGLHFTENILDELKQKGVDIQYVTLNVGLATFQPVRVEKITDHRMLEESFYISPETAGAINLARKEGRRITAVGTTVVRTLESAWTENGLQAGEHTTRLFIYPGYHFKVVERMLTNFHLPRSTLLMLVCAFAGYDLVMAAYREAVRERYRFFSYGDCMLIV

SEQ ID NO: 64941 - protein, 351 aa, unidentified
  source 1..351: note = Saccharimonas aalborgensis
  REGION 1..351: note = tr|R4PJV6|R4PJV6_9BACT S-adenosylmethionine:tRNA ribosyltransferase-isomerase OS=Candidatus Saccharimonas aalborgensis OX=1332188 GN=queA PE=3 SV=1
MSLVLHWYVMQLADFHYDIPEKLIATTPPTVRGDARLLVLDRQSGTVSDRHYPDIVDYLGLGDVLIINDTKVIKARLITTKQTGGTRELVLVEKHGRSDDWHTHKVIYRRKLAVGDKLSVGADTLTVEELLDGGMAIIKSERDLLQIAEEHGSVPLPPYMRRDATPADIERYQTIFAREQGSVAAPTASLNMTEETLSRLRDKGIVVVYATLHVGLGTFLPIRVEDVTDHHMHKEYFEIPAVTVSAIRDAKAKGKRVVALGTTVTRTLEYAHEAILAGPPRDLSGEADIFMYPGYSFKIIDGLITNFHMPDSTVLMLTAAFAGWDKLKPAYEHAIDKSYRFFSYGDSMLIL

SEQ ID NO: 64942 - protein, 180 aa, unidentified
  source 1..180: note = Scalindua brodae
  REGION 1..180: note = tr|A0A0B0EMH3|A0A0B0EMH3_9BACT S-adenosylmethionine:tRNA ribosyltransferase-isomerase; OS = Candidatus Scalindua brodae OX=237368 GN=SCABRO_00366; PE = 3 SV=1
MNAIKQFMQKKVGAIAAPTAGLHFTTNLLREISCKGIKIVYITLHVGLGTFKPIHKEDFRQHTIHKEFYNISEETVSTINKAKSLGKKIIATGTSTCRVLETIAKNHTTEKSSGWTKLFIYPPYKFKLTDSLITNFHLQRSTLILLASAFAGRENIATSYEEAISLNYRFYSYGDCMLIL

SEQ ID NO: 64943 - protein, 351 aa, unidentified
  source 1..351: note = Scalindua sp.
  REGION 1..351: note = tr|A0A523CJX2|A0A523CJX2_9BACT S-adenosylmethionine:tRNA ribosyltransferase-isomerase; OS = Candidatus Scalindua sp. AMX11 OX=2555784 GN=queA PE=3; SV = 1
MKQNISTISDYDYPLPEQLIAQCPLSKREKSRLLVLHRDDGRIEHKRFFEIIEYLHKGDVLVLNDTKVFPAKIVGSKRTGGRVEALLIKKVKDTVWEMLLKTNRKLKENDSIYFLDNSVVGNVLCKNKSGSWYVEFKNGEDFTNTVMSVGSMPLPPYIKRSQDNKQLAAIDETRYQTVYAKNVGAIAAPTAGLHFSEELLGKIREKEITIASVTLHVGLGTFQTIKEEDYTKHTMHEEYYHIPQQTIDVILKAKSLGKKIFATGTSACRVLETVARNDSVQECSGWTDLFIYPPYNFKITDSLITNFHLQRTSLLLLVSAFAGKETIRNAYESAIERGYRFYSYGDCMLIT

SEQ ID NO: 64944 - protein, 363 aa, unidentified
  source 1..363: note = Schekmanbacteria bacterium
  REGION 1..363: note = tr|A0A1F7SFC7|A0A1F7SFC7_9BACT S-adenosylmethionine:tRNA ribosyltransferase-isomerase; OS = Candidatus Schekmanbacteria bacterium RIFCSPLOWO2_12_FULL_38_15 OX=1817883 G N=queA PE=3 SV=1
MQLSDFDYSLHEELIAQYPLGKRDSSKLMVFDRNTGSLIHTNFFKIANFLMNTDVLVINDTKVFPARLRGVKENTGGRIEILLLKNWKNGKAEENIWEVLINTNKGIKKGATLCFGNGELKGIIRESDGNGKGILEFETRNDIFEILDRIGEPPLPPYIKRKLLVNSEQYLPNTVHYSLFTDRERYQTVYARERGAVAAPTAGLHFSDELLKRIKKTGVEIINITLHVGLGTFKPVRVSNIKEHIMDSESYVIASDNAEKLNKARRDKRRIIAVGTTTARTLESEIEKYGKFTEGEKETSLFIYPGFKFKAIDSLITNFHLPKSTLLMLVSAFCGLENIMDCYRKAIEMEYRFYSYGDAMFII

SEQ ID NO: 64945 - protein, 342 aa, unidentified
  source 1..342: note = Schekmanbacteria bacterium
  REGION 1..342: note = tr|A0A1F7RQM9|A0A1F7RQM9_9BACT S-adenosylmethionine:tRNA ribosyltransferase-isomerase; OS = Candidatus Schekmanbacteria bacterium RBG_13_48_7; OX = 1817878 GN=queA PE=3 SV =1
MRLHDFDYDLPGHLIAQTPSINREDSRLMVLFREEEKIIHSQFKYLSEFVNQNEIIVLNESKVIPARLFGHKQKTGARIEILISRPLDEKAGIYKVLAKPMKRISCGTHIEFATGFEMEVLEKNNEFCTIKFNNPEKFEWFLNRYGKTPLPPYITKRNPDDKDRYQTIFARIPGSVAAPTAGLHFTVQLFNELENKNITIAKVILHVGPGTFMPLREEKIENQSLEEEEYSLPEETANKINNTRQAGNALIAVGTTTTRVLESCADIHGKVEGNAGLTSAFIYPGYKFRVVDKIITNFHLPRSSLLLLVCAFAGKDFILNAYKAAISMGYRFYSYGDAMLIR

SEQ ID NO: 64946 - protein, 342 aa, unidentified
  source 1..342: note = Schmidhempelia bombi
  REGION 1..342: note = tr|A0A484GCR8|A0A484GCR8_9GAMM S-adenosylmethionine:tRNA ribosyltransferase-isomerase; OS = Candidatus Schmidhempelia bombi str. Bimp OX=1387197; GN = queA PE=3 SV=1
MQLSDFAFELPDELIARYPTKMRSQCRLLSLDGATGALDSGVFTDIVQKLNPGDLLVFNNTRVIPARLYGQKITGGKVEILVERILDNHRVLAHVKASKAPKVGTELVLGETGQVQVTMLARHDALFELQFPSDVLSILDKIGHMPLPPYIDRPDEDQDRELYQTVYNKVPGAVAAPTAGLHFDDTLIQTLKEKGIEIAFVTLHVGAGTFQPVRVADIYQHVMHAEYAQVPQDVVEAVQRCKARGNRVVAVGTTSVRALESAALATGQIAPFFADTRIFIYPGFQFNVIDALITNFHLPESTLIMLVSAFAGYDNVMHAYHQAIEQRYRFFSYGDAMWVTKK

SEQ ID NO: 64947 - protein, 337 aa, unidentified
  source 1..337: note = Shapirobacteria bacterium
  REGION 1..337: note = tr|A0A0G0I533|A0A0G0I533_9BACT S-adenosylmethionine:tRNA ribosyltransferase-isomerase; OS = Candidatus Shapirobacteria bacterium GW2011_GWE1_38_10; OX = 1618488 GN=queA PE =3 SV=1
MIKIEDYDYQLPSELIAQEALKNRDECRLLVVDRENNDTKEGVFKDIASDLGEDDVLVLNESRVFPARLIGKKDSGGKVELLLLRKTREKEWEAICRPGLKKGKRLDFGELKGEVTENWEEAIEIRFEFEGDFWKILEKIGKTPIPPYIQNDRENEIRKDYQTVYANSYGSAAAPTAGLHFTNELLEKLLKKGVQIEKVNLDVGLGTFKPVSEKNLERGKLHSEHFELRAEVADRLNLAKKQGKRIIAVGTTSVRVLEAMSDEKGNLRGGSGETDIFIYPPYKFKFVDSLLTNFHLPKSSLLMLVSALMGEAWREVYKEAVEKRYRFFSFGDAMWIR

SEQ ID NO: 64948 - protein, 350 aa, unidentified
  source 1..350: note = Shapirobacteria bacterium
  REGION 1..350: note = tr|A0A0G0N044|A0A0G0N044_9BACT S-adenosylmethionine:tRNA ribosyltransferase-isomerase; OS = Candidatus Shapirobacteria bacterium GW2011_GWE2_38_30; OX = 1618490 GN=queA PE =3 SV=1
MLNPTDFDYHLPKNQIANQPLNNRDQSRLLFVDRSSQKLSDHHFFEIENYLGKNDVLVLNQTKVFPARIFGQKSTGGHFEILLAHQISQDTLEALSRPRLKSGLLLNFSSLLSAQIIDSNPDTGLITLKFNQFGTEFYQSLNQLGHTPIPPYIKNSQSEKILRQNYQTIYAKNTGSSAAPTAGLHFTKELLKKLSDRGVQIEYVTLHVGLGTFQPLRLENLKSKTLHTESYFIDPDTINRLNNAKKSGKKITAVGTTTTRCLESFAINPTATSTQLFIYPPYKFKFVDSLITNFHLPQSSLLMLVYAFCSHPNTPQKFSIFSDSLIGQAYLYAVQNDYRFFSFGDAMWII

SEQ ID NO: 64949 - protein, 347 aa, unidentified
  source 1..347: note = Stoquefichus sp.
  REGION 1..347: note = tr|A0A139TDE5|A0A139TDE5_9FIRM S-adenosylmethionine:tRNA ribosyltransferase-isomerase; OS = Candidatus Stoquefichus sp. KLE1796 OX=1574263 GN=queA; PE = 3 SV=1
MKGRFNMKLSEFDYHLPEELIAQTPLQKRDTSRLMVLDRKNQTIEDKHFYDILDYLHEGDILVRNNTKVIPARLYGTKEETNGHVEVLLLKDLGNDVWECLVGNARIVKMDTIITFGDGSLKAKCVHIGEEGIRHFQMIYDGIFYEILDKLGTMPLPPYIKEKLEDQNRYQTVYAKIEGSAAAPTAGLHFTDEILEKVKAKGVKILDVTLHVGLGTFRPVKVDDVLEHHMHSEFYMIDEDVAKQLNEAKANGQRIISVGTTSTRTLEANFKKYGEFKATQESTDIFIYPGYQFEAIDALITNFHLPKSTLVMLVSAFASKDFIMKAYHHAVEEKYRFFSFGDAMFIQ

SEQ ID NO: 64950 - protein, 410 aa, unidentified
  source 1..410: note = Sulcia muelleri
  REGION 1..410: note = tr|A0A346E0R1|A0A346E0R1_9FLAO S-adenosylmethionine:tRNA ribosyltransferase-isomerase; OS = Candidatus Sulcia muelleri OX=336810 GN=C9I73_007 PE=3; SV = 1
MKKRICHKRKNLFGRKGKGNQVNQNKINKINKINKKAFKKKKDSYNISKYILINFKNSDFNFKVPKKLIPNKPRLSKNRTRLMVLNRMNMTIQHKYMNDFNSYFITGDTLVLNNTKMYKYILYGKKEKNGSDLQVYLLREINPNEKSWEVLVQPARKIRIGNRLFFLDENNEKLIAVVHDNTISKGRIIKFTCDLPNQIFKNKIKNLGKIQSGLIKYGLYTSFKKPFIDFSNLQTIYAKKEGSTSPHFPGLHISKYILKKLEFYGINISYVTLHLGHDTYDKIIVEDIQKHKMKEEYFKITHKACNFINYSINSQQKVCAIGTSTLRALESSVSPSNTLIPNKKWTNKFIYPYYKFHIANSLLTNFHQPKSTVMPLLAAFVGYDFLKYAYDLAIKKKYQFYNFGDAMLIL

SEQ ID NO: 64951 - protein, 352 aa, unidentified
  source 1..352: note = Sulfopaludibacter sp.
  REGION 1..352: note = tr|A0A2U3KS04|A0A2U3KS04_9BACT S-adenosylmethionine:tRNA ribosyltransferase-isomerase; OS = Candidatus Sulfopaludibacter sp. SbA4 OX=2043165; GN = queA PE=3 SV=1
MELAAFDYHLPGELIAQQPLEERAASRMLVVYRDEHRWEDRHFRELPAFLRSGDCLVLNDSRVFPARLYGHREGVRSLPIGKNNPKRREYLSGEVEVFLLRAVSADGRDWEALVRPGRKMRVGERLRFAEALVGEIVDRGEFGERTIRFTGAADLLNTFEKIGHIPLPPYIKRPDEATDRERYQTVFARAKGSVAAPTAGLHFTAEILDQCRAAGAGVACVTLHVGLGTFQPLHSEQVEQARLHSERYHISAEAVASIRAASRIVAVGTTSVRTIESAWQSGQLAGETDIFIYPGFPFRAIGAMLTNFHLPRTSLLLLVCAFAGTDLALAAYRHAVEQKYRFYSYGDCMLVL

SEQ ID NO: 64952 - protein, 49 aa, unidentified
  source 1..49: note = Sulfopaludibacter sp.
  REGION 1..49: note = tr|A0A2N9N0Z7|A0A2N9N0Z7_9BACT S-adenosylmethionine:tRNA ribosyltransferase-isomerase; OS = Candidatus Sulfopaludibacter sp. SbA3 OX=2043164; GN = SBA3_4290004 PE=3 SV=1
MLTNFHLPKTSLLLLVSAFAGRELTLEAYRHAVEARYRFYFYGDCMLII

SEQ ID NO: 64953 - protein, 383 aa, unidentified
  source 1..383: note = Sulfotelmatobacter kueseliae
  REGION 1..383: note = tr|A0A2U3KR29|A0A2U3KR29_9BACT S-adenosylmethionine:tRNA ribosyltransferase-isomerase; OS = Candidatus Sulfotelmatobacter kueseliae OX=2042962; GN = queA PE=3 SV=1
MLVSDFHYGLPEELIAQEPLADRAGSRLLRLEAGTGRFEDRQFREFPELLRPDDLVVFNNTRVFPARLYGRRGGLKAQTVSQRNPAARDFLQGRIEVLLTRQLREEPNEWECLVRPGRKIGVGEHLFFGEQDELPAEVIGRGGFGERRIRFETPSSFARPGGRGRPSPHEPIPADEFFARVEKIGHVPLPPYIARPDSAADRERYQTVYARERGSVAAPTAGLHFTAEILERIKQRGIETAEVTLHVGLGTFQPVRVERVEEHRLHPEAYSISAEEAEKIGRAKSEGRRVVAVGTTTVRTLEYAAQQGVGEVRAGTGEANLFIYPGYEFQVVGALLTNFHLPQSTLLMLVCALGGRENVLRAYQHAVEQRYRFYSYGDCMLVE

SEQ ID NO: 64954 - protein, 393 aa, unidentified
  source 1..393: note = Sulfotelmatomonas gaucii
  REGION 1..393: note = tr|A0A2N9LKB3|A0A2N9LKB3_9BACT S-adenosylmethionine:tRNA ribosyltransferase-isomerase; OS = Candidatus Sulfotelmatomonas gaucii OX=2043161 GN=queA; PE = 3 SV=1
MSGPSGDSPQSGRSERRADPQADLRVSDFDYELPEELIAQQPTAERGTSRLLVMDRKSGAWEDDVFPGFASRLRPRDLLVLNDSRVIPARLYARRTLRREREKPTGRIEVMLLEPAGERQWRALVRPGRKVAIGERLVFPAAGGDIVLEAEVMERGQYGERLLEFAPVDDFYAAIERIGHMPLPPYIHRRDAEADRERYQTVFAHERGSVAAPTAGLHFTEAMIEALQAKGVEIARVTLHVGLGTFAPLRVERVDEVRLHRERYSISAAAADALNRAVAEGRRIVAVGTTVVRTLEAAALAARGEELRTHSGATEIFIAPGFEFRLVSALLTNFHLPQSSLLMLVSAFAGREHVLAAYRHAVEERYRFYSYGDCMFIAGAVLSDHFQLLDSLA

SEQ ID NO: 64955 - protein, 342 aa, Sulfuricurvum sp.
  REGION 1..342: note = tr|K7SZD8|K7SZD8_9HELI S-adenosylmethionine:tRNA ribosyltransferase-isomerase OS=Candidatus Sulfuricurvum sp. RIFRC-1 OX=1249480 GN=queA PE=3 SV=1
MTNLDPLLTSSYHYELPEELIATHPIHPRDHARLLVYDRADQSITHARFDALDNFLPRECGIIFNDTKVIKARLYGHKESGGAIELLINRPHDAYAINVYIKGRVRSDTRLIFDGDLSARVIKLYEDGSRDVNFYLRKTLIRFEELLPILEQVGHIPLPPYLGREDNSEDEREYQSVFAHYEGAVAAPTASLHFSDELFEAVCSHHPHAFVTLHVGSGTFKPVEAEVITDHPMHSEYFDISASALELIHSNIPLLSIGTTSTRTVEYHARTAEHHGEANLFLHPHNPPKRINHLLTNFHLPQSTLLMLVASFVGLEETHRIYHEAIDQKYRFFSYGDAMLIL

SEQ ID NO: 64956 - protein, 358 aa, unidentified
  source 1..358: note = Sumerlaea chitinovorans
  REGION 1..358: note = tr|A0A2Z4Y5D5|A0A2Z4Y5D5_9BACT S-adenosylmethionine:tRNA ribosyltransferase-isomerase; OS = Candidatus Sumerlaea chitinovorans OX=2250252 GN=queA; PE = 3 SV=1
MRTDLFDYHLPKELIAATPAEKRDASRLLVLHRDSQTLEHAVFARLGNYLTSGDLLVINDSRVIRARLHGKRMATGGHVELLLVERHSPASNAGKDTWLVLCRPARKLKPGEMVYFANKRLTARILHYAGEGERIVEFDCPNVLEWLDQIGEVPLPPYIVQRRRELFGPRHEVLPEDVERYQTVYAREPGSVAAPTAGLHFTTELMESLKQQGVRFARVTLHVGPGTFKPVEAEEIEQHRMHVEHYSIPNETVTAIEETRRMGKRVVAVGTTVVRTLEAAADEEGRVQSGDGATDLMIVPGYRFRVIDALITNFHLPRSTLLMLVAAFAGREFVLRAYEEAVAQRYRFYSYGDAMLIL

SEQ ID NO: 64957 - protein, 371 aa, unidentified
  source 1..371: note = Sumerlaeota bacterium
  REGION 1..371: note = tr|A0A353GHX2|A0A353GHX2_9BACT S-adenosylmethionine:tRNA ribosyltransferase-isomerase; OS = Candidatus Sumerlaeota bacterium OX=2107588 GN=queA; PE = 3 SV=1
MDTVALSFELPEELIARHPAARREDARLMLVEPGATEFPERTFSGFPDLLRDDDLIVFNNTRVFPARLLGWRMPDLGKVEALLLHPESPEQNLWWAMVRPGRKIKMGDRLVFSTNRLEAEVVSYGDPGGGERLLKFTCDGDWWEMLEAVGHTPLPPYILRARKQLEAAGDPQTSWHNVPDLPEDRERYQTVFAGSAPESVAAPTAGLHFSTDVMERIAARGIEQVFVNLRIGAGTFQPIKTERVEDHPIHAEYYQLTAEAAAAIQRAKDQGRRVVAVGTTVVRALESAAQEGLPLDARSGWTRLFIRPGFDFKLVDALLTNFHLPMSTLLLLVYAFAGTETVQAAYAEAIRRKFGFFSYGDCMFMPTRTDH

SEQ ID NO: 64958 - protein, 103 aa, unidentified
  source 1..103: note = Sungbacteria bacterium
  REGION 1..103: note = tr|A0A1G2LCN9|A0A1G2LCN9_9BACT S-adenosylmethionine:tRNA ribosyltransferase-isomerase; OS = Candidatus Sungbacteria bacterium RIFCSPLOWO2_01_FULL_59_16 OX=1802280 GN=A3 B37_02390 PE=3; SV = 1
MRPINTDFRPIIAVGTTVVRALESAANARGYLTRRQGSTELFIRPGYRFRVVSDVITNFHIPESCLTMLVATFVGHERLLRLYRRAIHERFRLFSFGDGMIVT

SEQ ID NO: 64959 - protein, 360 aa, unidentified
  source 1..360: note = Symbiobacter mobilis
  REGION 1..360: note = tr|U5NB44|U5NB44_9BURK S-adenosylmethionine:tRNA ribosyltransferase-isomerase OS=Candidatus Symbiobacter mobilis CR OX=946483 GN=queA PE=3 SV=1
MPPLTLEDVDFDLPADRIAQYPAAQRSQSRLLDASGSTMVDRVFDELPTLLREGDLLVCNDTRVLRARLYGHKPTGGQIELLVERVLGGQEVAAHLRCRRKPQPGAQFSLVSAHHPLEPLHATMLGRWPDEHGPLFRLALHDEADSDPYAILERHGHVPLPPYIARPDAAPDDTRYQSVFARSPGAIAAPTASLHFDEALLQRLDDRGIERAFLTLHVGAGTFQPVQCTDVSQHRMHSEWYEVPAATREAVAACRRRNGRVVAVGTTCVRALESWAHTGQPQGETRLFILPGFDFRTVDLLVTNFHLPHSTLLMLVAAFAGLDRIRVAYRHAIDNRYRFFSYGDAMLLARMSSTTLPTLP

SEQ ID NO: 64960 - protein, 368 aa, unidentified
  source 1..368: note = Synechococcus spongiarum
  REGION 1..368: note = tr|A0A1T1D710|A0A1T1D710_9SYNE S-adenosylmethionine:tRNA ribosyltransferase-isomerase; OS = Candidatus Synechococcus spongiarum LMB bulk15N; OX = 1943583 GN=queA PE=3 SV=1
MNQDNHLSNYDYALPEEAIAQAPAEPRHSARLLCVEPDAGWKDATMAQWPALLRAGDLLILNDTRVLKARLKARRASGGLVELLVLEPHRDDTWLGLVKPGQRVRPGEWLQIQPPPGQLPVAVQVLGRHGDGGARLLRFATPELEAMEQFLNTYGELPLPPYIRAACQDEQRYQTTYARRPGAVAAPTAGLHLSRELLQRLNVAGVASATVTLHVGLGTFQPLQTEDLGQVRLHGERVEISPATVSAVQRTQAQGGRVLAVGTTSCRALEGVAALHGGQLQPYSGTVELCIRPGFRFQVMDGLLTNFHLPRSSLLLLVSALVGRQRLLTLYQEALTRDYRFYSFGDAMWIPPEAVLGSARPQGFSPPP

SEQ ID NO: 64961 - protein, 368 aa, unidentified; identical to SEQ ID NO: 64960
  source 1..368: note = Synechococcus spongiarum
  REGION 1..368: note = tr|A0A0G8AU76|A0A0G8AU76_9SYNE S-adenosylmethionine:tRNA ribosyltransferase-isomerase; OS = Candidatus Synechococcus spongiarum 15L OX=1608419; GN = queA PE=3 SV=1

SEQ ID NO: 64962 - protein, 340 aa, unidentified
  source 1..340: note = Syntrophonatronum acetioxidans
  REGION 1..340: note = tr|A0A424YHB0|A0A424YHB0_9FIRM S-adenosylmethionine:tRNA ribosyltransferase-isomerase; OS = Candidatus Syntrophonatronum acetioxidans OX=1795816; GN = queA PE=3 SV=1
MELSEFDYYLPPELIAQEPVPERSGSRLLVAKRDKGIIEHTWFQEIIEYLVPGDTLVLNDTRVIPARLFGVRKDTGGKVEIILLKRRQENRWEVLVKPGKRARPGIEIVFGDGKLTARVEDYTEEGGRVLSFHYQGVFEEVLSELGEMPLPPYIKKKLEEPERYQTVYAREEGSAAAPTAGLHFTPELLKKIKEKGVELIYLTLHVGLATFRPVKVDRIEEHKMHEEYYQVSPSAAHALNKALAAGSRIIAVGTTSCRVLETIRREEGFIPGKGWTDIFIYPGYQFKAVDGLLTNFHLPRSTLIMLVCAFGGKDLVMKAYQEAMERRYRFYSFGDAMLIL

SEQ ID NO: 64963 - protein, 344 aa, unidentified
  source 1..344: note = Syntrophosphaera thermopropionivorans
  REGION 1..344: note = tr|A0A4R5JPA8|A0A4R5JPA8_9BACT S-adenosylmethionine:tRNA ribosyltransferase-isomerase; OS = Candidatus Syntrophosphaera thermopropionivorans; OX = 2593015 GN=queA PE=3 SV= 1
MVDLLDLNSYDYYLPQELIAQYPLKDRSSSRLMHIDRKTGTISHLYFRDLVDLLAPGEVLVINNSKVIPARLFGYKDNGTKIEILLLNHLDGSKWKCMVHPGKRLKREQVLRFSPQLEGWVSLPDEDGLRVIEFNNPDTYWNEIERIGHIPLPPYIKREDKAEDRQTYQTVYAEEAGSVAAPTAGFHFTEEMLSQLKEKGIKIVNIILHIGMGTFVPIKTQRIDQHKMHSEFCTIPEETANVINKAKLEGRRVIAVGSTSIRTLESFWNNGTLMSGSKWTDIFIYPGKNIQVADALITNFHLPKSTLLMMVSAFAGYELTRKAYEIAVQEHYRFFSYGDAMYIS

SEQ ID NO: 64964 - protein, 353 aa, unidentified
  source 1..353: note = Tachikawaea gelatinosa
  REGION 1..353: note = tr|A0A090AJW2|A0A090AJW2_9ENTR S-adenosylmethionine:tRNA ribosyltransferase-isomerase; OS = Candidatus Tachikawaea gelatinosa OX=1410383 GN=queA; PE = 3 SV=1
MHISKFFFDLPTKLIARFPQKKRSSCRLLILNKISGKITHTKFYDIVNKINEGDLLIFNDTKVIPARIYGHKNTGGKIEILVERILDNKNILVHIYSKRPLSLGSKIFLQKRKNSTQYIEAIIIKIIKNEAIISFSKNNFNTLDILYEVGHIPLPPYIKRIDEKIDYEYYQTIYGKNIGSIAAHTAGLHFDQELLKKIKKKNIETAFITLHIGIGTFKSIRKTNIKYHTMHDEYLNISQETINAILSCKARGNKIIAVGTSTVRALESIAINNNQNFVPYSGKTNIFIYPGWKYRVIDALITNFHLPKSTLIILVSAFVGRQLLMRTYQEAIKKKYLFFSYGDAMFISNDPHI

SEQ ID NO: 64965 - protein, 353 aa, unidentified
  source 1..353: note = Taylorbacteria bacterium
  REGION 1..353: note = tr|A0A1G2MDS4|A0A1G2MDS4_9BACT S-adenosylmethionine:tRNA ribosyltransferase-isomerase; OS = Candidatus Taylorbacteria bacterium RIFCSPHIGHO2_02_FULL_43_32b OX=1802306 G N=queA PE=3 SV=1
MSTEDNKYSYELPEELIAKKPAEPRDSARLFIFDTKSGRIDFDIFSNLNKYLPEHSLLVFNNTKVVPARINLYKKTGGKVEILFLVNEWGGGDTSFKVMADRRLEIGDELSIGEKFRKDFLVEKQESHFFWLRPNFEANKIFEILEEFGMTPIPKYIKGTDISEKELREKYQSIFAKNPSSVAAPTASLHFTSGLLAKLSNAGFDRTFVTLNVGLGTFAPLTDENFKKESLHSESFMIKDDAVESIRDAKSNRNPVVAVGTTVARTLESAASHIFEMNCPISGSTNIFIHPPFNFKVVDCLVTNFHLPNSSLMMMVEAFLENKKSPLHLVELYKKAIKERFRFYSFGDGMLIK

SEQ ID NO: 64966 - protein, 139 aa, unidentified
  source 1..139: note = Taylorbacteria bacterium
  REGION 1..139: note = tr|A0A1G2PBD5|A0A1G2PBD5_9BACT S-adenosylmethionine:tRNA ribosyltransferase-isomerase; OS = Candidatus Taylorbacteria bacterium RIFCSPLOWO2_12_FULL_47_20 OX=1802335 GN= A3G59_03405 PE=3; SV = 1
MAFGLAAKECPGDFGVFVCSYLLRESSVIITSEQKAGTPVIAVGTTVTRTLESVARDILSGPEGTDIRGSTELFIRPPFDFKIIDGLITNFHHRGTSLLYLVDSFLRHKKSKRSVVSLYEEAVRERMRFFSFGDVMLIV

SEQ ID NO: 64967 - protein, 345 aa, unidentified
  source 1..345: note = Tectomicrobia bacterium
  REGION 1..345: note = tr|A0A1F7T177|A0A1F7T177_9BACT S-adenosylmethionine:tRNA ribosyltransferase-isomerase; OS = Candidatus Tectomicrobia bacterium RIFCSPLOWO2_12_FULL_69_37 OX=1802343 GN=q ueA PE=3 SV=1
MRPEDFDYALPPEAIARYPAPEREGARLLVLPKKDGPPAHRAIRDLPRFLRPGDLLVLNDTRVMPWRLMGKRASGGKVEVLLIEREGGGVFRALVSANRPLPEGERILLLDGREAVLGPQGRERRLAFAEPGGLEAWIGERGETPIPPYLGRPAEPLDRERYQTVYARVPGAAAAPTAGLHLSEGLLAELEAAGVERAALTLHVGPGTFRPVKAARVEDHEIEEEACCLPAGTARRIGETRERGGRVVAVGTTVVRTLEWAAMEAEREGGGALLREGAGRAALFIRPGHRFRIVDALLTNFHLPRSTLLMLVCAFAGRERVLAAYEAAREAGYRFYSYGDAMLIA

SEQ ID NO: 64968 - protein, 345 aa, unidentified
  source 1..345: note = Tectomicrobia bacterium
  REGION 1..345: note = tr|A0A1F7T6A6|A0A1F7T6A6_9BACT S-adenosylmethionine:tRNA ribosyltransferase-isomerase; OS = Candidatus Tectomicrobia bacterium RIFCSPLOWO2_02_FULL_70_19 OX=1802342 GN=q ueA PE=3 SV=1
MRPEDFDYALPPEAIARYPAPEREGARLLVLPKKDGPPAHRAIRDLPRFLRPGDLLVLNDTRVMPWRLMGKRASGGKVEVLLIEREGGGVFRALVSANRPLPEGERILLPDGREAVLGPQGRERRLAFAEPGGLEAWIGERGETPIPPYLGRPAEPLDRERYQTVYARVPGAAAAPTAGLHLSEGLLAELEAAGVERAALTLHVGPGTFRPVKAARVEDHEIEEEACCLPAGTARRIGETRERGGRVVAVGTTVVRTLEWAAMEAEREGGGALLREGAGRAALFIRPGHRFRIVDALLTNFHLPRSTLLMLVCAFAGRERVLAAYEAAREAGYRFYSYGDAMLIA

SEQ ID NO: 64969 - protein, 348 aa, unidentified
  source 1..348: note = Tenderia electrophaga
  REGION 1..348: note = tr|A0A0S2TBS3|A0A0S2TBS3_9GAMM S-adenosylmethionine:tRNA ribosyltransferase-isomerase; OS = Candidatus Tenderia electrophaga OX=1748243 GN=queA; PE = 3 SV=1
MQRSDFHYDLPPRLIAQHPLAERGASRLLVLDGMTGALADRRFADIVEYLQPGDVLVFNDTRVIPARLFGNKESGGRVEVLVERILDAHRVLAHVRASKAPQPGTRLLLEDTVEAEVTGRRDDLFELCFLDQRPVSEILEAVGHMPLPPYIERADEADDQRRYQTVYARRPGAVAAPTAGLHFDEVLLEQLRARGIETVFVTLHVGAGTFQPVRVDDLAEHKMHAEYVEVSAAAAAAIKRARAAGGRVVAVGTTAVRSLEAAAHSGVLQAFSGETRLFITPGYQFKAVDLLITNFHLPESTLLMLVSALGGYAQVMAAYAHAVDQEYRFFSYGDAMLVMPAPQALAGQ

SEQ ID NO: 64970 - protein, 344 aa, unidentified
  source 1..344: note = Terasakiella magnetica
  REGION 1..344: note = tr|A0A1C3RLM8|A0A1C3RLM8_9RHIZ S-adenosylmethionine:tRNA ribosyltransferase-isomerase; OS = Candidatus Terasakiella magnetica OX=1867952 GN=queA; PE = 3 SV=1
MKVDDFDFDLPRELIAQRPVSPRDASKLLRIDADLSDHIFAELPDHLKEGDLLVFNNTRVIPARLKGKRGEANVEVTLHKHEGAGTWIAFAKGAKKLKPGQTIIFDADFSADVLDKDGGEVTLKFNRAGAALMEALEAHGGMPLPPYIKREGLADERDKSDYQTVFAKEEGAVAAPTAGLHFTPDLLQKLKDKGVKFAYVTLHVGAGTFLPVKVDDVADHKMHAEFGVVDQATSDMINDTHAAGHRVVAVGTTSLRLLESAAPEKGRMAAFEGDTDIFITPGYEFKIVDMLTTNFHLPRSTLFMLVSAFAGFERMKKAYSYAIEHGYRFYSYGDGSLLSRHDQI

SEQ ID NO: 64971 - protein, 354 aa, unidentified
  source 1..354: note = Termititenax aidoneus
  REGION 1..354: note = tr|A0A388TD32|A0A388TD32_9BACT S-adenosylmethionine:tRNA ribosyltransferase-isomerase; OS = Candidatus Termititenax aidoneus OX=2218524 GN=queA; PE = 3 SV=1
MTGEFSAELYKYELPPELIAQTPAARREDSRLLILRRKNNSLEHKYFRDIVDYLEPQDLLVFNDTKVLPARLLGRKETGARCEVFLLKQLDAARWEALVKPGRRLTSGSVVRFGADFSAVILEKLSDGRRRVEFSFAGDFWEKLRCYGQTPLPPYIKTVTERSRSDRLALAERYQTVYAKTPGAAAAPTAGLHFSPELLDKIEAKGTAKTFVTLHVGTGTFQPLQTADIREHRMHAEEYFFPEQAMQAVRECRARGGRVIAVGTTSARVLETAAEQILRGEKISAPQGSTSLYIYPEYQFKIVDALITNFHLPGSTLLLLVSALAGREKILAAYQEAIRQRYRFFSFGDAMLIL

SEQ ID NO: 64972 - protein, 349 aa, unidentified
  source 1..349: note = Termititenax persephonae
  REGION 1..349: note = tr|A0A388TJ29|A0A388TJ29_9BACT S-adenosylmethionine:tRNA ribosyltransferase-isomerase; OS = Candidatus Termititenax persephonae OX=2218525 GN=queA; PE = 3 SV=1
MSGEFSADLYDYHLPPELIAQRPAARREDSRLMVLSRQGDALEHKYFRDLPGYLTPADLLIFNDTKVLPARLSGQKDSGARCELLLLKRLGEKQWEALVKPGRRLPAGSTVHFGAELSATVLEILPAGRRRVELCYPGDFWAVLDRHGQTPLPPYINQKPTKELAERYQTVYAREPGAAAAPTAGLHFSTDLLAKIKAKGVATAFVTLHVGLGTFRPLQTGDIREHKMHAEEYSLPAETVRAIAECRARAGRVVAVGTTAARVLETWAQEAANDANDYAPRHGQTAIYIYPGYRFKAVDALITNFHLPRSTLLLLVSALAGRAPLLQAYQEAVRQKYRFFSFGDAMLIK

SEQ ID NO: 64973 - protein, 346 aa, unidentified
  source 1..346: note = Thermochlorobacter aerophilum
  REGION 1..346: note = tr|A0A395LVS0|A0A395LVS0_9BACT S-adenosylmethionine:tRNA ribosyltransferase-isomerase; OS = Candidatus Thermochlorobacter aerophilum OX=1868324; GN = queA PE=3 SV=1
MRLSEFRYPLTKSAIATVPKEPRDKCRLMVLDRRKKTITDAKFTDIVDYLQKGDVLVVNDTKVFPAKLYGHKEKTSAKIEVFLLRELNKQAGLWDVLVEPARKVRVGNKIYFPEDLVAEVVDNTTSRGRTIRFLNPEVDIFQVVERIGQMPIPPYIKREPDEKDKERYQTVYARVPGAVVAPASGLHFTIELLNKIKRKGVEILSLTLHSGLGTFRPVEVEDISKHKMESEYYNLPYSTAQRINEVKTERSGRVVAVGTSVLRVIEANATVEGRIKFGEGWTDKFIYPPYDFKVVDMLITNFQQPETTPLMAVSAFAGHEFLMKAYRQALKTGYRFLAYGDAMLIY

SEQ ID NO: 64974 - protein, 425 aa, unidentified
  source 1..425: note = Thermochlorobacter aerophilum
  REGION 1..425: note = tr|A0A395M1C8|A0A395M1C8_9BACT S-adenosylmethionine:tRNA ribosyltransferase-isomerase; OS = Candidatus Thermochlorobacter aerophilum OX=1868324; GN = queA PE=3 SV=1
MVPEIPEIAIDDYTYDLPEERIASMPLVERDQSKLMVVDAKTGAISHHRFYNLPELLPPQTLLIRNNSKVIAARLSLRKQSGGRVEVLCAQPLEPSNELPSALLARGSTKWKCLLHGRNLKPLMSLSASVVYNASPLLLKATLLEKGAESTVCFEWQPKELTFLEVLEAVGKVPLPPYLNREPDEQDKIRYQTVYAKNEGSVAAPTAGLHFTQAIYERLQQKGVDVQELTLHVGIGTFKPVHERDARKHDMHAEQIHVPKQTLLSLYQHLVRQEPVVAVGTTSLRVLESLYWFGAKLSRQQMPVWRAKTMNLEQWEAYSLSQESAISPVQSLETVLNWLDKHGLESVNGSTQLMIVPGYDYKVCDGLITNFHQPRSTLILLVAAFLGGDLWKKVYHEALQNDYRFLSYGDASLLWRRSALPSKSA

SEQ ID NO: 64975 - protein, 346 aa, unidentified
  source 1..346: note = Thermochlorobacteriaceae bacterium
  REGION 1..346: note = tr|A0A081SHF5|A0A081SHF5_9BACT S-adenosylmethionine:tRNA ribosyltransferase-isomerase; OS = Candidatus Thermochlorobacteriaceae bacterium GBChlB; OX = 1519464 GN=queA PE=3SV=1
MRLSEFRYTLPKTAIATVPKEPRDKCKLMVLDRRQKTIQDAKFPDITNYLKKGDVLVINDTKVFPARLYGHKEKTSAKIEVFLLRELNKQVGLWDVLVEPARKVRVGNKIYFPDDLVAEVVDNTTSRGRTIRFLNSDIDIFQAVERIGLMPIPPYIKREADDKDKSRYQTVYARVPGAVAAPAAGLHFTTELLTKIKRMGVEIISLTLHAGLSTFRPVEVEDISKHKMDSEYLNLPYSTAQRINEVKGARSGKIYAVGTTVCRALEANATVDGRIKFGEGWTDKFIFPPYDFKVVDGLITNFHQPESTLMMVASAFAGHEFLIKAYKQALKSGYRFLAYGDAMLII

SEQ ID NO: 64976 - protein, 424 aa, unidentified
  source 1..424: note = Thermochlorobacteriaceae bacterium
  REGION 1..424: note = tr|A0A081SDI7|A0A081SDI7_9BACT S-adenosylmethionine:tRNA ribosyltransferase-isomerase; OS = Candidatus Thermochlorobacteriaceae bacterium GBChlB; OX = 1519464 GN=queA PE=3SV=1
MTQAHFFSNISLSDYDYDLPAECIAKFPLAERDQSKLLVADALTGRLEHRRFFELPDLLPSKALLICNNTKVISARLHLQKQSGGKVEILCIESAEASPDNAFGLMETDGAVWKCLIGGRVREGMELSKAGLFNGKPIFLSAKILPKTNGETQVRFQWSPQCLPFVAVLETLGQVPLPPYLKRDADESDKVRYQTVYAKQGGSVAAPTAGLHFTDAVFDRLREKSIDIAELTLHVGLGTFKPIESADVADHAMHGERIAVPKDTLNKLLAQLERRKDGGGKMIAVGTTSVRTLETLYWFGVRLAKKDGDARNSNHIMLSQWDSYRLSDGGTLPDASESLKTLVEWAEQRGLSTISGETQLFIAPGYQYALCDGIITNFHQPHSTLILLVATFLGKSLWKKVYDEALQNGYRFLSYGDASLLRRW

SEQ ID NO: 64977 - protein, 356 aa, unidentified
  source 1..356: note = Thermofonsia Clade
  REGION 1..356: note = tr|A0A2M8NTK2|A0A2M8NTK2_9CHLR S-adenosylmethionine:tRNA ribosyltransferase-isomerase; OS = Candidatus Thermofonsia Clade 2 bacterium OX=2364211; GN = queA PE=3 SV=1
MRLSDFDYDLPDHFIAQTPLEPRDSSKLMVINRADKTIQHRIFREITDYLNPGDVLVMNNTRVIPARIAGFRADTGGKLEVLLLRQLDETTWRVLIGGKQAKIGMIIGFPKTDITAEVLEATEDEAERVIRFSQPVNDLLVEIGDTPLPPYIHTRLDDAERYQTVYSRHDGSAAAPTAGLHFTPELLLKLRDKGVIFAYCTLHVGLDTFQPVKVDNIVDHKIHAEEAMLTAENAEIINKAKLAGGRIIAVGTTTTRTLETAGILSAGGDPSNPAALGDVCPWKPVVAFRADTQLYIYPSYKWRVVDAMITNFHLPKSSLLMMISAFAGRELVFEAYETAKRENYRFFSFGDAMLIL

SEQ ID NO: 64978 - protein, 344 aa, unidentified
  source 1..344: note = Thermofonsia Clade
  REGION 1..344: note = tr|A0A2M8QEP7|A0A2M8QEP7_9CHLR S-adenosylmethionine:tRNA ribosyltransferase-isomerase; OS = Candidatus Thermofonsia Clade 3 bacterium OX=2364212; GN = queA PE=3 SV=1
MHISELDYELPPELIAQHPVEPRDASRLLVCDRATQTHQHRHFYDLPEFLRPGDLLVANDTSVINARLHGRKPTGGQVEVLLLRKLDDVTWEALVGGRNVRQITFPAGEDGQQLSAEVVARSGEAAFVVRFSAPIEPHLDALGETPLPPYIREQLRDPARYQTVYARVAGSAAAPTAGLHFTPQLLERIQAMGVQIAFVTLHVGLDTFKPIEEETVEAHKIHTEWCELPPATAEAINDTRARGRRIIAVGTTSARVLESGSQTLAQASHSRLVQPFSGFTSLYITPGYKWKVVDALITNFHLPRSTLLAMIGAFMGMDFMRRTYARAIRERYRFYSFGDAMLIL

SEQ ID NO: 64979 - protein, 346 aa, unidentified
  source 1..346: note = Thermokryptus mobilis
  REGION 1..346: note = tr|A0A0S4MY64|A0A0S4MY64_9BACT S-adenosylmethionine:tRNA ribosyltransferase-isomerase; OS = Candidatus Thermokryptus mobilis OX=1643428 GN=queA; PE = 3 SV=1
MKLSDFSYQLPKNLIAKYPAEPRDSARLLVLDRKSRKIEDKVFTDIVNYLDPGDSLVINVSKVFPARLIGRKEKTGAKIEILLLRELNPEEHLWDVLVDPARKVRIGNKIYFGENDEVYCEVIDNTTSRGRTIKFHYEGDFFRFVEKYGQVPLPPYIKRPPQEEDKEWYQTVYASVVGSVAAPTAGLHFTTRLLKRIEKKGVKIVPIILHIGIGTFRKVEVEDLSKHRMDSEYFEISPESAKLINETIDKKKSVVAVGTSTVRALESSVTADAHVKPYKGWTDKFIYPPYEFKIVDKLITNFHMPESTPLILTAAFAGLDLLMEAYRHAIKNGYRFLSYGDAMLII

SEQ ID NO: 64980 - protein, 345 aa, unidentified
  source 1..345: note = Thiodiazotropha endoloripes
  REGION 1..345: note = tr|A0A1E2UQR5|A0A1E2UQR5_9GAMM S-adenosylmethionine:tRNA ribosyltransferase-isomerase; OS = Candidatus Thiodiazotropha endoloripes OX=1818881; GN = queA PE=3 SV=1
MRLSDFDYFLPDELIAQYPPEERGSSRLLVLPPNQSSPEDRQFSELPGLLSAGDLLIFNDTRVMKARLHGKKETGGRVEVLIERVTEPRRALAQVRASKSPKINSKILLDDDARVEVIGREGEFFQLRALDRDFHALMDQQGHMPLPPYITRQDEGVDESRYQTVYAEKRGAVAAPTAGLHFSNEMLAELAEKGVNQATVTLHVGAGTFQPVRVDDLDQHVMHREYAEVDRAVCDLITKTKQQDGRVIAVGTTSVRSLESAAQTGVLQPFHGDTRLFIRPGFQFNVVDAMITNFHLPQSTLMMLVSAFSGYERLMGAYRHAVEQRYRFFSYGDAMFLTPGESSSA

SEQ ID NO: 64981 - protein, 342 aa, unidentified
  source 1..342: note = Thiodictyon syntrophicum
  REGION 1..342: note = tr|A0A2K8UF22|A0A2K8UF22_9GAMM S-adenosylmethionine:tRNA ribosyltransferase-isomerase; OS = Candidatus Thiodictyon syntrophicum OX=1166950 GN=queA; PE = 3 SV=1
MKRSDFHFDLPPGLIAQRPLAQRSASRLLALDGDGTTPRDLLFTDLPEQLRPGDLLVFNNTRVMRARLFGHKDSGGAVEVLIERLLGPAQAQAQVRASKSPRPGSLILLGGGGRLEVLGRDADLFLLRALDQPFPLLMQTQGHVPLPPYIERPDEDADAERYQTVYGSRTGAVAAPTAGLHFDQPLLERLAALGIARAEVTLHVGAGTFQPVRVEDLDQHRMHAEWLDVDPRVCAQVAATRAAGGRVVAVGTTSVRSLESAAAHGELEPFQGDSRIFIRPGYRFQVVDAMITNFHLPESTLLMLVCAFAGMEPIRAAYRHAIAGRYRFFSYGDAMFLTRRDQ

SEQ ID NO: 64982 - protein, 344 aa, unidentified
  source 1..344: note = Thioglobus sp.
  REGION 1..344: note = tr|A0A520MKZ2|A0A520MKZ2_9GAMM S-adenosylmethionine:tRNA ribosyltransferase-isomerase; OS = Candidatus Thioglobus sp. OX=2026721 GN=queA PE=3 SV=1
MYFASDFDYSLPESLIAQEPPANRGDSRLLIVPPADGALIDAGFEDLGSRLRQGDLLVVNDTKVLPARLFGHKAETGGKFELMLERILSSSRALVQLKTSKTPPAGTRLKTENGSDLEIIGRENTFFIIECLSGESFVALLEREGVVPIPPYIKRDVVETDTDRYQTVYASDSGAVAAPTAGLHFSARHLDALQAKGVELARVTLHVGAGTFQPLKSESLNDHMMHSEFFNVGSEVVDAVRRTRCRGGRVVAVGTTVVRSLEAAAWQGDLKETNEQTHLFIQPGFRFRVIDMLITNFHLPRSTLLVLVSAFAGMERIRQTYQHAIANQYRFFSYGDAMLLEARQ

SEQ ID NO: 64983 - protein, 347 aa, unidentified
  source 1..347: note = Thioglobus sp.
  REGION 1..347: note = tr|A0A432TLE2|A0A432TLE2_9GAMM S-adenosylmethionine:tRNA ribosyltransferase-isomerase; OS = Candidatus Thioglobus sp. OX=2026721 GN=queA PE=3 SV=1
MKLTDFDFELPKSLIAQNPPKNRTDSRLLVPFMPSFGVQSTIIDSVFHQIESFIKPGDLLVMNNTRVIPARLFGHKDSGGKVEIMIERLLNNRQVLAMVKASRAPQIESFITLENGDKAQVVSKEDGFYTLDFLTDSLLDLLDNVGHIPLPPYIERSDEQADLERYQTVFAKHEGAVAAPTAGLHFDDELLSSLKDKGISHCFVTLHVGAGTFQPVKVDEITDHKMHSEYFEIDQTTVDQINQTKKNGGRVIAVGTTAVRSIESAAKSGKLKAVQEETDIFIYPGYEFKVVDMMITNFHLPKSSLLMLVSAFIGRERMMEIYQHAIKEKYRFFSYGDAMLLTREKTS

SEQ ID NO: 64984 - protein, 227 aa, unidentified
  source 1..227: note = Thiomargarita nelsonii
  REGION 1..227: note = tr|A0A176RSS1|A0A176RSS1_9GAMM S-adenosylmethionine:tRNA ribosyltransferase-isomerase (Fragment) OS=Candidatus Thiomargarita nelsonii OX=1003181; GN = THIOM_005595 PE=3SV=1
MIAQHPLKSRTDSRLLHITPKSGQFQDRHFVDFPSLLVPGDLLVFNNTRVIPARLFGHKASGGKIEILVERVLDDKRVLAQVRASRSPQIGARLYLDNDVNLIVLRRVENFFELQFERPVYEILQAIGHIPLPPYIERADTAIDSRRYQTVYAQQIGAVAAPTAGLHFDEAMLERIDAMGVESAFVTLHVGAGTFASIRVDDIRQHTMHSERLQVSAEVCEQVKATR

SEQ ID NO: 64985 - protein, 343 aa, unidentified
  source 1..343: note = Thiomargarita nelsonii
  REGION 1..343: note = tr|A0A0A6RWC6|A0A0A6RWC6_9GAMM S-adenosylmethionine:tRNA ribosyltransferase-isomerase; OS = Candidatus Thiomargarita nelsonii OX=1003181 GN=queA; PE = 3 SV=1
MQRTDFSFNLPSDLIAQHPLKSRTDSRLLHIMRGEFEDRHFVDFPSLLAPGDLLVFNNTRVIPARLFGHKASGGQIEILVERVLDDKRVLAQVRASRSPKNGARLYLDNDVNLIVLRRVENFFELQFERPVYEILQAIGHIPLPPYIERADTAIDSRRYQTVYAQEIGAVAAPTAGLHFDEAMLERIEAMGVESAFVTLHVGAGTFASVRVDDIRQHSMHSERLQVSAEVCEQVKATRARGGRVIAVGTTSVRALETASAEGVIKPYEGETRLFITPGYRFVSVDALLTNFHLPESTLLMLVCAFAGQSLVLAAYRHAVAQQYRFFSYGDAMFINQTPTSHTH

SEQ ID NO: 64986 - protein, 319 aa, unidentified
  source 1..319: note = Tokpelaia sp.
  REGION 1..319: note = tr|A0A367ZYH2|A0A367ZYH2_9RHIZ S-adenosylmethionine:tRNA ribosyltransferase-isomerase; OS = Candidatus Tokpelaia sp. JSC189 OX=2079010 GN=queA PE=3; SV = 1
MADLPALLQPGDALVFNDTRVIPARLEGEYHHDGVVVRIGATLHMRTALDGWKAFVRPAKRLQRGGTIIFSGHGIELVAAVAEKGDAGEILLIFDKSGMALDAAIKLVGRMPLPPYIAARRAEDAQDRIDYQTVYAREEGAVAAPTAGLHFTIDLLKKLAEHGIEEHFITLHVGAGTFLPVRVDDTENHKMHAEIGHIDAETAERLMAVKAQGGQIIAVGTTTLRLLESATSEIGQLGAWSGATDIFITPGYQFRFVDRLITNFHLPRSTLFMLVSAFSGLETMKAAYKHAIENDYRFYSYGDASLLDRFSESRNLALR

SEQ ID NO: 64987 - protein, 357 aa, unidentified
  source 1..357: note = Tokpelaia hoelldoblerii
  REGION 1..357: note = tr|A0A1U9JUK1|A0A1U9JUK1_9RHIZ S-adenosylmethionine:tRNA ribosyltransferase-isomerase; OS = Candidatus Tokpelaia hoelldoblerii OX=1902579 GN=queA; PE = 3 SV=1
MNVDLFDFDLPEENIALRPAVPREAARLLHVTPPRGFDDFSVGDLLSLLRPGDALVFNDTKVIPARLEGERYRDGAVAHIGVTLHMRVAADRWKAFVRPARRLRQGEKIVFARHDTVLTAEVAEKGEAGEMLLVFDRSGTALDSAVAVLGHMPLPPYIAARRAEDARDASDYQTVYAREEGAVAAPTAGLHFTESLLEAIKQHGVEEHFVTLHVGAGTFLPVKVADTDSHKMHAEIGHIDAETARRLMAVKARGGRIVAVGTTALRLLESAANEQGELKAWSGATDIFMTPGYQFRFVDRLITNFHLPRSTLFMLVSAFSGLETMRAAYAHAIKNGYRFYSYGDTSLLERADNKSVK

SEQ ID NO: 64988 - protein, 340 aa, unidentified
  source 1..340: note = Uhrbacteria bacterium
  REGION 1..340: note = tr|A0A3A0FEX1|A0A3A0FEX1_9BACT S-adenosylmethionine:tRNA ribosyltransferase-isomerase; OS = Candidatus Uhrbacteria bacterium OX=2053634 GN=queA; PE = 3 SV=1
MKTELFDYPLPKDRIAQKPIRPRDHSRLMILDRMTGDIWHRHFFDIIEYLKPGDLLVLNITKVFKARLLGSTDSGPVELFLLHPDNSRVWLALGKPGKKLPSGSRITFADGMTCRIHAKRNNGTLEVDFDAMPKEVIAWANERGHIPVPPYIGTEPEMLDEYQTVYAESVGSVAAPTAGFHFTPELIGRLKHAGIDVAAVTLHVGMGTFRPMRTETLKEHHMHEEWVSVPRTTAEKIRETKERGGRVIAVGTTTVRALESGMQEGFTSLFITPGYSFKIVDGLITNFHLPKSTLLVLVSAFLGEQHATTDWGRTTLLRAYATAIREGYRFYSFGDAMLIL

SEQ ID NO: 64989 - protein, 354 aa, unidentified
  source 1..354: note = Uhrbacteria bacterium
  REGION 1..354: note = tr|A0A1F7TMF7|A0A1F7TMF7_9BACT S-adenosylmethionine:tRNA ribosyltransferase-isomerase; OS = Candidatus Uhrbacteria bacterium RIFCSPHIGHO2_01_FULL_63_20 OX=1802385 GN=qu eA PE=3 SV=1
MPTPVSLYDYALPAERIAQSPVEPRDSSRLLALDRKTGKTEHKVFRDIVDELKAGDLLVMNDSKVFKARLRGKRFKKEYEVFLLRPVPHEFVMEGASLWHALVRPGKLVHVGNDIEISGLKPKVVEKKPDGSVVLAFPIPESEVFAFCDQFGEVPVPPYVEKAPEDASKYQTVYAKETGSVAAPTAGFHFTPEIIEKLKGKGVEFQFVTLHVGLGTFRPVKAETLEEHVMHSEYVTISSETAQAINKAKAEGRRVIAVGTTTVRALEGVASTQPPAPSPQLPTNGYSGDVNMFITPGFDFKVIDALITNFHLPKSTLLVLVSAFAGREHVLAAYKEAIEKEYRFYSFGDAMFIR

SEQ ID NO: 64990 - protein, 419 aa, unidentified
  source 1..419: note = Uzinura diaspidicola
  REGION 1..419: note = tr|L7VFV6|L7VFV6_9FLAO S-adenosylmethionine:tRNA ribosyltransferase-isomerase OS=Candidatus Uzinura diaspidicola str. ASNER OX=1133592 GN=queA PE=3 SV=1
MNCFEQIEIKTSDLNFKIPSKLIVEYPSKERDESRLMVIHRKTGKIEHKLFKDLINYFDKEDVIILNNTKVFPAILYGYKEQTKAKIKVFLLRVLDKKNKILDVLVEPARKIRIGNKIFFRKKTHKYNYNLVAEVIDNTTSRGRILRFLSDLSYEEFQKQLYAIGKTPLPKYIKREVDKKDMERYQTIYAKEEGSIVAPAAGLHFSKHLLKKLEIKGISLAEITLHIGLSAFSSIEVEDLSKHKMDSEKANIKNNICKIINTAIDKKKRICAVGNSVMRTLETTVSVSKHLNPFDGWTNKFIYPPYNFSIANSLISNLHMPKSTSFIMVAAFMGYDLTIKAYQNAVKENTGFIPMEMLCLYYKMMNAIEYKTLHQYKIYEEICSSIYDRNEIKVIPKCYSLYNETKRKTNTSNINISYC

SEQ ID NO: 64991 - protein, 343 aa, unidentified
  source 1..343: note = Vecturithrix granuli
  REGION 1..343: note = tr|A0A081C123|A0A081C123_9BACT S-adenosylmethionine:tRNA ribosyltransferase-isomerase; OS = Candidatus Vecturithrix granuli OX=1499967 GN=queA PE=3; SV = 1
MQVADFDYTLPSELIAQYPTEVRDRSRLMVVERTSGKITHTIFSRILEWLTPSDTLVVNDTRVIPARLYGRKLPSGGKVEVFLLRQREEAIWEVLIGGKVRPGTLVEFGDGELTCTIQEKGSAGKGVVVFEKQADLKETLYRLGQVPLPPYIHRAEGVLPGDHLRYQTVYARHEGAVAAPTAGLHFSEQLLDAIREKGIEIVTVTLHVGIGTFQPVKVEHVEEHQIMPEWYELSEQAAERLTQTITHNRRIVCVGTTSTRLIESVYAQHGALAAGNGWADIFIYPGFRFRVTNALITNFHLPKSSLLMLVSAFGGMELMRKAYQEAIDQRYRFYSYGDAMLIL

SEQ ID NO: 64992 - protein, 373 aa, unidentified
  source 1..373: note = Wallbacteria bacterium
  REGION 1..373: note = tr|A0A352M1L4|A0A352M1L4_9BACT S-adenosylmethionine:tRNA ribosyltransferase-isomerase; OS = Candidatus Wallbacteria bacterium OX=2053640 GN=queA; PE = 3 SV=1
MKNENATNKYDITRYDFVLDDSKIAVKPYLKRDEARLLVFDRAKCAMSSKNFGDIIDYFNSGDMLILNETKVFKARLYGTKNESGARVELLLLKRTGENRFSALVKPSRRIKTGVRLAIDGGLLEAEAVGRADADGAWVFEFEKKELKNRDIFELVDMCGHVPLPPYIIKNKPVKTARGQAYEDDQIDREGYQTVYAKEHGSVAAPTAGFHFTPELLEKLASKGVLIEKIILHVGLGTFKLVEKDDIRDHTMHKEVIKIDKEAYARIIGFIRNKNEKKLFCCGTTSVRTIESIDRVALDAPGGSYCAETDLFIYDGYNFKNADAIITNFHLPRSTLLMMVSAFMGNDKMKMAYDYAINNDFMFYSYGDAMLII

SEQ ID NO: 64993 - protein, 373 aa, unidentified; identical to SEQ ID NO: 64992
  source 1..373: note = Wallbacteria bacterium
  REGION 1..373: note = tr|A0A1F7WP82|A0A1F7WP82_9BACT S-adenosylmethionine:tRNA ribosyltransferase-isomerase; OS = Candidatus Wallbacteria bacterium GWC2_49_35 OX=1817813; GN = queA PE=3 SV=1

SEQ ID NO: 64994 - protein, 351 aa, unidentified
  source 1..351: note = Wirthbacteria bacterium
  REGION 1..351: note = tr|A0A1J5IZH6|A0A1J5IZH6_9BACT S-adenosylmethionine:tRNA ribosyltransferase-isomerase; OS = Candidatus Wirthbacteria bacterium CG2_30_54_11; OX = 1817892 GN=queA PE=3 SV=1
MRVDEFDYDLPRELIAQTPAEPRDAARLLVFDRSTGSISHMVFRDLISCLPQGSVLVFNQTKVEPRRLYGEKARTFGKVEVLLLDCLAEDRWECKMSPGMDRGGVIIFTPAHGQKGGASSLEGHVIEVTPEGNRIIEFSRPVREVWGEYGVLPIPPYIKGYHGDEQRYQTVYARAEGSVAAPTAGLHFTEELISQVKRSGHEVEFVTLHVSRDTAFPIMKEETVDQVRVHSENVIVTPEVSHRLNEAKRQGRRIIAVGTTSVRTLEGISRRTGSQALLPEEGYSGAVDLFIHPGFEFGFVDSMITNFHFPRSTLFMLICAFGGRQEMQKVYREAVEERYRFFTFGDAMLIL

SEQ ID NO: 64995 - protein, 363 aa, unidentified
  source 1..363: note = Woesebacteria bacterium
  REGION 1..363: note = tr|A0A1F8DHF9|A0A1F8DHF9_9BACT S-adenosylmethionine:tRNA ribosyltransferase-isomerase; OS = Candidatus Woesebacteria bacterium RIFOXYD1_FULL_41_28; OX = 1802550 GN=queA PE =3 SV=1
MKASLFDYSLPKDLIANSQASPRDHSRLMIIDRKTGKINHRKFYDIESFLKPDDVLVLNKTKVFPARIYAQKVILQQGLGHSAGGKVELLFLEEIRPGIWSTLSHPGVKPNTNIVLGKHLLNVVGHEGITAIIDTHLGKIKMLELLRKYGHTPLPPYINSGETEQELRKEYQTVYAKSTGSVAAPTAGFHFTNSLLKKIKSKGVRIEYVTLHVGLGTFAPIKSENIEDHPIHVEHFELEKGTAERLNQARKAGKRIISVGTTTVRVLETCVKKKTGIYQLVPQKGSTNIFIYPPYKFKFTDALITNFHLPKSTLIALVSSFVSYPNTGHKFESFKSSIVGKAYQEAIKENYRFYSFGDSSLII

SEQ ID NO: 64996 - protein, 381 aa, unidentified
  source 1..381: note = Woesebacteria bacterium
  REGION 1..381: note = tr|A0A0G1LFP6|A0A0G1LFP6_9BACT S-adenosylmethionine:tRNA ribosyltransferase-isomerase; OS = Candidatus Woesebacteria bacterium GW2011_GWA2_44_33; OX = 1618564 GN=queA PE=3SV=1
MRGSIWDNSIMNLSDFHFELPEELIGQQAIEPRDSCRLLVVNRSNQSLTHHIFRDLIDLLDDRCVLVLNDTKVFPARLFGTKETGGKIEILLLKQTSTDTFECLVRGKTKDDQKINFDVSFFGTLHHVVISTDLPASKAGVEKSHSITFNLSGLDLIAKINELGKTPLPPYIHSDSKEAELREQYQTVYAREKGSAAAPTAGLHFTPEILNRLQNKGVQIEKLTLHVGLGTFKPVTEEQVATKTLHAESFTLSQDVAKRLNIAKKSGKRIIAVGTTSCRVLETLSDESGNLSGGAGETNIFIQPGYRFKFIDGMITNFHLPSTSLLMLVSALVSFPNSPASPAGGPIHFTNFYDSLMDQAYAEAIKNKYKFFSFGDAMLIV

SEQ ID NO: 64997 - protein, 343 aa, unidentified
  source 1..343: note = Wolfebacteria bacterium
  REGION 1..343: note = tr|A0A1F8DWY9|A0A1F8DWY9_9BACT S-adenosylmethionine:tRNA ribosyltransferase-isomerase; OS = Candidatus Wolfebacteria bacterium RIFOXYB1_FULL_54_12; OX = 1802559 GN=queA PE =3 SV=1
MNLTQLLTQYDYALPEARIAQKPASPRDSSKLLTYDRTLGTISETTFAHIGDHLPKNAVLVFNQTKVIPARLRVIKPTGGAARILYVQAVDGLMQAMSDRKLTVGTDVSIANGLFLTVVRQEEKYYFLRPSFPLNKLDIVLHKHGITPIPPYIKESPLKESELRKKYQTVFAKHAGSVAAPTASLHFTNRLLTKLQKQGIDIRFVTLHVNIGTFAPLTQEHIDTGALHTESYEIDKATAAFLNKAKHQGRPIIGVGTTVVRTLESATQQGELKKLSGETNIFIQEGYHFKFIDGMVTNFHVPQSSLLMLVAALIGKEKLFELYRLAIKKRYRFFSFGDGMLIR

SEQ ID NO: 64998 - protein, 345 aa, unidentified
  source 1..345: note = Wolfebacteria bacterium
  REGION 1..345: note = tr|A0A0G1HBE8|A0A0G1HBE8_9BACT S-adenosylmethionine:tRNA ribosyltransferase-isomerase; OS = Candidatus Wolfebacteria bacterium GW2011_GWE2_44_13; OX = 1619017 GN=queA PE=3SV=1
MKQLLEQTIQAYDYAFPETLIAQNPASPRDSAKLLIYDRKNDEVAESTFAHIGEYLPKNAVLVFNQTKVFPARLKVTKPTGGEARILYIATEGDCIRVMSDRKLIVGTNVLIAKDLFLTVVSHDEKQYLLKPSFPIQQLAAVLERHGITPIPPYIKKTPLTESALRKRYQTVFAKHSGSVAAPTASLHFTDRLLKKLQRSGIDIRFVTLHVNIGTFAPLTQEHLDTGALHIEQYEIDKETAAFLNNAKKEGRPIIGVGTTVVRTLESATKKGELKNLSDNTSIFIQEGYRFTFIDGMITNFHVPQSSLLMLVAALIGKDKLFELYRLAIKHKFRFFSFGDGMLIR

SEQ ID NO: 64999 - protein, 353 aa, unidentified
  source 1..353: note = Woykebacteria bacterium
  REGION 1..353: note = tr|A0A1G1WST0|A0A1G1WST0_9BACT S-adenosylmethionine:tRNA ribosyltransferase-isomerase; OS = Candidatus Woykebacteria bacterium RIFCSPLOWO2_01_FULL_43_14 OX=1802605 GN=q ueA PE=3 SV=1
MKIEDFDYDLPKNLIAHHPAEPRDSSGLMVVERVSHLIKHRKFSDLPDLLTQNDVLVFNQSKVIPARLIGKKPTGGKVEILLLRELNEAEWECISKPGLKIGQQINLDLGLDAKVLSKKTNGLITLAFHPKGVKLIKLIEQIGLTPLPPYINPSQGEKELREIYQTVYANTPGSSAAPTAGLHFTKKLLERLSKKGVQMEFVTLHVGLGTFRPVVQEQLDSKKLHSEWYQIDKEVSDRLNKAKSEGKRIIAVGTTTTRVLESSSDAKGKLAPSVGETNIFIYPPYKYRFVDSLITNFHIPKSSLLMLVSAYVSKPNTNADFEDFHSCLIGKAYKEAVKKKYRFYSFGDAMLIV

SEQ ID NO: 65000 - protein, 353 aa, unidentified; identical to SEQ ID NO: 64999
  source 1..353: note = Woykebacteria bacterium
  REGION 1..353: note = tr|A0A1G1WQQ4|A0A1G1WQQ4_9BACT S-adenosylmethionine:tRNA ribosyltransferase-isomerase; OS = Candidatus Woykebacteria bacterium RIFCSPHIGHO2_02_FULL_43_16b OX=1802601 GN =queA PE=3 SV=1

SEQ ID NO: 65001 - protein, 346 aa, unidentified
  source 1..346: note = Candidimonas bauzanensis
  REGION 1..346: note = tr|A0A1M5YTD8|A0A1M5YTD8_9BURK S-adenosylmethionine:tRNA ribosyltransferase-isomerase; OS = Candidimonas bauzanensis OX=658167 GN=queA PE=3 SV=1
MNPSLELSQFNYELPQELIAQSPAAQRVESRLLHLDRRGSLHDRQFVDLPSLLRPKDLLVFNNTRVIKARLLGRKASGGKVEVLVERVTGASTALAHVKASKSPKAGGKLILAGAFAATVLGREGELFELEFPGRVLDLLEQYGATPLPPYIEHAAGQDDDERYQTVYAREPGAVAAPTAGLHFDQAMLEQLAGLGIAQAFVTLHVGAGTFQPVRAQRLSEHVMHAERYSVPPETIELLRATRAAGGRVVAVGTTSVRALESAALQASAAGAPGPIEGDTRLFITPGYQFSWVDALLTNFHLPQSTLLMLVSALAGMEPIQRAYAHAVQSRYRFFSYGDAMFIESP

SEQ ID NO: 65002 - protein, 363 aa, Candidimonas nitroreducens
  REGION 1..363: note = tr|A0A225MLC4|A0A225MLC4_9BURK S-adenosylmethionine:tRNA ribosyltransferase-isomerase; OS = Candidimonas nitroreducens OX=683354 GN=queA PE=3 SV=1
MNPKLELSQFDYELPSELIAQAPAAERSGSRLLHLDAGSRLHDLRFTDLPGLLRAGDLLVFNDTRVIKARLRGSKDSGGRVEVLVERITAPTLALAHVRASKSPKAGSALRLEDAFSARVLGRQGELFELEFPERVLDLLERHGSTPLPPYITHAAGREDEERYQTVYAREPGAVAAPTAGLHFDQPMLERLAAQGVQRAFVTLHVGAGTFQPVRVQDLSAHVMHSERYVVPPETLDLMRATRKAGGRIVAVGTTSVRALESAAAQDPDAPGPVEGDTRLFITPGYKYRAIDALITNFHLPQSTLLMLVSALAGMEPIRRAYAHAVAERYRFFSYGDAMFIESPRETSGPARGAAVRPEDPRP

SEQ ID NO: 65003 - protein, 433 aa, Candidimonas sp.
  REGION 1..433: note = tr|A0A522QGG8|A0A522QGG8_9BURK S-adenosylmethionine:tRNA ribosyltransferase-isomerase; OS = Candidimonas sp. OX=1912597 GN=queA PE=3 SV=1
MVDTPSPWKGIPWQFSRYRPGIQRFATFFHKIEQDVRADANETRQDQRASAYTKQALQVRHFRRGSPLPLKLHPPLKIPLLQTCHAAVDSPLSLSQFDYHLPTELIAQAPPDRRTDSRLLHLDPRGALHDRRFTELPGLLRPNDLLVFNDTRVIKARLRGHKETGGKVEVLIERITGPRTALAHIRSSKSPRAGARLTLAEAFQANVTGRQGELFELEFPQRVLDLLERHGTTPLPPYITHQADARDEERYQTVYARKPGAVAAPTAGLHFDELLLEEIGRRGIGSVFITLHVGAGTFQPVRTDRIDQHVMHSEHYVVPVDTLARLAATRAAGGRIVAVGTTSVRALESVAANADNAAPAEGDTRLFITPGYRFKRVDALITNFHLPQSTLLMLVSALAGMEPIRRAYAHAVAARYRFFSYGDAMLIESPTPP

SEQ ID NO: 65004 - protein, 350 aa, Candidimonas sp.
  REGION 1..350: note = tr|A0A522P9V9|A0A522P9V9_9BURK S-adenosylmethionine:tRNA ribosyltransferase-isomerase; OS = Candidimonas sp. OX=1912597 GN=queA PE=3 SV=1
MNHKLVLSQFDYELPPELIAQSPAAERTGSRLLHLDAAGALHDRQFTQLPELLKPNDLLVFNDTRVIKARLRGHKESGGKVEVLIESITEPRVALAHVRASKTPRPGSVLTMAQAFNINVLGRQGELFELEFPERVLDLLDRYGSTPLPPYITHAAQQQDEERYQTVYAREPGAVAAPTAGLHFDNAMLARLAAQGIGESFVTLHVGAGTFQPVRVEHLDEHVMHSEHYSVSAQTLQQIRATRAAGGRIIAVGTTSVRALESVAQHCGLEASIDDHPVQGDTRLFITPGYRFQVIDALITNFHLPQSTLLMLISALAGMDPIRRAYAHAIQSRYRFFSYGDAMFIETPQP

SEQ ID NO: 65005 - protein, 349 aa, Capnocytophaga canimorsus
  REGION 1..349: note = tr|F9YQ84|F9YQ84_CAPCC S-adenosylmethionine:tRNA ribosyltransferase-isomerase OS=Capnocytophaga canimorsus (strain 5) OX=860228 GN=queA PE=3 SV=1
MKLSNFNFDLPKELLAEYPSENRDEARLMVIHRKTGEIEHKLFKDLIDYFDDGDVFVLNNTKVFPARLYGNKEKTKAKIEVFLLRELNAEQRLWDVLVDPARKIRIGNKLYFGKDESLVAEVIDNTTSRGRTLRFLYDGSYEEFRNKLTELGQTPLPKYISRAVEPEDEERYQTIYAKHEGAVAAPTAGLHFSKHLMKRLEIKGIDFAEVTLHVGLGTFNPVEVEDLSKHKMDSEEVLIPESATKIINKAKVGRKRVCAVGTTVMRALESSVSSEKTVNPFVGWTNKFIFPPYDFSVADAMVTNFHTPKSTLLMMVSAFAGHDLIMKAYKEAVKEKYKFYSYGDAMLIL

SEQ ID NO: 65006 - protein, 349 aa, Capnocytophaga canimorsus; identical to SEQ ID NO: 65005
  REGION 1..349: note = tr|A0A0B7HLW9|A0A0B7HLW9_9FLAO S-adenosylmethionine:tRNA ribosyltransferase-isomerase; OS = Capnocytophaga canimorsus OX=28188 GN=queA PE=3 SV=1

SEQ ID NO: 65007 - protein, 364 aa, unidentified
  source 1..364: note = Capnocytophaga canis
  REGION 1..364: note = tr|A0A0B7I414|A0A0B7I414_9FLAO S-adenosylmethionine:tRNA ribosyltransferase-isomerase; OS = Capnocytophaga canis OX=1848903 GN=queA PE=3 SV=1
MQTFYEKIYGFIHHTMKLSNFNFELPKELLAEYPSENRDEARLMVVHRKTGLIEHKLFKDVIDYFDDGDVFVLNNTKVFPARLYGNKEKTKAKIEVFLLRELNADQRLWDVLVDPARKIRIGNKLYFGKDDSLVAEVIDNTTSRGRTLRFLYDGSYEEFRNKLTELGQTPLPKYISRAVEPEDEERYQTIYAKHEGAVAAPTAGLHFSKHLMKRLEIKGINFAEVTLHVGLGTFSPVEVEDLSKHKMDSEEMFILEDQTEIINKAKRGKNKVCAVGTTVMRALESSVSSENTVNPYVGWTNKFIFPPHDFSIADAMITNFHTPKSTLLMMISAFAGHDLIMKAYKEAVQEKYKFYSYGDAMLIL

SEQ ID NO: 65008 - protein, 349 aa, unidentified
  source 1..349: note = Capnocytophaga canis
  REGION 1..349: note = tr|A0A0B7ISS9|A0A0B7ISS9_9FLAO S-adenosylmethionine:tRNA ribosyltransferase-isomerase; OS = Capnocytophaga canis OX=1848903 GN=queA PE=3 SV=1
MKLSNFNFELPKELLAEYPSENRDEARLMVVHRKTGLIEHKLFKDVIDYFDDGDVFVLNNTKVFPARLYGNKEKTKAKIEVFLLRELNADQRLWDVLVDPARKIRIGNKLYFGKDDSLVAEVIDNTTSRGRTLRFLYDGSYEEFRNKLTELGQTPLPKYISRAVEPEDEERYQTIYAKHEGAVAAPTAGLHFSKHLMKRLEIKGINFAEVTLHVGLGTFSPVEVEDLSKHKMDSEEMFILEDQTEIINKAKRGKNKVCAVGTTVMRALESSVSSENTVNPYVGWTNKFIFPPHDFSIADAMITNFHTPKSTLLMMISAFAGHDLIMKAYKEAVQEKYKFYSYGDAMLIL

SEQ ID NO: 65009 - protein, 349 aa, Capnocytophaga cynodegmi
  REGION 1..349: note = tr|A0A250EBX1|A0A250EBX1_9FLAO S-adenosylmethionine:tRNA ribosyltransferase-isomerase; OS = Capnocytophaga cynodegmi OX=28189 GN=queA PE=3 SV=1
MKLSNFNFELPKELLAEYPSENRDEARLMVLHRKTGEIEHRLFKDVIDYFDDQDVFVLNNTKVFPARLYGNKEKTKAKIEVFLLRELNAEQRLWDVLVDPARKIRIGNKLYFGKDDSLVAEVIDNTTSRGRTLRFLYDGSYEEFRDKLTELGQTPLPKYISRAVEPEDEERYQTIYAKHEGAVAAPTAGLHFSKHLMKRLEIKGINFAEVTLHVGLGTFSPVEVEDLSKHKMDSEEVFIPEDQTKIINKAKLNKKRVCAVGTTVMRALESSVSSENTVNPYIGWTNKFIFPPYDFSVANAMITNFHTPKSTLLMMVSAFGGHDLVMRAYKEAVAEKYKFYSYGDAMLIL

SEQ ID NO: 65010 - protein, 349 aa, Capnocytophaga cynodegmi
  REGION 1..349: note = tr|A0A0B7HIG4|A0A0B7HIG4_9FLAO S-adenosylmethionine:tRNA ribosyltransferase-isomerase; OS = Capnocytophaga cynodegmi OX=28189 GN=queA PE=3 SV=1
MKLSNFNFELPKELLAEYPSENRDEARLMVLHRKTGEIEHKLFKDVIDYFDDQDVFVLNNTKVFPARLYGNKEKTKAKIEVFLLRELNAEQRLWDVLVDPARKIRIGNKLYFGKDDSLVAEVIDNTTSRGRTLRFLYDGSYEEFRDKLTELGQTPLPKYISRAVEPEDEERYQTIYAKHEGAVAAPTAGLHFSKHLMKRLEIKGINFAEVTLHVGLGTFSPVEVEDLSKHKMDSEEVFIPEDQTKIINKAKLNKKRVCAVGTTVMRALESSVSSENTVNPYIGWTNKFIFPPYDFSVANAMITNFHTPKSTLLMMVSAFGGHDLVMRAYKEAVAEKYKFYSYGDAMLIL

SEQ ID NO: 65011 - protein, 349 aa, Capnocytophaga gingivalis
  REGION 1..349: note = tr|C2M7D2|C2M7D2_CAPGI S-adenosylmethionine:tRNA ribosyltransferase-isomerase OS=Capnocytophaga gingivalis; OX = 553178 GN=queA PE=3 SV=1
MKLSSFNFNLPKELLAEYPSENRDEARLMVVHRKTGEIEHRLFKDVIEYFDDGDVFVLNNTKVFPARLYGHKEKTNAKIEVFLLRELNKEQRLWDVLVDPARKIRIGNKLFFDPEEELVAEVIDNTTSRGRTLRFLFDGSYEGFRNKLLELGHTPLPKYISRPVEPEDEERYQTIYAKYEGAVAAPTAGLHFSKQLMKRLEIKGINFAELTLHIGLGTFNPVEVEDLSKHKMDSEEIIIPQEACQVVNKAKEAGKRVCAVGTTVMRAMESSVSSHNTLNPFIGWTNKFIFPPYDFGVANAMITNFHTPKSTLLMMVSAFAGHELIMDAYEEAVKEKYKFFSYGDAMLII

SEQ ID NO: 65012 - protein, 349 aa, Capnocytophaga gingivalis; identical to SEQ ID NO: 65011
  REGION 1..349: note = tr|A0A250FUU4|A0A250FUU4_9FLAO S-adenosylmethionine:tRNA ribosyltransferase-isomerase; OS = Capnocytophaga gingivalis OX=1017 GN=queA PE=3 SV=1

SEQ ID NO: 65013 - protein, 173 aa, Capnocytophaga granulosa
  REGION 1..173: note = tr|A0A381HA58|A0A381HA58_9FLAO S-adenosylmethionine:tRNA ribosyltransferase-isomerase; OS = Capnocytophaga granulosa OX=45242 GN=queA_2 PE=3 SV=1
MQVRGAVAAPTAGLHFSKQLMKRLEIKGISFAELTLHVGLGTFNPVEVEDLSKHKMDSEEIIIPQEACDKVNKAKEAGKRVCAVGTTVMRAMESSVSSHNTLNPFVGWTNKFIFPPYDFGVANAMITNFHTPKSTLLMMVSAFAGHELIMDAYEEAVKEKYKFFSYGDAMLII

SEQ ID NO: 65014 - protein, 349 aa, Capnocytophaga granulosa
  REGION 1..349: note = tr|A0A381DRJ3|A0A381DRJ3_9FLAO S-adenosylmethionine:tRNA ribosyltransferase-isomerase; OS = Capnocytophaga granulosa OX=45242 GN=queA_1 PE=3 SV=1
MKLSSFNFNLPKELLAEYPSENRDEARLMVVDRKIGTIEHKLFKDVIDYFDDGDVFVLNNTKVFPARLYGHKEKTNAKIEVFLLRELNKEQRLWDVLVDPARKIRIGNKLFFDKEEELVAEVIDNTTSRGRTLRFLFDGSYEGFRNKLLELGHTPLPKYITRPVEPEDEERYQTIYAKYEGAVAAPTAGLHFSKQLMKRLEIKGISFAELTLHVGLGTFNPVEVEDLSKHKMDSEEIIIPQEACDKVNKAKEAGKRVCAVGTTVMRAMESSVSSHNTLNPFVGWTNKFIFPPYDFGVANAMITNFHTPKSTLLMMVSAFAGHELIMDAYEEAVKEKYKFFSYGDAMLII

SEQ ID NO: 65015 - protein, 349 aa, Capnocytophaga haemolytica
  REGION 1..349: note = tr|A0A0X8JBW6|A0A0X8JBW6_9FLAO S-adenosylmethionine:tRNA ribosyltransferase-isomerase; OS = Capnocytophaga haemolytica OX=45243 GN=queA PE=3 SV=1
MKLSNFNFDLPKELLAEYPSENRDEARLMVLHRKTGEIEHKLFKDVINYFDDGDVFVINNTKVFPARLFGNKEKTKARIEVFLLRELSAEQRLWDVLVDPARKIRIGNKLYFGKDARLVAEVIDNTTSRGRTLRFLYDGTYEEFRQYLKELGQTPLPKYISRPVEPEDEERYQTIYAKYEGAVAAPTAGLHFSKHLMKRLEIKGISFAEITLHVGLGTFSPVEVEDLSKHKMDSEEIIIPEDQTLIINKAKESGKRVCAVGTTVMRALESSVAPNGNVNPYNGWTNKFIFPPYDFSVANAMITNFHTPKSTLLMMVSAFGGHELVMRAYHEAVAEKYKFYSYGDAMLIL

SEQ ID NO: 65016 - protein, 349 aa, Capnocytophaga leadbetteri
  REGION 1..349: note = tr|A0A250FCN5|A0A250FCN5_9FLAO S-adenosylmethionine:tRNA ribosyltransferase-isomerase; OS = Capnocytophaga leadbetteri OX=327575 GN=queA PE=3 SV=1
MKLSNFNFDLPKELLAEYPSENRDEARLMVIHRKTGKIEHKLFKDVIDYFDDGDVFVLNNTKVFPARLYGNKEKTKAKIEVFLLRELSAEQRLWDVLVDPARKIRIGNKLYFGENGDLVAEVIDNTTSRGRTLRFLYDGTYEEFRQRLVELGQTPLPKYISRPVEPEDEERYQTIYAKHEGAVAAPTAGLHFSKHLMKRLEIKGISFAEVTLHVGLGTFNPVEVEDLSKHKMDSEEIHIPVDQANIINAAKEKKKRVCAVGTTVMRVLESSVSADGLVNPFDGWTNKFIFPPYDFSVANAMITNFHTPKSTLLMMVSAFAGHDLIMRAYKEAVEQKYKFYSYGDAMLIL

SEQ ID NO: 65017 - protein, 349 aa, Capnocytophaga ochracea
  REGION 1..349: note = tr|E4MRQ6|E4MRQ6_CAPOC S-adenosylmethionine:tRNA ribosyltransferase-isomerase OS=Capnocytophaga ochracea F0287 OX=873517 GN=queA PE=3 SV=1
MKLSNFNFELPKELLAEYPSENRDEARLMVIHRKTGEIEHRLFKDVIDYFDDGDVFVLNNTKVFPARLYGNKEKTKAKIEVFLLRELSAEQRLWDVLVDPARKIRIGNKLYFGKNAELVAEVIDNTTSRGRTLRFLYDGTYEEFRQHLTELGQTPLPKYISRPVEPEDEERYQTIYAKYEGAVAAPTAGLHFSKHLMKRLEIKGITFAEVTLHVGLGTFNPVEVEDLSKHKMDSEEIHIPESQTKIINVAKVNKKRVCAVGTTVMRVLESSVSSDGFLNPFDGWTNKFIFPPYDFSIANAMITNFHTPKSTLLMMVSAFAGHDLIMRAYKEAVEQKYKFYSYGDAMLIL

SEQ ID NO: 65018 - protein, 349 aa, Capnocytophaga ochracea
  REGION 1..349: note = tr|A0A2X2SWD4|A0A2X2SWD4_CAPOC S-adenosylmethionine:tRNA ribosyltransferase-isomerase; OS = Capnocytophaga ochracea OX=1018 GN=queA PE=3 SV=1
MKLSNFNFELPKELLAEYPSENRDEARLMVIHRKTGEIEHRLFKDVIDYFDDGDVFVLNNTKVFPARLYGNKEKTKAKIEVFLLRELSAEQRLWDVLVDPARKIRIGNKLYFGKNAELVAEVIDNTTSRGRTLRFLYDGTYEEFRQHLTELGQTPLPKYISRPVEPEDEERYQTIYAKYEGAVAAPTAGLHFSKHLMKRLEIKGITFAEVTLHVGLGTFNPVEVEDLSKHKMDSEEIHIPESQTKIINAAKVNKKRVCAVGTTVMRVLESSVSSDGFLNPFDGWTNKFIFPPYDFSIANAMITNFHTPKSTLLMMVSAFAGHDLIMRAYKEAVEQKYKFYSYGDAMLIL

SEQ ID NO: 65019 - protein, 355 aa, Capnocytophaga sp.
  REGION 1..355: note = tr|J5VL12|J5VL12_9FLAO S-adenosylmethionine:tRNA ribosyltransferase-isomerase OS=Capnocytophaga sp. CM59; OX = 936370 GN=queA PE=3 SV=1
MPLIQTMKLSSFNFNLPKELLAEYPSENRDEARLMVVDRKIGTIEHKLFKDVIDYFDDGDVFVLNNTKVFPARLYGHKEKTNAKIEVFLLRELNKEQRLWDVLVDPARKIRIGNKLFFDKEEELVAEVIDNTTSRGRTLRFLFDGSYEGFRNKLLELGHTPLPKYITRPVEPEDEERYQTIYAKYEGAVAAPTAGLHFSKQLMKRLEIKGISFAELTLHVGLGTFNPVEVEDLSKHKMDSEEIIIPQEACDKVNKAKEAGKRVCAVGTTVMRAMESSVSSHNTLNPFVGWTNKFIFPPYDFGVANAMITNFHTPKSTLLMMVSAFAGHELIMDAYEEAVKEKYKFFSYGDAMLII

SEQ ID NO: 65020 - protein, 349 aa, Capnocytophaga sp.
  REGION 1..349: note = tr|U2AMY4|U2AMY4_9FLAO S-adenosylmethionine:tRNA ribosyltransferase-isomerase OS=Capnocytophaga sp. oral taxon 863 str. F0517 OX=1227266 GN=queA PE=3 SV=1
MKLSSFNFNLPKELLAEYPSENRDEARLMVVNRKTGTIEHKLFKDVIDYFDDGDVFVLNNTKVFPARLYGHKEKTNAKIEVFLLRELNKEQRLWDVLVDPARKIRIGNKLFFDKEEQLVAEVIDNTTSRGRTLRFLFDGSYEGFREKLLELGHTPLPKYITRPVEPEDEERYQTIYAKHEGAVAAPTAGLHFSKQLMKRLEIKGISFAELTLHVGLGTFNPVEVEDLSKHKMDSEEIIIPQEACNTVNKAKEGGHRVCAVGTTVMRAMESSVSSHNTLNPFIGWTNKFIFPPYDFGVANAMITNFHTPKSTLLMMVSAFAGHELIMDAYEEAVKEKYKFFSYGDAMLII

SEQ ID NO: 65021 - protein, 349 aa, Capnocytophaga sputigena
  REGION 1..349: note = tr|A0A250FD38|A0A250FD38_CAPSP S-adenosylmethionine:tRNA ribosyltransferase-isomerase; OS = Capnocytophaga sputigena OX=1019 GN=queA PE=3 SV=1
MKLSNFNFDLPKELLAEYPSENRDEARLMVVHRKTGEIEHKLFKDVIDYFDDGDVFVLNNTKVFPARLYGNKEKTKAKIEVFLLRELSAEQRLWDVLVDPARKIRIGNKLYFGKNAELVAEVIDNTTSRGRTLRFLYDGTYEEFRQHLTELGQTPLPKYISRPVEPEDEERYQTIYAKHEGAVAAPTAGLHFSKHLMKRLEIKGITFAEVTLHVGLGTFNPVEVEDLSKHKMDSEEIHIPESQTKIINTAKENKKRVCAVGTTVMRVLESSVSSDCFVNPFDGWTNKFIFPPYDFSVANAMITNFHTPKSTLLMMVSAFAGHDLIMRAYKEAVEQKYKFYSYGDAMLIL

SEQ ID NO: 65022 - protein, 349 aa, Capnocytophaga sputigena
  REGION 1..349: note = tr|A0A2A3N2W1|A0A2A3N2W1_CAPSP S-adenosylmethionine:tRNA ribosyltransferase-isomerase; OS = Capnocytophaga sputigena OX=1019 GN=queA PE=3 SV=1
MKLSNFNFDLPKELLAEYPSENRDEARLMVVHRKTGEIEHKLFKDVIDYFDDGDVFVLNNTKVFPARLYGNKEKTKAKIEVFLLRELSAEQRLWDVLVDPARKIRIGNKLYFGKNAELVAEVIDNTTSRGRTLRFLYDGTYEEFRQHLTELGQTPLPKYISRPVEPEDEERYQTIYAKHEGAVAAPTAGLHFSKHLMKRLEIKGITFAEVTLHVGLGTFNPVEVEDLSKHKMDSEEIHIPESQTKIINTAKENKKRVCAVGTTVMRVLESSVSSDGFVNPFDGWTNKFIFPPYDFSVANAMITNFHTPKSTLLMMVSAFAGHDLIMRAYKEAVEQKYKFYSYGDAMLIL

SEQ ID NO: 65023 - protein, 349 aa, unidentified
  source 1..349: note = Capnocytophaga stomatis
  REGION 1..349: note = tr|A0A250FWC2|A0A250FWC2_9FLAO S-adenosylmethionine:tRNA ribosyltransferase-isomerase; OS = Capnocytophaga stomatis OX=1848904 GN=queA PE=3 SV=1
MKLSNFNFDLPKELLAEYPSENRDEARLMVLHRKTGEIEHRLFKDVIDYFDDQDVFVLNNTKVFPARLYGNKEKTKAKIEVFLLRELNAEQRLWDVLVDPARKIRIGNKLYFGKDDSLVAEVIDNTTSRGRTLRFLYDGSYEEFRNKLTELGQTPLPKYISRAVEPEDEERYQTIYAKHEGAVAAPTAGLHFSKHLMKRLEIKGINFAEVTLHVGLGTFSPVEVEDLSKHKMDSEEVFIPEDQTKIINKAKLNKKKVCAVGTTVMRALESSVSSENTVNPYIGWTNKFIFPPYDFSVANAMITNFHTPKSTLLMMVSAFGGHDLVMRAYKEAVAEKYKFYSYGDAMLIL

SEQ ID NO: 65024 - protein, 348 aa, unidentified
  source 1..348: note = Caproiciproducens galactitolivorans
  REGION 1..348: note = tr|A0A4Z0Y109|A0A4Z0Y109_9FIRM S-adenosylmethionine:tRNA ribosyltransferase-isomerase; OS = Caproiciproducens galactitolivorans OX=642589 GN=queA; PE = 3 SV=1
MELDLQNLQTKDFYYDLPKELIAQTPLEPRDSSRLLTLNRKTGEISHKHFYDIIDCLNPGDCLVLNDSRVLPARLYGVKEDTGAKVEFLLLTHREGDVWEVLCGPGKRAKPGTRFSFGDDLLKAEVLEIIEDGNRLARFIYDGNFYEILDKIGQMPLPHYITKPLENNERYQTVYSKEIGSAAAPTAGLHFTPELLERVKQKGVKVAFVTLHVGLGTFRPVTAERVVDHKMHSEHYYLPKETADCINATKKNGGRVIAVGTTSCRTLETVGTKEGCIKESSGWTDIFIYPGYQYKVLDGLITNFHLPESTLIMLVSAFAGYDHIMNAYKVAVQEKYRFFSFGDAMFIY

SEQ ID NO: 65025 - protein, 341 aa, unidentified
  source 1..341: note = Caproiciproducens sp.
  REGION 1..341: note = tr|A0A410Q7L6|A0A410Q7L6_9FIRM S-adenosylmethionine:tRNA ribosyltransferase-isomerase; OS = Caproiciproducens sp. NJN-50 OX=2507162 GN=queA PE=3; SV = 1
MKTKDFYYDLPEDLIAQSPAEPRDSSRLLTLNRKTGEVEHRHFYDIIDYLNPGDCLVLNDSRVLPARLLGVKDETGAKVEFLLLNHREGDVWEVLTGPGRRAKIGSKFTFGDGLLRAEVLDIIEDGNRLARFTCEGNFYEILDKIGQMPLPHYIKEELRDNERYQTVYSKEIGSAAAPTAGLHFTPELLQKIKDKGIDLAFVTLHVGLGTFRPVTAQKVTEHKMHSEHYYLSAQTAKQINRAKRNGGRVIAVGTTSCRTLEAVGTKEGCIRESAGWTDIFIYPGYRFKVLDGLITNFHLPESTLIMLVSALAGYDHIMNAYRVAVKEKYRFFSFGDAMLIY

SEQ ID NO: 65026 - protein, 355 aa, unidentified
  source 1..355: note = Capsulimonas corticalis
  REGION 1..355: note = tr|A0A402D786|A0A402D786_9BACT S-adenosylmethionine:tRNA ribosyltransferase-isomerase; OS = Capsulimonas corticalis OX=2219043 GN=queA PE=3 SV=1
MNPAITTDLDEPLRLSDFDYTLPPERIAQSPLPERDSSRLLVLDRKTGAIQHRVFTDLLEYFRPGDVLVINDTRVTAQRLFGARLGKPGERVEAFLTHRVADGLWRGLVRPGKKLQPGVVVEFGDGLSAEILDRTDERGGRLMRFSTADGGNVEAAIEAHGAAPLPPYITRVLPPEERGRYQTVYADEGGSAAAPTAGLHFTQDLLGRVREHGVEIAHVTLHVGLGTFRPIESEHIADHTMHAERIHLSPEAAETINGAAGRVIAVGTTSARTLESAAVGPGRVEAVDKETSLYCTPGYQFQIVDALITNFHMPRSTLLVLVSALAGREKIFAAYQEALAREYRFLSFGDAMFIQ

SEQ ID NO: 65027 - protein, 341 aa, Carboxydocella sporoproducens
  REGION 1..341: note = tr|A0A1T4PHN2|A0A1T4PHN2_9FIRM S-adenosylmethionine:tRNA ribosyltransferase-isomerase; OS = Carboxydocella sporoproducens DSM 16521 OX=1121270; GN = queA PE=3 SV=1
MRVSDFDFFLPEELIAQQPVEPRDHSRLLVLFRQEKRLEHRYFYQLPEYLRAGDVLVVNETRVIPARLFGEKKGTGARIEVVLLHRIDKDRWEVLLKPGKRARPGTWLQFGDGLLEAEVEDVTPAGGRILRFVYRGVWEELLDRLGEMPLPPYIREKLPDRERYQTVYAREEGSAAAPTAGLHFTPRLLAELQERGIEIVKVLLHVGLGTFRPVKVEKIEEHQMHAEYYRLSAEAAQVLNRAKAEGRRVIAVGTTSTRVLETAAVAPGQVQAGEGWTDIFIYPGYQFKMIDGLITNFHLPKSTLLMLVAALVGRERILAAYEEAVRERYRFFSFGDAMLII

SEQ ID NO: 65028 - protein, 341 aa, Carboxydocella thermautotrophica; identical to SEQ ID NO: 65027
  REGION 1..341: note = tr|A0A2R4N3A8|A0A2R4N3A8_9FIRM S-adenosylmethionine:tRNA ribosyltransferase-isomerase; OS = Carboxydocella thermautotrophica OX=178899 GN=queA PE=3; SV = 1

SEQ ID NO: 65029 - protein, 338 aa, Carboxydothermus hydrogenoformans
  REGION 1..338: note = sp|Q3ABY6|QUEA_CARHZ S-adenosylmethionine:tRNA ribosyltransferase-isomerase OS=Carboxydothermus hydrogenoformans (strain ATCC BAA-161 / DSM 6008 / Z-2901); OX = 246194GN=queA PE=3 SV=1
MKLKDFDYYLPEELIAQTPLEKRDESRLLVLKRQTGEITHDVFKNLKKYLVPGDLLVVNKTRVIPARLFGVREQGGEVEILLVKRMNFREWEVLVKPGRRARVGTRLIFAPGVLEGEIVAQTEVGRIIKFSFQGVFEEILNQLGQTPLPPYIKEKLKDPERYQTIYAKEPGSAAAPTAGLHFTRELISELKDYGVEFAEVLLHVGLGTFKPVKTENILEHKMHEEYYEIENEAAEKVNKAKREGRRVIAVGTTVVRVLESVADKGQVAPAKGYTDLFIYPGFNFQIIDGLITNFHLPKSTLLMLVSAFAGREKVLNAYEIAVRLRYRFFSFGDAMLII

SEQ ID NO: 65030 - protein, 339 aa, Carboxydothermus islandicus
  REGION 1..339: note = tr|A0A1L8D1S0|A0A1L8D1S0_9THEO S-adenosylmethionine:tRNA ribosyltransferase-isomerase; OS = Carboxydothermus islandicus OX=661089 GN=queA PE=3 SV=1
MMKLEDFDYNLPEELIAQTPLEKRDESRLLVLNRQTGEITHDIFKNLKRYLVPGDLLVVNKTRVIPARLYGVREQGGEVEILLLKRLSLTEWEVLVKPGRRARVGTRLIFAPGVLEGEIVAQTEVGRIIKFSFQGIFEEILNQLGQTPLPPYIKEKLKDPERYQTIYAKEPGSAAAPTAGLHFTWELISELNNYGVEFTEVLLHVGLGTFKPVKTENIFEHKMHEEYYEIENEAAEKINKAKREGRRVIAVGTTVVRVLESVADRGQVAPAKGYTDLFIYPGFNFQIIDGLITNFHLPKSTLLMLVSAFAGREKVLNAYETAVSLRYRFFSFGDAMLII

SEQ ID NO: 65031 - protein, 338 aa, unidentified
  source 1..338: note = Carboxydothermus pertinax
  REGION 1..338: note = tr|A0A1L8CXV7|A0A1L8CXV7_9THEO S-adenosylmethionine:tRNA ribosyltransferase-isomerase; OS = Carboxydothermus pertinax OX=870242 GN=queA PE=3 SV=1
MELKDFDYYLPEELIAQTPLAQRDESRLMVLRRQTGEIEHDVFKNIKRYLRPGDLLVLNKTRVIPARLFGVREQGGEVEILLIKRLGITEWEVLVRPGRRARVGTRLIFAPNILEGEIIAQTEVGRIIKFSFQGVFEDVLNKLGETPLPPYIKEKLSDPERYQTVYAKEPGSAAAPTAGLHFTKELMADLKDHGVEITEVLLHVGLGTFKPVKTENILEHKMHEEYYEVEQEAANKINKAKDEGRRIIAVGTTVVRVLESVAKDGQVIPSKGYTDIFIYPGFQFQIIDGLITNFHLPKSTLIMLVSAFAGREKVLKAYETAVNLRYRFFSFGDAMLIL

SEQ ID NO: 65032 - protein, 404 aa, unidentified
  source 1..404: note = Carboxylicivirga sp.
  REGION 1..404: note = tr|A0A553GLP3|A0A553GLP3_9BACT S-adenosylmethionine:tRNA ribosyltransferase-isomerase; OS = Carboxylicivirga sp. M1479 OX=2594476 GN=FNN09_12660; PE = 3 SV=1
MIKPTISISDFTYDLPNERIAKYPLANRDESKLLIYKNECIEETSFPSIIDAIPSKAMLAFNNTKVIRARLKFKKVTGAEIEIFCLEPLSPAEVQMAFDSREQTTWKCIVGNARKWKDGELSKDLMINGEEVCIKLTKGERLHDAYSINFSWDNSNFSFAELIEEIGLTPIPPYLNRETEDIDKDRYQTVYSQHQGSVAAPTAGLHFTDNILNTLQTKGHPLLNVTLHVGAGTFKPVKSEEIADHDMHIEHFVIEKDALKRLIAHQDELIAVGTTSVRTLESLYWYGVRILSNESIANGIEQWDPYNLKGSYSKEEAFRALLDFMEEKKLSHLAGKTAIIIVPGYSFKVINGLVTNFHQPQSTLLLLISAIVGDNWKKIYQYAYDNDFRFLSYGDSSLLMIDKK

SEQ ID NO: 65033 - protein, 349 aa, unidentified
  source 1..349: note = Carboxylicivirga sp.
  REGION 1..349: note = tr|A0A553GQG2|A0A553GQG2_9BACT S-adenosylmethionine:tRNA ribosyltransferase-isomerase; OS = Carboxylicivirga sp. M1479 OX=2594476 GN=queA PE=3 SV=1
MKLSKFKYNLPEELIALHPAENRDESRLMVLNRQTKEIEHKIFKDMINYFDDEDVMVFNNTKVFPARLYGNKEKTGAEIEVFLLRELNREQRLWDVLVDPARKIRIGNKLYFGDDDNLVAEVIDNTTSRGRTLRFLYDGSYEEFKETLYGMGETPIPSMIGRKVVPEDRERYQTIYAKHEGAVAAPTAGMHFSRELMKRLEIKGVDFSEITLHVGLGNFRQVDVEDLTKHKMDSEQIFITEEATKIINAGKDKKKRVCAVGTTVMRTLESSVSTYGHVKPFEGWTNKFIFPPYEFQVANAMITNFHLPLSTLMMMAAGFGGYDFIMEAYEVAVKEKYRFGTYGDAMLII

SEQ ID NO: 65034 - protein, 366 aa, unidentified
  source 1..366: note = Cardinium endosymbiont
  REGION 1..366: note = tr|X5J7Z6|X5J7Z6_9BACT S-adenosylmethionine:tRNA ribosyltransferase-isomerase OS=Cardinium endosymbiont cBtQ1 of Bemisia tabaci OX=1354314 GN=queA PE=3 SV=1
MPKAAYKRNITFLNYIHTMKLSNFKFDLPAHSIAQYPIEAKEDARLMVVHKSSGKIEHKTFKDLPAYFSEGDTLVVNDSKVLPCKLYGYKEKTNAQVEVLLLRKLNDEHGLWDTIVEPARKIRIGNKIYFGNGELVAEIIDNTTSRGRTLKLLFERTEEEFYALINQIGHMPLPPQIGRSSKPEDREYYQTIFSQNIGSIVLPAAGLHFTPYLLKYLALQNISVVPVTLHIGLGELSTIDMEDLTKVRASSERFTITPETATVVNHSLQHQKKVCAVGTSVLRAMESSVSVACQIKPASDWTNKFILPSYSFKVCNALLTTFHLSSSISLVSVAAFGGEELILDAYAEAIKEAYRFFLYGDSMLII

SEQ ID NO: 65035 - protein, 348 aa, unidentified
  source 1..348: note = Cardinium endosymbiont
  REGION 1..348: note = tr|A0A556QXA7|A0A556QXA7_9BACT S-adenosylmethionine:tRNA ribosyltransferase-isomerase; OS = Cardinium endosymbiont of Dermatophagoides farinae; OX = 2597823 GN=queA PE=3 S V=1
MKLSNFKFELPAHSIAQYPIEVKEDARLMVVHKDSGKIEHKTFKDLPTYFSEGDTLVVNDSKVLPCKLYGCKEKTNAQVEVLLLRKLNDEHGLWDTIVEPARKIRIGNKIYFGNGELVAEIIDNTTSRGRTLKLLFDRTEEEFYALINEIGHMPLPHQIGRPSKPEDREYYQTIFAQNVGSIVLPAAGLHFTPYLLKYLALQNISVVPITLHIGLGELSTIDMEDLTKVRASSERFMITQETTKVVNQSLHHQKKVCAVGTSVLRAMESSVSVSCQLKEASDWTNKFILPSCPFKVCNALLTTFHLPSSISLVSVAAFGGEELILTAYAEAIKEGYRFFLYGDSMLII

SEQ ID NO: 65036 - protein, 345 aa, Cardiobacterium hominis
  REGION 1..345: note = tr|C8NB88|C8NB88_CARH6 S-adenosylmethionine:tRNA ribosyltransferase-isomerase OS=Cardiobacterium hominis (strain ATCC 15826 / DSM 8339 / NCTC 10426 / 6573); OX = 638300GN=queA PE=3 SV=1
MWRKSDFMYELPDELIARFPLAERSAARLLLARAVSVDEVALADRMVRDLPDLLEPDDLLVFNNTRVLPARLFGQKESGGRVEILLERLKSAHEANAYVRASKSPKVGGVIRIGSAELRVTGRHEALFALYSETPWAELLAAQGEMPIPPYLERAALESDKQRYQTVFAKHSGAVAAPTAGLHFDEALLAAIRLRGVKMAEVTLHVGAGTFQPVRHENLAEHIMHEEWLQVGQDVVDAVAACRARGGRVVAIGTTSLRALESAAEGGELAPFSGDTNLFITPGYRFRVVDALLTNFHLPESTLLMLVSAFAGYANIRAAYQHAIAARYRFFSYGDAMFLPTRLDV

SEQ ID NO: 65037 - protein, 360 aa, Cardiobacterium hominis
  REGION 1..360: note = tr|A0A1C3H3W1|A0A1C3H3W1_9GAMM S-adenosylmethionine:tRNA ribosyltransferase-isomerase; OS = Cardiobacterium hominis OX=2718 GN=queA PE=3 SV=1
MVARVFGVLVEGSGVMWRKSDFMYELPDELIARFPLAERSAARLLLARAVSVDEVALADRMVRDLPDLLEPDDLLVFNNTRVLPARLFGQKESGGRVEILLERLKSAHEANAYVRASKSPKVGGVIRIGNAEVQVTGRHEALFALSSETPWAELLAAQGEMPIPPYLERAALESDKQRYQTVFAKHSGAVAAPTAGLHFDEALLAAIRARGVATAEVTLHVGAGTFQPVRHENLAEHVMHEEWLAVGQEVVDAVAACRARGGRVVAIGTTSLRALESAAAGGELAPFSGDTNLFITPGYRFRVVDALLTNFHLPESTLLMLVSAFAGYANIRAAYQHAIAARYRFFSYGDAMFLPTRLDV

SEQ ID NO: 65038 - protein, 346 aa, Cardiobacterium valvarum
  REGION 1..346: note = tr|A0A381E3E7|A0A381E3E7_9GAMM S-adenosylmethionine:tRNA ribosyltransferase-isomerase; OS = Cardiobacterium valvarum OX=194702 GN=queA PE=3 SV=1
MTYHKSDFHYDLPDERIARYPLPERSAARMLVARVMDADTVELGDRQVRDLPDYLDPADLLVFNNTRVLPARLYGHKASGGKIEILIERLKSPHEASAYIRASKSPQTGSTLHIGNATLRVGDRDDALFTLYSDGAPWQELLAAHGEMPIPPYLERRAQDSDSERYQTVYAKHSGAVAAPTAGLHFDDALLAAIAARGVQRAEITLHVGAGTFQPVRHENLAEHIMHEEWLTVGEDVVDAVAACRARGGRVIAVGTTALRALESAAAGGNLAPYTGDTRLFITPGYRFRVVDALFTNFHLPESTLLMLVSAFAGYDNIRRAYQHAIAHDYRFYSYGDAMFLPKRLY

SEQ ID NO: 65039 - protein, 371 aa, Cardiobacterium valvarum
  REGION 1..371: note = tr|G9ZFQ0|G9ZFQ0_9GAMM S-adenosylmethionine:tRNA ribosyltransferase-isomerase OS=Cardiobacterium valvarum F0432 OX=797473 GN=queA PE=3 SV=1
MAHLRRRCQNSRPAQQYRLSPSSIVMTYHKSDFHYDLPDERIARYPLPERSAARMLVARVLDADTVELGDRQVRDLPDYLDPADLLVFNNTRVLPARLYGHKTSGGKIEILIERLKSPHEASAYIRASKSPQAGSTLHVGDATLRVGDRDDALFTLYSDGAPWQELLATHGEMPIPPYLERRAQDSDSERYQTVYAKHSGAVAAPTAGLHFDEALLAAIAARGVQRTEITLHVGAGTFQPVRHENLAEHIMHEEWLTVGEDVVDAVAACRARGGRVIAVGTTALRALESAAAGGSLAPYTGDTRLFITPGYRFRVVDALFTNFHLPESTLLMLVSAFAGYDNIRRAYQHAIAHDYRFYSYGDAMFLPKRLD

SEQ ID NO: 65040 - protein, 343 aa, Carnobacterium alterfunditum
  REGION 1..343: note = tr|A0A1N6G9D8|A0A1N6G9D8_9LACT S-adenosylmethionine:tRNA ribosyltransferase-isomerase; OS = Carnobacterium alterfunditum OX=28230 GN=queA PE=3 SV=1
MLTTKDFDFNLPEELIAQTPLANRSSSKLLILDKEMGKVEDKYFTDILDELNKGDALVMNDTRVLPARLHGIKPETGAHIELLLLKNTKNDQWETLVKPAKKATVGTVISFGDGRLTATVTEELNHGGRIVDFSYEGIFLEVLESLGEMPLPPYIKERLEDGERYQTVYAKENGSAAAPTAGLHFTEELLEQIKLKGVQLVFLTLHVGLGTFRPVSVDSLEDHEMHSEFYRLTEESAAILTAVRNNGGRIVAVGTTSIRTLETIGTKFNGEIKADSGWTSIFISPGYTFKVVDAFSTNFHLPKSTLVMLISAFAGRENVLSAYQHAIDKRYRFFSFGDAMFIK

SEQ ID NO: 65041 - protein, 343 aa, Carnobacterium divergens
  REGION 1..343: note = tr|A0A0R2HYQ3|A0A0R2HYQ3_CARDV S-adenosylmethionine:tRNA ribosyltransferase-isomerase; OS = Carnobacterium divergens DSM 20623 OX=1449336 GN=queA; PE = 3 SV=1
MLSTKDFDFDLPEELIAQTPLSDRSSSRLLVLDSKTGEVSDKHFTDILDELHAGDALVMNDTRVLPARLYGTKPETGGHLEVLLLKNTVNDQWETLVKPAKRAKVGTEISFGDGRLKATVVEELEHGGRIVDFSYEGIFLEVLESLGEMPLPPYIKERLEDNERYQTVYAKENGSAAAPTAGLHFTEDLLAKIKAKGVELVFLTLHVGLGTFRPVSVDSIEDHDMHSEFYRLTEAAAAKLNQVKAEGGRIVAVGTTSIRTLETIGTKFDGEIKADSGWTSIFISPGYQFKVVDAFSTNFHLPKSTLVMLVSAFAGRENVLAAYHHAVEERYRFFSFGDAMFVK

SEQ ID NO: 65042 - protein, 343 aa, Carnobacterium divergens
  REGION 1..343: note = tr|A0A5F0MCZ5|A0A5F0MCZ5_CARDV S-adenosylmethionine:tRNA ribosyltransferase-isomerase; OS = Carnobacterium divergens OX=2748 GN=queA PE=3 SV=1
MLSTKDFDFDLPEELIAQTPLSDRSSSRLLVLDSKTGEVSDKHFTDILDELHAGDALVMNDTRVLPARLYGTKPETGGHLEVLLLKNTVNDQWETLVKPAKRAKVGTEISFGDGRLKATVVEELEHGGRIVDFSYKGIFLEVLESLGEMPLPPYIKERLEDNERYQTVYAKENGSAAAPTAGLHFTEDLLAKIKAKGVELVFLTLHVGLGTFRPVSVDSIEDHDMHSEFYRLTEAAAAKLNQVKAEGGRIVAVGTTSIRTLETIGTKFDGEIKADSGWTSIFISPGYQFKVVDAFSTNFHLPKSTLVMLVSAFAGRENVLAAYHHAVEERYRFFSFGDAMFVK

SEQ ID NO: 65043 - protein, 343 aa, unidentified
  source 1..343: note = Carnobacterium iners
  REGION 1..343: note = tr|A0A1X7NS29|A0A1X7NS29_9LACT S-adenosylmethionine:tRNA ribosyltransferase-isomerase; OS = Carnobacterium iners OX=1073423 GN=queA PE=3 SV=1
MLSTNDFDFELPEELIAQTPLEDRSGSKLLLLNKQNGEIKDEYFPAILNELESGDALVMNDTRVLPARLHGVKPETGGHLEVLLLKNTAGDQWETLVKPAKRARTGTKISFGDGRLEAVIKEELDHGGRIIEFYYEGVFLEVLESLGEMPLPPYIKERLEDNERYQTVYAKENGSAAAPTAGLHFTQELLEEIKAKGVKLVFLTLHVGLGTFRPVSVDSIEDHEMHSEFYRLSDEAANQLNEVKTAGGKIIAVGTTSIRTLETIGTKFDGEIKADSGWTSIFISPGYDFKLIDAFLTNFHLPKSTLVMLVSAFAGREKVLGAYEHAVKEKYRFFSFGDAMFVK

SEQ ID NO: 65044 - protein, 345 aa, Carnobacterium inhibens
  REGION 1..345: note = tr|U5S7Q7|U5S7Q7_9LACT S-adenosylmethionine:tRNA ribosyltransferase-isomerase OS=Carnobacterium inhibens subsp. gilichinskyi OX=1266845 GN=queA PE=3 SV=1
MNMLTTKDFDFDLPEELIAQTPLENRSSSKLLILDKETGKVEDKHFTDILDELHEGDALVMNDTRVLPARLYGIKPATGAHLEILLLKNTEKDQWETLVKPAKKARVGDVISFGDGRLTATVIEELNHGGRIIDFSYDGIFLEVLESLGEMPLPPYIKERLEDSERYQTVYAKENGSAAAPTAGLHFTQELLEQIKAKGVQLVFLTLHVGLGTFRPVSVDSIEDHEMHSEFYRLTEESAAELTTVRKNGGRIVAVGTTSIRTLETIGTKFNGELKADSGWTDIFISPGYTFKVVDAFSTNFHLPKSTLVMLVSAFAGRENVLAAYQHAVDERYRFFSFGDAMFVK

SEQ ID NO: 65045 - protein, 343 aa, Carnobacterium maltaromaticum
  REGION 1..343: note = tr|A0A0R2ICU1|A0A0R2ICU1_CARML S-adenosylmethionine:tRNA ribosyltransferase-isomerase; OS = Carnobacterium maltaromaticum DSM 20342 OX=1449341; GN = queA PE=3 SV=1
MLTTKDFDFDLPEELIAQTPLEDRSASKLLVLDRETGAIKDKHFTDILDELSEGDALVMNDTRVLPARLYGTKPETGGHLEVLLLKNTTGDQWETLVKPAKRAKVGTEIEFGDGRLKAVVLEELEHGGRIIEFSYTGIFLEVLESLGEMPLPPYIKERLEDSERYQTVYAKENGSAAAPTAGLHFTEDLLEKIKAKGVEIVFLTLHVGLGTFRPVSVDSIEDHEMHAEFYRLSEESAETLRKVKANGGRIVAVGTTSIRTLETIGTKFNGEIEADSGWTSIFITPGYQFKVVDAFSTNFHLPQSTLVMLISAFAGREKILAAYQHAIDEQYRFFSFGDAMFIK

SEQ ID NO: 65046 - protein, 343 aa, Carnobacterium maltaromaticum; identical to SEQ ID NO: 65045
  REGION 1..343: note = tr|K8E4V0|K8E4V0_CARML S-adenosylmethionine:tRNA ribosyltransferase-isomerase OS=Carnobacterium maltaromaticum LMA28 OX=1234679 GN=queA PE=3 SV=2

SEQ ID NO: 65047 - protein, 343 aa, Carnobacterium sp.
  REGION 1..343: note = tr|A8U9M7|A8U9M7_9LACT S-adenosylmethionine:tRNA ribosyltransferase-isomerase OS=Carnobacterium sp. AT7; OX = 333990 GN=queA PE=3 SV=1
MLTTKDFDFDLPEELIAQTPLENRSSSKLLILDKETGKVEDKHFTDILDELHEGDALVMNDTRVLPARLHGIKTETGAHIEILLLKNTENDRWETLVKPAKKATVGNVISFGDGRLTATVKEELTHGGRIIDFSYEGIFLEVLESLGEMPLPPYIKERLEDSERYQTVYAKENGSAAAPTAGLHFTQELLEQIKAKGVQLVFLTLHVGLGTFRPVSVDSIEDHEMHSEFYRLTEESAAALTAVQKNGGKIVAVGTTSIRTLETIGTKFNGELKADSGWTDIFISPGYKFKVVDAFSTNFHLPKSTLVMLVSAFAGREHVLAAYQHAVDEKYRFFSFGDAMFVK

SEQ ID NO: 65048 - protein, 374 aa, Carnobacterium sp.
  REGION 1..374: note = tr|A0A5C1LNN2|A0A5C1LNN2_9LACT S-adenosylmethionine:tRNA ribosyltransferase-isomerase; OS = Carnobacterium sp. PL26RED25 OX=2592352 GN=queA PE=3; SV = 1
MTLTTNDFDFDLPEELIAQVPIQDRLASRLLKLDAQTGNFQDGYFPDVASELEAGDVLVLNNTRVLPARLHGIRPDTGGHIEVLLLNNTEGDKWETLVKPARRIRVGTEIVFGDGQLVAVITEVLDHGGRIVEFKYNGIFLEVLEALGEMPLPPYIKKKLDNPDRYQTVYAKENGSAAAPTAGLHFTEEFMNALKDRGVEIAYLTLHVGLGTFRPVSVDDIDAHKMHSEFYRLDQENAAKIRRAQEGGHKVIAVGTTSIRTLETIGTKFKGQVQADSGWTDIFIAPGYQFSVVEGFITNFHLPKSTLIMLVSAFAGRDHVLAAYQHAVEEKYRFFSFGDAMFLRGPQYADPAITAEDIEAAKQRNSQFFTNEDK

SEQ ID NO: 65049 - protein, 343 aa, Carnobacterium viridans
  REGION 1..343: note = tr|A0A1H1BBW4|A0A1H1BBW4_9LACT S-adenosylmethionine:tRNA ribosyltransferase-isomerase; OS = Carnobacterium viridans OX=174587 GN=queA PE=3 SV=1
MLTTKDFDFDLPEELIAQTPLENRSSSKLLILDKETGEVDDKHFTDILEELNEGDALVMNDTRVLPARLHGVKPSTGAHLEILLLKNTEKDQWETLVKPAKKAIVGDVISFGDGRLTATVMEELTHGGRIIDFSYNGIFLEVLESLGEMPLPPYIKERLEDSERYQTVYAKENGSAAAPTAGLHFTEELLEQIKSKGVKLVFLTLHVGLGTFRPVSVDSIEDHEMHSEFYRLTEESAAELTAVRNNGGRIIAVGTTSIRTLETIGTKFNGEIKADSGWTDIFISPGYTFKVVDAFSTNFHLPKSTLVMLVSAFAGREHVLAAYQHAVDERYRFFSFGDAMFVK

SEQ ID NO: 65050 - protein, 345 aa, Caryophanon latum
  REGION 1..345: note = tr|A0A1C0Z5M6|A0A1C0Z5M6_9BACL S-adenosylmethionine:tRNA ribosyltransferase-isomerase; OS = Caryophanon latum OX=33977 GN=queA PE=3 SV=1
MKVEDFDFHLPEELIAQTPLLDRTASRLMVVDKTTNSVAHEQFPHILEELQQGDCLVLNDTRVLPARLMGTKQPTGANIELLLLKQNEQDVWETLAKPAKRVKIGTVVSFGDGLLQAECIGELDHGGRIFKFMYDGIFYEILDQLGEMPLPPYIREKLDDQDRYQTVFAKERGSAAAPTAGLHFTEEILDAVRAKGVSIAFVTLHVGLGTFRPVSVEDIDSHDMHSEFYSVSEETANIINETKARGGKVISVGTTSTRTLETVASRHDGKIVAEQGWTAIFIYPGYEWKCVDGLLTNFHLPKSTLVMLVSSLANRELILDAYAQAVEEKYRFFSFGDAMFIRPVR

SEQ ID NO: 65051 - protein, 345 aa, Caryophanon tenue
  REGION 1..345: note = tr|A0A1C0YN00|A0A1C0YN00_9BACL S-adenosylmethionine:tRNA ribosyltransferase-isomerase; OS = Caryophanon tenue OX=33978 GN=queA PE=3 SV=1
MKVEDFDFHLPEELIAQTPLLDRTASRLMVVDKQVGEVEHHHFPQILNEIQAGDCLVLNDTRVLPARLMGTKEPTGANIELLLLKQNEEDVWETLAKPAKRVKIGTVVSFGDGLLQAECIGELDHGGRIFKFIYDGIFYEILDQLGEMPLPPYIREKLDDQDRYQTVFAKERGSAAAPTAGLHFTEEILAAIRAKGVEIVFITLHVGLGTFRPVSVDDIDNHDMHSEFYSVTEEAAAIINRTKANGGKVISVGTTSTRTLETVASRHNGQIVAEQGWTSIFIYPGYEWKCVDGLLTNFHLPKSTLVMLVSSLANRDLILDAYAKAVDEKYRFFSFGDAMFIRPVR

SEQ ID NO: 65052 - protein, 358 aa, Castellaniella defragrans
  REGION 1..358: note = tr|W8X5W9|W8X5W9_CASDE S-adenosylmethionine:tRNA ribosyltransferase-isomerase OS=Castellaniella defragrans 65Phen OX=1437824 GN=queA PE=3 SV=1
MTDSLDIAQFDYELPPELIAQHPAARRDASRLLRLDGAGGLHDLQFTDLPGLLRAGDLLVFNDTRVIKARLRGRKDSGGQVEVLIERITEPRRALAHVRASKSPRPGTRLALADGAFEAEVLGRRDELFELAFPAPVLELLERHGSVPLPPYITHGAGSEDEARYQTVYAAKPGAVAAPTAGLHFDQAMLDRLDAMGVERAFVTLHVGAGTFQPVRVARISEHVMHAERYVVPADTLRRIRETRARGGRVIAVGTTSVRSLEAAAHDGDGEHACEGDTRLFITPGYRFAHVDALITNFHLPQSTLLMLVSALAGLEPIRRAYAHAVRSRYRFFSYGDAMFIEAAQDLAPADQPQAPTP

SEQ ID NO: 65053 - protein, 348 aa, Castellaniella sp.
  REGION 1..348: note = tr|A0A522TZ08|A0A522TZ08_9BURK S-adenosylmethionine:tRNA ribosyltransferase-isomerase; OS = Castellaniella sp. OX=1955812 GN=queA PE=3 SV=1
MDISQFDYELPPELIAQHPAERRDASRLLHLDAAGGLHDLHFTDLPGLLRAGDLLVFNNTRVIKARLRGRKETGGQVEVLVERILAPTRALVHLRSSKSPHAGTRLLLADGAIQAEVLGRQGELFELSFPSPLLNLLEQYGDVPLPPYITHAPAAEDESRYQTVYAEKPGAVAAPTAGLHFDQAMLDRLKTQDIGEAFVTLHVGAGTFQPVRVTNISEHVMHSERYVVPESVFAQIHETRARGGRVIAVGTTSVRSLEAAAHEGDGVHTCEGDTRLFITPGYTFQNVDALITNFHLPQSTLLMLVSALAGMEPIRRAYAHAVQSRYRFFSYGDAMFIEAAKAASSPTS

SEQ ID NO: 65054 - protein, 339 aa, unidentified
  source 1..339: note = Catabacter hongkongensis
  REGION 1..339: note = tr|A0A0M2NK37|A0A0M2NK37_9FIRM S-adenosylmethionine:tRNA ribosyltransferase-isomerase; OS = Catabacter hongkongensis OX=270498 GN=queA PE=3 SV=1
MKTSDFDYELPEELIAQTPVSPRDHSRLLVYDRQTKETFDRHFYDVTDYLKKGDVLVVNETKVIPARLYGKKRGTETDFEFLLLKRLQLDIWEVIMRPGKKLKPGGFVDFGDDLCAELLCKKEDGVCEVRFHYDGVFEELLDRYGNMPLPPYITEKLEEKERYQTVYAKEDGSAAAPTAGLHFTPELMRKIEEMGVTIVKILLHVGLGTFRPMKEDTVEEHIMHSEYYSVSEQAARMINDAKKEGRRVIAVGTTSVRTLESAACGGRVQAGSADTDIFIYPGYDYQIVDALITNFHLPKSTLIMLVSAFCGREETLRIYRRAVEERYRFFSFGDAMLII

SEQ ID NO: 65055 - protein, 349 aa, unidentified
  source 1..349: note = Catalinimonas alkaloidigena
  REGION 1..349: note = tr|A0A1G9D9J6|A0A1G9D9J6_9BACT S-adenosylmethionine:tRNA ribosyltransferase-isomerase; OS = Catalinimonas alkaloidigena OX=1075417 GN=queA PE=3 SV=1
MKLSQFKFDLPPELIAQHPTDNRDESRLMVVHRDTGKIEHRIFKDVLDYFDEGDVFVVNDTQVFPARLYGRKEKTGAKIEVFLLRELNASAHLWDVLVDPARKIRVGNKLYFGDGELVAEVIDNTTSRGRTIRFLYDGDEKDFHKMIDTLGETPLLKEYINRDVTKNDRERYQTIFAKNKGAVAAPTAGMHFTPQLIKRLAIKGIDIVPITLHIGLGTFREVDVEDLTKHKTDSENFVVTDQTADMVNTALDEKRRICAIGTTSMRALESSVSANNRLKANQGWTDRFIFPPYDFKIANALVTNFQLPQSTLLMLACAFGGYDLIMNAYEVAIKERYRFFSYGDAMLIV

SEQ ID NO: 65056 - protein, 403 aa, unidentified
  source 1..403: note = Catalinimonas alkaloidigena
  REGION 1..403: note = tr|A0A1G9F1P1|A0A1G9F1P1_9BACT S-adenosylmethionine:tRNA ribosyltransferase-isomerase; OS = Catalinimonas alkaloidigena OX=1075417 GN=queA PE=3 SV=1
MGIPPLVLSDYQYELPDERIARFPLTPRDASKLLVYRQGTLTHHTFRDLDALLPAQTLLVFNDTKVIPARLFFHRTTGAQIEVFLLHPQEPSPVMSEAMQQTDTCTWQAMVGNRKRWKAGEVLEKTWETPQGTITLRAEQAGADRVTFHWTPATLTFAEVLTASGEMPLPPYLKRSVTEQDRTQYQTVYSKQEGAVAAPTAGLHFTPEVLARLQTRGIALDFLTLHVSAGTFQPIKTELVTEHAMHREQVELSRQNLLHLQQHLGHIVAVGTTSMRTLESLYWFGVKLLHDPQSTFSIDQQLAYSIPATQQPSAAEALRAVEAYLDRTRQEILRGETGIYIHPGYDFKLCRGLITNYHQPGSTLILLVAAFVGADWRRIYDEALQHDYRFLSFGDSSLLLPNG

SEQ ID NO: 65057 - protein, 348 aa, Catellicoccus marimammalium
  REGION 1..348: note = tr|K8ZN71|K8ZN71_9ENTE S-adenosylmethionine:tRNA ribosyltransferase-isomerase OS=Catellicoccus marimammalium M35/04/3 OX=1234409 GN=queA PE=3 SV=1
MTLTTEDFDFYLPDELIAQTPLENRDQSRMLVLDPNTGAVEDKHFYDIIDELNPGDALVMNDTRVLPARLHGVKTETGGHLEVLLLHNTEGNVWETLVKPARRAKVGTKIDFGDGLLQATVVEELEHGGRMIEFSYDGVFLEILEQLGEMPLPPYIKERLEEQDRYQTVYAKENGSAAAPTAGLHYTPELMQKIEEKGVKIVYVTLHVGLGTFRPVSVDQLEDHEMHSEFYRLTPEAAQTLNEVRDAGGKIVAVGTTSIRTLETIGTKFNGEIKPDSGWTNIFIYPGYEFKVVDAFNTNFHLPKSTLVMLVSAFAGRENVLHAYQHAVEEGYRFFSFGDAMFVRPKKK

SEQ ID NO: 65058 - protein, 350 aa, Catenibacterium mitsuokai
  REGION 1..350: note = tr|E2NVU6|E2NVU6_CATMR S-adenosylmethionine:tRNA ribosyltransferase-isomerase OS=Catenibacterium mitsuokai (strain DSM 15897 / JCM 10609 / CIP 106738 / RCA14-39) OX= 451640 GN=queA PE=3 SV=1
MFMKGRFSFMDIELFDYNLPEELIAQTPLKKRDTSRLMVLDKETGNVEHKHFYDILDYLKPGDVLVRNNTKVIPARLYGLKEETGGHVEVLLLKDLHDDLWECLVGNAKIVKLGTVITFGDGRLKAQCTEIREEGIRIFKMIYDGIFYEILDQLGIMPLPPYIKEKLNDPDRYQTVYAKVEGSAAAPTAGLHFTEELLQKVREKGVEILDVTLHVGLGTFRPVKVENVLEHHMHSEYYEISEEVAEKLNQAKKEGRRIIAVGTTSCRTLEANHSKYGCFKAAHENTNIFIYPGYTFTGIDALITNFHLPKSTLVMLVSALAGREHILNAYKIAVNEKYRFFSFGDAMFIH

SEQ ID NO: 65059 - protein, 341 aa, Catenibacterium sp.
  REGION 1..341: note = tr|A0A373I5H4|A0A373I5H4_9FIRM S-adenosylmethionine:tRNA ribosyltransferase-isomerase; OS = Catenibacterium sp. AM22-15 OX=2292991 GN=queA PE=3 SV=1
MDIELFDYDLPEELIAQTPLKKRDTSRLMVLDKETGDVEHKHFYDILDYLKPGDVLVRNNTKVIPARLYGLKEETGGHVEVLLLEDLHDDLWECLVGNAKIVKLGTVITFGDGRLKAQCTEIREEGIRIFKMIYDGIFYEILDQLGIMPLPPYIKEKLNDPDRYQTVYAKVEGSAAAPTAGLHFTEELLQKVREKGVEILDVTLHVGLGTFRPVKVENVLEHHMHSEYYEISEEVAEKLNQAQKEGRRIIAVGTTSCRTLEANHSKYGCFKAAHENTNIFIYPGYTFTGIDALITNFHLPKSTLVMLVSALAGREHILNAYKIAVNEKYRFFSFGDAMFIH

SEQ ID NO: 65060 - protein, 348 aa, Catenibacterium sp.
  REGION 1..348: note = tr|R7GR38|R7GR38_9FIRM S-adenosylmethionine:tRNA ribosyltransferase-isomerase OS=Catenibacterium sp. CAG:290 OX=1262767 GN=queA PE=3 SV=1
MKGRFSFMDIELFDYDLPEELIAQTPLKKRDTSRLMVLDKETGNVEHKHFYDILDYLKPGDVLVRNNTKVIPARLYGLKEETGGHVEVLLLKDLHDDLWECLVGNAKIVKLGTVITFGDGRLKAQCTEIREEGIRIFKMIYDGIFYEILDQLGIMPLPPYIKEKLNDPDRYQTVYAKVEGSAAAPTAGLHFTEELLQKVREKGVEILDVTLHVGLGTFRPVKVENVLEHHMHSEYYEISEEVAEKLNQAKKEGRRIIAVGTTSCRTLEANHSKYGCFKATHENTNIFIYPGYTFTGIDALITNFHLPKSTLVMLVSALAGREHILNAYKIAVNEKYRFFSFGDAMFIH

SEQ ID NO: 65061 - protein, 347 aa, Catenovulum agarivorans
  REGION 1..347: note = tr|W7QTA5|W7QTA5_9ALTE S-adenosylmethionine:tRNA ribosyltransferase-isomerase OS=Catenovulum agarivorans DS-2 OX=1328313 GN=queA PE=3 SV=1
MRVSDFSFDLPDELIARYPAEKRSQSRLLVVDGDSGEIEHKVFNQMVDLVTDKDLIIFNNTKVIPARLLGQKVSGGKIEVLVERMLEGNQILAHVRANKALKPGTEVVLEQHIRAKMLERQDDLFVLQVLNEEPILSLLEQYGHMPLPPYIDRADEQTDKDRYQTVYGEVPGAVAAPTAGLHFDEALLAKIADKGVQVEYVTLHVGAGTFQSIRVDNVKDHQMHAEYIDVPQHVVDAVFACKQRGGRVIAVGTTSVRSLESAAQFANDALLAPYQGDTSIFIYPGYEFQVVDAMFTNFHLPESTLIMLVSAFAGQQHIKQAYKVAVEEKYRFFSYGDSMFLTKQTQK

SEQ ID NO: 65062 - protein, 354 aa, unidentified
  source 1..354: note = Catenovulum maritimum
  REGION 1..354: note = tr|A0A0J8JQM2|A0A0J8JQM2_9ALTE S-adenosylmethionine:tRNA ribosyltransferase-isomerase; OS = Catenovulum maritimum OX=1513271 GN=queA PE=3 SV=1
MRVSDFYFDLPDELIARFPAENRSESRLLSVDGNTGDLSHLVFNQMLDLVNENDLLIFNNTKVIPARLLGQKVTGGKIEVLVERILSDSQVLAHVRSNKALKPGAELILEDKIQLKMVERQNDLFILDVLNETPVLELLEAYGHMPLPPYIDRADTLSDKERYQTVYGQVPGAVAAPTAGLHFDNDLIEKIKAKGVNTAEVTLHVGAGTFQSIRVDDIKDHQMHSEQIFVDQAVVDKIKSCKAKGGRVIAVGTTSVRSLESAAKFAQENGLDDLIAAHQGDTNIFIYPGYKFKVVDAMFTNFHLPESTLIMLVSAFAGKENIHNAYQEAIKQKYRFFSYGDSMFLTKQTPSEQA

SEQ ID NO: 65063 - protein, 347 aa, Catenovulum sp.
  REGION 1..347: note = tr|A0A2S0VL64|A0A2S0VL64_9ALTE S-adenosylmethionine:tRNA ribosyltransferase-isomerase; OS = Catenovulum sp. CCB-QB4 OX=2172099 GN=queA PE=3 SV=1
MLVSDFHFDLPDELIARYPAPNRTDSRLLTLDGNSGEIQHKQFVDMLDLVSEKDLLIFNNTKVIPARLLGQKITGGKIEVLVERVLDEHNLLAHVRANKALKPGNQVVLEGVIQAEMMGREGDLFQLKILNEENVFDLLEQHGHMPLPPYIDRADENEDKNRYQTVYGTEKGAVAAPTAGLHFDESLLAKLKDKGVRCEFVTLHVGAGTFQSIRVDNVKEHTMHSEYAIVPQNVVDAIKQTKANGGRVIAVGTTSVRSLESAAQAAGDELISTFQDDTQIFIYPGYQFKVVDAMFTNFHLPESTLIMLVSAFAGKENILKAYNQAIAEKYRFFSYGDSMFLQRQTEK

SEQ ID NO: 65064 - protein, 385 aa, Catenulispora acidiphila
  REGION 1..385: note = tr|C7Q6M3|C7Q6M3_CATAD S-adenosylmethionine:tRNA ribosyltransferase-isomerase OS=Catenulispora acidiphila (strain DSM 44928 / NRRL B-24433 / NBRC 102108 / JCM 14897)OX=479433 GN=Caci_5199 PE=3 SV=1
MSIVLHEPSVVNAAVPSEESAIPPGPLGTGFRVSSDLLARKPAEARGLDRDGVRLLVARGRGADDPEVAHYVFSDLPDVLEPGDLLVVNNSGTLPAALDAVDPDSGTRVVLHVSTGTPQDPDAWIVELRRPMADGSTRPFALGPDSQDPDSPATPGLRLRVTGGATVTLLRPYTRRLWVARLDLGMSVADYLTRHGRAIRYDYVDRDWPITAYQTVFAAIPGSAEMPSAARPFSTDVVARLVAKGVYIAPITLHTGVASPEAHEKPYAEWYSVPEATAELVNHVRARGGRVIAIGTTAVRALESVADEEGTVHPGQGWTELIITPQRGVRAVDGLLTGFHEPEASHLLMLTAIAGPRLIRASYDAALAARYLWHEFGDVNLLLRR

SEQ ID NO: 65065 - protein, 341 aa, Catonella morbi
  REGION 1..341: note = tr|V2Y943|V2Y943_9FIRM S-adenosylmethionine:tRNA ribosyltransferase-isomerase OS=Catonella morbi ATCC 51271; OX = 592026 GN=queA PE=3 SV=1
MKTSDFFYELPEELIAQDPLEDRTASRLLVLDRKTDKLEHKIFSDVIDYLNPGDCLVINNTRVIPARLIGEKEGTGGKVEILLLKRRENDIWESLVKPGKKLRPGARVTFGDGRLKAEILEIAEEGNRLVKFYYEGIFEEILDSLGEMPLPPYITHKLEDKEMYQTVYAKFDGSAAAPTAGLHFTNELLEKIRHKGVRIASITLHVGLGTFRPVKVEDVNNHHMHTEWYEVNKEAADIINETKKNGGRVICVGTTSCRTIESVADENGLMSAKTGETDIFIYPGYKFKVMDGLITNFHLPESTLVMLVSAFAGKERVLSAYETAVKEIYRFFSFGDAMILI

SEQ ID NO: 65066 - protein, 370 aa, unidentified
  source 1..370: note = Caulobacter flavus
  REGION 1..370: note = tr|A0A2N5D374|A0A2N5D374_9CAUL S-adenosylmethionine:tRNA ribosyltransferase-isomerase; OS = Caulobacter flavus OX=1679497 GN=queA PE=3 SV=1
MRLSDFDFDLPDDSIALRPAEPRDSARFLVVRPGQALEDRIVRDLPDFLRPGDALVFNDTRVIPARLSGLREGRTTGGADGTPVAVEATLHRRIAPNRWSAFMRPGKRLKVGDRVAFAAISSTPCEAERLDATVVEKHEGGEVVLAFDLSGPDLDIGIARHGMMPLPPYIAAKRAEDDRDRADYQTVYAREDGSVAAPTAGLHFTPDLLEALKAKGVSLHFVTLHVGAGTFLPVKTDEVSEHKMHAEFGEVSEETADALNAVHAAGGRIVCVGTTSLRLIESATGEDGVVRPFADETAIFITPGYRFRAVDVLMTNFHLPKSTLFMLVSAFAGRAKMREAYEHAISTGYRFYSYGDGSLLFRADPETETV

SEQ ID NO: 65067 - protein, 362 aa, Caulobacter henricii
  REGION 1..362: note = tr|A0A0N7JHF7|A0A0N7JHF7_9CAUL S-adenosylmethionine:tRNA ribosyltransferase-isomerase; OS = Caulobacter henricii OX=69395 GN=queA PE=3 SV=1
MRLSDFDFVLPEDNIALRPAEPRDSARLLVVRPGEDIADQIVRELPDILRPGDALVFNDTRVIPARLAGLRDARTTGGGDGAPVPVEATLHQRIAPDRWKAFMRPGKRLKVGDHVAFGSDEHRLDATVLEKHEGGEVLLAFDLTGPELDVGIARHGEMPLPPYIAAKRAEDDRDRADYQTVYAREDGSVAAPTAGLHFTPDLLERLRARGVSLHFVTLHVGAGTFLPVKTDEVSEHRMHAEYGEVTAAIADALNAVRAAGGRIVCVGTTSLRLLESATGEDRVIRPFADETAIFITPGYRFRAADVLMTNFHLPKSTLFMLVSAFAGQTTMRAAYERAIATGYRFYSYGDSSLLFPADPAET

SEQ ID NO: 65068 - protein, 363 aa, Caulobacter mirabilis
  REGION 1..363: note = tr|A0A2D2B455|A0A2D2B455_9CAUL S-adenosylmethionine:tRNA ribosyltransferase-isomerase; OS = Caulobacter mirabilis OX=69666 GN=queA PE=3 SV=1
MRLSDFDFDLSEDLIALRPATPRESAKLLAVRPGAPLEDLTVGDLPSLLRAGDALVFNDTRVIPARLDGLREGRSEGGGDGSPVAVEATLHKRLAPSRWSAFMRPGKRLKVGDRVRFGASEDRACDLTHLDATVAEKGEGGEVVLAFDLSGPDLDIAINTRGHMPLPPYIAAKRGEDEQDRTDYQTVYAREDGSVAAPTAGLHFTPELLQALADKGVSQHFVTLHVGAGTFLPVKVDDVAEHRMHPEYGEVSAEVADALNGVRANGGRIVCVGTTSLRLLESATGEDGVVRAWADETAIFITPGYRFRAADLLMTNFHLPKSTLFMLVSAFAGQAKMREAYAHAIATEYRFYSYGDSSLLFRA

SEQ ID NO: 65069 - protein, 368 aa, unidentified
  source 1..368: note = Caulobacter radicis
  REGION 1..368: note = tr|A0A2T9K526|A0A2T9K526_9CAUL S-adenosylmethionine:tRNA ribosyltransferase-isomerase; OS = Caulobacter radicis OX=2172650 GN=queA PE=3 SV=1
MRLSDFDFHLPDDSIALRPAEPRDSARFLVVRPGQDLEDRIVRELPDFLRPGDALVFNDTRVIPARLSGLREGRTTGGGDGAPVAVEATLHRRIAPDRWSAFMRPGKRLKAGDRVAFAAEGSVACEAERLDATVVEKHEGGEVVLAFDLSGPDLDIGIARHGMMPLPPYIAAKRAEDDRDRADYQTVYAREDGSVAAPTAGLHFTPDLLEALKAKGVSLHFVTLHVGAGTFLPVKTDEVSEHKMHAEFGEVSAQTADALNAVHAAGGRIVCVGTTSLRLIESATGEDGVVRPFADETAIFITPGYRFRAVDVLMTNFHLPKSTLFMLVSAFAGRATMRAAYEHAISTGYRFYSYGDGSLLFRADTETV

SEQ ID NO: 65070 - protein, 368 aa, unidentified
  source 1..368: note = Caulobacter radicis
  REGION 1..368: note = tr|A0A2T9JFK5|A0A2T9JFK5_9CAUL S-adenosylmethionine:tRNA ribosyltransferase-isomerase; OS = Caulobacter radicis OX=2172650 GN=queA PE=3 SV=1
MRLSDFDFDLPDDSIALRPAEPRDSARFLVVRPGQALDDRIVRDLPDFLSPGDALVFNDTRVIPARLSGLREGRTTGGADGTPVAVEATLHRRMAPDRWSAFMRPGKRLKAGDRVAFAAQGSVACEAERLDATVVEKHEGGEVVLAFDLSGPDLDIGIARHGMMPLPPYIAAKRAEDDRDRADYQTVYAREDGSVAAPTAGLHFTPDLLEALKAKGVSLHFVTLHVGAGTFLPVKTDEVSEHKMHAEFGEVSAQTADALNAVHVAGGRIVCVGTTSLRLIESATGEDGVVRPFADETAIFITPGYRFRAVDVLMTNFHLPKSTLFMLVSAFAGRKTMRGAYEHAISTGYRFYSYGDGSLLFRAETETV

SEQ ID NO: 65071 - protein, 373 aa, unidentified
  source 1..373: note = Caulobacter rhizosphaerae
  REGION 1..373: note = tr|A0A561MWF1|A0A561MWF1_9CAUL S-adenosylmethionine:tRNA ribosyltransferase-isomerase; OS = Caulobacter rhizosphaerae OX=2010972 GN=queA PE=3 SV=1
MRLSDFDFLLPDEAIALRPAEPRDSARLLVVKPGEGLEDRVVRDLPDFLRPGDALVFNDTRVIPARLMGRRAARETGGGDGSSVAVEATLHRRVAPDRWVAFMRPGKRLKEGDRIAFGHDSDRACMAGLLDATVVAKHEGGEIELAFDFAGVDLDLAVAAHGEMPLPPYIAAKRAEDERDRADYQTVYAREDGSVAAPTAGLHFTPDLLQRLKARGVSLHFVTLHVGAGTFLPVKTEVIAEHRMHAEFGEVPAAVADALNAARAAGGRIVCVGTTSLRLLESATGEDGVIRPFADETAIFITPGYRFRAADVLMTNFHLPKSTLFMLVSAFAGRATMKAAYEHAIATGYRFYSYGDGSLLFRAPTHENGPEQA

SEQ ID NO: 65072 - protein, 368 aa, Caulobacter segnis
  REGION 1..368: note = tr|D5VKP4|D5VKP4_CAUST S-adenosylmethionine:tRNA ribosyltransferase-isomerase OS=Caulobacter segnis (strain ATCC 21756 / DSM 7131 / JCM 7823 / NBRC 15250 / LMG 17158/ TK0059) OX=509190 GN=queA PE=3 SV=1
MHLSDFDFDLPEDRIALRPAEPRDAARLLVVRPGQPLADHVVRELPDFLQPGDAMVFNDTRVIPARLSGLREGRTTGGADGTPVAVEATLHRRLTPDRWSAFMRPGKRLKVGDRVAFGGRDDRACALDRLDATVAEKHEGGEVVLAFDLSGPDLDVGIARHGDMPLPPYIAAKRGEDERDRADYQTVYAREDGSVAAPTAGLHFTPSLLEALKAKGVSTHFVTLHVGAGTFLPVKTDDVSEHKMHAEYGQVTREVADALNAARAAGGRIICVGTTSLRLLESATGEDGVVKPFADETAIFITPGYRFRAADILMTNFHLPKSTLFMLVSAFAGRETMRAAYEHAISTGYRFYSYGDGSLLFRAEPESR

SEQ ID NO: 65073 - protein, 368 aa, Caulobacter segnis
  REGION 1..368: note = tr|A0A2W5UX85|A0A2W5UX85_9CAUL S-adenosylmethionine:tRNA ribosyltransferase-isomerase; OS = Caulobacter segnis OX=88688 GN=queA PE=3 SV=1
MRLSDFDFDLPEDRIALRPAEPRDAARLLVVSPGQGLADHVVRDLPDFLRPGDAMVFNDTRVIPARLSGLREGRTTGGADGTPVAVEATLHRRVAPDRWSAFMRPGKRLKVGDRVAFGARDDCACEADRLDATVAEKHEGGEVVLTFDLSGPDLDLGVARHGDMPLPPYIAAKRGEDERDRADYQTVYAREDGSVAAPTAGLHFTPDLLDALKAKGVSTHFVTLHVGAGTFLPVKTDDVSEHKMHAEYGQVTREVADALNAARAAGGRIVCVGTTSLRLLESATGEDGVVAPFADETAIFITPGYRFRAADVLMTNFHLPKSTLFMLVSAFAGRETMRAAYEHAISTGYRFYSYGDGSLLFRAEPESR

SEQ ID NO: 65074 - protein, 373 aa, Caulobacter sp.
  REGION 1..373: note = sp|B0T8H5|QUEA_CAUSK S-adenosylmethionine:tRNA ribosyltransferase-isomerase OS=Caulobacter sp. (strain K31) OX=366602 GN=queA PE=3 SV=1
MRLSDFDFHLPDAAIALRPAEPRDSARLLVVRPGEGLEDRIVRDLPDFLRPGDALVFNDTRVIPARLMGRRAGRETGGGDGSPVAVEATLHRRIAPDRWVAFMRPGKRLKEGDRIAFGHDQDRACQAGMLDATVIAKHEGGEIELAFDFAGVDLDLAVAAHGEMPLPPYIAAKRAEDDRDRADYQTVYAREDGSVAAPTAGLHFTSDLLERLKAGGVSLHFVTLHVGAGTFLPVKTDVVADHKMHAEFGEVPAAVADALNAARAAGGRIVCVGTTSLRLLESATGEDRIIKPFADETAIFITPGYRFRAADVLMTNFHLPKSTLFMLVSAFAGQATMKAAYEHAIAAGYRFYSYGDGSLLFRAATDENGSEQS

SEQ ID NO: 65075 - protein, 372 aa, Caulobacter sp.
  REGION 1..372: note = tr|A0A4R3H8Q0|A0A4R3H8Q0_9CAUL S-adenosylmethionine:tRNA ribosyltransferase-isomerase; OS = Caulobacter sp. BK020 OX=2512117 GN=queA PE=3 SV=1
MRLSDFDFHLPDEAIALRPAEPRDSARLLVVRPGAQGAGGLEDRIVRELPDFLRPGDALVFNDTRVIPARLMGLRAGRETGGGDGSPVAVEATLHRRVAPDRWIAFMRPGKRLKVGDRIAFGHDADRAGLAGLLDATVAAKHEGGEIELAFDFAGVDLDLAVAAHGEMPLPPYIAAKRAEDDRDRADYQTVYAREDGSVAAPTAGLHFTPDLMERLKARGVSLHFVTLHVGAGTFLPVKTDVIAEHRMHAEFGEVPAAVADALNAVRAAGGRVVCVGTTSLRLLESATGQDGVIKPFADETAIFITPGYRFRAADVLMTNFHLPKSTLFMLVSAFAGQATMKAAYAHAIATGYRFYSYGDGSLLFRADPEQA

SEQ ID NO: 65076 - protein, 366 aa, Caulobacter vibrioides
  REGION 1..366: note = sp|Q9A7Y2|QUEA_CAUVC S-adenosylmethionine:tRNA ribosyltransferase-isomerase OS=Caulobacter vibrioides (strain ATCC 19089 / CB15) OX=190650 GN=queA PE=3 SV=1
MRLSDFDFDLPEDRIALRPAEPRDSARFLVVRPGQAVADHIVSDLPDFLRPGDALVFNDTRVIPARLSGLREGRTTGGADGTPVAVEATLHRRLAPDRWSAFMRPGKRLKVGDRVAFGGHEGRVGDLGRLDAVIAEKHDGGEVVLAFDLSGPDLDVGIAQHGDMPLPPYIAAKRGEDERDRADYQTVYAREDGSVAAPTAGLHFTPQLLERLKAKGVSLHFVTLHVGAGTFLPVKTDEVSEHRMHAEYGQVTQEIADALNAARAAGGRIVCVGTTSLRLLESATGEDGIVRPFADETAIFITPGYRFRTADVLMTNFHLPKSTLFMLVSAFAGTEAMRAAYEHAIATGYRFYSYGDSSLLFKDETC

SEQ ID NO: 65077 - protein, 364 aa, Caulobacter vibrioides
  REGION 1..364: note = tr|A0A290MHY3|A0A290MHY3_CAUVI S-adenosylmethionine:tRNA ribosyltransferase-isomerase; OS = Caulobacter vibrioides OX=155892 GN=queA PE=3 SV=1
MRLSDFDFDLPEDRIALRPAEPRHAARFLVVRAGQPLADHVVSDLPDFLRPGDALVFNDTRVIPARLAGLREGRSTGGANGTPVAVEATLHRRLAPDRWSAFMRPGKRLKVGDRVAFGAREDRDLDRLDAVIAEKHEGGEVVLAFDLSGPELDIGIAQHGDMPLPPYIAAKRGEDERDRADYQTVYAREDGSVAAPTAGLHFTPELLERLKAKGVSLHFVTLHVGAGTFLPVKTNDVSEHKMHAEYGQVTQEIADALNAVRAAGGRIVCVGTTSLRLLESATGEDGVVRPFADETAIFITPGYRFRAADVLMTNFHLPKSTLFMLVCAFAGTATMREAYAYAIETGYRFYSYGDSSLLFKDETR

SEQ ID NO: 65078 - protein, 368 aa, unidentified
  source 1..368: note = Caulobacter zeae
  REGION 1..368: note = tr|A0A2N5DQK2|A0A2N5DQK2_9CAUL S-adenosylmethionine:tRNA ribosyltransferase-isomerase; OS = Caulobacter zeae OX=2055137 GN=queA PE=3 SV=1
MRLSDFDFHLPDDNIALRPAEPRDSARFLVVRPGQDLEDHIVRELPDFLRAGDALVFNDTRVIPARLSGLREGRTTGGADGTPVAVEATLHRRIAPDRWSAFMRPGKRLKAGDRVAFAAEGSVACEAERLDATVVEKHEGGEVVLAFDLSGPDLDIGIARHGMMPLPPYIAAKRAEDDRDRADYQTVYAREDGSVAAPTAGLHFTPDLLEALKAKDVSLHFVTLHVGAGTFLPVKTDEVSEHKMHAEFGEVSQETADALNAVHAAGGRIVCVGTTSLRLIESATGEDGVVRPFADETAIFITPGYRFRAVDVLMTNFHLPKSTLFMLVSAFAGRKTMRAAYEHAISTGYRFYSYGDGSLLFRAETETV

SEQ ID NO: 65079 - protein, 214 aa, unidentified
  source 1..214: note = Caulobacteraceae bacterium
  REGION 1..214: note = tr|A0A4Q3TV91|A0A4Q3TV91_9CAUL S-adenosylmethionine:tRNA ribosyltransferase-isomerase (Fragment) OS=Caulobacteraceae bacterium OX=1978230; GN = queA PE=3 SV=1
GAALDAAIGAVGVMPLPPYIAAKRPQDDRDRSDYQTVYAREEGSVAAPTAGLHFTPDLLQRLADHGVGLHTVTLHVGAGTFLPVKVDDVADHRMHPEYGEVSAGTAQALNAVRRSGGRIVCVGTTSLRLLESAADEDGAIQAFAAETSIFITPGYRFKTADMLMTNFHLPKSTLFMLVSAFAGQERMRRAYGHAIADGYRFYSYGDACLLFRAP

SEQ ID NO: 65080 - protein, 357 aa, unidentified
  source 1..357: note = Caulobacteraceae bacterium
  REGION 1..357: note = tr|A0A4Q3STV2|A0A4Q3STV2_9CAUL S-adenosylmethionine:tRNA ribosyltransferase-isomerase; OS = Caulobacteraceae bacterium OX=1978230 GN=queA PE=3 SV=1
MQLADFDFELPEDRIALRPVSPRDAARLLLVRPGEPLADLTVADLPSQLRAGDVLVLNDTRVIPARLKGRRVREGSDIAVEATLHRRLSPSQWTAFMRPGKKLAPGDRVRFGSMEDRACFLGELDATVVEKGEGGEVTLSFDLSGPDLDASIAERGAMPLPPYIAAKRGEDAQDRADYQTVYADEEGSVAAPTAGLHFTPELLARLTAMGVTLHFVTLHVGAGTFLPVKTENLAEHRMHAEYGEVDTQTADALNAAKAAGGRIVCVGTTSLRLVESATGEDGVVRPFAQETAIFITPGYRFRAADGLMTNFHLPKSTLFMLVSAFAGYETMRGAYAHAIADGYRFYSYGDASLLWRA

SEQ ID NO: 65081 - protein, 347 aa, unidentified
  source 1..347: note = Caulobacterales bacterium
  REGION 1..347: note = tr|A0A258CDM8|A0A258CDM8_9PROT S-adenosylmethionine:tRNA ribosyltransferase-isomerase (Fragment) OS=Caulobacterales bacterium 32-67-6 OX=1970502; GN = B7Z13_06685 PE=3SV=1
MKTADFDFDLPDSAIALRPAQPRDAARMLRVIPGQPLADLQVRDLPGELRAGDILVLNDTRVIPARLSGRRTRGESVVAVEATLHKRIAPDRWSAFMRPGKRLAPGDRVSFGESEDRACLLGALDATVVEKGEGGEILLAFDLAGPALDEAIKARGAMPLPPYIAAKRPEDDRDQTDYQTVYAQADGSVAAPTAGLHFTPELLARLTEAGVETCFVTLHVGAGTFLPVKVDDIEGHRMHAEFGEVSPETAERLNKARAAGGRIICVGTTSLRLVESAAGEDGVVRPFADDTAIFITPGYRFRAADGLMTNFHLPHSTLFMLVSAFSGLETMRAAYAHAIETGYRFYS

SEQ ID NO: 65082 - protein, 368 aa, unidentified
  source 1..368: note = Caulobacterales bacterium
  REGION 1..368: note = tr|A0A1F8I518|A0A1F8I518_9PROT S-adenosylmethionine:tRNA ribosyltransferase-isomerase; OS = Caulobacterales bacterium RIFCSPHIGHO2_01_FULL_70_19; OX = 1797585 GN=queA PE=3SV=1
MKTADFDFDLPEDRIALRPAEPRDSARLLVVRPGAGLEDRVVRDLPDFLRPGDALVFNDTRVIPARLSGVRQRPGPEGETLSVVVEATLHHRDAPDVWSAFMKPGKRIKAGDRIRFGAPSSGLLGDAACQLGRLDATVEARGEDGLVLLRFDLSGPFLDEAIRDVGVMPLPPYIAARRPEDERDRTDYQTVFAEHDGSVAAPTAGLHFTPGLLDAIRARGVSTHAVTLHVGAGTFLPVKAEDVAGHRMHSEWGEVSAETAAALNAVRAAGGRIVCVGTTSLRLLESAAGEDGVIHPFHGDTAIFITPGYRFRAADVLMTNFHLPKSTLFMLVSAFSGLETMKAAYAHAVQTGYRFYSYGDGSLLFRAA

SEQ ID NO: 65083 - protein, 357 aa, unidentified
  source 1..357: note = Caviibacterium pharyngocola
  REGION 1..357: note = tr|A0A2M8RT79|A0A2M8RT79_9PAST S-adenosylmethionine:tRNA ribosyltransferase-isomerase; OS = Caviibacterium pharyngocola OX=28159 GN=queA PE=3 SV=1
MRVSDFYFHLPDELIARYPKADRTSSRLLQLNGKNGEISHRTFADVVDLINEGDLLIFNNTRVIPARMFGHKASGGKIEVLVERVLDEHCCLAHIRSSKSPKEGAELVLGEDKLGEGKGVKMIMRARHESLFELELCNKSTALLEVLQQIGHIPLPPYIDRPDEDADKERYQTVYNKVPGAVAAPTAGLHFDNELLAKLKAKGVEFAFVTLHVGAGTFQPVRVENIEDHKMHAEYVEVPQEVVEAILRTKAAGKRVIAVGTTSVRSVESAALFAEENGKTQLLEPYFSDTSIFIYPGKKFRVIDCLITNFHLPESTLIMLVSAFAGFEHTMKAYKSAVENRYRFFSYGDAMFIEKAE

SEQ ID NO: 65084 - protein, 408 aa, unidentified
  source 1..408: note = Cecembia calidifontis
  REGION 1..408: note = tr|A0A4Q7PEE6|A0A4Q7PEE6_9BACT S-adenosylmethionine:tRNA ribosyltransferase-isomerase; OS = Cecembia calidifontis OX=1187080 GN=queA PE=3 SV=1
MFKISSIEEIRLSDYEYNLPDERIAKFPLEKRDHSKLLQFSDGRISHHRFFELPELLPTGSLMAFNNTKVIPARLIFQRETGAKVEIFLLKPVAPSTIINEVMIRTDEVSWETMIGNLKKWKDGEELHGQIEIQGQPVVISAKLMDREKKVVSFSWTGENIPFVSIVEASGEVPLPPYLNREATEEDRPRYQTVYSKKEGAVAAPTAGLHFTDEVLENLEKKGVNKEFLTLHVSAGTFQPIKSEKVTDHAMHSEQVVIELSTLERLAAHPEKIIAVGTTSMRTLESLYWYGVRLIKEGDKQFFIPKLYPYEHEGYLLPGRTESFKAVLDLMNKNNLKEITGSTEIFIMPGYDFQVCDALITNFHQPSSTLILLVAAFTDGNWRQIYEEALNQDYRFLSYGDSSLLWRR

SEQ ID NO: 65085 - protein, 349 aa, unidentified
  source 1..349: note = Cecembia calidifontis
  REGION 1..349: note = tr|A0A4Q7P8E7|A0A4Q7P8E7_9BACT S-adenosylmethionine:tRNA ribosyltransferase-isomerase; OS = Cecembia calidifontis OX=1187080 GN=queA PE=3 SV=1
MKLSDFKFDLPKKLISLYPTENRDESRLMVVHKKTGEIEHRVFKDIIEYFGDGDVFVMNDTKVFPARLYGNKEKTGAKIEVFLLRELNADLRLWDVLVDPARKIRVGNKLYFGDSDLVAEVIDNTTSRGRTIRFLFDGTDEEFYKTIDSLGETPLLKEYIERKVEPEDRDRYQTIFAKNVGAVAAPTAGLHFTPHLLKRLELKGVEITPITLHVGLGTFRQVDVEDLTKHKMDSENYNIPEKTVELVNQALDNKKRVVAVGTTTLKTIESSVTANGRLKVSSGWTDKFIIPPYDFKIANALITNFHLPESTLLMTAAAFGGYDLIMRAYKEAVKEKYRFFSYGDAMLIL

SEQ ID NO: 65086 - protein, 408 aa, unidentified
  source 1..408: note = Cecembia lonarensis
  REGION 1..408: note = tr|K1LF71|K1LF71_9BACT S-adenosylmethionine:tRNA ribosyltransferase-isomerase OS=Cecembia lonarensis LW9; OX = 1225176 GN=queA_1 PE=3 SV=1
MLKYPSIEDIRLSDYEYILPEQRIAKFPLEKRDHSKLLHFHSGQISHQHFYELPQLLPSGSLMVFNNTKVIPARLIFQRETGAKIEIFLLKPLAPSTIINEIMIQTQEVTWEVMIGNLKKWKGEEVLQGEVFIQGKPCVISAKLLNRDQKTVSFSWTGEDIPFVSIVEASGEVPLPPYLNREATDEDKPRYQTVYSKKEGAVAAPTAGLHFTDTVLEELANKGIHKEFLTLHVSAGTFQPIKEEKVTEHPMHSEQVVVQMETVKRLAQHMEKVIAVGTTSMRSLESLYWYGVKLLLDQDQQFFIPKLYPYKHELKILPSRSESFQAVEDFMDGKGLKEITGSTEIFIMPGYDFKVCDGLVTNFHQPSSTLILLVAAYTGKDWRKIYQEALKNDYRFLSYGDSSLLWKQ

SEQ ID NO: 65087 - protein, 349 aa, unidentified
  source 1..349: note = Cecembia lonarensis
  REGION 1..349: note = tr|K1LVT1|K1LVT1_9BACT S-adenosylmethionine:tRNA ribosyltransferase-isomerase OS=Cecembia lonarensis LW9; OX = 1225176 GN=queA_2 PE=3 SV=1
MKLSDFKLDVPKKLISLYPTDNRDESRLMVVHRKTGEIEHRLFKDIIEYFGEGDVFVMNDTKVFPARLYGNKEKTGAKIEVFLLRELNPDLRLWDVLVDPARKIRVGNKLYFGDSDLVAEVIDNTTSRGRTIRFLFDGSDEEFYKTIDTLGETPLLKEFIERKVEPEDRERYQTIFAKNVGAVAAPTAGLHFTPHLLKRLELKGVSVSPITLHVGLGTFRQVDVEDLTKHKMDSENYDIPERTVELVNEALDNKKRVVAVGTTTLKTVESSVTANGRLKLSSGWTDKFIIPPYEFKIANSLITNFHLPESTLLMTAAAFGGYDLIMKAYKEAVKEKYRFFSYGDAMLIL

SEQ ID NO: 65088 - protein, 408 aa, unidentified
  source 1..408: note = Cecembia rubra
  REGION 1..408: note = tr|A0A2P8ECK1|A0A2P8ECK1_9BACT S-adenosylmethionine:tRNA ribosyltransferase-isomerase; OS = Cecembia rubra OX=1485585 GN=queA PE=3 SV=1
MFKISSIEEIRLSDYDYTLPEERIAKFPLEKRDHSKLLQYLNGDVSHHRFFELPDLLPSGSLMVFNNTKVIPARLIFQRDTGAKIEIFLLKPLAPSPVINEVMICTDEVSWETMIGNLKKWKDGEVLQGQIDIQGQSIIISAKLTDRENKVVSFSWTGDNIPFVSIVEASGEVPLPPYLNREATEEDRPRYQTVYSKKEGAVAAPTAGLHFTEEVLDNLENKGVNKEFLTLHVSAGTFQPIKSEKVTDHAMHSEQVVIELSTLERLAAHPEKIIAVGTTSMRTLESLYWYGVKLIRGGDKQFFIPKLYPYEHKAYNLPERTESFKAVLEMMKKSNLKEITGSTEVFIMPGYDFKVCDALVTNFHQPSSTLILLVAAFTEGNWRKIYEEALSNDYRFLSYGDSSLLWKR

SEQ ID NO: 65089 - protein, 349 aa, unidentified
  source 1..349: note = Cecembia rubra
  REGION 1..349: note = tr|A0A2P8E609|A0A2P8E609_9BACT S-adenosylmethionine:tRNA ribosyltransferase-isomerase; OS = Cecembia rubra OX=1485585 GN=queA PE=3 SV=1
MKLSDFKFDFPKKLISLYPTDNRDESRLMVVHRKTGEIEHRTFKDIIEYFGDGDVFVMNDTKVFPARLYGNKEKTGAKIEVFLLRELNADLRLWDVLVDPARKIRVGNKLYFGDSDLVAEVIDNTTSRGRTIRFLFDGTDEEFYKTIDSLGETPILKEYIERKVEPEDRERYQTIFAKNVGAVAAPTAGLHFTPHLLKRLELKGVSISPVTLHVGLGTFRQVDVEDLTKHKMDSENYDIPEKTVELVNEALDNKRRVVAVGTTTLKTIESSVTANGRLKVSNGWTDKFIIPPYDFKIANALITNFHLPESTLLMTAAAFGGYDLIMKAYKEAVKEKYRFFSYGDAMLIL

SEQ ID NO: 65090 - protein, 272 aa, Cedecea davisae
  REGION 1..272: note = tr|S3JFX2|S3JFX2_9ENTR S-adenosylmethionine:tRNA ribosyltransferase-isomerase OS=Cedecea davisae DSM 4568; OX = 566551 GN=HMPREF0201_00815 PE=3 SV=1
MLDDKRILAHIRASKAPKPGAELLLGDDESVHATMTARHDALFEVEFNDERSVLDILNSIGHMPLPPYIDRPDEESDRELYQTVYSQKPGAVAAPTAGLHFDEPLLEKLRNKGIDMAFVTLHVGAGTFQPVRVDSIEDHIMHSEYAEVPQDVVDAVLACKARGNRVIAVGTTSVRSLESAAQAATNGLIEPFFGDTQIFIYPGYKYNVIDALVTNFHLPESTLIMLVSAFAGYKNTLHAYHEAVKAEYRFFSYGDAMFITCNPQAINERPGE

SEQ ID NO: 65091 - protein, 356 aa, Cedecea lapagei
  REGION 1..356: note = tr|A0A3S4IG34|A0A3S4IG34_9ENTR S-adenosylmethionine:tRNA ribosyltransferase-isomerase; OS = Cedecea lapagei OX=158823 GN=queA PE=3 SV=1
MRVADFSFELPESLIAHYPQAERSSCRLLSLDGPTGALTHGTFTDLLDKLNPGDLLVFNNTRVIPARLFGRKASGGKIEVLVERMLDDKRILAHIRASKAPKPGAELLLGDDESVHATMVARHDALFEVEFNDERAVLDILNNIGHMPLPPYIDRPDEEADRELYQTVYSQKPGAVAAPTAGLHFDEPLLEKLRNKGVDMAFVTLHVGAGTFQPVRVDSIEDHIMHSEYAEVPQDVVDAVLACKARGNRVIAVGTTSVRSLESAAQAAKNDLIEPFFGDTQIFIYPGYQYNVIDALVTNFHLPESTLIMLVSAFAGYKNTLHAYHEAVKAEYRFFSYGDAMFITCNPQAINERPGE

SEQ ID NO: 65092 - protein, 356 aa, Cedecea lapagei
  REGION 1..356: note = tr|A0A2N0CM89|A0A2N0CM89_9ENTR S-adenosylmethionine:tRNA ribosyltransferase-isomerase; OS = Cedecea lapagei OX=158823 GN=queA PE=3 SV=1
MRVADFSFELPESLIAHYPQPERSGCRLLSLDGPTGALTHGTFTDLLDKLNPGDLLVFNNTRVIPARLFGRKASGGKIEVLVERMLDDKRILAHIRASKAPKPGAELLLGDDESINATMTARHGALFEVEFNDERPVLDILNAIGHMPLPPYIDRPDEDADRELYQTVYSEKPGAVAAPTAGLHFDEPLLEKLREKGIEMAFVTLHVGAGTFQPVRVDSIEDHIMHSEYAEVPQEVVDAVLAAKARNNRVIAVGTTSVRSLESAAQAAKTDLIEPFFGDTQIFIYPGYQYKVIDALVTNFHLPESTLIMLVSAFAGYQNTMNAYKAAVEQNYRFFSYGDAMFITYNPQALNERVGD

SEQ ID NO: 65093 - protein, 356 aa, Cedecea neteri
  REGION 1..356: note = tr|A0A089RD71|A0A089RD71_9ENTR S-adenosylmethionine:tRNA ribosyltransferase-isomerase; OS = Cedecea neteri OX=158822 GN=queA PE=3 SV=1
MRVADFSFELPESLIAHYPQAERSSCRLLSLDGPTGALTHGTFTDLLDKLNPGDLLVFNNTRVIPARLFGRKASGGKIEVLVERMLDDKRILAHIRASKAPKPGAELLLGDDESVHATMVARHDALFEVEFNDERAVLDILNSIGHMPLPPYIDRPDEEADRELYQTVYSQKPGAVAAPTAGLHFDEPLLEKLRNKGIDMAFVTLHVGAGTFQPVRVDSIEDHIMHSEYAEVPQDVVDAVLACKARGNRVIAVGTTSVRSLESAAQASKNDPIEPFFGDTQIFIYPGYQYKVVDALVTNFHLPESTLIMLVSAFAGYKNTMHAYHEAVKAEYRFFSYGDAMFITCNPQAINERPGE

SEQ ID NO: 65094 - protein, 183 aa, Cedecea neteri
  REGION 1..183: note = tr|A0A2X2SYF5|A0A2X2SYF5_9ENTR S-adenosylmethionine:tRNA ribosyltransferase-isomerase; OS = Cedecea neteri OX=158822 GN=queA_1 PE=3 SV=1
MPLPRQRRACHFDEPLLEKLRNKGIDMAFVTLHVGAGTFQPVRVDSIEDHIMHSEYAEVPQDVVDAVLACKARGNRVIAVGTTSVRSLESAAQASKNDLIEPFFGDTQIFIYPGYQYKVIDALVTNFHLPESTLIMLVSAFAGYKNTMHAYHEAVKAEYRFFSYGDAMFITCNPQAINERPGE

SEQ ID NO: 65095 - protein, 356 aa, Cedecea sp.
  REGION 1..356: note = tr|A0A1X7J245|A0A1X7J245_9ENTR S-adenosylmethionine:tRNA ribosyltransferase-isomerase; OS = Cedecea sp. NFIX57 OX=1566286 GN=queA PE=3 SV=1
MRVADFSFELPESLIAHYPQAERSSCRLLSLDGPTGALTHGTFTDLLDKLNPGDLLVFNNTRVIPARLFGRKASGGKIEVLVERMLDDKRILAHIRASKAPKPGAELLLGDDESVHATMVARHDALFEVEFNDERAVLDILNNIGHMPLPPYIDRPDEEADRELYQTVYSQKPGAVAAPTAGLHFDEPLLEKLRNKGVDMAFVTLHVGAGTFQPVRVDSIEDHIMHSEYAEVPQDVVDAVLACKARGNRVIAVGTTSVRSLESAAQAAKNDLIEPFFGDTQIFIYPGYQYKVIDALVTNFHLPESTLIMLVSAFAGYKNTMHAYHEAVKAEYRFFSYGDAMFITCNPQAINERPGA

SEQ ID NO: 65096 - protein, 362 aa, Celeribacter baekdonensis
  REGION 1..362: note = tr|A0A2R4M0A0|A0A2R4M0A0_9RHOB S-adenosylmethionine:tRNA ribosyltransferase-isomerase; OS = Celeribacter baekdonensis OX=875171 GN=queA PE=3 SV=1
MKLSDFDFDLPEALIATRPAKPRSSARLLVATPDTITDGHVTDLLDWLQPGDRLVLNDTKVLPARLTGKRGRDTAQGYQEAKIEVTLLEPQAEAGHGGMVWRALIKPLKKIKEGEEVRFSDDLSATLIAKEDGEAMVAFNLSGADFDKALAEAGSMPLPPYIEAKRKADAQDKEDYQTVWARNMGAVAAPTASLHFDEPLLKALAEKGVEFTYVTLHVGAGTFLPVKVDNVDDHKMHSEWGEVSEGAAIEINTTKQRGGRVIPVGTTALRLIESAAPAPGVIAPFLGETDIFIKPGYPFRVTDALMTNFHLPKSTLLMLVAALMGRERMRAVYEHAVAEGYRFFSYGDASLLLPQKDRGCEV

SEQ ID NO: 65097 - protein, 357 aa, Celeribacter baekdonensis
  REGION 1..357: note = tr|K2JQV3|K2JQV3_9RHOB S-adenosylmethionine:tRNA ribosyltransferase-isomerase OS=Celeribacter baekdonensis B30 OX=1208323 GN=queA PE=3 SV=1
MKLSDFDFDLPEALIATRPAKPRSSARLLVATPDSITDGHVTDLLQWLQPGDRLVLNDTKVLPARLTGKRGRDTAQGYQEAKIEVTLLEPQAEAGHGGMIWRALIKPLKKIKEGEVVRFSDELSATLVAKDDGEAIVAFNLKGEDFDAALAAAGSMPLPPYIEAKRKADAQDKEDYQTVWARNMGAVAAPTASLHFDEPLLQALAQKGVEFTYVTLHVGAGTFLPVKVDNVEDHKMHAEWGEVSEGAAHEINTTKQGGGRVIPVGTTALRLIESAAPAPGVIAPFLGETDIFIKPGYSFRITDALMTNFHLPKSTLLMLVAALMGRERMRAVYEHAVAEGYRFFSYGDASLLLPQSD

SEQ ID NO: 65098 - protein, 353 aa, unidentified
  source 1..353: note = Celeribacter ethanolicus
  REGION 1..353: note = tr|A0A291GB75|A0A291GB75_9RHOB S-adenosylmethionine:tRNA ribosyltransferase-isomerase; OS = Celeribacter ethanolicus OX=1758178 GN=queA PE=3 SV=1
MKLSDFDFELPEGLIATRPAKPRSSARLLVATPTRIVDGHVTDLLEWFRPGDRLVLNDTKVLPARLTGKRGRDTAQGWQEAKIEVTLLEPQATPGQWRTLIKPLKKIREGEEVRFSDDLAARLIAKEDGEAVVEFNLTGEDFDRALNAAGSMPLPPYIEAKRKADQQDKTDYQTVWARNLGAVAAPTASLHFDQPLLKALADKGVEFTYVTLHVGAGTFLPVKVDDVSQHKMHSEWGEVSEGAAIEINTTKQRGGRVIPVGTTALRLIESAAPAPGVIAPFLGETDIFIKPGYEFRVADALMTNFHLPKSTLMMLVSAMMGRERIRQVYDHAIAEGYRFFSYGDASLLLPQEP

SEQ ID NO: 65099 - protein, 357 aa, unidentified
  source 1..357: note = Celeribacter halophilus
  REGION 1..357: note = tr|A0A1I3PSD8|A0A1I3PSD8_9RHOB S-adenosylmethionine:tRNA ribosyltransferase-isomerase; OS = Celeribacter halophilus OX=576117 GN=queA PE=3 SV=1
MKLSDFDFDLPEALIATRPAKPRSSARLLVATPTRMVDGYVTDLLEWFQPGDRLVLNDTKVLPARLSGKRGRDTAQGYQEAKIEVTLLEPQAEAGHDRMVWRALIKPLKKIKEGEVVRFSDDLSATLIAKEDGEAVVAFNLTGEDFDKALAEAGSMPLPPYIEAKRKADAQDKEDYQTVWARNMGAVAAPTASLHFDEPLLKALQEKGVEFTYVTLHVGAGTFLPVKVDDVSQHKMHSEWGEVSEGAAREINATKACGGRVIPVGTTALRLIESAAPTKGEIAPFLGETDIFIKPGYAFRMADALMTNFHLPKSTLLMLVSALMGRERMREVYDHAVAESYRFFSYGDASLLLPHEA

SEQ ID NO: 65100 - protein, 353 aa, unidentified
  source 1..353: note = Celeribacter indicus
  REGION 1..353: note = tr|A0A0B5E006|A0A0B5E006_9RHOB S-adenosylmethionine:tRNA ribosyltransferase-isomerase; OS = Celeribacter indicus OX=1208324 GN=queA PE=3 SV=1
MKLSDFDFDLPEALIATRPAKPRSSARLLVATPDAIHDGTVTDLTRWFRPGDRLVLNDTKVLPARLTGTRGRDTAEGYREARIEVTLLEPQAEAGQWRVLVKPLKKLREGETVRFSDALSAVLVAKEDGEAVVAFNLAGGDFDRALAEAGSMPLPPYIEAKRKADSQDKVDYQTVWAKTLGAVASPTASLHFDEPLLEALARMGVEFTYVTLHVGAGTFLPVKVDDVSEHRMHSEWGEVTERAAAEINATKAAGGRVIPVGTTALRLIESAAPEPGRIAPFLGETDIFITPGYTFRMTDALMTNFHLPKSTLLMLVSALMGRERMREVYDHAVAEKYRFFSYGDSSLLLPQGA

SEQ ID NO: 65101 - protein, 356 aa, unidentified
  source 1..356: note = Celeribacter manganoxidans
  REGION 1..356: note = tr|A0A291M2I4|A0A291M2I4_9RHOB S-adenosylmethionine:tRNA ribosyltransferase-isomerase; OS = Celeribacter manganoxidans OX=1411902 GN=queA PE=3 SV=1
MKLSDFDFDLPEDLIATRPARPRSSARLLVADGQVPGGSLRDAVVTDLPSFLRPGDRLILNNTRVIPARLSGLRHRDGAEGATAARIGITLLEPRGDGSWAALAKPAKKVRDGEDIVFAPGFSARVEGRAEGQVHLRFSVTGNDFDAALAQAGAMPLPPYIAAKRPADEADHTDYQTVFARHSGAVAAPTASLHFDQPLLERIAAMGVDFSEVTLHVGAGTFLPVKVDDVTTHRMHAEWGEVGAQAAAEINATRAAGGRIIPVGTTALRLIESAATPEGRMEPWDGETDIFIYPGYEFRIADGLMTNFHLPKSTLMMLVSALMGQARMREVYDHAIAERYRFFSYGDSSLLLPGGV

SEQ ID NO: 65102 - protein, 353 aa, unidentified
  source 1..353: note = Celeribacter marinus
  REGION 1..353: note = tr|A0A0P0A892|A0A0P0A892_9RHOB S-adenosylmethionine:tRNA ribosyltransferase-isomerase; OS = Celeribacter marinus OX=1397108 GN=queA PE=3 SV=1
MKLSDFDFDLPEALIATRPAKPRSSARLLVATPDTLTDGVVTDLVDWFNAGDRLVLNDTKVLPARLTGKRGRDTAQGYQEAKIEVTLLEPQAEGGVWRALIKPLKKVKEGEVIRFSDDLSATLTAKEDGAAYVAFNLTGADFDKALNAAGSMPLPPYIEAKRKADAQDNEDYQTVWARKLGAVAAPTASLHFDAALLAALADKGVEITHVTLHVGAGTFLPVKVDNVDDHKMHAEWGEVTPEAAAEIAATKAAGGRVIPVGTTALRLIESAARETGAIAPFLGETDIFITPGFEFAVTDALMTNFHLPKSTLLMLVSALMGAPRMRAVYDHAVAQNYRFFSYGDASLLVPHRA

SEQ ID NO: 65103 - protein, 353 aa, Celeribacter neptunius
  REGION 1..353: note = tr|A0A1I3JQV5|A0A1I3JQV5_9RHOB S-adenosylmethionine:tRNA ribosyltransferase-isomerase; OS = Celeribacter neptunius OX=588602 GN=queA PE=3 SV=1
MKLSDFDFDLPEALIATRPAKPRSSARLLVATPSRIVDGHVTDLLDWFQPGDRLVLNDTKVLPARLTGKRGRDTAQGWQEARIEVTLLEPLSVAGQWRALIKPLKKIREGEEVRFSDDLSAKLIAKEDGEAIVEFNLTGADFDKALAEAGSMPLPPYIEAKRKADAQDKEDYQTVWARNMGAVAAPTASLHFDAPLLKALSEKGVEFTYVTLHVGAGTFLPVKVDNVDEHKMHAEWGEVSEGAAIEINATKQRGGRVIPVGTTALRLIESAAPAAGVIAPFLGETDIFIKPGYEFRIADALMTNFHLPKSTLLMLVSALMGRERMREVYAHAVSEGYRFFSYGDASLLLPGEA

SEQ ID NO: 65104 - protein, 353 aa, unidentified
  source 1..353: note = Celeribacter persicus
  REGION 1..353: note = tr|A0A2T5HSK7|A0A2T5HSK7_9RHOB S-adenosylmethionine:tRNA ribosyltransferase-isomerase; OS = Celeribacter persicus OX=1651082 GN=queA PE=3 SV=1
MKLSDFDFDLPEGLIATRPAKPRSSARLLVATPTRIVDRHVTDLLDWFRPGDRLVLNDTRVLPARLTGKRGRDTAQGYQEAKIELTLLEPQSVPGQWKALIKPLKKIREGEEVKFSDDLSATLVAKEEGEALVAFNLTGEDFDRALNAAGSMPLPPYIEAKRKADQQDKADYQTVWAKNLGAVAAPTASLHFDEPLLKALSEKGVEFTYVTLHVGAGTFLPVKVDDVSQHKMHSEWGEVSEGAAIEINTTKQRGGRVIPVGTTALRLIESAAPAPGVIAPFLGETDIFIKPGYEFRIADALMTNFHLPKSTLMMLVSAMMGRERMMQVYDHAVAERYRFFSYGDASLLLPQEP

SEQ ID NO: 65105 - protein, 360 aa, Celerinatantimonas diazotrophica
  REGION 1..360: note = tr|A0A4R1JLI9|A0A4R1JLI9_9GAMM S-adenosylmethionine:tRNA ribosyltransferase-isomerase; OS = Celerinatantimonas diazotrophica OX=412034 GN=queA PE=3; SV = 1
MRVADFSYELPEELIARYPTERRRDCRLLSLDGNSGAVEHLQFPQLVDLVRPGDLLVFNNTRVIPARLFGQKQTGGKIEILIERILDGNRVLAHMRASKSPKVGARLRFADAFDATLLARHDELFELRFDDQHNVLELLDSYGHMPLPPYIDRPDEDSDRERYQTVYSRHPGAVAAPTAGLHFDQELIAELENRGVSTAYVTLHVGAGTFQSIRVDNVEEHHMHSEYAIVSEEVVNKVLQTKANGGRVIAVGTTSVRSLESAAQATHEALIAPYADETDIFIYPGYRFKVIDAMITNFHLPESTLVMLVSAFAGKMNILSAYQQAVEQRYKFFSYGDAMFITRKDTPEQDESIGTVLDEV

SEQ ID NO: 65106 - protein, 349 aa, Cellulophaga algicola
  REGION 1..349: note = tr|E6X5U2|E6X5U2_CELAD S-adenosylmethionine:tRNA ribosyltransferase-isomerase OS=Cellulophaga algicola (strain DSM 14237 / IC166 / ACAM 630) OX=688270 GN=queA; PE = 3 S V=1
MKLSGFNFELPEELLAEYPAENRDESKLMVIHRETGKIEHKMFKDMINYFDEGDVMVLNNTKVFPARLYGNKEKTGARIEVFLLRELNEEQRLWDVLVDPARKIRIGNKLYFGDDDTLVAEVIDNTTSRGRTLRFLYDGSYTDFRRKLKELGDTPLPKYIKRETEAEDAERYQTIYAKHEGAVAAPTAGLHFSKHLLKRLEIKGIDFAELTLHVGLGTFNPVEVEDLSKHKMDSEELIIDEKTTEIVNNAKKNKKRICAIGTTAMRGLESGVSSQHTLNTFEGWTNKFIFPPYDFSIANCMVTNFHLPKSTLLMMVSAFMGHDLMKKAYKEAILEGYKFYSYGDAMLII

SEQ ID NO: 65107 - protein, 349 aa, Cellulophaga baltica
  REGION 1..349: note = tr|A0A0A7KAG3|A0A0A7KAG3_9FLAO S-adenosylmethionine:tRNA ribosyltransferase-isomerase; OS = Cellulophaga baltica 18 OX=1348584 GN=queA PE=3 SV=1
MKLSGFNFELPEELLAEYPAENRDESKLMVIHRETGKIEHKMFKDMIDYFDEGDVMVLNNTKVFPARLYGNKEKTGARIEVFLLRELNEEQRLWDVLVDPARKIRIGNKLYFGDDDTLVAEVIDNTTSRGRTLRFLYDGSYTDFRRKLKELGDTPLPKYIKRETEAEDAERYQTIYAKHEGAVAAPTAGLHFSKHLLKRLEIKGVDFAELTLHVGLGTFNPVEVEDLSKHKMDSEELIIDEKTTEIVNSAKKNKKRICAIGTTVMRGLESGVSSQHTLNTFEGWTNKFIFPPYDFSIANCMVTNFHLPKSTLLMMVSAFMGHDLMKKAYKEAILEGYKFYSYGDAMLII

SEQ ID NO: 65108 - protein, 349 aa, Cellulophaga baltica; identical to SEQ ID NO: 65107
  REGION 1..349: note = tr|A0A1G7CRN8|A0A1G7CRN8_9FLAO S-adenosylmethionine:tRNA ribosyltransferase-isomerase; OS = Cellulophaga baltica OX=76594 GN=queA PE=3 SV=1

SEQ ID NO: 65109 - protein, 349 aa, Cellulophaga fucicola
  REGION 1..349: note = tr|A0A1K1P8C3|A0A1K1P8C3_9FLAO S-adenosylmethionine:tRNA ribosyltransferase-isomerase; OS = Cellulophaga fucicola OX=76595 GN=queA PE=3 SV=1
MKLSSFNFELPDNLLAEYPSEHRDEAKLMVIHRETGKIEHKMFKDLINYFDEGDVMVLNNTKVFPARLYGNKEKTGARIEVFLLRELNAEQRLWDVLVDPARKIRIGNKLYFGDDETLVAEVIDNTTSRGRTLRFLYDGSYTDFRQKLKDLGETPLPKYIKRDVEESDEDRYQTIYAKHEGAVAAPTAGLHFSKHLLKRLEIKGVDFAELTLHVGLGTFNPVEVEDLSKHKMDSEELIIDEKATEIVNSALDRKRRICAVGTTAMRGLESAVSSNGRLNTHEGWTNKFIFPPYDFSIANSMVTNFHLPKSTLLMMVSAFIGHDLMKKAYKEAILESYKFYSYGDAMLIV

SEQ ID NO: 65110 - protein, 349 aa, Cellulophaga lytica
  REGION 1..349: note = tr|F0RDQ5|F0RDQ5_CELLC S-adenosylmethionine:tRNA ribosyltransferase-isomerase OS=Cellulophaga lytica (strain ATCC 23178 / DSM 7489 / JCM 8516 / NBRC 14961 / NCIMB 14 23 / VKM B-1433 / Cy l20) OX=867900 GN=queA PE=3
MKLSSFNFELPDNLLAEYPSEHRDEAKLMVIHRETGKIEHKMFKDLINYFDEGDVMVLNNTKVFPARLYGNKEKTGARIEVFLLRELNAEQRLWDVLVDPARKIRIGNKLYFGDDETLVAEVIDNTTSRGRTLRFLYDGSYTDFRQKLKDLGETPLPKYIKREVEESDEDRYQTIYAKHEGAVAAPTAGLHFSKHLLKRLEIKGVDFAELTLHVGLGTFNPVEVEDLSKHKMDSEELVIDEKATEVVNAAIDNKRRICAIGTTAMRGLESAVSSNGHLNTYEGWTNKFIFPPYDFSIANSMVTNFHLPKSTLLMMVSAFIGHDLMKKAYKEAILESYKFYSYGDAMLII

SEQ ID NO: 65111 - protein, 349 aa, Cellulophaga sp.; identical to SEQ ID NO: 65110
  REGION 1..349: note = tr|A0A559N2Q1|A0A559N2Q1_9FLAO S-adenosylmethionine:tRNA ribosyltransferase-isomerase; OS = Cellulophaga sp. RHA_52 OX=1250036 GN=queA PE=3 SV=1

SEQ ID NO: 65112 - protein, 349 aa, Cellulophaga tyrosinoxydans
  REGION 1..349: note = tr|A0A1W1Y9T2|A0A1W1Y9T2_9FLAO S-adenosylmethionine:tRNA ribosyltransferase-isomerase; OS = Cellulophaga tyrosinoxydans OX=504486 GN=queA PE=3 SV=1
MKLSGFNFELPEELLAEYPAENRDESRLMVVHRETGKIEHKMFKDLINYFDEGDVMVLNNTKVFPARLYGNKEKTGARIEVFLLRELNEEQRLWDVLVDPARKIRIGNKLYFGDDDTLVAEVIDNTTSRGRTLRFLYDGSYTDFRRKLKELGDTPLPKYIKRDTEPEDAERYQTIYAKHEGAVAAPTAGLHFSKHLLKRLEIKGVDFAELTLHVGLGTFNPVEVEDLSKHKMDSEELIIDEKTTEIVNNAKKNKKRICAVGTTAMRGLESGVSSQQTLNTFEGWTNKFIFPPYDFSIANCMVTNFHLPKSTLLMMVSAFMGHDLMKKAYKEAILEGYKFYSYGDAMLII

SEQ ID NO: 65113 - protein, 340 aa, Cellulosilyticum lentocellum
  REGION 1..340: note = tr|F2JLT3|F2JLT3_CELLD S-adenosylmethionine:tRNA ribosyltransferase-isomerase OS=Cellulosilyticum lentocellum (strain ATCC 49066 / DSM 5427 / NCIMB 11756 / RHM5) OX= 642492 GN=queA PE=3 SV=1
MKTSDFYFHLPEEQIAQVPLKDRTTSRLMVLDQKTGEIEHKHFYDIKAYLKPGDCLVLNDTRVIPARLFGARPSGGKVEFLLLTRKEEKRWEVLVKPGKKAKIGDEIIFGEGLLKAKVEEIIEDGKRIVRFEYEGIFEEVLDALGEMPLPPYIHEKLEDKERYQTVYSKHEGSAAAPTAGLHFTKELLKEIEEMGVKIAYVTLHVGLGTFRPVKVEDVLNHEMHSEYYSIDEENATIINKVKAEGGRVIAVGTTSTRTLESNADEKGLIKAGSGWTNIFIYPGYTFKCVEELITNFHLPESTLIMLVSALAGKEAILNAYNTAVNEGYRFFSFGDAMLIK

SEQ ID NO: 65114 - protein, 340 aa, Cellulosilyticum sp.
  REGION 1..340: note = tr|A0A5B9YH11|A0A5B9YH11_9FIRM S-adenosylmethionine:tRNA ribosyltransferase-isomerase; OS = Cellulosilyticum sp. WCF-2 OX=2497860 GN=queA PE=3 SV=1
MKTSDFYFHLPEEQIAQVPLKDRTTSRLMVLDQKTGEIEHKHFYDIKGYLKPGDCLVLNDTRVIPARLFGARPSGGKVEFLLLTRKEEKRWEVLVKPGKKAKIGDEIIFGEGLLKAKVEEIIEDGKRIVSFEYEGIFEEVLDALGEMPLPPYIHEKLEDKERYQTVYSKHEGSAAAPTAGLHFTKELLKEIEEMGVKIAYVTLHVGLGTFRPVKVEDVLNHEMHSEYYSIDEENATIINKAKAEGGRVIAVGTTSTRTLESNADEKGLIKAGSGWTNIFIYPGYTFKCVEALITNFHLPESTLIMLVSALAGKEAILNAYNTAVKEGYRFFSFGDAMLIK

SEQ ID NO: 65115 - protein, 364 aa, Cellvibrio japonicus
  REGION 1..364: note = tr|B3PDJ6|B3PDJ6_CELJU S-adenosylmethionine:tRNA ribosyltransferase-isomerase OS=Cellvibrio japonicus (strain Ueda107) OX=498211 GN=queA PE=3 SV=1
MPNLMRRQDFYYELPDHLIARVPASERRGSRLLQLDGATGARVHGQFPDLLDLVNPGDLMVFNNTRVIPARLFGQKATGGAVEILVERVLSDKRVLAHTRASKAPKVDSQVILQDGTSVILRARQDALFEWEFLTDQSALEVMEQIGHMPLPPYIDRADAVEDRERYQTVYGEKQGAVAAPTAGLHFDELMLQQLRDKGVQIAFVTLHVGAGTFQNMRVDNIREHKMHGEIMEVSPEVCELVRATKAAGKRVVAVGTTSVRSLESAAHGYLDPVHKGSIQPYRGETSIFIYPGYTFQVVDALVTNFHLPESTLIMLVSAFAGYSHTMAAYADAVARQYRFFSYGDAMFITRNPAPDQPGQVDPV

SEQ ID NO: 65116 - protein, 360 aa, Cellvibrio mixtus
  REGION 1..360: note = tr|A0A266Q4G0|A0A266Q4G0_9GAMM S-adenosylmethionine:tRNA ribosyltransferase-isomerase; OS = Cellvibrio mixtus OX=39650 GN=queA PE=3 SV=1
MRRQDFFYELPDSLIARAPAAERRGSRLLQLDGQRGHLTHGQFPDLLTLVESGDLMVFNNTRVIPARLFGQKTSGGQVEILVERVLDTRRVLAHTRASKAPKVDSQVILQDGTRVQLVARHDALFEWEFLGDDPALVVLERIGHMPLPPYIDREDVAADRERYQTVYSKEQGAVAAPTAGLHFDELMLEQLRAKGVNIAFVTLHVGAGTFQNMRVDNIAEHQMHSEIMDVSPEVCEMVRATKAAGKRVIAVGTTSVRSLESAAQGYADAAQKGEIHPYQGETSIFIYPGYQFQVVDALVTNFHLPESTLIMLVSAFAGYGFTMAAYKEAVAQQYRFFSYGDAMFITRNPVAAQQPVGTSI

SEQ ID NO: 65117 - protein, 360 aa, Cellvibrio sp.
  REGION 1..360: note = tr|I3IBR8|I3IBR8_9GAMM S-adenosylmethionine:tRNA ribosyltransferase-isomerase OS=Cellvibrio sp. BR; OX = 1134474 GN=queA PE=3 SV=1
MRRQDFFYELPDNLIARTPAAERRGSRLLQLDGTSGQLAHGRFPDLLNLVEPGDLMVFNNTRVIPARLFGQKTSGGQVEILVERVLDNRRVLAHTRASKAPKVASQVILQDGTRVQLVARHDALFEWEFLGDDPALVVLDRIGHMPLPPYIDRDDVAADRERYQTVYSKEQGAVAAPTAGLHFDELMLEQLRAKGVNIAFVTLHVGAGTFQNMRVDNIAEHQMHSEIMDVSPEVCEQVRATKAAGKRVIAVGTTSVRSLESAAQGYADPAQKGAIHPYQGETSIFIYPGYQFQVVDALVTNFHLPESTLIMLVSAFAGYGFTMAAYKEAVAQQYRFFSYGDAMFITRNPAAAQQPVGGSV

SEQ ID NO: 65118 - protein, 364 aa, Cellvibrio sp.
  REGION 1..364: note = tr|A0A5J6NYQ8|A0A5J6NYQ8_9GAMM tRNA preQ1(34) S-adenosylmethionine ribosyltransferase-isomerase QueA; OS = Cellvibrio sp. KY-YJ-3 OX=454662 GN=queA PE=4 SV=1
MRRQDFFYELPDNLIARTPAAERRGSRLLQLDGASGQLAHGRFPDLLNLVEAGDLMVFNNTRVIPARLFGQKTSGGQVEILVERVLDNRRVLAHTRASKAPKVDSQVILQDGTRVQLVARHDALFEWEFLGDDPALVVLERIGHMPLPPYIDRDDVAADRERYQTVYSKEQGAVAAPTAGLHFDELMLEQLRAKGVNTAFVTLHVGAGTFQNMRVDNIAEHQMHSEIMDVSPEVCELVRATKAAGKRVIAVGTTSVRSLESATQGYADAAQKGAIHPYQGETSIFIYPGYQFQVVDALVTNFHLPESTLIMLVSAFAGYGFTMAAYKEAVAQQYRFFSYGDAMFITRNPAAAQQPVGQPVGASV

SEQ ID NO: 65119 - protein, 357 aa, unidentified
  source 1..357: note = Cellvibrionaceae bacterium
  REGION 1..357: note = tr|A0A545U891|A0A545U891_9GAMM S-adenosylmethionine:tRNA ribosyltransferase-isomerase; OS = Cellvibrionaceae bacterium R142 OX=2591008 GN=queA PE=3; SV = 1
MRRQDFYYTLPDELIARAPAAERRGSRLLVLDGPSGQVSHRRFPDILDCLQPGDLMVFNDTRVIPARVFGRKPTGGRVEILIERVLPDNRVLAHTRASKSPRVGTDILLEDGTVLAVVARHEELFELRFPPAKPVLEVLENIGHMPLPPYIDRADEVTDRERYQTVYGHRQGAVAAPTAGLHFDAELLEQLRAAGVQIAFVTLHVGAGTFQPVRVDNIHEHNMHSEIMEVSAAVCEQVRATRAAGKRVIAVGTTSVRCLETAAQSGELQPYQGETNIFIYPSYRYRVVDALVTNFHLPESTLLMLVSAFAGYRHTLEAYRQAVQNRYRFFSYGDAMFITRNSNAGDDMPGRRAGYPG

SEQ ID NO: 65120 - protein, 353 aa, unidentified
  source 1..353: note = Cellvibrionales bacterium
  REGION 1..353: note = tr|A0A1Z8YNW8|A0A1Z8YNW8_9GAMM S-adenosylmethionine:tRNA ribosyltransferase-isomerase; OS = Cellvibrionales bacterium TMED79 OX=1986768 GN=queA; PE = 3 SV=1
MKTADFHFDLPEYLIAQSPLEERTGSRLLALDGATGSLDHRQFLEIEALLSPNDLLVFNNTRVIPARLYGQKQTGGRVEILIERLRGDGSVLAHVRASKSPKEGTLIFITADQDSDITDFTLRVCGRDGGLFELQAETGTVAKMMRLYGHMPLPPYIERADTPQDRERYQTVYAKHEGAVAAPTAGLHFDEALLSRLSLKGVQTAFVTLHVGAGTFQPVRVENITHHKMHREWIEVGQDCVDAIRACRKRGGRVVAVGTTSVRSLESAAAAGLDSERCPRAFEGDSDIFLYPGCEFGVVDAMVTNFHLPESTLIMLVSAFAGYEETMKAYREAVLKEYRFFSYGDAMFVTHKT

SEQ ID NO: 65121 - protein, 340 aa, unidentified
  source 1..340: note = Cellvibrionales bacterium
  REGION 1..340: note = tr|A0A2E8KGW1|A0A2E8KGW1_9GAMM S-adenosylmethionine:tRNA ribosyltransferase-isomerase; OS = Cellvibrionales bacterium OX=2026722 GN=queA PE=3 SV=1
MNLSDFDYHLPDELIARYPTEQRTASRLLALDKTNGQVLHHQFTDLIDQLQPNDLLVFNNTRVIPARLFGEKASGGKVEVMIERITSGSRGIAQIRASKSAKPDTIIHLEQGLSLRVIDRIDGMFLIESNDEASLSMVLQAVGHMPLPPYIDREDEKLDRERYQTVYSSREGAVAAPTAGLHFDQAMLSKLGEKGVNFTYVTLHVGAGTYQPVREHYIPDHKMHAEYVEVGADVCNDIRMAQAAGGRVIAIGTTAVRSVETASVESGWIEPYYGDTEIFIYPGYQFKTVDAMLTNFHLPQSSLIMLVSAFAGRENTLSAYQQAINEQYRFFSYGDAMFIR

SEQ ID NO: 65122 - protein, 343 aa, Centipeda periodontii
  REGION 1..343: note = tr|F5RM74|F5RM74_9FIRM S-adenosylmethionine:tRNA ribosyltransferase-isomerase OS=Centipeda periodontii DSM 2778 OX=888060 GN=queA PE=3 SV=1
MDISDFDYDLPEKRIAQIPAEPRDSSRLMVLNPKEHTIEHRHFFQLGDFLKKGDVLIFNDTRVIPARLIGTRSQTGGKVEVFLLRQIDRNQWEALVKPGKKVRIGSIVHFDDELSCEVIDHTDFGGRIVKFIYNGVFEEILDRLGSVPLPPYIHEKLEDRERYQTIYSRVKGSAAAPTAGLHFTEKLMKELRGKEVQFGFITLHVGLGTFRPVHANVIEDHVMHREFYSVPIETAALIHAAKDEGRRVIAVGTTSIRTLEASAARTGTVDAGAGWTDIFIYPGYQFKIVDAVITNFHLPKSTLIMLISAFAGREFTLEAYRMAVEEEYRFFSFGDAMMIESRA

SEQ ID NO: 65123 - protein, 387 aa, unidentified
  source 1..387: note = Cephaloticoccus capnophilus
  REGION 1..387: note = tr|A0A139SRD7|A0A139SRD7_9BACT S-adenosylmethionine:tRNA ribosyltransferase-isomerase; OS = Cephaloticoccus capnophilus OX=1548208 GN=queA PE=3 SV=1
MPTAPLRTELFDYPVPEELIAQSPSVRRDDSRLLVVDRATHTISHHRFAELPNFLSAGDTLFRNNAAVLPARLRARRIIRSEGGATALGGAIECFLLRPHEAEPQNTSTWHCLLRPSKRLPVGAAFADTNREFSAEVLAKSADGTALVRLKSHRENETVPELARRLGSVPLPPYIHREKTEAPSTTGKDSQRARDLDRYQTVYADAARPVAVAAPTAGLHFTPELLGSLAARGVALADLTLHVGLGTFRPITTETIEAHQIHRERYEIPPHTIDRLHNTRGRRIAIGTTTLRSIEHYLRQTQACAPCPPLRAHLAEADLFIYPPAQFRGVDALLTNFHQPRSTLLCLIAAFLSPGSTDGITWFREIYAEAITRKYRLFSYGDAMLIL

SEQ ID NO: 65124 - protein, 385 aa, unidentified
  source 1..385: note = Cephaloticoccus primus
  REGION 1..385: note = tr|A0A139SRP3|A0A139SRP3_9BACT S-adenosylmethionine:tRNA ribosyltransferase-isomerase; OS = Cephaloticoccus primus OX=1548207 GN=queA PE=3 SV=1
MPTECFDYALPEELIAQTPSARRDGSRLLVVDRTAHTIAHHHFAELPEFLRAGDTLFRNNAAVFPARLRALRPSGGQVECFLLRPHESGENSTLWLCLLKPGKRLPIGATFAHASGAFSAEVVAREPDRTAIVRFRIPSGASVPELARRLGAVPLPPYIRREYACKAYDTAATNEAPMRPNEAAHTEKVEDLARYQTVYADEARPVAVAAPTAGLHFTPELLAQITARGVALADLTLHVGLGTFRPITTDTINAHQIHHERYEIPAPTLEKLRHGTGRRIAVGTTSLRSIEHYLRQKQCTAADTRPETAEHSSEADLFIYPPATFRGVDALLTNFHQPRSTLLCLVAAFLAPGSTDGIAWLHEIYAEAIARRYRFFSYGDAMLIL

SEQ ID NO: 65125 - protein, 340 aa, Cerasibacillus quisquiliarum
  REGION 1..340: note = tr|A0A511UZ05|A0A511UZ05_9BACI S-adenosylmethionine:tRNA ribosyltransferase-isomerase; OS = Cerasibacillus quisquiliarum OX=227865 GN=queA PE=3 SV=1
MNANEFDFYLPEELIAQTPLKDRTASRLLILDKETKEIQHRTFPAIKDYLKRGDCLVLNDTEVLPARLYGVKEDTGAKIEVLLLHVIENDTWETLIKPAKKVKLGTVITFGKGLKATCTKILEHGGRQLTFSYEGIFYEILDELGKMPLPPYIKAQLSENERYQTVYAKEKGSAAAPTAGLHFTKDLLDEIKGLGVHITTITLHVGLGTFRPVSAEKVENHRMHSEYYRMSHHTAHTLNQAKENGGRIIAVGTTSTRTLETIMNKYGSFTECSGWTDIFIYPPYNWKAIDGLLTNFHLPKSTLIMLVSALAGREAVLNAYEQAVLERYRFFSFGDAMLII

SEQ ID NO: 65126 - protein, 341 aa, Cerasibacillus sp.
  REGION 1..341: note = tr|A0A5C8P3P2|A0A5C8P3P2_9BACI S-adenosylmethionine:tRNA ribosyltransferase-isomerase; OS = Cerasibacillus sp. CC-CFT480 OX=2498845 GN=queA PE=3; SV = 1
MNVNEFDFNLPEELIAQTPLRERTASRLLVLNKQTRRIEHKYFYNIKKYLKKGDCLVLNDTRVLPARLYGMKEDTGGKIEVLLLHQSENDTWETLVKPARKVKLGTIISFGNGKLKAICTKTEEHGGRELKFIYNGVFYEILDELGEMPLPPYIKEQLPEKERYQTVFAREKGSAAAPTAGLHFTTELLEEIKELGVEIAYITLHVGLGTFRPVSVEDIENHQMHSEFYRMSKTTADTLNRVKANGGKIISVGTTSTRTLETIARDHQAFKETSGWTDIFIYPPYEFKAIDGLITNFHLPKSTLIMLVSALAGKNAVLHAYEQAVQKKYRFFSFGDAMLII

SEQ ID NO: 65127 - protein, 343 aa, unidentified
  source 1..343: note = Cereibacter changlensis
  REGION 1..343: note = tr|A0A2T4JZZ5|A0A2T4JZZ5_9RHOB S-adenosylmethionine:tRNA ribosyltransferase-isomerase; OS = Cereibacter changlensis JA139 OX=1188249 GN=queA PE=3; SV = 1
MRLSDFDFHLPETLIATRPARPRTSARLLLAEGDAIRDLHVSDLLEIFRPGDRLILNNTKVIPARLTGTRTRGDAVAKVEITLMEPAAEGWRALAKPLRKVQPGEMIRFSEALSATVAEKGETDLRLVFNLVGEDFDAALAEAGAMPLPPYIAAKRKPDAQDETDYQTVFARHAGAVAAPTASLHFDAPLLEALAAKGVQFTEVTLHVGAGTFLPVKVEDVTTHRMHAEWGEVTETAAAEMNATKAAGGRVIPVGTTALRLIESAAATGAVEPWRGTTDIFIYPGYRFRVTDALMTNFHLPKSTLLMLVSALMGQERIERIYRHAVDTEYRFFSYGDASLLIP

SEQ ID NO: 65128 - protein, 343 aa, unidentified; identical to SEQ ID NO: 65127
  source 1..343: note = Cereibacter changlensis
  REGION 1..343: note = tr|A0A2W7RQB1|A0A2W7RQB1_9RHOB S-adenosylmethionine:tRNA ribosyltransferase-isomerase; OS = Cereibacter changlensis OX=402884 GN=queA PE=3 SV=1

SEQ ID NO: 65129 - protein, 348 aa, Cesiribacter andamanensis
  REGION 1..348: note = tr|M7NJ08|M7NJ08_9BACT S-adenosylmethionine:tRNA ribosyltransferase-isomerase OS=Cesiribacter andamanensis AMV16 OX=1279009 GN=queA PE=3 SV=1
MKLSEFKFDLPAGLLALYPAENRDESRLLVLHRNTGQIEHRVFKDVVEYFGEGDVMVTNNTKVFPARLYGNKEKTGAKIEVFLLRELNRDMHLWDVLVDPARKIRVGNKLYFGDGELVAEVIDNTTSRGRTIRFLFDGSNEEFYKMIDSLGETPLPREITRDVEPEDRDRFQTIYAEHTGAVSAPTAGLHFTPHLLKRLDLKGVAISPITLHVGLGTFRPVDVEDLTKHKMDSENFVVPTQTATAVNQALDNKNRVCAIGTTSMRALESSVSASNRLKATEGWTDKFIFPPYEFKICNALITNFHMPESTLLMMACAFGGFDNVMNAYKVAMEEKYRFFTYGDAMLII

SEQ ID NO: 65130 - protein, 341 aa, unidentified
  source 1..341: note = Cetia pacifica
  REGION 1..341: note = tr|A0A3N1YM95|A0A3N1YM95_9PROT S-adenosylmethionine:tRNA ribosyltransferase-isomerase; OS = Cetia pacifica OX=1424653 GN=queA PE=3 SV=1
MSLNKDLLVSSYDYNLPEHLIAKYPVTPRDSAKLLVYDRKKDRVTHTVFRNILDFVGDKRFVFNNTKVIKARIYGKKESGGKIELLLNRPFGDKYLVYIRGKVRVGTKLYFDKGLVAEVVELLEDGSRVVEFKLKTQNEMKNLDFLELVKILEEIGHVPLPPYIKREDEKIDESEYQSVFAKKEGAVAAPTASLHFTDELLKKIEKKAYLTLHVGAGTFKPVEVEDIREHKMHSEFFEIPKTTAEILDSDEEIVAVGTTSTRTIEYYARTKKLSGECDLFLNPLNPPIRVNHLLTNFHLPKSTLIMLVAAFIGREKTLKLYEEAIKNNYRFYSYGDAMLII

SEQ ID NO: 65131 - protein, 343 aa, Cetobacterium ceti
  REGION 1..343: note = tr|A0A1T4KYT0|A0A1T4KYT0_9FUSO S-adenosylmethionine:tRNA ribosyltransferase-isomerase; OS = Cetobacterium ceti OX=180163 GN=queA PE=3 SV=1
MSTMLSDYDYHLPEELIGQKPREPRDHSKLMVVNKEKEEIEHKHFYDIIDYLNEGDILVRNSTKVIPARLFGHKDTGGVLEILLIKRIDLNTWECLLKPAKKLKVGQKLYIGHNNELIGELIEIKDDGNRVLKFTYEGAFEEVLDKLGKMPLPPYIVESLSEKERYQTVYAIKGESVAAPTAGLHFTKELLEKIEKKGIKIIDVFLEVGLGTFRPVQTENVLDHKMHEEHFEIPEEAAKIINEAKTQGRRVVAVGTTSVRALESSVDENGKLVAQGNDTHIFIYPGYKFKIVDALITNFHLPKSTLLMLVSAFSNREFMLDVYKKAVENEYHFFSFGDAMFIY

SEQ ID NO: 65132 - protein, 343 aa, Cetobacterium somerae
  REGION 1..343: note = tr|U7VA50|U7VA50_9FUSO S-adenosylmethionine:tRNA ribosyltransferase-isomerase OS=Cetobacterium somerae ATCC BAA-474 OX=1319815 GN=queA PE=3 SV=1
MSTKLVDYDYHLPDELIGQKPREPRDHSKLMVVDKENQTLEHKTFFNIIDYLKPGDVLVRNSTKVIPARLFGKKETGGVLEILLIKRVSLDTWECLLKPAKKLKVGQKLEIGENKELVAELLEIKEDGNRVLRFEYEGVFEEVLDKLGKMPLPPYIVEALETKDRYQTVYAIKGESVAAPTAGLHFTKELLEKIKEKGIEILDVFLEVGLGTFRPVQTEDVLDHKMHEEIFEIPLYTVERIKKAKEENRRIIAVGTTTVRALESSVDMDGNLISKTGSTEIFIYPGYKFNVIDALITNFHLPKSTLLMLVSALSNREFMLDVYKEAVKKEYHFFSFGDAMFIY

SEQ ID NO: 65133 - protein, 362 aa, Chamaesiphon minutus
  REGION 1..362: note = tr|K9UQR2|K9UQR2_CHAP6 S-adenosylmethionine:tRNA ribosyltransferase-isomerase OS=Chamaesiphon minutus (strain ATCC 27169 / PCC 6605) OX=1173020 GN=queA PE=3 SV=1
MNTSLDRLLASYDYELPPESIAQTPVVPRDRSRLLVVETGSGYQHRHFHEIGDFLTAGDLLVFNNTRVIPARVYGVKTTGAPVEILLLSEREHNCWLALVKPGRKLKIGTKIVFPARNPESKIPQITADIMDRDEATGGRVLRFDIPDGVPLLSILADFGELPLPPYITASTSTDEQYQTVYAKVPGAVAAPTAGLHFTPELLDRLTQQGISRAEVTLHVGVGTFRPVEAEDITTHQMHHEWLEITSETVDLINAAKAAGGKIYAVGTTAVRVLETAAQTGKLQPYRGDTNMFIYPGYQWQVVDGLITNFHLPGSSLMMLVSAAIGRERLLDLYQIAIADGYRFYSFGDAMLIRPFRSMESI

SEQ ID NO: 65134 - protein, 364 aa, unidentified
  source 1..364: note = Chamaesiphon polymorphus
  REGION 1..364: note = tr|A0A2T1G0F0|A0A2T1G0F0_9CYAN S-adenosylmethionine:tRNA ribosyltransferase-isomerase; OS = Chamaesiphon polymorphus CCALA 037 OX=2107692 GN=queA; PE = 3 SV=1
MNTSLDRLLTSYDYELPTESIAQTPVVPRDRSRLLVVETGAGYQHRHFHEIGDFLTAGDLLVFNNTRVIPARVYGVKTTGAPVEILLLSEREHNCWLALVKPGRKLKIGTKIVFPARHPESKIPQITAEIMARDEDTGGRLLKFDIPDGVPLLSILADFGELPLPPYITASTSTDEQYQTVYAKIPGAVAAPTAGLHFTPELLDRLTQQGIERAEVTLHVGVGTFRPVEAEDITTHQMHHEWLEISSETVDRINAVKAAGGKIYAVGTTAVRVLETAAQTGKLQPYRGDTNIFIYPGYQWQVVDGLITNFHLPGSSLMMLVSAAIGRERLLDLYQIAIGDGYRFYSFGDAMLIRPFRSNENSGR

SEQ ID NO: 65135 - protein, 358 aa, unidentified
  source 1..358: note = Chania multitudinisentens
  REGION 1..358: note = tr|W0LGB8|W0LGB8_9GAMM S-adenosylmethionine:tRNA ribosyltransferase-isomerase OS=Chania multitudinisentens RB-25 OX=1441930 GN=queA PE=3 SV=1
MRVADFSFALPESLIAHYPQPERSACRLLQLDGPSGALRHGVFTDLLDKLETGDLLVFNNTRVIPARLFGRKVSGGKIEVLVERVLDDHRVLAHVRASKAPKPGTELLLGDDENIAATMVARHDTLFELRFNDERDVFTILNAVGHMPLPPYIDRPDEDADRELYQTVYSEKPGAVAAPTAGLHFDEPLLAALRAKGVEMAFVTLHVGAGTFQPVRVETIEEHVMHAEYAEVSQEVVDAVLACKARGKRVVAVGTTSVRSLESAATASQNALIAPFFGDTRIFIYPGYHYQVIDALVTNFHLPESTLIMLVSAFAGYKHTMNAYQQAVAEQYRFFSYGDAMFISRNPQAESESVGNTR

SEQ ID NO: 65136 - protein, 358 aa, Chelativorans sp.
  REGION 1..358: note = sp|Q11IH4|QUEA_CHESB S-adenosylmethionine:tRNA ribosyltransferase-isomerase OS=Chelativorans sp. (strain BNC1) OX=266779 GN=queA PE=3 SV=1
MRVDLFDFDLPEERIALRPASPRDSARMLVVRPGKPLEDCIVRDLPQFLRPGDALVFNDTKVIPARLSGIRRRGETVAQIEATLHMRAGPDRWKAFLKPAKRVAVGERIQFGHDGESCFLGSLDATVAEKGEGGEALLVFDFSGPVLDEAIAAAGHVPLPPYIASKRPDDERDRADYQTIYAREEGAVAAPTAGLHFTPDLFSALDTIGVERHFVTLHVGAGTFLPVKAEDTEAHRMHAEWGEVDGMTADALNAVRARGGCIIAVGTTSLRLLESAAEPSGLLKAWSGETDIFITPGYRFRAIDILMTNFHLPRSTLFMLVSAFSGLETMKSAYSHAIDQGYRFYSYGDSSLLFREDT

SEQ ID NO: 65137 - protein, 362 aa, Chelatococcus asaccharovorans
  REGION 1..362: note = tr|A0A2V3U7L1|A0A2V3U7L1_9RHIZ S-adenosylmethionine:tRNA ribosyltransferase-isomerase; OS = Chelatococcus asaccharovorans OX=28210 GN=queA PE=3 SV=1
MRVDLFDFDLPEDRIATRPVKPRDAARLLVVGGPEAALQDRVVRDLPGLLRPGDTLVLNDTRVIPARLVGMRRRGEASARIEAMLHKREATDRWRAFVRPAKRLALGDIIRFGEETEGACLLSGLEATVTEKGDGGEVVLRFALSGPILDESIASLGHMPLPPYIASKRPEDAADRVDYQTVYAAEEGAVAAPTAGLHFTDELITRLSERGIDRQFVTLHVGAGTFLPVKADDTSEHRMHAEWGSVSAETAAALNATRQRGGRIVAVGTTSLRLLESATTPEGEVRPWAGDTAIFITPGYRFRAVDVLMTNFHLPRSTLFMLVSAFAGLGEMQRAYAHAIANGYRFYSYGDASLLFRAEMPR

SEQ ID NO: 65138 - protein, 365 aa, Chelatococcus sambhunathii
  REGION 1..365: note = tr|A0A0K6H679|A0A0K6H679_9RHIZ S-adenosylmethionine:tRNA ribosyltransferase-isomerase; OS = Chelatococcus sambhunathii OX=363953 GN=queA PE=3 SV=1
MRVDLFDFELPDESIALRPASPRDSARMLVVRPDGERLLADRIVRELPDLLAPGDVLVLNDTRVIPARLAGIRVRGEAVSHVEVTLHKREGADLWRAFARPGKRLKVGDRIRFGEEGENMACLLAALDAEVEEKSDGGEVLLRFAFSGPALDEAIARLGHVPLPPYIASKRPDDAADLRDYQTIYARHDGAVAAPTAGLHFTDELFCALDTRGIARRFVTLHVGAGTFLPVKAEDTRDHRMHAEWGTIDDATAAALNAARAEGRRIVAVGTTALRLLESAVRPDGTFEAWRGDTSIFITPGYRFRAVDVLMTNFHLPRSTLFMLVCAFAGMETMKAAYAHAIAAGYRFYSYGDASLLFRAPEPPA

SEQ ID NO: 65139 - protein, 365 aa, Chelatococcus sp.
  REGION 1..365: note = tr|A0A0K2DFS7|A0A0K2DFS7_9RHIZ S-adenosylmethionine:tRNA ribosyltransferase-isomerase; OS = Chelatococcus sp. CO-6 OX=1702325 GN=queA PE=3 SV=1
MRVDLFDFELPDESIALRPASPRDSARMLVVRPDGGRLLEDRIVRELPDLLTPGDVLVLNDTRVIPARLAGIRVRGEAVSHVEVTLHKREGADLWRAFARPGKRLKEGDRIRFGEEGESMACLLAALDAEVEEKSDGGEVLLRFAFSGPALDEAIARLGHMPLPPYIASKRPDDAADLRDYQTIYARHDGAVAAPTAGLHFTDALFSALDTRGIARRFVTLHVGAGTFLPVKAEDTRDHRMHAEWGTIDAATAAALNAARAEGRRIVAVGTTALRLLESAVRPNGTFEAWSGDTAIFITPGYRFRAVDVLMTNFHLPRSTLFMLVCAFAGMETMKAAYAHAIAAGYRFYSYGDAGLLFRAPETPA

SEQ ID NO: 65140 - protein, 361 aa, Chelatococcus sp.
  REGION 1..361: note = tr|A0A2W6ZWD7|A0A2W6ZWD7_9RHIZ S-adenosylmethionine:tRNA ribosyltransferase-isomerase; OS = Chelatococcus sp. OX=1953771 GN=queA PE=3 SV=1
MNVDLFDFELPDERIALRPASPRDVARMLVVRPGGEPALEDRIVRDLPSFLREGDALVLNDTRVIPSRLRGRRYRGEDSARVEIMLHKRESEDRWLAFARPAKKLAIGERVVFDAENASNACELARLHAEVLAKGEGGEVELRFSLTGAWLDEAIARFGELPLPPYIAGKRAVDSADTADYQTAYAREDGAVAAPTAGLHFTPELFAALEARGVSRHFVTLHVGAGTFLPVKAEDTDDHRMHAEWGTVSAGTADALNAVKARGGRIVAVGTTSLRLLESATGEDGVVRPFSGDTAIFITPGYRFRAVDLLMTNFHLPRSTLFMLVSAFAGLDPMKRAYAHAIAEGYRFYSYGDSSLLHRAG

SEQ ID NO: 65141 - protein, 362 aa, Chelonobacter oris
  REGION 1..362: note = tr|A0A0A3APR8|A0A0A3APR8_9PAST S-adenosylmethionine:tRNA ribosyltransferase-isomerase; OS = Chelonobacter oris OX=505317 GN=queA PE=3 SV=1
MQVSDFYFELPDELIARYPKAERTSSRLLCLDGTNGELCHRRFSDVTELVDEGDLLVFNNTRVIPARMFGRKSSGGKLEVLVERVLSEKSCLAHVRASKAPQSGALLILGEDKLGEGNGIQMVMKARHGALFELETADDVPLLDCLQQIGHIPLPPYIDRPDEEMDQERYQTVYNQVPGAVAAPTAGLHFDQALLAKLQQKGVNFAFVTLHVGAGTFQPVRVEKVEDHHMHAEYVEVDEQTVQAILATKAAGKRVIAVGTTSVRSVESAALAAAQTRAANLLAPYFSDTAIFLYPGKPFRVIDALITNFHLPESTLVMLVSAFAGYRNTMQAYQRAVTEKYRFFSYGDAMFITKNPDVKGLD

SEQ ID NO: 65142 - protein, 351 aa, unidentified
  source 1..351: note = Chishuiella changwenlii
  REGION 1..351: note = tr|A0A1M6XM38|A0A1M6XM38_9FLAO S-adenosylmethionine:tRNA ribosyltransferase-isomerase; OS = Chishuiella changwenlii OX=1434701 GN=queA PE=3 SV=1
MKMKTSDFDFNLPEELLAERPSENRDESRLMVVHRDTGEIEHRLFKDVIDYFDEGDVMIRNNTKVFPARLMGNKEKTGAQIEVFLLRELDAETRLWDVLVDPARKIRIGNKLFFDNDDTLVAEVVDNTTSRGRTLRFLFDGSYEEFRAKLKELGETPLPKYITRSVEPEDAERYQTIYAKHEGAVAAPTAGLHFSKHLLKRLEIKGVDFAELTLHIGLGTFQGVEVEDLSKHKMESEQTIIPQESADLVNRAIDEKKKVCAIGTTSMRSIESSVSADGHLNAFDGWTNKFIHPPYDFSVANCMITNFHTPKSTLIMMISAFAGHDLTMKAYHEAVKEGYKFYSYGDAMLIL

SEQ ID NO: 65143 - protein, 338 aa, Chitinimonas sp.
  REGION 1..338: note = tr|A0A2G3K4A5|A0A2G3K4A5_9BURK S-adenosylmethionine:tRNA ribosyltransferase-isomerase; OS = Chitinimonas sp. BJB300 OX=1559339 GN=queA PE=3 SV=1
MQLSDFDYTLPQRLIAQFPPSQRGGSRLLHLPSERGLFDRQFSDLSGLLRAGDLLVLNDTRVIKARMYGQKESGGQVEAMVERVLGQHEVLAMIRASKSPKPGTWLVFAGQWRAQMLGRQGEFFHLRFEKPVLGVLDVAGQLPLPPYIEHVPDGEDAERYQTVFAREPGAVAAPTAGLHFTAAMLDALAQAGIDHARLTLHVGAGTFQPVRVENLAEHRMHHERYQIPAGTLAAIQAARARGGRVVAVGTTSLRALEAACQHGDFAEPEGDTDIFITPGYQFRAVDSLITNFHLPKSTLLMLVSAFMGYDRMRAAYAHAVAAEYRFFSYGDAMLLERR

SEQ ID NO: 65144 - protein, 338 aa, Chitinimonas sp.
  REGION 1..338: note = tr|A0A516SH37|A0A516SH37_9MICO S-adenosylmethionine:tRNA ribosyltransferase-isomerase; OS = Chitinimonas sp. R3-44 OX=2594795 GN=queA PE=3 SV=1
MQLSDFDYALPEHLIAQFPPAVRGGSRLLHLPAQGGTFDRHFADLPDLLRAGDLLVLNDTRVIKARLLGQKASGGQVEALIERVSDEFEALAQVRASKSPKPGSVLIFGGRWRAHMLAREGEFFRLRFEAPVLDVLEAAGALPLPPYIEHRPDASDDERYQTVFSREPGAVAAPTAGLHFTEAMFAALAERGIAHARLTLHVGAGTFQPVRVDNLAEHRMHHERYQIPAETLAAIRATRERGGRVIAVGTTSLRAMEAACQDGDFAAPEGDTDIFITPGYAFRAVDALLTNFHLPKSTLLMLVSAFAGYERIQAAYRHAVEHEYRFFSYGDAMLLERR

SEQ ID NO: 65145 - protein, 337 aa, Chitinimonas taiwanensis
  REGION 1..337: note = tr|A0A1K2HH92|A0A1K2HH92_9BURK S-adenosylmethionine:tRNA ribosyltransferase-isomerase; OS = Chitinimonas taiwanensis DSM 18899 OX=1121279 GN=queA; PE = 3 SV=1
MQLSDFDYHLPEHLIAQFPPAVRGGSRLLHLPAGGGLHDRQFADLPSLLRRGDLLVLNDTRVIKARLFGQKDSGGQVEVMIERVLSEYEALAMVRASKSPKPDSWLQFGEHRAQMLAREGEFFHLRFAAPVLDVLEAAGQLPLPPYIEHRPDGEDAERYQTVFAREPGAVAAPTAGLHFTEAMLATLAEQGIAHARLTLHVGAGTFQPVRVENLAEHRMHHERYRIPPETLAAIAATRAAGGRIVAVGTTSLRALEAACQTGDFAAPEGDTDIFITPGYSFRAVDALITNFHLPKSTLLMLVSALMGYERMQAAYAHAVAAEYRFFSYGDAMLLERR

SEQ ID NO: 65146 - protein, 339 aa, Chitiniphilus sp.
  REGION 1..339: note = tr|A0A4U0QCH6|A0A4U0QCH6_9NEIS S-adenosylmethionine:tRNA ribosyltransferase-isomerase; OS = Chitiniphilus sp. HX-2-15 OX=2571148 GN=queA PE=3 SV=1
MQISDFDYFLPEHLIAQFPPAERGASRLMHVAATGAAHGWFRELPGLLRAGDVLVFNDTKVIKARLFGHKASGGAIEVLVERVLDTRNALAHVRASKAPKPGTRLVFDGFEAEMVERQGDLFLLRFLGERSVLERLEEAGRLPLPPYITHTPDDEDARRYQTVYARDPGAVAAPTAGLHFTEALLDEIRALGVQTHFLTLHVGAGTFQPVRVDDIAQHVMHHERYSIPAATIEAIRAAKASGGRVIAVGTTSLRALEAASQEVLLGQPEGDTDIFITPGYRFRVVDRLITNFHLPKSTLLMLVSAFIGLDAMRAAYAEAVAREYRFFSYGDAMLLERAG

SEQ ID NO: 65147 - protein, 338 aa, unidentified
  source 1..338: note = Chitinivibrio alkaliphilus
  REGION 1..338: note = tr|U7D6F1|U7D6F1_9BACT S-adenosylmethionine:tRNA ribosyltransferase-isomerase OS=Chitinivibrio alkaliphilus ACht1 OX=1313304 GN=queA PE=3 SV=1
MLKTSDFDYILPSTLIATRPLEDRASARMMVLPRRNKEQIHATFADLPRFLRKGDRLVFNDTRVIPGRVFAHRSTGASVEILFTEPCDSHTWKALVRPGRKMRVGDEVLLGNAQITVQEILPDGLRVLRATQPIKELMDVHGEMPIPPYMERHADEKDKQTYQTVYAKNAGAVAAPTAGLHFTTELLQELTDAGVDSTYITLHVGVGTFRPVSEENPLDHPMHSEYFHISPEAVEEIEETRRAGGRIIAVGTTVVRALEAASQGGSLESGERSTNLMIMPGYTYQIVDGLITNFHLPRSTLLMLVSAFYSREALLSAYEEAIRHSYRFYSYGDGMLLI

SEQ ID NO: 65148 - protein, 349 aa, Chitinophaga arvensicola
  REGION 1..349: note = tr|A0A1I0SDB7|A0A1I0SDB7_9BACT S-adenosylmethionine:tRNA ribosyltransferase-isomerase; OS = Chitinophaga arvensicola OX=29529 GN=queA PE=3 SV=1
MKLSQFKFDLPLNLIAQHPTKTRDESRLMVVHRNTGKIEHKVFKDILGYFNDKDVMIVNNTKVFPARLYGRKEKTGAKIEVFLLRELNKQNRLWDVIVDPARKIRVGNKLYFGDDETLVAEVIDNTTSRGRTIRFLFEGNDEEFKQVLDQLGETPLPKYIKRKPEDEDKERYQTVYAKYEGAVAAPTAGLHFSRELIKRLEIKGVKFAEVTLHTGLGTFRPIEVEDLSKHKMDAEYFHIEEHAVKVVNKAKEENRKICAIGTTSVRAVESSVTAQNHLKAAEGWTNTFIHPPYDFAIPNALVTNFHLPKTSLLIMTCAFAGYDLIMEAYQQAIKEKYRFFSYGDAMLIV

SEQ ID NO: 65149 - protein, 349 aa, unidentified
  source 1..349: note = Chitinophaga barathri
  REGION 1..349: note = tr|A0A3N4MH60|A0A3N4MH60_9BACT S-adenosylmethionine:tRNA ribosyltransferase-isomerase; OS = Chitinophaga barathri OX=1647451 GN=queA PE=3 SV=1
MKLSQFKFDLPLNLIAQHPSKTRDESRLMIVNRATGKIEHKVFKDILGYFNDKDVMVVNNTKVFPARLYGRKEKTGAKIEVFLLRELNKQNRLWDVIVDPARKIRVGNKLYFGDDESLVAEVIDNTTSRGRTIRFLFEGNDDEFKAVLDSLGETPLPKYIKRKPEEDDKERYQTVYAKYEGAVAAPTAGLHFSRELIKRLEIKGVKFAEVTLHTGLGTFRPIEVEDLSKHKMDAEYFHIDEYAVKIVNKAKEDNRKICAIGTTTVRAVESSVTAQNHLKAAEGWTNTFIHPPYDFSIPNALVTNFHLPKTSLLIMVCAFAGYDLIMEAYQQAIKEKYRFFSYGDAMLII

SEQ ID NO: 65150 - protein, 349 aa, unidentified
  source 1..349: note = Chitinophaga caeni
  REGION 1..349: note = tr|A0A291QTW5|A0A291QTW5_9BACT S-adenosylmethionine:tRNA ribosyltransferase-isomerase; OS = Chitinophaga caeni OX=2029983 GN=queA PE=3 SV=1
MKLSQFRFDLPTNLIAQHPSKTRDESRLMVVHRDSGKIEHKLFKDILGYFNDKDVMIVNNTKVFPARLYGRKEKTGAKIEVFLLRELNKTNRLWDVIVDPARKIRVGNKLYFGDDESLVAEVIDNTTSRGRTIRFLFDGSEEEFKQVLESLGETPLPKYIKRKPEDDDKERYQTVYAKYEGAVAAPTAGLHFSRELIKRLEIKGVKFAEVTLHTGLGTFRPIEVEDLSKHKMDAEYFHIEENAVKIVNKAKEENRRVCAIGTTSVRAVESSVTAQNHLKAAEGWTNTFIHPPYDFSIPNSLVTNFHLPKTSLIIMVCAFAGYDLIMEAYQQAIKEKYRFFSYGDAMLIL

SEQ ID NO: 65151 - protein, 349 aa, unidentified
  source 1..349: note = Chitinophaga costaii
  REGION 1..349: note = tr|A0A1C3ZYQ7|A0A1C3ZYQ7_9BACT S-adenosylmethionine:tRNA ribosyltransferase-isomerase; OS = Chitinophaga costaii OX=1335309 GN=queA PE=3 SV=1
MKLSQFKFDLPLNLIAQHPSKTRDESRLMVVHRATGKIEHKLFKDVINYFNDKDVMIVNNTKVFPARLYGRKEKTGAKIEVFLLRELNKQNRLWDVIVDPARKIRVGNKLYFGDDETLVAEVIDNTTSRGRTIRFLFEGNDEEFKQVLDSLGETPLPKYIKRKPEEEDKERYQTVYAKYEGAVAAPTAGLHFSRELIKRLEIKGVKFAEVTLHTGLGTFRPIEVEDLSKHKMDAEYFHIDEHAVKVVNKAKEENRKICAIGTTSVRAVESSVTAQNHLKAAEGWTNTFIHPPYDFSIPNALVTNFHLPKTSLLIMVCAFAGYDLVMEAYQQAIKEKYRFFSYGDAMLIL

SEQ ID NO: 65152 - protein, 349 aa, unidentified
  source 1..349: note = Chitinophaga cymbidii
  REGION 1..349: note = tr|A0A512RKA4|A0A512RKA4_9BACT S-adenosylmethionine:tRNA ribosyltransferase-isomerase; OS = Chitinophaga cymbidii OX=1096750 GN=queA PE=3 SV=1
MKLSQFKFDLPLNLIAQHPSKTRDESRLMVVNRTTGKIEHKVFKDILGYFNDKDVMIVNNTKVFPARLYGRKEKTGAKIEVFLLRELNKQNRLWDVIVDPARKIRVGNKLYFGDDESLVAEVIDNTTSRGRTIRFLFEGNDEEFKAVLDSLGETPLPKYIKRKPEDEDKERYQTVYAKFEGAVAAPTAGLHFSRELIKRLEIKGVKFAEVTLHTGLGTFRPIEVEDLSKHKMDAEYFHIDEYAVKIVNKAKEDNRKICAIGTTSVRAIESSVTAQNHLKAAEGWTNTFIHPPYDFSIPNALVTNFHLPKTSLLIMVCAFAGYDLIMEAYQQAIKEKYRFFSYGDAMLII

SEQ ID NO: 65153 - protein, 349 aa, unidentified
  source 1..349: note = Chitinophaga dinghuensis
  REGION 1..349: note = tr|A0A327WAZ9|A0A327WAZ9_9BACT S-adenosylmethionine:tRNA ribosyltransferase-isomerase; OS = Chitinophaga dinghuensis OX=1539050 GN=queA PE=3 SV=1
MKLSQFKFDLPLNLIAQHPSKTRDESRLMVVHRATGKIEHKVFKDILGYFNDKDVMIVNNTKVFPARLYGRKEKTGAKIEVFLLRELNKQNRLWDVIVDPARKIRVGNKLYFGDDESLVAEVIDNTTSRGRTIRFLFEGNDDEFKQVLDTLGETPLPKYIKRKPEEEDKERYQTVYAKYEGAVAAPTAGLHFSRELIKRLEIKGVKFAEVTLHTGLGTFRPIEVEDLSKHKMDAEYFHIDEHAVKIVNKAKEENRKICAIGTTSVRAVESSVTAQNHLKAAEGWTNTFIHPPYDFAIPNALVTNFHLPKTSLLIMTCAFAGYDLVMEAYQQAIKEKYRFFSYGDAMLIL

SEQ ID NO: 65154 - protein, 361 aa, Chitinophaga eiseniae
  REGION 1..361: note = tr|A0A1T4KH62|A0A1T4KH62_9BACT S-adenosylmethionine:tRNA ribosyltransferase-isomerase; OS = Chitinophaga eiseniae OX=634771 GN=queA PE=3 SV=1
MHPLKNSYSYRNMKLSQFKFDLPLNLIAQHPSKTRDESRLMVVNRTTGKIEHKVFKDILGYFNDKDVMIVNNTKVFPARLYGRKEKTGAKIEVFLLRELNKQNRLWDVIVDPARKIRVGNKLYFGDDESLVAEVIDNTTSRGRTIRFLFEGNDEEFKQVLDTLGETPLPKYIKRKPEEEDKERYQTVYAKYEGAVAAPTAGLHFSRELIKRLEIKGVKFAEVTLHTGLGTFRPIEVEDLSKHKMDAEYFHIEEHAVKVVNKAKEENRRICAIGTTSVRAVESSVTAQNHLKAAEGWTNTFIHPPYDFAIPNALVTNFHLPKTSLLIMVCAFAGYDLIMEAYQQAIKEKYRFFSYGDAMLII

SEQ ID NO: 65155 - protein, 349 aa, Chitinophaga filiformis
  REGION 1..349: note = tr|A0A1G7X409|A0A1G7X409_CHIFI S-adenosylmethionine:tRNA ribosyltransferase-isomerase; OS = Chitinophaga filiformis OX=104663 GN=queA PE=3 SV=1
MKLSQFRFDLPLNLIAQHPSKTRDEARLMVVNRATGKIEHKVFRDIINYFNDKDVMVVNNTKVFPARLYGRKEKTGAKIEVFLLRELNKQNRLWDVIVDPARKIRVGNKLYFGDDESLVAEVIDNTTSRGRTIRFLFEGNDDEFKQVLDTLGETPLPKYIKRKPEDEDKERYQTVYAKYEGAVAAPTAGLHFSRELIKRLEIKGVKFAEVTLHTGLGTFRPIEVEDLSKHKMDAEYFNIDEYAVKIVNKAKEENRKVCAIGTTTVRAVESSVTAQNLLKAAEGWTNTFIHPPYDFAIPNALVTNFHLPKTSLLIMVCAFAGYDLVMEAYQQAIKEKYRFFSYGDAMLII

SEQ ID NO: 65156 - protein, 349 aa, unidentified
  source 1..349: note = Chitinophaga flava
  REGION 1..349: note = tr|A0A365XPP1|A0A365XPP1_9BACT S-adenosylmethionine:tRNA ribosyltransferase-isomerase; OS = Chitinophaga flava OX=2259036 GN=queA PE=3 SV=1
MKLSQFKFDLPLNLIAQHPSKTRDESRLMVVNRVTGKIEHKVFKDILGYFNDKDVMIVNNTKVFPARLYGRKEKTGAKIEVFLLRELNKQNRLWDVIVDPARKIRVGNKLYFGDDESLVAEVIDNTTSRGRTIRFLFEGNDDEFKQVLDTLGETPLPKYIKRKPEEEDKERYQTVYAKYEGAVAAPTAGLHFSRELIKRLEIKGVKFAEVTLHTGLGTFRPIEVEDLSKHKMDAEYFLIDEHAVKVVNKAKEENRRICAIGTTSVRAVESSVTAQNLLKAAEGWTNTFIHPPYDFAIPNALVTNFHLPKTSLLIMTCAFAGYDLIMEAYQQAIKEKYRFFSYGDAMLII

SEQ ID NO: 65157 - protein, 349 aa, Chitinophaga ginsengisegetis; identical to SEQ ID NO: 65148
  REGION 1..349: note = tr|A0A1T5P2C6|A0A1T5P2C6_9BACT S-adenosylmethionine:tRNA ribosyltransferase-isomerase; OS = Chitinophaga ginsengisegetis OX=393003 GN=queA PE=3 SV=1

SEQ ID NO: 65158 - protein, 349 aa, Chitinophaga ginsengisoli; identical to SEQ ID NO: 65155
  REGION 1..349: note = tr|A0A2P8FZ43|A0A2P8FZ43_9BACT S-adenosylmethionine:tRNA ribosyltransferase-isomerase; OS = Chitinophaga ginsengisoli OX=363837 GN=queA PE=3 SV=1

SEQ ID NO: 65159 - protein, 349 aa, Chitinophaga japonensis
  REGION 1..349: note = tr|A0A562T3S7|A0A562T3S7_CHIJA S-adenosylmethionine:tRNA ribosyltransferase-isomerase; OS = Chitinophaga japonensis OX=104662 GN=queA PE=3 SV=1
MKLSQFKFDLPLNLIAQHPSKSRDESRLMVVNRATGKIEHKLFRDIISYFNDKDVMVVNNTKVFPARLYGRKEKTGAKIEVFLLRELNKQNRLWDVIVDPARKIRVGNKLYFGDDESLVAEVIDNTTSRGRTIRFLFEGNDDEFKAVLDTLGETPLPKYIKRKPEDEDKERYQTVYAKYEGAVAAPTAGLHFSRELIKRLEIKGIKFAEVTLHTGLGTFRPIEVEDLSKHKMDAEYFHIDEYAVKIVNKAKDENRKICAIGTTTVRAVESSVTAQNHLKAAEGWTNTFIHPPYDFSIPNALVTNFHLPKTSLLIMVCAFAGYDLIMEAYQQAIKEKYRFFSYGDAMLIL

SEQ ID NO: 65160 - protein, 349 aa, unidentified
  source 1..349: note = Chitinophaga jiangningensis
  REGION 1..349: note = tr|A0A1M7FFC6|A0A1M7FFC6_9BACT S-adenosylmethionine:tRNA ribosyltransferase-isomerase; OS = Chitinophaga jiangningensis OX=1419482 GN=queA PE=3 SV=1
MKLSQFKFDLPLNLIAQHPSKTRDESRLMVVHRATGKIEHKVFKDILGYFNDKDVMVVNNTKVFPARLYGRKEKTGAKIEVFLLRELNKQNRLWDVIVDPARKIRVGNKLYFGDDESLVAEVIDNTTSRGRTIRFLFEGNDEEFKAVLDTLGETPLPKYIKRKPEEEDKERYQTVYAKYEGAVAAPTAGLHFSRELIKRLEIKGVKFAEVTLHTGLGTFRPIEVEDLSKHKMDAEYFHIDEHAVKIVNKAKEENRKICAIGTTSVRAVESSVTAQNHLKAAEGWTNTFIHPPYDFAIPNALVTNFHLPKTSLLIMTCAFAGYDLVMEAYQQAIKEKYRFFSYGDAMLIL

SEQ ID NO: 65161 - protein, 349 aa, Chitinophaga niabensis
  REGION 1..349: note = tr|A0A1N6H6U4|A0A1N6H6U4_9BACT S-adenosylmethionine:tRNA ribosyltransferase-isomerase; OS = Chitinophaga niabensis OX=536979 GN=queA PE=3 SV=1
MKLSQFKFDLPLNLIAQHPTKTRDESRLMVVNRATGKIEHKVFKDVLGYFNDKDVMVVNNTKVFPARLYGRKEKTGAKIEVFLLRELNKLNRLWDVIVDPARKIRVGNKLYFGDDESLVAEVIDNTTSRGRTIRFLFEGNDEEFKAVLDSLGETPLPKYIKRKPEDDDKERYQTVYAKYEGAVAAPTAGLHFSRELIKRLEIKGVKFAEVTLHTGLGTFRPIEVEDLSKHKMDAEYFHIDEYAVKIVNKAKEENRKICAIGTTTVRAVESSVTAQNHLKAAEGWTNTFIHPPYDFSIPNALVTNFHLPKTSLLIMVCAFAGYDLVMEAYQQAIKEKYRFFSYGDAMLII

SEQ ID NO: 65162 - protein, 349 aa, Chitinophaga niastensis
  REGION 1..349: note = tr|A0A2P8HM46|A0A2P8HM46_9BACT S-adenosylmethionine:tRNA ribosyltransferase-isomerase; OS = Chitinophaga niastensis OX=536980 GN=queA PE=3 SV=1
MKLSQFKFDLPLNLIAQHPTKTRDESRLMVVHRNTGKIEHKVFKDILGYFNDKDVMIVNNTKVFPARLYGRKEKTGAKIEVFLLRELNKQNRLWDVIVDPARKIRVGNKLYFGDDESLVAEVIDNTTSRGRTIRFLFEGNDDEFKQILDLLGETPLPKYIKRKPEDEDKERYQTVYAKYEGAVAAPTAGLHFSRELIKRLEIKGVKFAEVTLHTGLGTFRPIEVEDLSKHKMDAEYFHIEDHAVKTVNKAKEENRRICAIGTTSVRAVESSVTAQNLLKAAEGWTNTFIHPPYEFAIPNALVTNFHLPKTSLLIMTCAFAGYDLIMEAYQQAIKEKYRFFSYGDAMLIV

SEQ ID NO: 65163 - protein, 349 aa, unidentified
  source 1..349: note = Chitinophaga parva
  REGION 1..349: note = tr|A0A2T7BEU1|A0A2T7BEU1_9BACT S-adenosylmethionine:tRNA ribosyltransferase-isomerase; OS = Chitinophaga parva OX=2169414 GN=queA PE=3 SV=1
MKLSQFKFDLPLNLIAQHPSKTRDESRLMVVHRATGKIEHKLFKDVINYFNDKDVMIVNNTKVFPARLYGRKEKTGAKIEVFLLRELNKQNRLWDVIVDPARKIRVGNKLYFGDDETLVAEVIDNTTSRGRTIRFLFEGNDEEFKQVLDSLGETPLPKYIKRKPEEEDKERYQTVYAKYEGAVAAPTAGLHFSRELIKRLEIKGIKFAEVTLHTGLGTFRPIEVEDLSKHKMDAEYFHIDEHAVKVVNKAKEENRKICAIGTTSVRAVESSVTAQNHLKAAEGWTNTFIHPPYDFSIPNALVTNFHLPKTSLLIMVCAFAGYDLVMEAYQQAIKEKYRFFSYGDAMLIL

SEQ ID NO: 65164 - protein, 349 aa, Chitinophaga pinensis
  REGION 1..349: note = tr|A0A561IQV3|A0A561IQV3_9BACT S-adenosylmethionine:tRNA ribosyltransferase-isomerase; OS = Chitinophaga pinensis OX=79329 GN=queA PE=3 SV=1
MKLSQFRFDLPLNLIAQHPSKTRDEARLMVVNRATGKIEHKVFKDILNYFNDKDVMMVNNTKVFPARLYGRKEKTGAKIEVFLLRELNKQNRLWDVIVDPARKIRVGNKLYFGDDESLVAEVIDNTTSRGRTIRFLFEGNDDEFKQVLDTLGETPLPKYIKRKPEDEDKERYQTVYAKYEGAVAAPTAGLHFSRELIKRLEIKGIKFAEVTLHTGLGTFRPIEVEDLSKHKMDAEYFNIDEYAVKIVNKAKEENRKVCAIGTTTVRAVESSVTAQNMLKAAEGWTNTFIHPPYDFAIPNALVTNFHLPKTSLLIMVCAFAGYDLVMEAYQQAIKEKYRFFSYGDAMLIL

SEQ ID NO: 65165 - protein, 349 aa, Chitinophaga pinensis
  REGION 1..349: note = tr|C7PSY7|C7PSY7_CHIPD S-adenosylmethionine:tRNA ribosyltransferase-isomerase OS=Chitinophaga pinensis (strain ATCC 43595 / DSM 2588 / NCIB 11800 / UQM 2034); OX = 4859 18 GN=queA PE=3 SV=1
MKLSQFRFDLPLNLIAQHPSKTRDEARLMVVNRATGKIEHKVFRDIINYFNDKDVMVVNNTKVFPARLYGRKEKTGAKIEVFLLRELNKQNRLWDVIVDPARKIRVGNKLYFGDDESLVAEVIDNTTSRGRTIRFLFEGDDNEFKQVLDTLGETPLPKYIKRKPEEEDKERYQTVYAKHEGAVAAPTAGLHFSRELIKRLEIKGVKFAEVTLHTGLGTFRPIEVEDLSKHKMDAEYFNIDEYAVKVVNKAKEENRKVCAIGTTTVRAVESSVTAQNLLKAAEGWTNTFIHPPYDFAIPNALVTNFHLPKTSLLIMVCAFAGYDLVMEAYQQAIKEKYRFFSYGDAMLII

SEQ ID NO: 65166 - protein, 349 aa, unidentified
  source 1..349: note = Chitinophaga polysaccharea
  REGION 1..349: note = tr|A0A561P637|A0A561P637_9BACT S-adenosylmethionine:tRNA ribosyltransferase-isomerase; OS = Chitinophaga polysaccharea OX=1293035 GN=queA PE=3 SV=1
MKLSQFKFDLPLNLIAQHPTKTRDESRLMVVHRNTGKIEHKVFKDILGYFNDKDVMIVNNTKVFPARLYGRKEKTGAKIEVFLLRELNKQNRLWDVIVDPARKIRVGNKLYFGDDETLVAEVIDNTTSRGRTIRFLFEGNDEEFKQVLDQLGETPLPKYIKRKPEDEDKERYQTVYAKYEGAVAAPTAGLHFSRELIKRLEIKGVKFAEVTLHTGLGTFRPIEVEDLSKHKMDAEYFLIEEHAVKVVNKAKEENRRICAIGTTSVRAVESSVTAQNHLKAAEGWTNTFIHPPYDFAIPNAMVTNFHLPKTSLLIMTCAFAGYDLIMEAYQQAIKEKYRFFSYGDAMLII

SEQ ID NO: 65167 - protein, 349 aa, Chitinophaga rupis
  REGION 1..349: note = tr|A0A1H8CRF4|A0A1H8CRF4_9BACT S-adenosylmethionine:tRNA ribosyltransferase-isomerase; OS = Chitinophaga rupis OX=573321 GN=queA PE=3 SV=1
MKLSQFKFDLPLNLIAQHPSKSRDESRLMVVNRATGKIEHKVFRDIIGYFNDKDVMVVNNTKVFPARLYGRKEKTGAKIEVFLLRELNKQNRLWDVIVDPARKIRVGNKLYFGDDESLVAEVIDNTTSRGRTIRFLFEGNDDEFKAVLDTLGETPLPKYIKRKPEDEDKERYQTVYAKYEGAVAAPTAGLHFSRELIKRLEIKGVKFAEVTLHTGLGTFRPIEVEDLSKHKMDAEYFHIEEYAVKIVNKAKDENRKICAIGTTTVRAVESSVTAQNHLKAAEGWTNTFIHPPYDFSIPNALVTNFHLPKTSLLIMVCAFAGYDLIMEAYQQAIKEKYRFFSYGDAMLIL

SEQ ID NO: 65168 - protein, 349 aa, Chitinophaga sancti; identical to SEQ ID NO: 65164
  REGION 1..349: note = tr|A0A1K1Q863|A0A1K1Q863_9BACT S-adenosylmethionine:tRNA ribosyltransferase-isomerase; OS = Chitinophaga sancti OX=1004 GN=queA PE=3 SV=1

SEQ ID NO: 65169 - protein, 349 aa, Chitinophaga skermanii
  REGION 1..349: note = tr|A0A327Q9J9|A0A327Q9J9_9BACT S-adenosylmethionine:tRNA ribosyltransferase-isomerase; OS = Chitinophaga skermanii OX=331697 GN=queA PE=3 SV=1
MKLSQFKFDLPLNLIAQHPSKTRDEARLMVVHRSTGKIEHKVFKDILGYFNDKDVMVVNNTKVFPARLYGRKEKTGAKIEVFLLRELNKANRLWDVIVDPARKIRVGNKLYFGDDESLVAEVIDNTTSRGRTIRFLFEGSEEEFKQVLDSLGETPLPKYIKRKPEEDDKERYQTVYAKYEGAVAAPTAGLHFSRELIKRLEIKGVKFAEVTLHTGLGTFRPIEVEDLSKHKMDAEYFHIDETAVKIVNKAKEENRKVCAIGTTSVRAVESSVTAQNHLKAAEGWTNTFIHPPYDFAIPNALVTNFHLPKTSLLIMVSAFAGYDLVMEAYQQAIKEKYRFFSYGDAMLIL

SEQ ID NO: 65170 - protein, 349 aa, Chitinophaga sp.
  REGION 1..349: note = tr|A0A5B9WUP7|A0A5B9WUP7_9BACT S-adenosylmethionine:tRNA ribosyltransferase-isomerase; OS = Chitinophaga sp. XS-30 OX=2604421 GN=queA PE=3 SV=1
MKLSQFKFDLPLNLIAQHPSKTRDESRLMVVNRATGKIEHKVFKDILGYFSDKDVMVVNNTKVFPARLYGRKEKTGAKIEVFLLRELNKQNRLWDVIVDPARKIRVGNKLYFGDDESLVAEVIDNTTSRGRTIRFLFEGNDEEFKAVLDSLGETPLPKYIKRKPEDEDKERYQTVYAKFEGAVAAPTAGLHFSRELIKRLEIKGVKFAEVTLHTGLGTFRPIEVEDLSKHKMDAEYFHIDEYAVKIVNKAKEDNRKICAIGTTTVRAVESSVTAQNHLKAAEGWTNTFIHPPYDFSIPNALVTNFHLPKTSLLIMVCAFAGYDLIMEAYQQAIKEKYRFFSYGDAMLII

SEQ ID NO: 65171 - protein, 349 aa, Chitinophaga sp.
  REGION 1..349: note = tr|A0A1I0PWH4|A0A1I0PWH4_9BACT S-adenosylmethionine:tRNA ribosyltransferase-isomerase; OS = Chitinophaga sp. YR573 OX=1881040 GN=queA PE=3 SV=1
MKLSQFRFDLPLNLIAQHPSKTRDEARLMVVNRATGKIEHKVFRDIIGYFNDKDVMVVNNTKVFPARLYGRKEKTGAKIEVFLLRELNKQNRLWDVIVDPARKIRVGNKLYFGDDESLVAEVIDNTTSRGRTIRFLFEGNDEEFKQVLDTLGETPLPKYIKRKPEDEDKERYQTVYAKYEGAVAAPTAGLHFSRELIKRLEIKGVKFAEVTLHTGLGTFRPIEVEDLSKHKMDAEYFNIDEYAVKIVNKAKEDNRKVCAIGTTTVRAVESSVTAQNLLKAAEGWTNTFIHPPYDFSIPNALVTNFHLPKTSLLIMVCAFAGYDLVMEAYQQAIKEKYRFFSYGDAMLII

SEQ ID NO: 65172 - protein, 349 aa, Chitinophaga terrae
  REGION 1..349: note = tr|A0A1H4FJH9|A0A1H4FJH9_9BACT S-adenosylmethionine:tRNA ribosyltransferase-isomerase; OS = Chitinophaga terrae Kim and Jung 2007 OX=408074 GN=queA; PE = 3 SV=1
MKLSQFKFDLPLNLIAQHPSKTRDESRLMVVNRSTGKIEHKLFKDILGYFNDKDVMIVNNTKVFPARLYGRKEKTGAKIEVFLLRELNKQNRLWDVIVDPARKIRVGNKLYFGDDETLVAEVIDNTTSRGRTIRFLFEGNDDEFKVVLDQLGETPLPKYIKRKPEEEDKERYQTVYAKYEGAVAAPTAGLHFSRELIKRLEIKGVRFAEVTLHTGLGTFRPIEVEDLSKHKMDAEYFHIDEHAVKIVNKAKEENRRICAIGTTSVRAVESSVTAQNHLKAAEGWTNMFIHPPYDFAIPNALVTNFHLPKTSLLIMTCAFAGYDLVMEAYQQAIKEKYRFFSYGDAMLII

SEQ ID NO: 65173 - protein, 450 aa, unidentified
  source 1..450: note = Chitinophagaceae bacterium
  REGION 1..450: note = tr|A0A257HZ92|A0A257HZ92_9BACT S-adenosylmethionine:tRNA ribosyltransferase-isomerase; OS = Chitinophagaceae bacterium BSSC1 OX=2015574; GN = CFE25_01580 PE=3 SV=1
MLAEQVKKIQIKDYSYELPDERIAKFPLENRDQSKLLIANQAPTQASHEVNDFHEVLDLETSSTTTQQTYQIDQYLNLANHLPANSFLVFNNTKVVEARILFQKPTGGVIELFCLEPDSIYPDITSAMLQKGTVQWKCLVGGAKKWKEEFLEKTIIDQGQNITLRARRVAQGAEAYLIEFSWSQAQMSFAELLHIAGLIPLPPYLNRVAENSDAERYQTVYAKHDGSVAAPTAGLHFTEGVFASLAAKGITKDFVTLHVGAGTFKPVKADAMEDHEMHAEFIDVSDSFIENLLGRLGDPIVPVGTTSMRTLESLYWLGLKTMANPTINLADLTVHQWDPYEMNSSNVPQKNLDARTISASIALASLLQWMQTQKLSQLITKTQIIIAPGYQFRICSGLITNFHQPQSTLLLLVAALIGDTWKELYNHAMNNEFRFLSYGDGCLIWNAQAI

SEQ ID NO: 65174 - protein, 406 aa, unidentified
  source 1..406: note = Chitinophagaceae bacterium
  REGION 1..406: note = tr|A0A1Z5SK98|A0A1Z5SK98_9BACT S-adenosylmethionine:tRNA ribosyltransferase-isomerase; OS = Chitinophagaceae bacterium IBVUCB1 OX=1985173; GN = CAP35_05670 PE=3 SV=1
MSAQHPATLKIEDYTYHLPDERIARYPLTERDASKLLIYQSGLLEESTYRHIADYLPSNTLLVFNQTKVVNARLLFTKDTGGIIEIFCLEPHSQYPEIQTALLQKNKVWWQCMVGGASKWKHGMVLTVAHETPDFTLSATVIEKQQGAFTIEFTWDADITFAEVLHYIGKVPIPPYLHRDAEQGDELRYQTIYAKEEGSVAAPTAGLHFTDAVFKSFEAKNITTSFVTLHVGAGTFKPVKSETMAEHDMHTEWIEVDVAAIQSLLQHDGNIVAVGTTSMRTLESLYWIGAKLLAGMSIAGDVAVTQWEPYELPATATAQQALQAIADYLAANNLQRLITRTQILIAPSYQCRVIKGLITNFHQPQSTLLLLVAAITNGNWQAIYNHALDNDYRFLSYGDGSLIWVD

SEQ ID NO: 65175 - protein, 345 aa, unidentified
  source 1..345: note = Chlamydiales bacterium
  REGION 1..345: note = tr|A0A1M3CRX4|A0A1M3CRX4_9CHLA S-adenosylmethionine:tRNA ribosyltransferase-isomerase; OS = Chlamydiales bacterium 38-26 OX=1895743 GN=queA PE=3; SV = 1
MKNRFALTSYLYDLPEDLIAQYPCHPRDASRLLVVERDTEKIYEMPFKELCHYLEKGDSLVFNDTKVIPSRLIGQRLSGGKAEVFLLKKISSHQWEALVKPGKKMGIGTRVYFGDGFFCEVIDIHANGQRLVQLEYTGSIEEAIEKFGHVPLPYYMRRESLNEVDKERYQTVYAQNPGSVAAPTAGLHFTDEMVSHLVDKGVLIDKITLHIGLGTFLPVKTEDIRHHQMHEEIFEITETTAQNLNARNPSRKQICVGTTTCRALESAASPEGCIQSGKYHTNIFIHPGYKFKYVKNLLTNFHQPGSSLIILVSTFASHELIQNAYQKAVKDRYRFLSYGDAMLIL

SEQ ID NO: 65176 - protein, 347 aa, unidentified
  source 1..347: note = Chloracidobacterium sp.
  REGION 1..347: note = tr|A0A257B7T3|A0A257B7T3_9BACT S-adenosylmethionine:tRNA ribosyltransferase-isomerase; OS = Chloracidobacterium sp. CP2_5A OX=2012633 GN=queA PE=3; SV = 1
MRLSELHYDLPPQLIAQQPSERRDHARLLLLDRQSGAWRDAYVYDLPKFLHSGDVLALNDTRVFPARLIGQREPGGGAVEVFLVREQAPRRWTALVKPGRRVRVGDRLVFGDGRLRGTIAERTEDGRRTIVFDGAGDFFAVLDEIGRTPLPPYIAREQDSPADRERYQTVYAAAPGSIAAPTAGLHFTPELLTTLAAQGVEIVKLTLHVGYGTFQPVRAEDLAEHRVEPEVYVVPEETARRVTAAKREGRRVIAVGTTSTRTLETVARATEGGVEVVAGQGMTDLTIVPGFTFRVLDGLMTNFHLPQSSLLALVVALAGYAPVMNAYRHAVAAEYRFYSFGDAMLIL

SEQ ID NO: 65177 - protein, 347 aa, unidentified
  source 1..347: note = Chloracidobacterium thermophilum
  REGION 1..347: note = tr|G2LHC0|G2LHC0_CHLTF S-adenosylmethionine:tRNA ribosyltransferase-isomerase OS=Chloracidobacterium thermophilum (strain B) OX=981222 GN=queA PE=3 SV=1
MRLSDLHYDLPPERIAQHPCEPRDQARLLVLDRRTGALEDAHVKDLPRWLCAGDVLVLNDTRVFPARLIGRREPTGGLVEVFLVRETAPQTWTALVKPGRRVRVGDRLTFGQDELRGVVTGRLEDGRRTIAFTCEGDFFALLDRIGRTPLPPYIAREADTPSDRERYQTVYAATPGSIAAPTAGLHFTPELLSTLAAQGVEIVKLTLHVGYGTFQPVRTENLAAHRVEPEVYVVPEATAQRVNAAKREGRRVIAVGTTSTRTLETVAQDGVDGNVVRAGQGMTDLTIVPGFRFRVLDGLLTNFHLPQSSLLALVVAFGGYEPVMCAYRHAVAAGYRFYSYGDAMLLI

SEQ ID NO: 65178 - protein, 340 aa, Chlorobaculum limnaeum
  REGION 1..340: note = tr|A0A1D8D206|A0A1D8D206_CHLLM S-adenosylmethionine:tRNA ribosyltransferase-isomerase; OS = Chlorobaculum limnaeum OX=274537 GN=queA PE=3 SV=1
MKVNDFDYTLPDERIAAYPPEERGSTRLIVLDRAAQSITHSAYASLHEWLRPGDLLVLNNSKVIRARLVARKPTGARIELMLLEKHEGEQNLALYRGRLRVGDLLLAHGAELTVEALPSDGVARLSCATARLTDLFEAHGSVPIPPYLKRDAEELDRERYQTVFAELPGSVAAPTASLNLTDELLGKVRAKGVEIAHVTLHVGLGTFLPIRAESFEEHVMHREFYTIPEASARKIGATRAAGGRVVAVGTTVTRALEHAAPKLFDGGFSQEVSGEADIFIYPGYTFRIIDALLTNFHAPRSTVLMLTAAFAGTELLQRAYQQALDNGYRFLSYGDSMLVE

SEQ ID NO: 65179 - protein, 346 aa, Chlorobaculum limnaeum
  REGION 1..346: note = tr|A0A1D8D745|A0A1D8D745_CHLLM S-adenosylmethionine:tRNA ribosyltransferase-isomerase; OS = Chlorobaculum limnaeum OX=274537 GN=queA PE=3 SV=1
MRLSNFRYTLPKTRIADHPESPRDACKLMVLSRRKKEIDHKVFTDIVSYFKKGDLLVVNNSRVFPAKIFGQKEKTDAKIEVFLLRELNKEAGLWDVLVDPARKVRVGNKIYFEDDVVAEVVDNTTSRGRTIRFLNPDIDVFQMVEKIGHVPLPPYFTRKPKEADRADYQTVYANQTGAVVAPMAGLHFTMPLLQQLQKIGVKILPVTLHPSLSTFNAIEVEDVSKHKMDSEYFNIPYQTAMEVNETKMNKSGRVFVVGTTTCRALEANATVEGKIKFGQGWTDKFIYPPYTFKVTDALITNFQQPETTLMMVVSAFAEHRLLMEAYKTALKNNYRFLAYGDAMLIV

SEQ ID NO: 65180 - protein, 340 aa, Chlorobaculum parvum
  REGION 1..340: note = sp|B3QPI5|QUEA_CHLP8 S-adenosylmethionine:tRNA ribosyltransferase-isomerase OS=Chlorobaculum parvum (strain NCIB 8327) OX=517417 GN=queA PE=3 SV=1
MRVEEFDYTLPEERIATYPPAERGSTRLIVLDRAADSITHSVYASLHERLRPGDLLVLNNSKVIRARLIANKPTGGRIELMLLEKHEGVQNLALYRGRLKVGDRLLAHGAELTVEALPDHGVARLSCDTANLTELFEAHGSVPIPPYLKRDAEEVDRERYQTVFAELPGSVAAPTASLNLTDELLEKIKAKGVDVVHITLHVGLGTFLPIRSETFEEHVMHREFYNIPESSAHKIGEAKARGGRVVAVGTTVTRALEHAAPRLLDSDFSQEVSGEADIFIYPGYEFRIIDALLTNFHAPRSTVLMLTAAFAGKELLRRAYQEALERDYRFLSYGDSMFIS

SEQ ID NO: 65181 - protein, 346 aa, Chlorobaculum parvum
  REGION 1..346: note = tr|B3QP84|B3QP84_CHLP8 S-adenosylmethionine:tRNA ribosyltransferase-isomerase OS=Chlorobaculum parvum (strain NCIB 8327) OX=517417 GN=queA PE=3 SV=1
MRLSNFRYTLPKTRIADHPESPRDACKLMVLNRRKKDIEHKVFTDIVSYFKKGDLLVVNNSRVFPAKIFGQKEKTDAKIEVFLLRELNKEAGLWDVLVDPARKVRVGNKIYFEDDVVAEVVDNTTSRGRTIRFLNPDIDVFKMVEKIGQVPLPPYFTRKPKDSDRTDYQTVYASQTGAVVAPMGGLHFTMPLLEQIQKVGVKILPITLHPSLSTFNAIEVEDVSKHKMDSEYFNIPYQTAMEINETKVNKSGRVFVVGTTTCRALEANATVEGKIKFGQGWTDKFIYPPYNFKVTDALITNFQQPETTLMMVVSAFAEHRLLMDAYKTALKNNYRFLAYGDSMLIV

SEQ ID NO: 65182 - protein, 340 aa, Chlorobaculum sp.
  REGION 1..340: note = tr|A0A4Q1DGF7|A0A4Q1DGF7_9CHLB S-adenosylmethionine:tRNA ribosyltransferase-isomerase; OS = Chlorobaculum sp. 24CR OX=2508878 GN=queA PE=3 SV=1
MRVEEFDYTLPEERIATWPPAERGSTRLVVLDRAAGTIEHSAYASLHERLRPGDLLVLNNSRVIRARLFARKPTGARIELMLLEKHEGVQNLALYRGRLKPGDRLLAHGAELTVEALPDHGVARLSCETANLAELFEAHGSVPIPPYLKRDAEEVDRERYQTVFAELPGSVAAPTASLNLTDELLEKIKAKGVEIARVTLHVGLGTFLPIRSESFEEHVMHREYYNIPESSARKIGQVKARGGRVVAVGTTVTRALEHAAPKLIDSAFTQELSGEADIFIYPGYTFKIIDALLTNFHAPRSTVLMLTAALAGKELLRRAYQEALESDYRFLSYGDSMFIE

SEQ ID NO: 65183 - protein, 346 aa, Chlorobaculum sp.
  REGION 1..346: note = tr|A0A4V1MAA0|A0A4V1MAA0_9CHLB S-adenosylmethionine:tRNA ribosyltransferase-isomerase; OS = Chlorobaculum sp. 24CR OX=2508878 GN=queA PE=3 SV=1
MRLSNFRYTLPKTRIADHPESPRDACKLMVLSRRKKEIEHKVFTDIVSYFKKGDLLVVNNSRVFPAKIFGQKEKTDAKIEVFLLRELNKEAGLWDVLVDPARKVRVGNKIYFEDDVVAEVVDNTTSRGRTIRFLNPDIDVFKMVEKIGHVPLPPYFTRKPKEADRTDYQTVYANQTGAVVAPMAGLHFTMPLLQQLQKIGVKILPVTLHPSLSTFNAIEVEDVSKHKMDSEYFNIPYQTAMEVNETKMNKSGRVFVVGTTTCRALEANATVEGKIKFGQGWTDKFIYPPYNFKVTDALITNFQQPETTLMMVVSAFADHRLLMEAYKTGLKNNYRFLAYGDAMLIV

SEQ ID NO: 65184 - protein, 340 aa, Chlorobaculum tepidum
  REGION 1..340: note = sp|Q8KEY7|QUEA_CHLTE S-adenosylmethionine:tRNA ribosyltransferase-isomerase OS=Chlorobaculum tepidum (strain ATCC 49652 / DSM 12025 / NBRC 103806 / TLS); OX = 194439 GN =queA PE=3 SV=1
MKVSDFDYALPEERIACYPPAKRGSTRLIVLNRATGSITHSAYASLHEELRPGDLLVLNNSRVIRARLIAHKPTGARIELMLLEKHEEAQNLALYRGRLRIGDRLLAHGVELSVEALPSDGIARLSCATGNLADLFDAHGSVPIPPYLKRDAEELDRERYQTVFAELPGSVAAPTASLNLTDELLDKINAKGVGIAHVTLHVGLGTFLPIRSERFEEHVMHREFYNIPQTAARKIGETKASGGRVVAAGTTVTRALEHAAPKLIESGFTQEVSSEADIFIYPGYEFRIIDALITNFHAPRSTVLMLTAAFAEKELLMRAYHEALDNGYRFLSYGDSMFIS

SEQ ID NO: 65185 - protein, 346 aa, Chlorobaculum tepidum
  REGION 1..346: note = tr|Q8KCU4|Q8KCU4_CHLTE S-adenosylmethionine:tRNA ribosyltransferase-isomerase OS=Chlorobaculum tepidum (strain ATCC 49652 / DSM 12025 / NBRC 103806 / TLS); OX = 194439GN=queA-2 PE=3 SV=1
MRLSNFRYTLPKTRIADHLESPRDACKLMVLNRRKKEIEHKVFTDIVSYFKKGDLLVVNNSRVFPAKIFGQKEKTDAKIEVFLLRELNKEAGLWDVLVDPARKVRVGNKIYFEDDVVAEVVDNTTSRGRTIRFLNPDIDVFQMVEKIGHVPLPPYFTRKPKETDRTDYQTVYASQTGAVVAPMAGLHFTIPLLQQLQKIGVKILPLTLHPSLSTFNAIEVEDVSKHKMDSEYFNIPYQTAMEINETKVNKSGRVFVVGTTTCRALEANATVDGKIKFGQGWTDKFIYPPYNFKVTDALITNFQQPETTLMMVVSAFAEHRLLMEAYKTALKNNYRFLAYGDAMLIV

SEQ ID NO: 65186 - protein, 340 aa, Chlorobaculum thiosulfatiphilum
  REGION 1..340: note = tr|A0A5C4S640|A0A5C4S640_CHLTI S-adenosylmethionine:tRNA ribosyltransferase-isomerase; OS = Chlorobaculum thiosulfatiphilum OX=115852 GN=queA PE=3; SV = 1
MKVSDFDYTLPEERIACYPPEERGSTRLVVLDRATQSITHSAYAALHEWLRPGDLLVLNNSKVIRARLIARKPTGARIELMLLEKHEGEQNLALYRGRLRVGDRLLAHGVELTVEALPSDGVARFGCATARLTELFEAHGSVPIPPYLKRDAEELDRERYQTIFAELPGSVAAPTASLNLTDELLDKVRAKGVEIAHVTLHVGLGTFLPIRSESFEEHIMHREFYNIPEASARKIGKTKATGGRVVAVGTTVTRALEHAAPRLLGSEFTQEVSGEADIFIYPGYTFRIIDALLTNFHAPRSTVLMLTAAFAGTELLKQAYHEALDNGYRFLSYGDSMFIA

SEQ ID NO: 65187 - protein, 346 aa, Chlorobaculum thiosulfatiphilum
  REGION 1..346: note = tr|A0A5C4SB47|A0A5C4SB47_CHLTI S-adenosylmethionine:tRNA ribosyltransferase-isomerase; OS = Chlorobaculum thiosulfatiphilum OX=115852 GN=queA PE=3; SV = 1
MRLSNFRYTLPKTRIADHPESPRDACKLMVLSRRKKEIEHKVFTDIVSYFKKGDLLVVNNSRVFPAKIFGQKEKTDAKIEVFLLRELNKEAGLWDVLVDPARKVRVGNKIYFEDDVVAEVVDNTTSRGRTIRFLNPDIDVFQMVEKIGHVPLPPYFTRKPKEADRTDYQTVYANQTGAVVAPMAGLHFTMPLLQQLQKIGVKILPVTLHPSLSTFNAIEVEDVSKHKMDSEYFNIPYQTAMEVNETKMNKSGRVFVVGTTTCRALEANATVEGKIKFGQGWTDKFIYPPYTFKVTDALITNFQQPETTLMMVVSAFADHRLLMESYKTALKNNYRFLAYGDAMLIV

SEQ ID NO: 65188 - protein, 125 aa, unidentified
  source 1..125: note = Chlorobi bacterium
  REGION 1..125: note = tr|A0A136PH25|A0A136PH25_9BACT S-adenosylmethionine:tRNA ribosyltransferase-isomerase (Fragment) OS=Chlorobi bacterium OLB7 OX=1619898; GN = UZ07_CHB004000346 PE=3 SV=1
GDARGASELSVAQWDPYRLAESDPALPLPDEAFAAVEGWRSSQQMEAVTGRTKILIVPGYRFRACDALVTNFHQPGSTLILLVGAFLGHDLWQQVYQAALREGYRFLSYGDSSLLIQGRCGSVSP

SEQ ID NO: 65189 - protein, 322 aa, unidentified
  source 1..322: note = Chlorobi bacterium
  REGION 1..322: note = tr|A0A4P5UPU1|A0A4P5UPU1_9BACT S-adenosylmethionine:tRNA ribosyltransferase-isomerase; OS = Chlorobi bacterium OX=2268192 GN=queA PE=3 SV=1
MMVLNKATGELEDKVFKDIMDYFQKGDCIVLNDTRVFPARVFGKKEKTNAKIEVMLLRELKAQERIWDVLVEPARKVRIGNKIYFDNNKFYCEVVDNTTNRGRTVRFSYDGDLFKVIERIGEMPLPGYIKRDPTEHDKETYQCVFANPEKTASIAPPTAGLHFTQKMLKELDKKGVRIAYVSLNIGQGIFENIEVEDLTKHRMYSEYFEITKDNADTINKSLKSKKNVYAVGCSVARALEASVLTTGSVKPNRGWTDKFIYPPYEFKIANRFITNFHPPATPSILLSAAFAGKDLLFKAYKRAIKGDYRLFAYGDAMLIINE

SEQ ID NO: 65190 - protein, 341 aa, unidentified
  source 1..341: note = Chlorobium chlorochromatii
  REGION 1..341: note = sp|Q3AR26|QUEA_CHLCH S-adenosylmethionine:tRNA ribosyltransferase-isomerase OS=Chlorobium chlorochromatii (strain CaD3) OX=340177 GN=queA PE=3 SV=1
MQVADFDYHLPEERIAKYPPLERGSTRLLVLNRQSGALTHSLYAHLDTFLQAGDLLLLNNTRVVPARLFATRATGATIELMLLERHHHREQLVLYRGQLKAGEMLQSHGHTLLVEEVLPQGLARLALADGGDLHQFFTQFGSVPIPPYLKRNAEAVDRERYQTVFAAHSGSVAAPTASLNMTPELLQRLKNNGVEIAHITLHVGLGTFLPIRTESLEEHVMHRESYLLPAESVAALQRVKADGGRVVAVGTTVTRALEHSAPRILQSSAHAEIEGEADIFIYPGYRFQMVDLLLTNFHAPRSTVLMLTAACAGTDNLRAAYSEAVLQGYNFLSYGDSMLIC

SEQ ID NO: 65191 - protein, 346 aa, unidentified
  source 1..346: note = Chlorobium chlorochromatii
  REGION 1..346: note = tr|Q3AS34|Q3AS34_CHLCH S-adenosylmethionine:tRNA ribosyltransferase-isomerase OS=Chlorobium chlorochromatii (strain CaD3) OX=340177 GN=queA PE=3 SV=1
MRLSNFRYNLPRHKIANELCEPRDNCKLMVLNRRKKEIEHKQFEDIASYLKKGDLLVLNNSKVFPAKIFGQKEKTDAKIEVFLLRVLNKEAGLWDVLVDPARKVRVGNKIYFEEDVVAEVVDNTTSRGRTIRFLNPDINVFELVDRIGTIPLPPYFNRAPRPSDKEHYQTVFASEIGAVVAPMAGLHFTMPQLQAIQKMGVKILPITLHPSLSTFSAIEVEDVSKHKMDSEYFHIPYQTAMEINETKLSKSGRVIAVGTTTCRVLEANATVDGKIKFGKGWTDKFIYPPYQFKVTDCLLTTFQLPETTLMMAVSAFADHRLLMDAYKIALKEDYQFLAYGDMMFIH

SEQ ID NO: 65192 - protein, 346 aa, unidentified
  source 1..346: note = Chlorobium ferrooxidans
  REGION 1..346: note = tr|Q0YQU5|Q0YQU5_9CHLB S-adenosylmethionine:tRNA ribosyltransferase-isomerase OS=Chlorobium ferrooxidans DSM 13031 OX=377431 GN=queA PE=3 SV=1
MRLSNFRYTLPKTKIADQPTEPRDKCRLMVLNRRKKDIDHKMFDDIVSYFKKGDLLILNNSRVFPAKIFGQKEKTDAKIEVFLLRVLNKEAGLWDVLVDPARKVRVGNKIYFEEDVVAEVVDNTTSRGRTIRFLNPEIDVFSLVERIGNIPLPPYFTRPPVESDKENYQTVYASQTGAVVAPMAGLHFTMPLLQKIQKIGVKILPITLHPSLSTFNAIEVEDVSKHKMDSEYFNIPYQTAMEINETKVNKTGRIIAVGTTTCRVLEANATVDGKIKFGRGWTDKFIYPPYQFKVTDALLTNFQQPETTLLMAVSAFAEHRLLMEAYKTALKGDYQFLAYGDAMFIH

SEQ ID NO: 65193 - protein, 347 aa, unidentified
  source 1..347: note = Chlorobium ferrooxidans
  REGION 1..347: note = tr|Q0YRL8|Q0YRL8_9CHLB S-adenosylmethionine:tRNA ribosyltransferase-isomerase OS=Chlorobium ferrooxidans DSM 13031 OX=377431 GN=queA PE=3 SV=1
MRASDFDYDLPEEKIACYPPEERGSTRMLVLDRASGALRHAWYAALDEYLEPGDLLVLNNTKVVRARLHALKQTGAKIELMLLEKHQADQDRVLYRGKLKKGDTLVAYDKELLVSDIVDDGVARIEFRGGSQSGSIRDFFERFGAVPIPPYLKRDAEEVDRERYQTVFAELPGSVAAPTASLNMTPELLENIRLKGVDVVTVTLHVGLGTFLPIRVESLREHVMHREYYSISAETVEKIRKVKAAGGRIVAVGTTVTRALEHAAGRIVRSSCRAGDAPITGEADIFIFPGYSFQVIDALLTNFHAPRSTVLMLTAAFAGAEHLKRAYQSALEEGYFFLSYGDSMLII

SEQ ID NO: 65194 - protein, 343 aa, Chlorobium limicola
  REGION 1..343: note = sp|B3EGG9|QUEA_CHLL2 S-adenosylmethionine:tRNA ribosyltransferase-isomerase OS=Chlorobium limicola (strain DSM 245 / NBRC 103803 / 6330) OX=290315 GN=queA; PE = 3 SV=1
MKVSDFDYTLPEDMIARYPPAERGTTRLLVLDPATGETEHSRYAHLADFLKPGDLLLLNNSKVVRARMFASKKTGASIELMLLEKHEGVQNLVLYRGRLKKGDRLIAHSEELLVEEITGQGVARLSASDGSDLPHLFERHAEVPIPPYLKREAEAVDAERYQTVFAEQPGSVAAPTASLNMTAGLLAELGQKGIDTATVTLHVGLGTFLPIRVESFEEHVMHREYYSIPFRTIDKIRRTKAGGGRVVAVGTTVTRALEHAAGSSCWGTSVAPASGEADIFIYPGYRFRVIDALLTNFHAPRSTVLMLTAAFAGQQNLLSAYHEAIEKQYRFLSYGDSMLIRPM

SEQ ID NO: 65195 - protein, 346 aa, Chlorobium limicola
  REGION 1..346: note = tr|A0A101JQN0|A0A101JQN0_CHLLI S-adenosylmethionine:tRNA ribosyltransferase-isomerase; OS = Chlorobium limicola OX=1092 GN=queA PE=3 SV=1
MRLSNFRYTLPKTKIADHPASPRDSCKLMVLNRRKKEIEHKVFEDIVSYFKKGDLLVVNNSRVFPAKIFGQKEKTDAKIEVFLLRVLNKEAGLWDVLVDPARKVRVGNKIYFDEDVVAEVVDNTTSRGRTIRFLNPEIDVFSLVERIGHVPLPPYFTRKPKESDKENYQTVYASQTGAVVAPMAGLHFTMPLLQKIQKIGVKILPVTLHPSLSTFNAIEVEDVSKHKMDSEYFNIPYQTAMEINETKINKTGRVIAVGTTTCRVLEANATVDGKIKFGRGWTDKFIYPPYQFKVTDALLTNFQQPETTLLMVVSAFAEHRLLMEAYKTAMKSDYQFLAYGDAMFIH

SEQ ID NO: 65196 - protein, 341 aa, Chlorobium phaeobacteroides
  REGION 1..341: note = sp|A1BEM6|QUEA_CHLPD S-adenosylmethionine:tRNA ribosyltransferase-isomerase OS=Chlorobium phaeobacteroides (strain DSM 266) OX=290317 GN=queA PE=3; SV = 1
MKVSDFDYELPESHIARYPPDERGSTRLLVLQRSTGEIMHSRYAGLHGFLRKGDLLVLNNSRVVKARMFAFKPTGGKIELVLLEKHGDEQNLVLYRGSLKKGDALLAYGCEFGVEELVGQGVAVLSVKGEGTVQDVFERYAAMPIPPYLKREAEEIDRERYQTVFAEQPGSVAAPTASLNMTGELFDSLRQKGVSIASMTLHVGLGTFLPIRVDHFDEHVMHREFYVIPDETIALIRTTKNNGGRVIAVGTTVTRALEHAADVVFNSNGNGSVSGEADIFIYPGYRFRVIDALLTNFHAPRSTVLMLTAAFAGAEKLFHAYAEALRWEYDFLSYGDSMLIL

SEQ ID NO: 65197 - protein, 346 aa, Chlorobium phaeobacteroides
  REGION 1..346: note = tr|A1BGY5|A1BGY5_CHLPD S-adenosylmethionine:tRNA ribosyltransferase-isomerase OS=Chlorobium phaeobacteroides (strain DSM 266) OX=290317 GN=queA PE=3; SV = 1
MRLSNFRYILPKTKIAEKPASPRDSCRLMVLNRRKKEIDHKNFEDISGYFKKGDLLVVNNSRVFPAKIFGQKEKTDAKIEVFLLRVLNKDAGLWDVLVDPARKVRVGNKIYFDEDIVAEVVDNTTSRGRTIRFLNPEVDVFSLVERIGHVPLPPYFTRLPVDSDKEDYQTVYASQTGAVVAPMAGMHFTMPLLQKIQKMGVKILPITLHPSLSTFNAIEVEDVSKHKMDSEYFNIPYQTAMEINETKINKTGRVIAVGTSTCRVLEANATVDGKIKFGSGWTDKFIYPPYQFKVTDALITNFQQPETTLLMVVSAFAEHRLLMDAYKVALKSEYQFLAYGDAMFIY

SEQ ID NO: 65198 - protein, 341 aa, Chlorobium phaeovibrioides
  REGION 1..341: note = sp|A4SDR0|QUEA_CHLPM S-adenosylmethionine:tRNA ribosyltransferase-isomerase OS=Chlorobium phaeovibrioides (strain DSM 265 / 1930) OX=290318 GN=queA PE=3 SV=1
MKVSDFDYSLPEERIAKYPPDNRGATRLLVLNRHTGSVQHARYSNLEAFLGYGDLLVINTTKVVRARLFAVKQTGAAIELMLLEKHEGPQNLALYRGRLKKGDRLLAHGHELIVEELAGQGVARLSVEGIESVHALFQNHAEVPIPPYLKRDAEAVDRERYQTVFAEHPGSVAAPTASLNMTPELLLKLEKGGVATAVMTLHVGLGTFLPIRTETMEEHVMHREFYSIPARTIEQIHETRRSGGRVVALGTTVTRALEHAATRISAFSGSDPLVGEADIFIHPGYSFQTIDALLTNFHAPRSTVLMLTAAFAGADHLRAAYREAVEKRYDFLSYGDSMLIS

SEQ ID NO: 65199 - protein, 341 aa, Chlorobium phaeovibrioides
  REGION 1..341: note = tr|A0A3S0NAE8|A0A3S0NAE8_CHLPH S-adenosylmethionine:tRNA ribosyltransferase-isomerase; OS = Chlorobium phaeovibrioides OX=1094 GN=queA PE=3 SV=1
MKVSDFDYSLPEERIAKYPPDNRGATRLLVLNRHTGSVQHARYSNLEAFLGHGDLLVINTTKVVRARLFAVKQTGAAIELMLLEKHEGPQNLALYRGRLKQGDRLLAHGHELIVEELAGQGVARLSVEGIESVHALFQNYAEVPIPPYLKRDAEAVDRERYQTVFAEHPGSVAAPTASLNMTPELLLKLEKGGVATAGMTLHVGLGTFLPIRTETMEEHVMHREFYSIPARTIEQIHETRRSGGRVVALGTTVTRALEHAATRISAFSGSDPLVGEADIFIHPGYSFQTIDALLTNFHAPRSTVLMLTAAFAGADHLRAAYREAVEKRYDFLSYGDSMLIS

SEQ ID NO: 65200 - protein, 342 aa, Chlorobium sp.
  REGION 1..342: note = tr|A0A4R0QL20|A0A4R0QL20_9CHLB S-adenosylmethionine:tRNA ribosyltransferase-isomerase; OS = Chlorobium sp. N1 OX=2491138 GN=queA PE=3 SV=1
MRVADFDYELPDGRIARYPPEERGSTRLLVMRRREGSVRHAFYGDLDTFLSKGDLLVINNTQVVRARLMAVKSTGAKIELMLLEKHEGEQELVLYRGRLRQGDRLLSFGHEFLVEELVADGVARLTHAGGESLQKVFQAHAEVPIPPYLRREAEPLDRERYQTLFAEHPGSVAAPTASLNMTPELLGRLRSKGVDDARITLHVGLGTFLPIRTESITEHVMHREFYSIPPETLEKIRRTKAAGGRVVAVGTTVTRALEHAAPQILEGADAGPVEAEADIFLHPGGRPFRVIDALVTNFHAPRSTVLMLTAAFAGPELLRRAYREALEGEYRFLSYGDSTLIL

SEQ ID NO: 65201 - protein, 346 aa, Chlorobium sp.
  REGION 1..346: note = tr|A0A533TYU8|A0A533TYU8_CHLSQ S-adenosylmethionine:tRNA ribosyltransferase-isomerase; OS = Chlorobium sp. OX=1095 GN=queA PE=3 SV=1
MRLSNFRYTLPKTKIADEPTSPRDKCRMMVLNRRKKDIEHKVFEEIISYFKKGDLLVLNNSRVFPAKIFGQKEKTDAKIEVFLLRVLNKEAGLWDVLVDPARKVRVGNKIYFEEDVVAEVVDNTTSRGRTIRFLNPDIDVFSLVERIGNIPLPPYFTRPNRDSDRENYQTVYATETGAVVAPMAGLHFTMPVLQKIQKIGVKILPITLHPSLSTFNAIEVEDVSKHKMDSEYFNIPYQTAMAINETKVNKTGRVFAVGTTTLRVLEANATVDGKIKFGRGWTDKFIYPPYQFKVVDALLTNFQQPETTLLMAVSAFAEHRLLMEAYKIALKEDYQFLSYGDAMFIH

SEQ ID NO: 65202 - protein, 340 aa, unidentified
  source 1..340: note = Chloroflexi bacterium
  REGION 1..340: note = tr|A0A1F8TAF3|A0A1F8TAF3_9CHLR S-adenosylmethionine:tRNA ribosyltransferase-isomerase; OS = Chloroflexi bacterium RBG_19FT_COMBO_62_14 OX=1797671; GN = queA PE=3 SV=1
MRTDDFDYRLPEAFIAQRPVEPRDASRLIVMDRAGGSLTHFSFHELPRFLTRGDALVLNETRVIPGRLAAMKIPHGGRVEILLLRRLGSQTWEALVGGRGLKSGSRLIVLHGPEAEIVDELGGARRVVRFARPISEELGRIGQVPLPPYIHVPLKDPEEYQTVYAARPGSAAAPTAGLHFTGGLLERIKTTGVDIVKVVLHVGLDTFQPVTEEDPRGHLIHSEWCRVSPEAAAAVNRAKAAGRRVIAVGTTTTRTLETAGLNAPAGQTVTSFEGASELYILPGFRFKVVDALITNFHLPRSTLLMMVSAFAGRERILAAYETAKQLGYRFYSFGDAMLIL

SEQ ID NO: 65203 - protein, 342 aa, unidentified
  source 1..342: note = Chloroflexi bacterium
  REGION 1..342: note = tr|A0A1F8NLQ4|A0A1F8NLQ4_9CHLR S-adenosylmethionine:tRNA ribosyltransferase-isomerase; OS = Chloroflexi bacterium RBG_16_47_49 OX=1797639 GN=queA; PE = 3 SV=1
MRTSDFDYELPAGYIAQTPLELRDQSRLLVLNRQSGSIEHAIFTDLVKYLKAGDVLVVNETRVFPGRLFARKIPGGGRVEILLLRKRNERTWEALVGGKGLTVGRQLQVESKMPGEKIPMGEIMEDLDGAERLIQFDQPLEAFLPTIGHVPLPPYIHSRLDDPERYQTVYARNSGSAAAPTAGLHFTPQLIEVLTDLDIQFAKVTLHVGLDTFSPVNEVDPQEHKMHSEWCQITQESVDKINLARSKGGRVLAVGTTSVRLLESAVVDNKLMPFEGQTNLFILPGYKFRMVDAMITNFHLPRSTLIMLVSAFAGGENILKSYEVAKQANYRFYSFGDAMLII

SEQ ID NO: 65204 - protein, 369 aa, Chlorogloea sp.
  REGION 1..369: note = tr|A0A2T1ERJ1|A0A2T1ERJ1_9CHRO S-adenosylmethionine:tRNA ribosyltransferase-isomerase; OS = Chlorogloea sp. CCALA 695 OX=2107693 GN=queA PE=3 SV=1
MIQDSNPTLNSLNFSDSSLASYDYRLPLEQIAQNPAFPRDSAKLLVVNSSTDYHHGIFSDLPSLLQPGDLLIMNDTRVIPARLYGRKTSGAAIEVLLLEEKQTNTWLALVKPGKRLQPGVQIVFVGTKEQYITATVLEIDEPTGGRLLKFDVPNNLSLLQVIDSFGKMPLPPYITNSQADDDEYQTVYAQNLGAIASPTAGLHFTPELIQKLAELGINSAFVTLHVGVGTFRPVEVEDVTTHKMHGEWIDVSQATVEQIRATKAKGGRIIAVGTTAVRALEGAAAASGQLKPFCGKTHMFIYPGYQWRVVDGLITNFHLPRSSLLMLVSALIGRQRLLDLYEDAIAQSYRFYSFGDAMLILPEATVNRP

SEQ ID NO: 65205 - protein, 394 aa, Chlorogloeopsis fritschii
  REGION 1..394: note = tr|A0A433NRN9|A0A433NRN9_CHLFR S-adenosylmethionine:tRNA ribosyltransferase-isomerase; OS = Chlorogloeopsis fritschii PCC 6912 OX=211165 GN=queA; PE = 3 SV=1
MQQKLPETNLNLSSNPTVESSALDHSLASYDYELPNELIAQNPAFPRDSSRLLVVNSPSTGKNTEPLHYIFRDLPDLLRAGDLLVMNNTRVLSARLYGRKSTGAEVEVLLLEERQHNCWLALVKPGKRFKHGSKIIFEAKEVGEDAENLSKTFPMPSQLTATVLETDEATGGRLLQFDLPEEISLVQLLDVFGEVPLPPYITQTDAESEQYQTVYAKSPGAIAAPTAGLHFTPELLERLRQKGINQAFVTLHVGVGTFRPVEVEDVTTHKMHEEWIEVPAATVEQIRATQAAGGRVIAVGTTVVRSLEGAAVSGELQPFCGKTDLFIYPGYKWRVVEGLITNFHLPRSSLLMLVSALIGRQRLLNIYQQAIASQYRFYSFGDAMLILPEAKMVE

SEQ ID NO: 65206 - protein, 346 aa, Chloroherpeton thalassium
  REGION 1..346: note = sp|B3QXK9|QUEA_CHLT3 S-adenosylmethionine:tRNA ribosyltransferase-isomerase OS=Chloroherpeton thalassium (strain ATCC 35110 / GB-78) OX=517418 GN=queA PE=3 SV=1
MRLSDFRYTLPKTAVAEYPSEPRDSCKLMVLDRRKKTTDHKQFSDLLDYFKKGDVLVLNDTKVFPARLYGNKEKTSAKIEVFLLRELNKQAGLWDVLVEPARKVRVGNKIYFPNDLVAEVVDNTTSRGRTIRFLNPDIDIFSIVEKVGQMPIPPYIKRDPEEEDKERYQTVFARIPGAVVAPLAGLHFTNPLLKAIQDKGVEIISLTLHPGLSTFREVEVEDISKHKMDSEYYNVPYSCAKVINSIKEKKSGRVFAVGTTVCRALEANATVEGRIKFGEGWTDKYIYPPYDFKVVDALITNFHQPESTLLMLVSAFAEHDFLMKNYKLALKSDYKFLGYGDAMLIF

SEQ ID NO: 65207 - protein, 339 aa, Chloroherpeton thalassium
  REGION 1..339: note = tr|B3QV33|B3QV33_CHLT3 S-adenosylmethionine:tRNA ribosyltransferase-isomerase OS=Chloroherpeton thalassium (strain ATCC 35110 / GB-78) OX=517418 GN=queA PE=3 SV=1
MNVSDFDYTLPDEQIAKYPPKERGTTKLLALNRKTGEVQHSLYRSLDAFLEPGDLLVLNNTKVIKARLQANKPTGASVELLLLEKHEGPQQIVMYGGKIKAGNTLLVGEDEVLVEEILGNGLAKVSAAVPLLSLVEKYGNVPIPPYLNRKAEKSDEMRYQTVFAKEQGSVAAPTASLNFTESLEKKLKEKGVQLAFLTLHVGLGTFMPIRTETLSAHEMHREFYHISHETAAAIRLAKAEKRRVVALGTTVTRAIEHASARLLAHEPAELAGEADIFIYPGGYEFQIVDALLTNFHAPRSTVLMLAAAFAGAAHLKAAYEAALQNDYHFLSYGDSMFIF

SEQ ID NO: 65208 - protein, 362 aa, Chondrocystis sp.
  REGION 1..362: note = tr|A0A1Z4RVI6|A0A1Z4RVI6_9CHRO S-adenosylmethionine:tRNA ribosyltransferase-isomerase; OS = Chondrocystis sp. NIES-4102 OX=2005460 GN=queA PE=3 SV=1
MESDFLLASYNYQLPQQLIAQTPVDPRDSSRLLIVDSQTTCTHGVFRDLVEWLKPGDLLVLNDTRVIPARLYGHKTTGSQVEILLLEERLDNCWLALVKPGKRFGLGSKISFDLVNESDDLLDFSLQATVIEKDEATGGRVLKFELPAGKSLWEFLEYYGQLPLPPYITNQDTAGDRYQTVYAQHPGAIAAPTAGLHFTPELLAKLQQQGVEQSYITLHVGVGTFRPVESAEITNHTMHQEWIEVSQATVDQILATKARGGRVIAVGTTVTRALEGAAQKSFQGGKSLTAFRGQTNLFIYPGYQWQVIDGLITNFHLPGSSLLMLVSALIGRKRLLDLYQEAIALEYRFYSFGDAMLILPTA

SEQ ID NO: 65209 - protein, 361 aa, Chondromyces apiculatus
  REGION 1..361: note = tr|A0A017SZK1|A0A017SZK1_9DELT S-adenosylmethionine:tRNA ribosyltransferase-isomerase; OS = Chondromyces apiculatus DSM 436 OX=1192034 GN=queA PE=3; SV = 1
MRRDLLHFDLPAELIASRPAEDRDGARLLLVDRALPPGEVAHAHIRDLEQHIPEGALVVVNDTRVILARLLGRKRTSGGQVELLLVRKLADEPASTPTPAERWSALGRASKPIRPGADLDFGEPGTLSAHVLASGGGMLEVRLSSPAGLPLAEALDACGHIPLPPYLRRADDGADRERYQTIFARTPGAIAAPTAGLHLSERLVERLRARGVRLTSITLHVGLGTFQPVTVDDLDEHPMHEEQYLVSDEARAAIADARTRGAPVVAIGTTVVRTLESAADPERPGHVLASAGETRLLIQPGYRFRVVDALLTNFHLPESTLLALVCAFAGVDRALAAYRAAIAARYHFYSYGDAMLISGKA

SEQ ID NO: 65210 - protein, 342 aa, Chondromyces crocatus
  REGION 1..342: note = tr|A0A0K1EF36|A0A0K1EF36_CHOCO S-adenosylmethionine:tRNA ribosyltransferase-isomerase; OS = Chondromyces crocatus OX=52 GN=CMC5_036320 PE=3 SV=1
MSPAAGPRTEPLLERLLHVDPHTGALLDATVGELGRFLRAGDLLVVNDGATLPGMLRGVTADGEAIEARLAQSLEDGRFQALLFGAGDARQRTEDRRPPPQLAVGAQVRFGPGLEAVIAEVSSLSSRLVVLVFSAQGAALWEAIYRNGRPVQYAYVPAPLALWDVQTRYASRPICAEMPSAGRPLAWGLLLSLVRRGVRLASLSHAAGLSSTGDPALDARLPLAERFEIPEATVRAVLDTRSRGGRVVAVGTTVTRALEGAAVLGRGTLLAGRGVTELILGAHHAPAVVDGLLTGVHEPSESHFELLSAFAGRDVLRRAHAHAEARGYLTHEFGDSMLLLAA

SEQ ID NO: 65211 - protein, 353 aa, Chondromyces crocatus
  REGION 1..353: note = tr|A0A0K1EN91|A0A0K1EN91_CHOCO S-adenosylmethionine:tRNA ribosyltransferase-isomerase; OS = Chondromyces crocatus OX=52 GN=queA PE=3 SV=1
MLDFSLPDELIASRPTAEREEARLLLVDRTQPPGEVGHSTICKLDEHIPPGALVIVNDTRVVAARLLGRKLATGGQVELLLLRKLKSSEGGLVEHWLARGRASKPIRQGAELAFGENGEIKAHVVQCAGDAMLEVVLSSPRGVAVEKLIGIHGHIPLPPYMKRADDASDRERYQTVFARTPGAIAAPTAGLHFSNQLVEKLQSRGVKMTSITLHVGLGTFKPVTALDLDDHPMHEEEYFVSDEVSEAIDDARRRKVPVIAVGTTVVRALETAADPSRPGRVTASSGETRVLIQPGYRFRVVDALITNFHLPQSTLLALVCAFAGGRRTLAAYRAAITSSYRFYSYGDAMMVFG

SEQ ID NO: 65212 - protein, 339 aa, Christensenella minuta
  REGION 1..339: note = tr|A0A136Q6K8|A0A136Q6K8_9FIRM S-adenosylmethionine:tRNA ribosyltransferase-isomerase; OS = Christensenella minuta OX=626937 GN=queA PE=3 SV=1
MKTSDFDYNLPEELIAQTPIEPRDHSRLLVYDRETQEVSHRHFYDVTDYLKQGDVLVLNETKVLPARLYGKKRGTGTDFEFLLLKRLKLDVWEAIMRPGKKLKPGGWVDFGGDLCAELLCKKEDGVCEVRFRYDGVFEELLDKYGNMPLPPYITKRLERKERYQTVYAKEDGSAAAPTAGLHFTPELLDKIEGMGVTVVKILLHVGLGTFRPMKEETVEEHVMHSEYYSVSPQAAETINAAKREGRRVIAVGTTSVRTLESAARNRLVQAGSADTDIFIYPGYEYQIVDALITNFHLPKSTLIMLVSALMGREATLDVYRQAVEERYRFFSFGDAMMIV

SEQ ID NO: 65213 - protein, 342 aa, unidentified
  source 1..342: note = Chromatiaceae bacterium
  REGION 1..342: note = tr|A0A3D4RXB6|A0A3D4RXB6_9GAMM S-adenosylmethionine:tRNA ribosyltransferase-isomerase; OS = Chromatiaceae bacterium OX=2049432 GN=queA PE=3 SV=1
MLRSDFHFELPRELIAQRPLSQRGQSRLLFLDGANGALNDHFFYHLPLLLRPNDLLIFNNTRVIPARLFVRKTTGGRAEVLLERLLSRRRASAQIRASKSPKPGGLLLLPSGERIEVAGRDGDLFLLDSLDADLGELMRRHGHVPLPPYIERPDDAADQQRYQTLYASRDGAVAAPTAGLHFDLETLAAIKRIGVDTAQVTLHVGAGTFQPVRVEDLDQHRMHAEWLEVGERVCRQVQQTRARGGRVVAVGTTTVRSLETAAAQGELSPFSGDSRLFIRPGYRFRVVDAMITNFHLPESTLLMLVAAFAGYDRVMAAYRHAVAERYRFFSYGDAMFLTRPVI

SEQ ID NO: 65214 - protein, 355 aa, unidentified
  source 1..355: note = Chromatiales bacterium
  REGION 1..355: note = tr|A0A257SVJ4|A0A257SVJ4_9GAMM S-adenosylmethionine:tRNA ribosyltransferase-isomerase; OS = Chromatiales bacterium 21-64-14 OX=1970504 GN=queA PE=3; SV = 1
MLRRDFEYQLPADLIAQRPSDERSASRLLHLDGAADTLEDRVFRDLPGLLRPGDLLVFNDTRVIPARVYGVKPSGGRVEVLVDRVIGPAEAWVRIRASKALRPGDTLRLEGGVAAVVRERSADRFRLSFDDPRPLPDLLDEVGHVPLPPYIRRGDEPADRARYQTVYGCRPGAIAAPTAGLHFDVPILERLRERGVDSAFVTLHVGAGTFQPVREDRVEEHVMHPEQVDVGDEVCAKVRRARRAGGRVVAVGTTVVRSLESAARDGELTPLRGETDLFILPGFRFRVVDALITNFHLPGSTLLMLVCAFGGYQRVMDAYRHAVERCYRFYSYGDAMLVVPPALGPERAPAPGMTT

SEQ ID NO: 65215 - protein, 339 aa, unidentified
  source 1..339: note = Chromatiales bacterium
  REGION 1..339: note = tr|A0A524KIX3|A0A524KIX3_9GAMM S-adenosylmethionine:tRNA ribosyltransferase-isomerase; OS = Chromatiales bacterium OX=2026725 GN=queA PE=3 SV=1
MHPADFHFDLPAELIAQQALAERSASRLLHVGAGLQDLHVRDLPGLLRPGDLLVANDTRVLPARLYGRKETGGKIELLLERVLGETEALVQLRASHAPRAGAMLSFGADVTAEVIDRRNEFFVLRFSRPVVPVLEEQGHVPLPPYIRRGDEPADRERYQTVYAREQGSVAAPTAGLHVDDSLLAALAARDIEFQTLTLHVGAGTFAPLRPQQLKTGRLHAERLLVTPALCAAVVACRARGGRVIAIGTTATRALETAGESGELRPLRGETSLFIRPGFNFQIVDAMFTNFHLPESSLLMLVGAFGGTERVLAAYRHAVASRYRFFSYGDAMFVERARAI

SEQ ID NO: 65216 - protein, 346 aa, Chromatium okenii
  REGION 1..346: note = tr|A0A2S7XPG6|A0A2S7XPG6_9GAMM S-adenosylmethionine:tRNA ribosyltransferase-isomerase; OS = Chromatium okenii OX=61644 GN=queA PE=3 SV=1
MRFSRSDFHYDLPPELIAQHPLPERGGSRLLVVEHSAAALRDLQFADLPQLLRPHDLLVFNNTRVMRARLFGRKSSGGRVELLIERVLTPHIALAHLRASKAPAAGSTLLIDGVTLQVLGREGALFQLQSPELAFAELMAHHGHIPLPPYIQRPDTAADEARYQTLYASREGAVAAPTAGLHFDAAMLQRLDALGVTRAEVTLHVGAGTFQPVRVDDLDQHEMHAEWLEVTAQLCAQIAATRQVGGRVIAVGTTSVRSLETAAASGELKPYCGDSRLFIRPGYQFQVVDAILTNFHLPESTLLMLVAAFTGYDAMMNAYRHAVAEHYRFFSYGDAMFLPGRSARLK

SEQ ID NO: 65217 - protein, 354 aa, Chromatocurvus halotolerans
  REGION 1..354: note = tr|A0A4R2L7C0|A0A4R2L7C0_9GAMM S-adenosylmethionine:tRNA ribosyltransferase-isomerase; OS = Chromatocurvus halotolerans OX=1132028 GN=queA PE=3 SV=1
MQRTDFYYDLPTELIAQRPLPDRGASRLLCLQGDSGQIAHRGFSDLEALLHPGDLLVFNNTRVIPARLWGRKATGGAVEVLIERVTGDRTALAHIRASKSPKPGTRIHVAKTEGAEPGTDSFRVTGRDEGLHLIETERPVAELMARYGHMPLPPYIERADDVADQERYQTVYAAREGAVAAPTAGLHFDQALIRALVERGVSTTEVTLHVGAGTFQPVRVDDIAQHQMHAEYLEVGQDTCDAIAAARERGGRVVAVGTTAVRSLETAAAGGTLRPYQGDTRLFIHPGYRFRCIDALITNFHLPESTLLMLVSALAGREAVMAAYEEAVRERYRFFSYGDAMFVTASASALTARP

SEQ ID NO: 65218 - protein, 356 aa, Chromatocurvus sp.
  REGION 1..356: note = tr|A0A2N5XYH3|A0A2N5XYH3_9GAMM S-adenosylmethionine:tRNA ribosyltransferase-isomerase; OS = Chromatocurvus sp. F02 OX=1905677 GN=queA PE=3 SV=1
MKLSDFKYHLPPELIAQHPLAERSASRLLSLDGATGALRHLQFTDLPSCLDPGDLLVFNNTRVIPARLWGQKETGGRVEILIERLTGTSTALAHIRSSKSPRPGTRIFLTAAEGDEPGPWQLEVSGREGALFALRAPEGVALPTILGAIGHMPLPPYIQRADEVIDQSRYQTVYAEREGAVAAPTAGLHFTDALLAELQAKGIERATVTLHVGAGTFQPVRVERIEEHQMHSEYLEVDEALCAAVAATRNRGGRVVAVGTTAVRSLESAACGGGKVAPLTGDTDIFIYPGYRFRVVDAMITNFHLSESTLLMLVSAFAGREAIATAYREAIAQRYRFFSYGDAMFITPSPDALEQR

SEQ ID NO: 65219 - protein, 341 aa, unidentified
  source 1..341: note = Chromobacterium amazonense
  REGION 1..341: note = tr|A0A2S9X874|A0A2S9X874_9NEIS S-adenosylmethionine:tRNA ribosyltransferase-isomerase; OS = Chromobacterium amazonense OX=1382803 GN=queA PE=3 SV=1
MQLSDFDYHLPEALIAQHPPAVRGASRLLHVDGMTLSDLTFADFPSRLQAGDLLVFNDTRVIRARLFGEKASGGKVEALIERVLDDHTALAHVRASKSPKPGSRLIFAGRWEAEMVERHDSMFKLRFLAEENVYDILEASGKLPLPPYIERSAEQDDDERYQTVYAREQGAVAAPTAGLHFTDDMLATLQAQGIATAFVTLHVGAGTFQPVKVENVAEHKMHSEIYDIPQSTVDAVAAARARGGRVVAIGTTSVRALESAAQHGELKAGRGETDIFITPGYRFRVVDRLLTNFHLPKSTLLMLVSAFAGYDEIFHAYRHAVEQQYRFFSYGDAMLLEKKEY

SEQ ID NO: 65220 - protein, 340 aa, Chromobacterium haemolyticum
  REGION 1..340: note = tr|A0A2T5P1J0|A0A2T5P1J0_9NEIS S-adenosylmethionine:tRNA ribosyltransferase-isomerase; OS = Chromobacterium haemolyticum OX=394935 GN=queA PE=3 SV=1
MQLSDFDYHLPERLIAQHPPAERGASRLLRVAGHDRANLRFTDFIDQVSPGDVMVFNDTRVIKARLFGEKASGGKIEALIERVLDAHTALAHVRASKSPKPGTRLIFADRWEAEMVERHGELFKLRFLAEDNLFDILEASGKLPLPPYIERGAGHEDDERYQTVYARERGAVAAPTAGLHFTEDMLERLRAKGVRLAYVTLHVGAGTFQPVRVDNIAEHKMHSEIYEVPETTRALIAEAHAAGRKVLSVGTTSMRALESAARGGELTAGHGETDIFITPGYRFRVVDRLLTNFHLPKSTLLMLVSAFAGYEEIRAAYQHAVEQEYRFFSYGDAMLLERKD

SEQ ID NO: 65221 - protein, 340 aa, Chromobacterium haemolyticum
  REGION 1..340: note = tr|A0A1W0CCQ7|A0A1W0CCQ7_9NEIS S-adenosylmethionine:tRNA ribosyltransferase-isomerase; OS = Chromobacterium haemolyticum OX=394935 GN=queA PE=3 SV=1
MQLSDFDYHLPERLIAQHPPAERGASRLLRVAGHNRANLRFTDFIDQVSPGDVMVFNDTRVIKARLFGEKASGGKVEALIERVLDAHSALAHVRASKSPKPGTRLIFADRWEAEMVERHGELFKLRFLAEDNLFDILEASGKLPLPPYIERGAGHEDDERYQTVYARERGAVAAPTAGLHFTEDMLEQLRAKGVQLAYVTLHVGAGTFQPVRVDNIAEHKMHSEIYEVPEATRALIAEAHAAGRKVLSVGTTSMRALESAARGGELAAGCGETDIFITPGYRFRVVDRLLTNFHLPKSTLLMLVSAFAGYEEIRAAYQHAVEQEYRFFSYGDAMLLERKD

SEQ ID NO: 65222 - protein, 340 aa, Chromobacterium sp.
  REGION 1..340: note = tr|A0A2T5NEB6|A0A2T5NEB6_9NEIS S-adenosylmethionine:tRNA ribosyltransferase-isomerase; OS = Chromobacterium sp. Panama OX=2161826 GN=queA PE=3 SV=1
MQLSDFDYHLPERLIAQHPPAERGASRLLRVAGHDRANLRFSDFIDHISPGDVMVFNDTRVIKARLFGEKASGGKIEALIERVLDAHTALAHVRASKSPKPGTRLIFADRWEAEMVERHGELFKLRFLAEDNLFDILEASGKLPLPPYIERGAGHEDDERYQTVYARERGAVAAPTAGLHFTEDMLEQLRAKGVQLAYVTLHVGAGTFQPVRVDNIAEHKMHSEIYEVPETTRALIAEAHAAGRKVLSVGTTSMRALESAARDGELAAGCGETDIFITPGYRFRVVDRLLTNFHLPKSTLLMLVSAFAGYEEIRAAYQHAVEQEYRFFSYGDAMLLERKD

SEQ ID NO: 65223 - protein, 340 aa, Chromobacterium sp.
  REGION 1..340: note = tr|A0A2S5DGC5|A0A2S5DGC5_9NEIS S-adenosylmethionine:tRNA ribosyltransferase-isomerase; OS = Chromobacterium sp. MWU14-2602 OX=2073169 GN=queA PE=3; SV = 1
MQLSDFDYHLPEALIAQHPPAVRGASRLLHVDGMALSDLTFADFPSRLQAGDLLVFNDTRVIRARLFGEKASGGKVEALIERVLDDHTALAHVRASKSPKPGSRLIFAGRWEAEMVERQDSLFKLRFLAEEDVYDILEASGKLPLPPYIERSAEHDDDERYQTVYAREQGAVAAPTAGLHFTDDMLAGLKAQGVETAFVTLHVGAGTFQPVKVDNVAEHKMHSEIYDMPQATVDAIAAARARGGRVVAIGTTSVRALESAARGGELKAGRGETDIFITPGYTFRVVDRLLTNFHLPKSTLLMLVSAFAGYEEIFQAYRHAVEQEYRFFSYGDAMLLEKKA

SEQ ID NO: 65224 - protein, 340 aa, unidentified
  source 1..340: note = Chromobacterium sphagni
  REGION 1..340: note = tr|A0A1S1X391|A0A1S1X391_9NEIS S-adenosylmethionine:tRNA ribosyltransferase-isomerase; OS = Chromobacterium sphagni OX=1903179 GN=queA PE=3 SV=1
MQLSDFDYHLPEALIAQHPPAVRGASRLLHVDGMNLSDQTFADLPARLQAGDLLVFNDTRVIRARLFGEKASGGKIEALIERVLDDHTALAHVRSSKSPKPGSRLIFAGRWEAEMVERQGSLFKLRFLAEDKLFDILEASGKLPLPPYIERSAEGDDDERYQTVYAREQGAVAAPTAGLHFTDELLAKLQAEGVETAFVTLHVGAGTFLPVKVENVAEHKMHSEIYEIPQATVDAIARVRARGNRVVAVGTTSVRALESAARGGDLAAGRGETDIFITPGYRFRVVDRLLTNFHLPKSTLLMLVSAFAGYDEIRQAYRHAVEQQYRFFSYGDAMLLEKKD

SEQ ID NO: 65225 - protein, 340 aa, unidentified
  source 1..340: note = Chromobacterium vaccinii
  REGION 1..340: note = tr|A0A1D9LKF9|A0A1D9LKF9_9NEIS S-adenosylmethionine:tRNA ribosyltransferase-isomerase; OS = Chromobacterium vaccinii OX=1108595 GN=queA PE=3 SV=1
MQLSDFDYHLPEALIAQHPPAERGASRLLHVDGMTLSDLGFADLPSRLQAGDLLVFNDTRVIRARLFGEKASGGKVEALIERVLDDHTALAHVRASKSPKPGSRLIFAGRWEAEMVERHDALFKLRFLAEENVYDILEASGRLPLPPYIERSAEHDDDERYQTVYAREQGAVAAPTAGLHFTDEMLAGLKAQGVETAFVTLHVGAGTFQPVKVDNVAEHKMHSEIYDIPQATVDAVAAARARGGRVVAIGTTSVRALESAVRGGELTAGRGETDIFITPGYRFRVVDRLLTNFHLPKSTLLMLVSAFAGYDQIFQAYRHAVEKEYRFFSYGDAMLLEKKA

SEQ ID NO: 65226 - protein, 340 aa, unidentified
  source 1..340: note = Chromobacterium vaccinii
  REGION 1..340: note = tr|A0A2L2B947|A0A2L2B947_9NEIS S-adenosylmethionine:tRNA ribosyltransferase-isomerase; OS = Chromobacterium vaccinii OX=1108595 GN=queA PE=3 SV=1
MQLSDFDYHLPEALIAQHPPAERGASRLLHVDGMTLSDLSFADLPSRLQAGDLLVFNDTRVIRARLFGEKASGGKVEALIERVLDDHTALAHVRASKSPKPGSRLIFAGRWEAEMVERHDALFKLRFLAEENVYDILEASGKLPLPPYIERSAEHDDDERYQTVYAREQGAVAAPTAGLHFTDEMLAGLKAQGVETAFVTLHVGAGTFQPVKVDNVAEHKMHSEIYDIPQATVDAVAAARARGGRVVAIGTTSVRALESAARSGELTAGRGETDIFITPGYRFRVVDRLLTNFHLPKSTLLMLVSAFAGYDEIFQAYRHAVEKEYRFFSYGDAMLLEKKA

SEQ ID NO: 65227 - protein, 340 aa, Chromobacterium violaceum
  REGION 1..340: note = sp|Q7NZD4|QUEA_CHRVO S-adenosylmethionine:tRNA ribosyltransferase-isomerase OS=Chromobacterium violaceum (strain ATCC 12472 / DSM 30191 / JCM 1249 / NBRC 12614 / NCI MB 9131 / NCTC 9757) OX=243365 GN=queA PE=3 SV=1
MQLSDFDYHLPEALIAQHPPAERGASRLLHVDGMTLSDLSFADLPSRLQAGDLLVFNDTRVIRARLFGEKASGGKVEALIERVLDDHTALAHVRASKSPKPGSRLIFAGRWEAEMVERHDSMFKLRFLAEENVYDILEASGKLPLPPYIERSAEHDDDERYQTVYAREQGAVAAPTAGLHFTDAMLATLQAQGIATAFVTLHVGAGTFQPVKVDNVAEHKMHSEIYDIPQATVDAIAAARARGGRVVAVGTTSVRALESAARHGELKAGRGETDIFITPGYRFRVVDRLLTNFHLPKSTLLMLVSAFAGYDEIFQAYRHAVEKEYRFFSYGDAMLLEKKV

SEQ ID NO: 65228 - protein, 340 aa, Chromobacterium violaceum
  REGION 1..340: note = tr|A0A381EQ23|A0A381EQ23_CHRVL S-adenosylmethionine:tRNA ribosyltransferase-isomerase; OS = Chromobacterium violaceum OX=536 GN=queA PE=3 SV=1
MQLSDFDYHLPEALIAQHPPAERGASRLLHVDGMTLSDLGFADLPSRLQAGDLLVFNDTRVIRARLFGEKASGGKVEALIERVLDDHTALAHVRASKSPKPGSRLIFAGRWEAKMVERHDALFKLRFLAEENVYDILEASGRLPLPPYIERSAEHDDDERYQTVYAREQGAVAAPTAGLHFTDEMLAGLKAQGVETAFVTLHVGAGTFQPVKVDNVAEHKMHSEIYDIPQATVDAVAAARARGGRVVAIGTTSVRALESAARGGELTAGRGETDIFITPGYRFRVVDRLLTNFHLPKSTLLMLVSAFAGYDEIFQAYRHAVEKEYRFFSYGDAMLLEKKA

SEQ ID NO: 65229 - protein, 356 aa, Chromohalobacter canadensis
  REGION 1..356: note = tr|A0A285VL63|A0A285VL63_9GAMM S-adenosylmethionine:tRNA ribosyltransferase-isomerase; OS = Chromohalobacter canadensis OX=141389 GN=queA PE=3 SV=1
MQRADFHFDLPDELIARYPSETRSDCRLLCLDDESGEVQHRRFTDLLTHLEPGDLLVFNDTRVIPARLFGQKASGGRVEMLLERPLDAHRGLAHLRASKAPKPGTELIFEGDIHAVVEERHEALFELRFLGETPMIELLENHGHMPLPPYIDREDELDDRERYQTVYARREGAVAAPTAGLHFDEALMAALRERGVEMGYVTLHVGAGTFQPVRVDDIREHHMHSEWLEVDETLCRQVEATRARGKRVIAVGTTSVRCLETASQGCDDGRIAPYRGDTDIFIYPGYAWRCVDALITNFHLPESTLLMLVSAFAGYRQVMHAYREAVAERYAFFSYGDAMLLSRAETSHPFPETSHA

SEQ ID NO: 65230 - protein, 356 aa, Chromohalobacter japonicus
  REGION 1..356: note = tr|A0A1Q8TG72|A0A1Q8TG72_9GAMM S-adenosylmethionine:tRNA ribosyltransferase-isomerase; OS = Chromohalobacter japonicus OX=223900 GN=queA PE=3 SV=1
MQRADFHFDLPAELIARYPSETRSDCRLLCLDDESGEVQHRRFTDLLTHLEPGDLLVFNDTRVIPARLFGQKSSGGRVEMLLERPLDAHRGLAHLRASKAPKPGTELIFEGDIHAVVEERHEGLFELRFLGETPMIELLERHGHMPLPPYIDREDELDDRERYQTVYARREGAVAAPTAGLHFDESLMAALRERGVEMGYVTLHVGAGTFQPVRVDDIREHHMHSEWLEVDETLCRQVEATRARGRRVIAVGTTSVRCLETASQGQKDGHIAPFRGDTDIFIYPGYEWRCVDALITNFHLPESTLLMLVSAFAGYRQVMHAYREAVAERYAFFSYGDAMLLSRAETSHPFPEISHA

SEQ ID NO: 65231 - protein, 356 aa, Chromohalobacter marismortui
  REGION 1..356: note = tr|A0A4R7NFK7|A0A4R7NFK7_9GAMM S-adenosylmethionine:tRNA ribosyltransferase-isomerase; OS = Chromohalobacter marismortui OX=42055 GN=queA PE=3 SV=1
MQRADFHFDLPDELIARYPSEKRSDCRLLCVDDTSGEIQHRRFTDLLTHLEPGDLLVFNDTRVIPARLFGQKASGGRIEMLLERPLDAHRGLAHLRASKAPRPGTELIFEGDIHAVVEERHEALFELRFLGETPMIELLERHGHMPLPPYIDRDDELDDRERYQTVYARREGAVAAPTAGLHFDTPLLEALRERGVEMGYVTLHVGAGTFQPVRVDDIREHHMHSEWLEVDETLCRQVEATQARGKRVIAVGTTSVRCLETASQGRDDGCITPYRGDTDIFIYPGYAWRCVDALITNFHLPESTLLMLVSAFAGYRQVMHAYREAVAERYAFFSYGDAMFLSRAETSHPFPETSHA

SEQ ID NO: 65232 - protein, 356 aa, Chromohalobacter salexigens
  REGION 1..356: note = sp|Q1QTN0|QUEA_CHRSD S-adenosylmethionine:tRNA ribosyltransferase-isomerase OS=Chromohalobacter salexigens (strain DSM 3043 / ATCC BAA-138 / NCIMB 13768); OX = 290398 G N=queA PE=3 SV=1
MQRADFHFDLPDELIARYPSETRSDCRLLCLDDATGDIAHRRFTDLLTLLAPGDLLVFNDTRVIPARLFGQKASGGRVEMLLERPLDAHRGLAHLRASKAPRPGTELIFEGDVHAVVEARHDALFELRFLGETPMIELLENHGHMPLPPYIDREDELDDRERYQTVYARREGAVAAPTAGLHFDTPLMEALRERGVEMGYVTLHVGAGTFQPVRVDDIREHHMHSEWLEVDETLCRQVEATRARGGRVIAVGTTSVRCLETASQGQEDGHIAPFRGDTDIFIYPGYQWRCVDALITNFHLPESTLLMLVSAFAGYPQVMRAYRAAVAERYAFFSYGDAMFLNRSASSHPFPENSHA

SEQ ID NO: 65233 - protein, 356 aa, Chromohalobacter salexigens
  REGION 1..356: note = tr|A0A317R6C9|A0A317R6C9_CHRSL S-adenosylmethionine:tRNA ribosyltransferase-isomerase; OS = Chromohalobacter salexigens OX=158080 GN=queA PE=3 SV=1
MQRADFHFDLPDELIARYPSETRSDCRLLCLDDATGDIAHRRFTDLLTLLAPGDLLVFNDTRVIPARLFGQKASGGRVEMLLERPLDAHRGLAHLRASKAPRPGTELIFEGDVHAVVEARHDALFELRFLGETPMIELLENHGHMPLPPYIDREDELDDRERYQTVYARREGAVAAPTAGLHFDTPLMEALRERGVEMGYVTLHVGAGTFQPVRVDDIREHHMHSEWLEVDETLCRQVEATRARGGRVIAVGTTSVRCLETASQGQEDGHIAPFRGDTDIFIYPGYQWRCVDALITNFHLPESTLLMLVSAFAGYPQVMRAYRAAVAERYAFFSYGDAMFLNRSASSHPFPEDSHA

SEQ ID NO: 65234 - protein, 365 aa, unidentified
  source 1..365: note = Chroococcales cyanobacterium
  REGION 1..365: note = tr|A0A3N5IUK7|A0A3N5IUK7_9CHRO S-adenosylmethionine:tRNA ribosyltransferase-isomerase; OS = Chroococcales cyanobacterium metabat2.561 OX=2485785; GN = queA PE=3 SV=1
MIPDQSLSSYDYHLPPELIAQNPAEPRDSSRLLVVDSPNSHNLAIFRDLPTWLEPGDLLVFNDTRVIPARLFGRKTTGAPIEILLLEEQDDHRWLSLVKPGKRFKVGSEVLFYPKTGRTEDKEKLWLAKVIDRDLNTSGRLLEFQRHPGRSFWDMLEEYGHIPFPPYVTESEAEEDRYQTVYADKQGSVAAPTAGLHFTPELFHKLAQKGIDTAYITLHVGVGTFRPVEVENITEHLMHQEFLDISAETAEKIAQTKARGGRVIAVGTTVARALEGAIKETKSDKLTAFQGKTNLFVYPGYQWRVIDGMITNFHLPKSSLMMLVSALVGRERLLALYQAAIQERFRFYSFGDAMLILPSARSSNQ

SEQ ID NO: 65235 - protein, 373 aa, unidentified
  source 1..373: note = Chroococcales cyanobacterium
  REGION 1..373: note = tr|A0A2G7GM97|A0A2G7GM97_9CHRO S-adenosylmethionine:tRNA ribosyltransferase-isomerase; OS = Chroococcales cyanobacterium IPPAS B-1203 OX=2049454; GN = queA PE=3 SV=1
MLIPKTMFSGSLPSQEDCLLSAYDYELPQELIAQNPAVPRDSARLLVVDSTHYSHQRFFELPQLLQPGDLLVMNNTKVIPARLYGRKSSGASIEVLLLEERQHNQWLALVKPGKRLPLGAKIVFEGNASYSLNATVLATDAATGGRLLQFDVPGGMSLIQILDKYGQVPLPPYITDSQAAGDQYQTVYAQQPGAVAAPTAGLHFTPELLIQLQNKGIKTAFVTLHVGVGTFRPVEVEDITTHTMHGEWVEVSADTVTQIHQTQAQGGRVIAVGTTVVRSLEGAATSGQLQPFCGKTDLFIYPGYRWRVVEGLITNFHLPKSSLLMLVSALIGRQRLLALYQEAIAHRYRFYSFGDAMLLLPVDLSTIERKDRK

SEQ ID NO: 65236 - protein, 434 aa, unidentified
  source 1..434: note = Chroococcidiopsis cubana
  REGION 1..434: note = tr|A0A433VYD6|A0A433VYD6_9CYAN S-adenosylmethionine:tRNA ribosyltransferase-isomerase; OS = Chroococcidiopsis cubana SAG 39.79 OX=388085 GN=queA; PE = 3 SV=1
MHINQFKDALSALNSVKTPNFDLTSSAKSELDYSLSSYDYELPAERIAQNPVSPRDSSRLLVVNLDSHAHQIFRDLPEFLQKDDLLVMNDTRVIPARLYGQKPSGAAVEVLLLEERQPNVWLALVKPGRRLAPGAKIVFFEREDKGDKGDKGDKGDKEAGEQRGRGAEEKNSATPDSRLPYGRVSKPAPTDSRLPTPCSLTATVLETDEETGGRVIQFDLPEGLSVIQLLDKFGHVPLPPYITDSQAESEQYQTVYAEKPGSAAAPTAGLHFTPELLKRLQENGIEQAFVTLHVGVGTFRPVEVEDVKTHQMHGEWIEVPAATVEQIRAARSRGGRIIAVGTTTVRALEGAAASGELQPFCGKTNLFIYPGYQWRVVDGLITNFHLPRSSLMMLVSAAIGRERLLALYQEAIAQQYRFYSFGDAMLILPQGKEL

SEQ ID NO: 65237 - protein, 358 aa, unidentified
  source 1..358: note = Chroococcidiopsis sp.
  REGION 1..358: note = tr|A0A2S6VBF6|A0A2S6VBF6_9CYAN S-adenosylmethionine:tRNA ribosyltransferase-isomerase; OS = Chroococcidiopsis sp. TS-821 OX=1378066 GN=queA PE=3; SV = 1
MLRQLPAQEQDRLLSAYDYELPEELIAQNPAVPRDSARLLVVDSTRHSHHRFYELPQLLQPGDLLVMNNTRVIPARLYGRKQSGAAVEVLLLEERQYNQWLALVKPGRRLPPGATIVFSGNAPESLSATVLETDTATGGRVLQFDVPQGMSLIQVLDKYGQVPLPPYITNSQAASEQYQTVYAEQPGAVAAPTAGLHFTPELLARLKETGIRTAFVTLHVGVGTFRPVEVEDITRHEMHGEWAEVSADTVAQIRETQAQGGRVFAVGTTVVRSLEGAAVSGELQPFCGKTDLFIYPGYQWRVVEGLITNFHLPKSSLLMLVSALIGRQRLLELYKEAIAQRYRFYSFGDAMLILPQFE

SEQ ID NO: 65238 - protein, 145 aa, unidentified
  source 1..145: note = Chroococcidiopsis sp.
  REGION 1..145: note = tr|A0A2P8QM43|A0A2P8QM43_9CYAN S-adenosylmethionine:tRNA ribosyltransferase-isomerase (Fragment) OS=Chroococcidiopsis sp. CCALA 051 OX=869949; GN = C7Y66_20480 PE=3 SV= 1
MSALNSVKTPNFDLTSSAKSELDYSLSSYDYELPAERIAQNPVSPRDSSRLLVVNLDSHAHQIFRDLPEFLQKDDLLVMNDTRVIPARLYGQKPSGAAVEVLLLEECQPNVWLALVKPGRRLAPGAKIVFFEREDKGDKGDKGDK

SEQ ID NO: 65239 - protein, 434 aa, unidentified; identical to SEQ ID NO: 65236
  source 1..434: note = Chroococcidiopsis thermalis
  REGION 1..434: note = tr|K9TUV5|K9TUV5_CHRTP S-adenosylmethionine:tRNA ribosyltransferase-isomerase OS=Chroococcidiopsis thermalis (strain PCC 7203) OX=251229 GN=queA PE=3 SV=1

SEQ ID NO: 65240 - protein, 361 aa, unidentified
  source 1..361: note = Chroogloeocystis siderophila
  REGION 1..361: note = tr|A0A1U7HQP6|A0A1U7HQP6_9CHRO S-adenosylmethionine:tRNA ribosyltransferase-isomerase; OS = Chroogloeocystis siderophila 5.2 s.c.1 OX=247279; GN = queA PE=3 SV=1
MLRQLSAQEQDSLLSAYDYELPEELIAQNPAVPRDSARLLVVDSTRHHHHRFYELPQLLRSGDLLVMNNTKVIPARLYGRKQSGADVEVLLLEERQHNQWLALVKPGRRLPPGATIVFAGNATDPLSATVLEIDAATGGRLLQFDVPPAMSLLQVLDQYGQVPLPPYITNSQATSEQYQTVYAEQPGAVAAPTAGLHFTPELLTRLKGKGIRTAFVTLHVGVGTFRPVEVEDITTHKMHGEWVEVSADTVAQIRETQAQGGRVFAVGTTVVRSLEGAAVSGELQPFCGKTNLFIYPGYQWRVVEGLITNFHLPKSSLLMLVSALIGRQRLLALYQEAIAERYRFYSFGDAMLILPQFESMC

SEQ ID NO: 65241 - protein, 349 aa, unidentified
  source 1..349: note = Chryseobacterium angstadtii
  REGION 1..349: note = tr|A0A0J7IEV0|A0A0J7IEV0_9FLAO S-adenosylmethionine:tRNA ribosyltransferase-isomerase; OS = Chryseobacterium angstadtii OX=558151 GN=queA PE=3 SV=1
MKTSDFNFDLPAELLAEHPSEHRDEARLMVLNRKTETIEHKLFKDVVDYFDEKDLFIFNNTKVFPARLYGNKEKTGAKIEVFLLRELDKETRVWDVLVDPARKIRIGNKLFFTEDESLVAEVIDNTTSRGRTLRFLFDGSYDEFRTKLKELGETPLPKYIKRAVEPEDAERYQTIYAKVEGAVAAPTAGLHFSKHLMKKLEIKGIDFAEVTLHVGLGTFNPIEVEDLSKHKMESEEIIIDEKNAEIINRAVDAHRRVCAVGTTTMRALETSVSSNKKISAFNGWTNKFIYPPHDFGVANSMITNFHTPKSTLLMMIAAFAGRDFIMHAYEEAVKEKYKFYSYGDAMLIL

SEQ ID NO: 65242 - protein, 349 aa, Chryseobacterium antarcticum
  REGION 1..349: note = tr|A0A3S4W206|A0A3S4W206_9FLAO S-adenosylmethionine:tRNA ribosyltransferase-isomerase; OS = Chryseobacterium antarcticum OX=266748 GN=queA PE=3 SV=1
MKTSHFNFDLPEELLAEYPAEHRDDAKMMVLNRATQTIEHKFFKDVVDYFDEKDLFIFNNTKVFPARLYGNKEKTGAKIEVFLLRELDKETRVWDVLVDPARKIRIGNKLFFTEDEGLVAEVIDNTTSRGRTLRFLYDGSYEEFRTKLKELGETPLPKYIKREVEASDAERYQTIYAKHEGAVAAPTAGLHFSRHLMKRLEIKGIEFAEITLHVGLGTFNPIEVEDLSKHKMESEEAIITQENADIINKAVADGVRVCAVGTTTMRTIETSVSSNRKIGPYHGWTNKFIFPPHDFGVANCMITNFHTPKSTLMMMVAAFAGKDFLMRAYEEGVKHKYKFYSYGDAMLII

SEQ ID NO: 65243 - protein, 349 aa, Chryseobacterium aquaticum
  REGION 1..349: note = tr|A0A0Q3HRD5|A0A0Q3HRD5_9FLAO S-adenosylmethionine:tRNA ribosyltransferase-isomerase; OS = Chryseobacterium aquaticum OX=452084 GN=queA PE=3 SV=1
MKTSDFNFDLPEELLAEHPSEHRDEARLMVLDRKTQTIEHKLFKDVVDYFDEKDLFIFNNTKVFPARLYGNKEKTGAKIEVFLLRELDKETRVWDVLVDPARKIRIGNKLFFTEDESLVAEVIDNTTSRGRTLRFLFDGSYEEFRTKLKELGETPLPKYIKRDVEPEDAERYQTIYAKIEGAVAAPTAGLHFSRHLMKRLEIKGIDFAEVTLHVGLGTFNPIEVEDLSKHKMESEEIIIDEKNAEIINRAVQENRKVCAVGTTTMRAIETSVSSNKKISAFQGWTNKFIYPPHDFGVANTMITNFHTPKSTLLMMIAAFAGKDFIMHAYEEAVKEKYKFYSYGDAMLIL

SEQ ID NO: 65244 - protein, 349 aa, Chryseobacterium aquifrigidense
  REGION 1..349: note = tr|A0A543ELF9|A0A543ELF9_9FLAO S-adenosylmethionine:tRNA ribosyltransferase-isomerase; OS = Chryseobacterium aquifrigidense OX=558021 GN=queA PE=3; SV = 1
MKTSDFNFDLPAELLAEHPSEHRDEARLMVLDRKTQTIEHKLFKDVVDYFDEEDLFIFNNTKVFPARLYGNKEKTGAKIEVFLLRELDKETRVWDVLVDPARKIRIGNKLFFTEDESLVAEVIDNTTSRGRTLRFLFDGSYDEFRTKLKELGETPLPKYIKRAVEPEDAERYQTIYAKVEGAVAAPTAGLHFSKHLMKRLEIKGINFAEVTLHVGLGTFNPIEVEDLSKHKMESEEIIIDEKNAAIINKAVETHRRVCAVGTTTMRALETSVSSNKKISAFNGWTNKFIYPPHDFGVANSMITNFHTPKSTLIMMIAAFAGRDFVMHAYEEAVKEKYKFYSYGDAMLIL

SEQ ID NO: 65245 - protein, 349 aa, unidentified
  source 1..349: note = Chryseobacterium arachidiradicis
  REGION 1..349: note = tr|A0A420DAX2|A0A420DAX2_9FLAO S-adenosylmethionine:tRNA ribosyltransferase-isomerase; OS = Chryseobacterium arachidiradicis OX=1617282 GN=queA; PE = 3 SV=1
MKTSDFNFDLPAELLAEHPSENRDEARLMVLNRKTETIEHRLFKDVIDYFDEKDLFIFNNTKVFPARLFGNKEKTGAKIEVFLLRELDAETRVWDVLVDPARKIRIGNKLFFTEDESLVAEVIDNTTSRGRTLRFLFDGSYEEFRAKLTELGETPLPKYIKREVEPEDAERYQTIYAKVEGAVAAPTAGLHFSKHLMKRLEIKGIDFAEITLHVGLGTFNPIEVEDLSKHKMESEEAIIDEKNAAIINKAVEEGRRVCAVGTTTMRALETSVSSNKKISAYRGWTNKFIYPPHEFGVANAMITNFHTPKSTLIMMIAAFANKDFIMRAYEEAIKEKYKFYSYGDAMLIL

SEQ ID NO: 65246 - protein, 349 aa, unidentified
  source 1..349: note = Chryseobacterium arachidis
  REGION 1..349: note = tr|A0A1M5KT49|A0A1M5KT49_9FLAO S-adenosylmethionine:tRNA ribosyltransferase-isomerase; OS = Chryseobacterium arachidis OX=1416778 GN=queA PE=3 SV=1
MKTSDFNFDLPAELLAEHPSEHRDEARLMVLDRKTQTIEHKLFKDVVDYFEEDDLFIFNNTKVFPARLYGNKEKTGAKIEVFLLRELDKETRVWDVLVDPARKIRIGNKLFFTEDESLVAEVIDNTTSRGRTLRFLFDGSYEEFRAKLKELGETPLPKYIKRDVEPEDAERYQTIYAKVEGAVAAPTAGLHFSKHLMKRLEIKGINFAEVTLHVGLGTFNPIEVEDLSKHKMESEEIFIDEKNAQIINNAVDAHRRVCAVGTTTMRTLETSVSSNKKISAFHGWTNKFIYPPHDFGVANCMITNFHTPKSTLIMMIAAFAGRDFVMHAYEEAVKEKYKFYSYGDAMLIL

SEQ ID NO: 65247 - protein, 349 aa, Chryseobacterium arthrosphaerae
  REGION 1..349: note = tr|A0A1B8ZSM1|A0A1B8ZSM1_9FLAO S-adenosylmethionine:tRNA ribosyltransferase-isomerase; OS = Chryseobacterium arthrosphaerae OX=651561 GN=queA PE=3; SV = 1
MKTSDFNFDLPAELLAEHPSEHRDEARLMVLDRKTQTIEHKLFKDVVDYFDEEDLFIFNNTKVFPARLYGNKEKTGAKIEVFLLRELDKETRVWDVLVDPARKIRIGNKLFFTEDESLVAEVIDNTTSRGRTLRFLFDGSYEEFRTKLKELGETPLPKYIKRAVEPEDAERYQTIYAKVEGAVAAPTAGLHFSKHLMKRLEIKGINFAEVTLHVGLGTFNPIEVEDLSKHKMESEEIIIDEKNAAIINKAVDAHRRVCAVGTTTMRALETSVSSNKKISAFNGWTNKFIYPPHDFGVANSMITNFHTPKSTLIMMIAAFAGRDFVMHAYEEAVKEKYKFYSYGDAMLIL

SEQ ID NO: 65248 - protein, 349 aa, unidentified
  source 1..349: note = Chryseobacterium artocarpi
  REGION 1..349: note = tr|A0A1B9A024|A0A1B9A024_9FLAO S-adenosylmethionine:tRNA ribosyltransferase-isomerase; OS = Chryseobacterium artocarpi OX=1414727 GN=queA PE=3 SV=1
MKTSDFNFDLPAELLAEHPSEHRDEARLMVLDRKTQTIEHKLFKDVVDYFDEEDLFIFNNTKVFPARLYGNKEKTGAKIEVFLLRELDKETRVWDVLVDPARKIRIGNKLFFTEDESLVAEVIDNTTSRGRTLRFLFDGSYDEFRTKLKELGETPLPKYIKRAVEPEDAERYQTIYAKVEGAVAAPTAGLHFSKHLMKRLEIKGINFAEVTLHVGLGTFNPIEVEDLSKHKMESEEIIIDERNAAIINKAVESHRRVCAVGTTTMRALETSVSSNKKISAFNGWTNKFIYPPHDFGVANSMITNFHTPKSTLIMMIAAFAGRDFVMHAYEEAVKEKYKFYSYGDAMLIL

SEQ ID NO: 65249 - protein, 349 aa, Chryseobacterium balustinum
  REGION 1..349: note = tr|A0A3G6TH46|A0A3G6TH46_9FLAO S-adenosylmethionine:tRNA ribosyltransferase-isomerase; OS = Chryseobacterium balustinum OX=246 GN=queA PE=3 SV=1
MKTSDFNFDLPEELLAEYPSEHRDEARLMVLDRKTQTIEHKMFKDVVDYFDEKDLFIFNNTKVFPARLYGNKEKTGAKIEVFLLRELDKETRVWDVLVDPARKIRIGNKLFFTEDESLVAEVIDNTTSRGRTLRFLFDGSYEEFRSKLKDLGETPLPKYIKREVEPEDAERYQTIYAKVEGAVAAPTAGLHFSKHLMKRLEIKGIDFAEVTLHVGLGTFNPIEVEDLSKHKMESEEVIIDEKNAEIINRAVQENRRVCAVGTTTMRAIETSVSSNRKISAFDGWTNKFIYPPHDFGIANTMITNFHTPKSTLMMMIAAFAGKDFLMHAYEEAVKEKYKFYSYGDAMLII

SEQ ID NO: 65250 - protein, 349 aa, unidentified
  source 1..349: note = Chryseobacterium bernardetii
  REGION 1..349: note = tr|A0A3G6TK74|A0A3G6TK74_9FLAO S-adenosylmethionine:tRNA ribosyltransferase-isomerase; OS = Chryseobacterium bernardetii OX=1241978 GN=queA PE=3; SV = 1
MKTSDFNFDLPAELLAEHPSEHRDEARLMVLDRKTETIEHKLFKDVVDYFDEDDLFIFNNTKVFPARLYGNKEKTGAKIEVFLLRELDKETRVWDVLVDPARKIRIGNKLFFTEDESLVAEVIDNTTSRGRTLRFLFDGSYEEFRAKLKELGETPLPKYIKRAVEPEDAERYQTIYAKVEGAVAAPTAGLHFSKHLMKRLEIKGINFAEVTLHVGLGTFNPIEVEDLSKHKMESEEIIIDEKNAAIINKAVESHRRVCAVGTTTMRALETSVSSNKKISAFNGWTNKFIYPPHDFGVANSMITNFHTPKSTLIMMIAAFAGRDFVMHAYEEAVKEKYKFYSYGDAMLIL

SEQ ID NO: 65251 - protein, 349 aa, Chryseobacterium bovis
  REGION 1..349: note = tr|A0A1U7Q0E2|A0A1U7Q0E2_9FLAO S-adenosylmethionine:tRNA ribosyltransferase-isomerase; OS = Chryseobacterium bovis DSM 19482 OX=1121284 GN=queA; PE = 3 SV=1
MKTSDFNFDLPAELLAEHPSENRDEARLMVLDRKTETIEHRLFKDVIDYFDEKDLFIFNNTKVFPARLFGNKEKTGAKIEVFLLRELDAETRVWDVLVDPARKIRIGNKLFFTEDESLVAEVIDNTTSRGRTLRFLFDGSYEEFRAKLTELGETPLPKYIKREVEPEDAERYQTIYAKVEGAVAAPTAGLHFSKHLLKRMEIKGIDFAEITLHVGLGTFNPIEVEDLSKHKMESEEAIIDEKNAAIINKAVEEGRRVCAVGTTTMRALETSVSSNKKISAYRGWTNKFIYPPHDFGVANAMITNFHTPKSTLIMMIAAFANKDFIMRAYEEAIKEKYKFYSYGDAMLIL

SEQ ID NO: 65252 - protein, 349 aa, unidentified
  source 1..349: note = Chryseobacterium carnipullorum
  REGION 1..349: note = tr|A0A1M7J420|A0A1M7J420_9FLAO S-adenosylmethionine:tRNA ribosyltransferase-isomerase; OS = Chryseobacterium carnipullorum OX=1124835 GN=queA PE=3; SV = 1
MKTSDFNFDLPEELLAEHPSEHRDEAKLMVLNRKTQTIEHKLFKDVVDYFDEKDLFIFNNTKVFPARLYGNKEKTGAKIEVFLLRELDKETRVWDVLVDPARKIRIGNKLFFTEDESLVAEVIDNTTSRGRTLRFLFDGSYDEFRTKLKELGETPLPKYIKRAVEPEDAERYQTIYAKIEGAVAAPTAGLHFSKHLMKKLEIKGIDFAEVTLHVGLGTFNPIEVEDLSKHKMESEEIIIDEKNADIINKAVDAHRRVCAVGTTTMRALETSVSSNKKISAFNGWTNKFIYPPHDFGVANSMITNFHTPKSTLLMMIAAFAGKDFIMHAYEEAVKEKYKFYSYGDAMLIL

SEQ ID NO: 65253 - protein, 349 aa, unidentified
  source 1..349: note = Chryseobacterium carnis
  REGION 1..349: note = tr|A0A3G8XII9|A0A3G8XII9_9FLAO S-adenosylmethionine:tRNA ribosyltransferase-isomerase; OS = Chryseobacterium carnis OX=1241979 GN=queA PE=3 SV=1
MKTSDFNFHLPEELLAEHPAEHRDDAKMMVLNRKTQTIEHKHFKDVVDYFDEKDLFIFNNTKVFPARLYGNKEKTGAKIEVFLLRELDKETRVWDVLVDPARKIRIGNKLFFTEDEGLVAEVIDNTTSRGRTLRFLYDGSYEEFRTKLKELGETPLPKYIKRDVEPEDAERYQTIYAKHEGAVAAPTAGLHFSRHLMKRLEIKGIDFAEVTLHVGLGTFNPIEVEDLSKHKMESEEAIIDQKNADIINKAVEEGRRVCAVGTTTMRTLETSVSSNKKIGPYHGWTNKFIFPPHDFGVANCMITNFHTPKSTLMMMIAAFAGKDFLMHAYEEAIKHEYKFYSYGDAMLII

SEQ ID NO: 65254 - protein, 349 aa, Chryseobacterium chaponense
  REGION 1..349: note = tr|A0A1N7KD23|A0A1N7KD23_9FLAO S-adenosylmethionine:tRNA ribosyltransferase-isomerase; OS = Chryseobacterium chaponense OX=713588 GN=queA PE=3 SV=1
MKTSDFNFHLPDELLAEHPSEHRDEAKLMVLNRATQTIEHKKFKDVVDYFNEHDLFIFNDTKVFPARLFGNKEKTGAKIEVFLLRELDKETRVWDVLVDPARKIRIGNKLFFTEDEGLVAEVIDNTTSRGRTLRFLYDGSYEEFRAKLKELGQTPLPKYIKREVEPEDAERYQTIYAKHEGAVAAPTAGLHFSKHLMKKLEIKGIDFAEITLHVGLGTFNPIEVEDLSKHKMESEEAIITQKNADIINKAVTEQRRVCAVGTTTMRAIETSVSSNKKIGPYHGWTNKFIFPPHDFGVANAMITNFHTPKSTLMMMVAAFAGKDFLMQAYEEAVKNEYKFYSYGDAMLII

SEQ ID NO: 65255 - protein, 349 aa, unidentified
  source 1..349: note = Chryseobacterium contaminans
  REGION 1..349: note = tr|A0A1M6ZC04|A0A1M6ZC04_9FLAO S-adenosylmethionine:tRNA ribosyltransferase-isomerase; OS = Chryseobacterium contaminans OX=1423959 GN=queA PE=3; SV = 1
MKTSDFNFDLPAELLAEHPSEHRDEARLMVLDRKTQTIEHKLFKDVVDYFDEEDLFIFNNTKVFPARLYGNKEKTGAKIEVFLLRELDKETRVWDVLVDPARKIRIGNKLFFTEDESLVAEVIDNTTSRGRTLRFLFDGSYEEFRAKLKELGETPLPKYIKRAVEPEDAERYQTIYAKVEGAVAAPTAGLHFSKHLMKRLEIKGINFAEVTLHVGLGTFNPIEVEDLSKHKMESEEIIIDEKNAAIINKAVDAHRRVCAVGTTTMRALETSVSSNKKISAFNGWTNKFIYPPHDFGVANSMITNFHTPKSTLIMMIAAFAGRDFVMHAYEEAVKEKYKFYSYGDAMLIL

SEQ ID NO: 65256 - protein, 349 aa, Chryseobacterium culicis
  REGION 1..349: note = tr|A0A1H6H2Q5|A0A1H6H2Q5_9FLAO S-adenosylmethionine:tRNA ribosyltransferase-isomerase; OS = Chryseobacterium culicis OX=680127 GN=queA PE=3 SV=1
MKTSDFNFDLPAELLAEHPSEHRDEARLMVLDRKTQTIEHKLFKDVVDYFDENDLFIFNNTKVFPARLYGNKEKTGAKIEVFLLRELDKETRVWDVLVDPARKIRIGNKLFFTEDESLVAEVIDNTTSRGRTLRFLFDGSYDEFRTKLKELGETPLPKYIKRAVEPEDAERYQTIYAKVEGAVAAPTAGLHFSKHLMKRLEIKGINFAEVTLHVGLGTFNPIEVEDLSKHKMESEEIIIDEKNAELINRAVEAHKRVCAVGTTTMRALETSVSSNKKISAFNGWTNKFIYPPHDFGVATSMITNFHTPKSTLLMMIAAFAGRDFVMHAYEEAVKEKYKFYSYGDAMLIL

SEQ ID NO: 65257 - protein, 349 aa, Chryseobacterium culicis
  REGION 1..349: note = tr|A0A2S9D007|A0A2S9D007_9FLAO S-adenosylmethionine:tRNA ribosyltransferase-isomerase; OS = Chryseobacterium culicis OX=680127 GN=queA PE=3 SV=1
MKTSDFNFDLPAELLAEHPSEHRDEARLMVLDRKTQTIEHKLFKDVVDYFDEEDLFIFNNTKVFPARLYGNKEKTGAKIEVFLLRELDKETRVWDVLVDPARKIRIGNKLFFTEDESLVAEVIDNTTSRGRTLRFLFDGSYDEFRTKLKELGETPLPKYIKRAVEPEDAERYQTIYAKVEGAVAAPTAGLHFSKHLMKRLEIKGINFAEVTLHVGLGTFNPIEVEDLSKHKMESEEIIIDEKNAAIINKAVETHRRVCAVGTTTMRALETSVSSNKKISAFNGWTNKFIYPPHDFGVANSMITNFHTPKSTLIMMIAAFAGRDFIMHAYEEAVKEKYKFYSYGDAMLIL

SEQ ID NO: 65258 - protein, 349 aa, Chryseobacterium daecheongense
  REGION 1..349: note = tr|A0A3N0W5A1|A0A3N0W5A1_9FLAO S-adenosylmethionine:tRNA ribosyltransferase-isomerase; OS = Chryseobacterium daecheongense OX=192389 GN=queA PE=3; SV = 1
MKTSDFNFDLPAELLAEHPSEHRDEARLMVLDRKTQTIEHKLFKDVVDYFDEKDLFIFNNTKVFPARLYGNKEKTGAKIEVFLLRELDKETRVWDVLVDPARKIRIGNKLFFTEDESLVAEVIDNTTSRGRTLRFLFDGSYEEFRAKLKELGETPLPKYIKRAVEPEDAERYQTIYAKIEGAVAAPTAGLHFSKHLMKRLEIKGIDFAEITLHVGLGTFNPIEVEDLSKHKMESEEVFIDEKNAEIINRAVEGHRRVCAVGTTTMRALETSVSSNKKISAFHGWTNKFIYPPHDFGVANSMITNFHTPKSTLIMMIAAFAGRDFVMHAYEEAVKEKYKFYSYGDAMLIL

SEQ ID NO: 65259 - protein, 349 aa, Chryseobacterium defluvii
  REGION 1..349: note = tr|A0A495SMZ5|A0A495SMZ5_9FLAO S-adenosylmethionine:tRNA ribosyltransferase-isomerase; OS = Chryseobacterium defluvii OX=160396 GN=queA PE=3 SV=1
MKTSDFNFDLPAELLAEHPSEHRDEARLMVLDRKTQTIEHKLFKDVVDYFDEKDLFIFNNTKVFPARLYGNKEKTGAKIEVFLLRELDKETRVWDVLVDPARKIRIGNKLFFTEDESLVAEVIDNTTSRGRTLRFLFDGSYEEFRAKLKELGETPLPKYIKRAVEPEDAERYQTIYAKIEGAVAAPTAGLHFSRHLMKRLEIKGIDFAEITLHVGLGTFNPIEVEDLSKHKMESEEVFIDERNAEIINKAVESNRRVCAVGTTTMRALETSVSSNKKISAFHGWTNKFIYPPHDFGVANSMITNFHTPKSTLIMMIAAFAGRDFVMHAYEEAVKEKYKFYSYGDAMLIL

SEQ ID NO: 65260 - protein, 349 aa, Chryseobacterium elymi
  REGION 1..349: note = tr|A0A3D9DMW1|A0A3D9DMW1_9FLAO S-adenosylmethionine:tRNA ribosyltransferase-isomerase; OS = Chryseobacterium elymi OX=395936 GN=queA PE=3 SV=1
MKTSDFNFDLPAELLAEHPSEHRDEAKLMVLNRKTETIEHKLFKDVVDYFDEKDLFIFNNTKVFPARLYGNKEKTGAKIEVFLLRELDKETRVWDVLVDPARKIRIGNKLFFTEDESLVAEVIDNTTSRGRTLRFLFDGSYDEFRTKLKELGETPLPKYIKRAVEPEDAERYQTIYAKVEGAVAAPTAGLHFSKHLMKKLEIKGIDFAEVTLHVGLGTFNPIEVEDLSKHKMESEEIIIDEKNADIINKAVDAHRRVCAVGTTTMRALETSVSSNKKISAFNGWTNKFIYPPHDFGVANSMITNFHTPKSTLLMMIAAFAGKDFIMHAYEEAVKEKYKFYSYGDAMLIL

SEQ ID NO: 65261 - protein, 349 aa, Chryseobacterium flavum
  REGION 1..349: note = tr|A0A3D9CQV0|A0A3D9CQV0_9FLAO S-adenosylmethionine:tRNA ribosyltransferase-isomerase; OS = Chryseobacterium flavum OX=415851 GN=queA PE=3 SV=1
MKTSDFNFDLPAELLAEHPSEHRDEARLMVLDRKTETIEHKLFKDVVDYFDEDDLFIFNNTKVFPARLYGNKEKTGAKIEVFLLRELDKETRVWDVLVDPARKIRIGNKLFFTEDESLVAEVIDNTTSRGRTLRFLFDGSYEEFRAKLKELGETPLPKYIKRAVEPEDAERYQTIYAKVEGAVAAPTAGLHFSKHLMKRLEIKGINFAEVTLHVGLGTFNPIEVEDLSKHKMESEEIIIDEKNAAIINKAVEAHRRVCAVGTTTMRALETSVSSNKKISAFNGWTNKFIYPPHEFGVANSMITNFHTPKSTLIMMIAAFAGRDFVMHAYEEAVKEKYKFYSYGDAMLIL

SEQ ID NO: 65262 - protein, 349 aa, Chryseobacterium formosense
  REGION 1..349: note = tr|A0A085Z7R0|A0A085Z7R0_9FLAO S-adenosylmethionine:tRNA ribosyltransferase-isomerase; OS = Chryseobacterium formosense OX=236814 GN=queA PE=3 SV=1
MKTSDFNFDLPEELLAEHPSEHRDEARLMVLDRKTQTIEHKLFKDVVDYFDEKDLFIFNNTKVFPARLYGNKEKTGAKIEVFLLRELDKETRVWDVLVDPARKIRIGNKLFFTEDESLVAEVIDNTTSRGRTLRFLFDGSYEEFRAKLKELGETPLPKYIKRDVEPEDAERYQTIYAKVEGAVAAPTAGLHFSKHLMKRLEIKGIDFAEVTLHVGLGTFNPIEVEDLSKHKMESEEIIIDEKNAQIINNAVQENRRVCAVGTTTMRALETSVSSNKKISAFQGWTNKFIYPPHDFGVANTMITNFHTPKSTLIMMIAAFAGRDFVMHAYEEAVKEKYKFYSYGDAMLIL

SEQ ID NO: 65263 - protein, 352 aa, unidentified
  source 1..352: note = Chryseobacterium frigidisoli
  REGION 1..352: note = tr|A0A1I3DYF5|A0A1I3DYF5_9FLAO S-adenosylmethionine:tRNA ribosyltransferase-isomerase; OS = Chryseobacterium frigidisoli OX=1125876 GN=queA PE=3; SV = 1
MSKLKTSDFYFDLPEHLLAEHPSPNRDESKLMVLHRKTGKIEHKMFKDVIDYFDEKDLFIFNNTKVFPARLYGNKEKTGAKIEVFLLRELDKETRVWDVLVDPARKIRIGNKLFFNEDESLVAEVIDNTTSRGRTLRFLYDGSYEEFRAKLKELGETPLPKYIKREVEPEDAERYQTIYAKNEGAVAAPTAGMHFSKHLMKRLEIKGVDFAEVTLHIGLGTFNPIEVEDLSKHKMESEEAIIDQKNADIINKAVEEGRQICAVGTTTMRAIETSVSSNKKLGPYNGWTNKFIFPPHDFGVATAMITNFHMPKSTLMMMIAAFAGKDFLMEAYEEAVKMDYKFFSYGDAMLIL

SEQ ID NO: 65264 - protein, 349 aa, unidentified
  source 1..349: note = Chryseobacterium gallinarum
  REGION 1..349: note = tr|A0A0G3LWC6|A0A0G3LWC6_9FLAO S-adenosylmethionine:tRNA ribosyltransferase-isomerase; OS = Chryseobacterium gallinarum OX=1324352 GN=queA PE=3 SV=1
MKTSDFNFDLPAELLAEHPSEHRDEARLMVLDRKTQTIEHKLFKDVVDYFDEDDLFIFNNTKVFPARLYGNKEKTGAKIEVFLLRELDKETRVWDVLVDPARKIRIGNKLFFTEDESLVAEVIDNTTSRGRTLRFLFDGSYEEFRAKLKELGETPLPKYIKRAVEPEDAERYQTIYAKVEGAVAAPTAGLHFSKHLMKRLEIKGINFAEVTLHVGLGTFNPIEVEDLSKHKMESEEIIIDEKNAEIINKAVDAHRRVCAVGTTTMRALETSVSSNKKISAFNGWTNKFIYPPHEFGVANSMITNFHTPKSTLIMMIAAFAGRDFVMHAYEEAVKEKYKFYSYGDAMLIL

SEQ ID NO: 65265 - protein, 349 aa, Chryseobacterium gambrini
  REGION 1..349: note = tr|A0A1N7QCH0|A0A1N7QCH0_9FLAO S-adenosylmethionine:tRNA ribosyltransferase-isomerase; OS = Chryseobacterium gambrini OX=373672 GN=queA PE=3 SV=1
MKTSDFNFDLPAELLAEHPSEHRDEARLMVLDRKTETIQHKLFKDVVDYFDEGDLFIFNNTKVFPARLYGNKEKTGAKIEVFLLRELDKETRVWDVLVDPARKIRIGNKLFFTEDESLVAEVIDNTTSRGRTLRFLFDGSYEEFRAKLKELGETPLPKYIKRDVEPEDAERYQTIYAKVEGAVAAPTAGLHFSRHLMKRLEIKGIDFAEVTLHVGLGTFNPIEVEDLSKHKMESEEIFIDEKNAQIINNAVDANRRVCAVGTTTMRTLETSVSSNKKISAFHGWTNKFIYPPHDFGVANCMITNFHTPKSTLIMMIAAFAGRDFIMHAYEEAVKEKYKFYSYGDAMLIL

SEQ ID NO: 65266 - protein, 349 aa, unidentified
  source 1..349: note = Chryseobacterium geocarposphaerae
  REGION 1..349: note = tr|A0A2M9C9I5|A0A2M9C9I5_9FLAO S-adenosylmethionine:tRNA ribosyltransferase-isomerase; OS = Chryseobacterium geocarposphaerae OX=1416776 GN=queA; PE = 3 SV=1
MKTSDFNFDLPAELLAEHPSEHRDEARLMVLNRKTETIEHKLFKDVVDYFDEGDLFIFNNTKVFPARLYGNKEKTGAKIEVFLLRELDKETRVWDVLVDPARKIRIGNKLFFTEDESLVAEVIDNTTSRGRTLRFLFDGSYEEFRAKLKELGETPLPKYIKRDVEPEDAERYQTIYAKVEGAVAAPTAGLHFSKHLMKRLEIKGIDFAEVTLHVGLGTFNPIEVEDLSKHKMESEEIFIDEKNAQIINNAVEANKRVCAVGTTTMRTLETSVSSNKKISAFHGWTNKFIYPPHEFGVANCMITNFHTPKSTLIMMIAAFAGRDFVMHAYEEAVKEKYKFYSYGDAMLIL

SEQ ID NO: 65267 - protein, 349 aa, unidentified
  source 1..349: note = Chryseobacterium glaciei
  REGION 1..349: note = tr|A0A172XYG1|A0A172XYG1_9FLAO S-adenosylmethionine:tRNA ribosyltransferase-isomerase; OS = Chryseobacterium glaciei OX=1685010 GN=queA PE=3 SV=1
MKTSDFNFDLPEELLAEHPSEHRDESRLMVLDRKTQTIEHKLFKDVVDYFDEKDLFIFNNTKVFPARLYGNKEKTGAKIEVFLLRELDKETRVWDVLVDPARKIRIGNKLFFTEDESLVAEVIDNTTSRGRTLRFLFDGSYEEFRTKLKELGETPLPKYIKRAVEPEDAERYQTIYAKIEGAVAAPTAGLHFSRHLMKRLEIKGIDFAEVTLHVGLGTFNPIEVEDLSKHKMESEEIIIDEKNADIINKAVDEHRRVCAVGTTTMRALETSVSSNKKISAFNGWTNKFIYPPHDFGVANTMITNFHTPKSTLLMMIAAFAGRDFIMQAYEEAVKEKYKFYSYGDAMLIL

SEQ ID NO: 65268 - protein, 349 aa, Chryseobacterium gleum
  REGION 1..349: note = tr|A0A448B174|A0A448B174_9FLAO S-adenosylmethionine:tRNA ribosyltransferase-isomerase; OS = Chryseobacterium gleum OX=250 GN=queA PE=3 SV=1
MKTSDFNFDLPAELLAEHPSEHRDEARLMVLDRKTQTIEHKLFKDVVDYFDEEDLFIFNNTKVFPARLYGNKEKTGAKIEVFLLRELDKETRVWDVLVDPARKIRIGNKLFFTEDESLVAEVIDNTTSRGRTLRFLFDGSYEEFRSKLKELGETPLPKYIKRAVEPEDAERYQTIYAKVEGAVAAPTAGLHFSKHLMKRLEIKGINFAEVTLHVGLGTFNPIEVEDLSKHKMESEEIIIDEKNAAIINKAVEAHRRVCAVGTTTMRALETSVSSNKKISAFNGWTNKFIYPPHEFGVANSMITNFHTPKSTLIMMIAAFAGRDFVMHAYEEAVKEKYKFYSYGDAMLIL

SEQ ID NO: 65269 - protein, 349 aa, Chryseobacterium gleum
  REGION 1..349: note = tr|A0A4U8WCF0|A0A4U8WCF0_9FLAO S-adenosylmethionine:tRNA ribosyltransferase-isomerase; OS = Chryseobacterium gleum OX=250 GN=queA PE=3 SV=1
MKTSDFNFDLPAELLAEHPSEHRDEARLMVLNRKTETIEHKLFKDVVDYFDEKDLFIFNNTKVFPARLYGNKEKTGAKIEVFLLRELDKETRVWDVLVDPARKIRIGNKLFFTEDESLVAEVIDNTTSRGRTLRFLFDGSYEEFRAKLKELGETPLPKYIKREVEPEDAERYQTIYAKVEGAVAAPTAGLHFSKHLMKRLEIKGVDFAEITLHVGLGTFNPIEVEDLSKHKMESEEVIIDEKNAEIINRAVQENRRVCAVGTTTMRAIETSVSSNKKISAFQGWTNKFIYPPHDFGIANSMITNFHTPKSTLIMMIAAFAGKDFVMHAYEEAVKEKYKFYSYGDAMLIL

SEQ ID NO: 65270 - protein, 349 aa, Chryseobacterium greenlandense
  REGION 1..349: note = tr|A0A124F2L7|A0A124F2L7_9FLAO S-adenosylmethionine:tRNA ribosyltransferase-isomerase; OS = Chryseobacterium greenlandense OX=345663 GN=queA PE=3; SV = 1
MKTSDFNFDLPEELLAEHPSEHRDEARLMVLDRKTQTIEHKLFKDVVDYFDEKDLFIFNNTKVFPARLYGNKEKTGAKIEVFLLRELDKETRVWDVLVDPARKIRIGNKLFFTEDESLVAEVIDNTTSRGRTLRFLFDGSYEEFRTKLKELGETPLPKYIKRDVEPEDAERYQTIYAKVEGAVAAPTAGLHFSRHLMKRLEIKGIDFAEVTLHVGLGTFNPIEVEDLSKHKMESEEIIIDEKNAEIINRAVQENRKVCAVGTTTMRAIETSVSSNKKISAFQGWTNKFIYPPHDFGVANTMITNFHTPKSTLLMMIAAFAGKDFIMHAYEEAVKEKYKFYSYGDAMLIL

SEQ ID NO: 65271 - protein, 349 aa, Chryseobacterium hagamense
  REGION 1..349: note = tr|A0A511YJJ9|A0A511YJJ9_9FLAO S-adenosylmethionine:tRNA ribosyltransferase-isomerase; OS = Chryseobacterium hagamense OX=395935 GN=queA PE=3 SV=1
MKTSDFNFDLPAELLAEHPSEHRDEARLMVLDRKTETIEHKLFKDVVDYFDEGDLFIFNNTKVFPARLYGNKEKTGAKIEVFLLRELDKETRVWDVLVDPARKIRIGNKLFFTEDESLVAEVIDNTTSRGRTLRFLFDGSYEEFRSKLKELGETPLPKYIKRDVEPEDAERYQTIYAKVEGAVAAPTAGLHFSRHLMKRLEIKGIDFAEVTLHVGLGTFNPIEVEDLSKHKMESEEIFIDEKNAQIINNAVESHRRVCAVGTTTMRTLETSVSSNKKISAFHGWTNKFIYPPHDFGVANCMITNFHTPKSTLIMMIAAFAGKEFIMRAYEEAVKEKYKFYSYGDAMLIL

SEQ ID NO: 65272 - protein, 349 aa, Chryseobacterium haifense
  REGION 1..349: note = tr|A0A246B8J2|A0A246B8J2_9FLAO S-adenosylmethionine:tRNA ribosyltransferase-isomerase; OS = Chryseobacterium haifense DSM 19056 OX=1450526 GN=queA; PE = 3 SV=1
MKTSDFNFHLPEELLAEHPAEHRDESKLMVLDRKTQTIEHKLFKDVVDYFDEHDLFIFNNTKVFPARLYGNKEKTGAKIEVFLLRELDKETRVWDVLVDPARKIRIGNKLFFTEDESLVAEVIDNTTSRGRTLRFLYDGSYEEFRAKLKELGETPLPKYIKRPVEPEDAERYQTIYAKHEGAVAAPTAGLHFSKHLMKKLEIKGIDFAEVTLHVGLGTFNPIEVEDLSKHKMESEEAIIDQVNADIINKAVAEQRRVCAVGTTTMRALETSVSSNKKIGAYHGWTNKFIFPPHEFGVANAMITNFHTPKSTLLMMVAAFAGKDFVMHAYEEAIKNEYKFFTYGDAMLIL

SEQ ID NO: 65273 - protein, 410 aa, Chryseobacterium haifense
  REGION 1..410: note = tr|A0A246BCE6|A0A246BCE6_9FLAO S-adenosylmethionine:tRNA ribosyltransferase-isomerase; OS = Chryseobacterium haifense DSM 19056 OX=1450526; GN = AP75_02425 PE=3 SV=1
MHPKHLRIEDFTYDLPAEKIAYNPVNPRDQSKLLVYQNNKISENTYRNISEYLPENAVLVFNDTKVVKSRIFFNNENGATIEVFCLEPYGEAIDYEQHFTERNSVTWICFIGKVSKWREQQLTKTIEVEGLPVELSAEITGKLEDAYLVTFTWSPSEIPFGKIMDAAGVTPLPPYIKRIAEKVDEDSYQTVYSENEGSVAAPTAGLHFTQDVLDDLKKKGISSLFTTLHVGAGTFKPVKSEVMEDHVMHSEYLNITTAFLEDLAVKIHQPIITVGTTSTRTLESIYWMGNKIVQNPEISYNALKINQWEPYEAEAICSAEEAIDALLKWIKNTHQDHLSIETEIIIAPGYSFKMVKGLVTNFHQPQSTLLLLVSALIGDQWKNIYQYALENDFRFLSYGDGSLLLPNNNF

SEQ ID NO: 65274 - protein, 349 aa, unidentified
  source 1..349: note = Chryseobacterium halperniae
  REGION 1..349: note = tr|A0A085BJA2|A0A085BJA2_9FLAO S-adenosylmethionine:tRNA ribosyltransferase-isomerase; OS = Chryseobacterium halperniae OX=421072 GN=queA PE=3 SV=1
MKTSDFNFDLPEELLAEHPSENRDEARLMVLDRKTETITHRLFKDVIEYFDEKDLFIFNNTKVFPARLFGNKEKTGAKIEVFLLRELDRETRVWDVLVDPARKIRIGNKLFFTEDESLVAEVIDNTTSRGRTLRFLFDGSYEEFRAKLTELGETPLPKYIKRDVEPEDADRYQTIYAKIEGAVAAPTAGLHFSKHLMKRLEIKGIDFAEITLHVGLGTFNPIEVEDLSKHKMESEEAIIDEKNAAIINKAVEEGRRVCAVGTTTMRALETSVSSNKKISAYRGWTNKFIYPPHDFGVANAMITNFHTPKSTLIMMIAAFSNKDFIMRAYEEAIKERYKFYSYGDAMLIL

SEQ ID NO: 65275 - protein, 349 aa, Chryseobacterium hispanicum
  REGION 1..349: note = tr|A0A3D9D3Z0|A0A3D9D3Z0_9FLAO S-adenosylmethionine:tRNA ribosyltransferase-isomerase; OS = Chryseobacterium hispanicum OX=358687 GN=queA PE=3 SV=1
MKTSDFNFDLPAELLAEHPSENRDEARLMVLNRKTETIEHRLFKDVIEYFDEKDLFIFNNTKVFPARLFGNKEKTGAKIEVFLLRELDAETRVWDVLVDPARKIRIGNKLFFTEDESLVAEVIDNTTSRGRTLRFLFDGSYEEFRAKLTELGETPLPKYIKRDVEPEDAERYQTIYAKVEGAVAAPTAGLHFSKHLMKRLEIKGIDFAEITLHVGLGTFNPIEVEDLSKHKMESEEAIIDEKNAEIINRAVQEGRRVVAVGTTTMRALETSVSSNKKISAYRGWTNKFIYPPHDFGVANAMITNFHTPKSTLIMMIAAFANKDFIMRAYEEAVKEKYKFYSYGDAMLIL

SEQ ID NO: 65276 - protein, 349 aa, Chryseobacterium hominis
  REGION 1..349: note = tr|A0A1H6HWY0|A0A1H6HWY0_9FLAO S-adenosylmethionine:tRNA ribosyltransferase-isomerase; OS = Chryseobacterium hominis OX=420404 GN=queA PE=3 SV=1
MKTSDFNFNLPPELLAEHPSENRDEARLMVLDRKTETIEHRLFKDVIDYFDEKDLFIFNNTKVFPARLYGNKEKTGAKIEVFLLRELDAETRVWDVLVDPARKIRIGNKLFFTEDESLVAEVIDNTTSRGRTLRFLFDGSYEEFRAKLTELGETPLPKYIKREVEPEDAERYQTIYAKVEGAVAAPTAGLHFSKHLMKRLEIKGIDFAEITLHVGLGTFNPIEVEDLSKHKMESEEAIIDEKNAEIINRAVEEGRRVCAVGTTTMRALETSVSSNKKISAYRGWTNKFIYPPHDFGVANAMITNFHTPKSTLIMMIAAFANKDFIMRAYEEAVKEKYKFYSYGDAMLIL

SEQ ID NO: 65277 - protein, 352 aa, Chryseobacterium humi
  REGION 1..352: note = tr|A0A1H5TM09|A0A1H5TM09_9FLAO S-adenosylmethionine:tRNA ribosyltransferase-isomerase; OS = Chryseobacterium humi OX=493375 GN=queA PE=3 SV=1
MSKLKTSDFNFHLPEHLLAEHPANNRDESKLMVLHRKTGKIEHKLFKDVIDYFEEKDLFIFNNTKVFPARLYGNKEKTGAKIEVFLLRELDKETRVWDVLVDPARKIRIGNKLFFNEDESLVAEVIDNTTSRGRTLRFLYDGSYEEFRAKLKELGETPLPKYIKRDVEPEDAERYQTIYAKNEGAVAAPTAGMHFSKHLMKRLEIKGVDFAEVTLHIGLGTFNPIEVEDLSKHKMESEEAIIDQLNADKINLAVEEGRQICAVGTTTMRAIETSVSSNKKIGPFHGWTNKFIFPPHDFGVATSMITNFHMPKSTLMMMIAAFAGKDFLMEAYEEAVKNEYKFYSYGDAMLIL

SEQ ID NO: 65278 - protein, 349 aa, Chryseobacterium hungaricum
  REGION 1..349: note = tr|A0A1G7J9K9|A0A1G7J9K9_9FLAO S-adenosylmethionine:tRNA ribosyltransferase-isomerase; OS = Chryseobacterium hungaricum OX=454006 GN=queA PE=3 SV=1
MKTSDFNFDLPAELLAEHPSENRDEARLMVLNRKTETIEHRLFKDVIDYFDEKDLFIFNNTKVFPARLFGNKEKTGAKIEVFLLRELDAETRVWDVLVDPARKIRIGNKLFFTEDESLVAEVIDNTTSRGRTLRFLFDGSYEEFRAKLTELGETPLPKYIKRDVEPEDAERYQTIYAKVEGAVAAPTAGLHFSKHLMKRLEIKGIDFAEITLHVGLGTFNPIEVEDLSKHKMESEEAIIDEKNAEIINKAVEEGRRVCAVGTTTMRALETSVSSNKKISAYRGWTNKFIYPPHEFGVANAMITNFHTPKSTLIMMIAAFANKDFIMRAYEEAIKEKYKFYSYGDAMLIL

SEQ ID NO: 65279 - protein, 349 aa, Chryseobacterium indologenes
  REGION 1..349: note = tr|A0A411DME1|A0A411DME1_9FLAO S-adenosylmethionine:tRNA ribosyltransferase-isomerase; OS = Chryseobacterium indologenes OX=253 GN=queA PE=3 SV=1
MKTSDFNFDLPAELLAEHPSEHRDEARLMVLDRKTQTIEHKLFKDVVDYFDEEDLFIFNNTKVFPARLYGNKEKTGAKIEVFLLRELDKETRVWDVLVDPARKIRIGNKLFFTEDESLVAEVIDNTTSRGRTLRFLFDGSYDEFRTKLKELGETPLPKYIKRAVEPEDAERYQTIYAKVEGAVAAPTAGLHFSKHLMKRLEIKGINFAEVTLHVGLGTFNPIEVEDLSKHKMESEEIIIDEKNAAIINKAVESHRRVCAVGTTTMRALETSVSSNKKISAFNGWTNKFIYPPHDFGVANSMITNFHTPKSTLIMMIAAFAGRDFVMHAYEEAVKEKYKFYSYGDAMLIL

SEQ ID NO: 65280 - protein, 349 aa, Chryseobacterium indologenes
  REGION 1..349: note = tr|A0A1Z3W2J3|A0A1Z3W2J3_9FLAO S-adenosylmethionine:tRNA ribosyltransferase-isomerase; OS = Chryseobacterium indologenes OX=253 GN=queA PE=3 SV=1
MKTSDFNFDLPAELLAEHPSEHRDEARLMVLDRKTETIEHKLFKDVVDYFDESDLFIFNNTKVFPARLYGNKEKTGAKIEVFLLRELDKETRVWDVLVDPARKIRIGNKLFFTEDESLVAEVIDNTTSRGRTLRFLFDGSYEEFRTKLKELGETPLPKYIKRAVEPEDAERYQTIYAKVEGAVAAPTAGLHFSKHLMKKLEIKGIDFAEVTLHVGLGTFNPIEVEDLSKHKMESEEIIIDEKNAEIINKAVEAHRRVCAVGTTTMRALETSVSSNKKISAFNGWTNKFIYPPHDFGVANSMITNFHTPKSTLLMMIAAFAGRDFVMHAYEEAVKEKYKFYSYGDAMLIL

SEQ ID NO: 65281 - protein, 349 aa, Chryseobacterium indoltheticum
  REGION 1..349: note = tr|A0A381F4J8|A0A381F4J8_9FLAO S-adenosylmethionine:tRNA ribosyltransferase-isomerase; OS = Chryseobacterium indoltheticum OX=254 GN=queA PE=3 SV=1
MKTSDFNFDLPEELLAEHPSEHRDEARLMVLDRKTQTIEHKLFKDVVDYFDEKDLFIFNNTKVFPARLYGNKEKTGAKIEVFLLRELDKETRVWDVLVDPARKIRIGNKLFFTEDESLVAEVIDNTTSRGRTLRFLFDGSYEEFRSKLKELGETPLPKYIKRDVEPEDAERYQTIYAKVEGAVAAPTAGLHFSKHLMKRLEIKGIDFAEVTLHVGLGTFNPIEVEDLSKHKMESEEIIIDEKNAEIINRAVQENRRVCAVGTTTMRAIETSVSSNRKISAFNGWTNKFIYPPHDFGIANTMITNFHTPKSTLMMMIAAFAGKDFLMHAYEEAVKEKYKFYSYGDAMLII

SEQ ID NO: 65282 - protein, 349 aa, Chryseobacterium jejuense
  REGION 1..349: note = tr|A0A2X2VFT3|A0A2X2VFT3_9FLAO S-adenosylmethionine:tRNA ribosyltransferase-isomerase; OS = Chryseobacterium jejuense OX=445960 GN=queA PE=3 SV=1
MKTSDFNFDLPAELLAEHPSEHRDEARLMVLDRKTQTIEHKLFKDVVDYFDEEDLFIFNNTKVFPARLYGNKEKTGAKIEVFLLRELDKETRVWDVLVDPARKIRIGNKLFFTEDESLVAEVIDNTTSRGRTLRFLFDGSYDEFRTKLKELGETPLPKYIKRAVEPEDAERYQTIYAKVEGAVAAPTAGLHFSKHLMKRLEIKGINFAEVTLHVGLGTFNPIEVEDLSKHKMESEEIIIDEKNALIINKAVESHRRVCAVGTTTMRALETSVSSNKKISAFNGWTNKFIYPPHDFGVANTMITNFHTPKSTLIMMIAAFAGRDFIMHAYEEAVKEKYKFYSYGDAMLIL

SEQ ID NO: 65283 - protein, 349 aa, Chryseobacterium jeonii
  REGION 1..349: note = tr|A0A0C1D9B2|A0A0C1D9B2_9FLAO S-adenosylmethionine:tRNA ribosyltransferase-isomerase; OS = Chryseobacterium jeonii OX=266749 GN=queA PE=3 SV=1
MKTSDFNFHLPEELLAEHPSEHRDEAKLMVLNRATQTIEHKKFKDVVDYFDEHDLFIFNNTKVFPARLFGNKEKTGAKIEVFLLRELDKETRVWDVLVDPARKIRIGNKLFFTEDEGLVAEVIDNTTSRGRTLRFLYDGSYEEFRTKLKELGQTPLPKYIKRDVEPEDAERYQTIYAKYEGAVAAPTAGLHFSKHLMKKLEIKGIDFAEITLHVGLGTFNPIEVEDLSKHKMESEEAIITQKNADIINKAVAEQRRVCAVGTTTMRAIETSVSSNRKIGPYHGWTNKFIFPPHDFGVANCMITNFHTPKSTLMMMVAAFAGKDFLMQAYEEAIKNEYKFYSYGDAMLII

SEQ ID NO: 65284 - protein, 349 aa, Chryseobacterium joostei
  REGION 1..349: note = tr|A0A1N7I1D2|A0A1N7I1D2_9FLAO S-adenosylmethionine:tRNA ribosyltransferase-isomerase; OS = Chryseobacterium joostei OX=112234 GN=queA PE=3 SV=1
MKTSDFNFDLPAELLAEHPSEHRDEARLMVLDRKTQTIEHKLFKDVVDYFDEKDLFIFNNTKVFPARLYGNKEKTGAKIEVFLLRELDKETRVWDVLVDPARKIRIGNKLFFTEDESLVAEVIDNTTSRGRTLRFLFDGSYDEFRTKLKELGETPLPKYIKRAVEPEDAERYQTIYAKVEGAVAAPTAGLHFSRHLMKKLEIKGIDFAEVTLHVGLGTFNPIEVEDLSKHKMESEEIIIDEKNAAIINNAVESHRRVCAVGTTTMRALETSVSSNKKISAFNGWTNKFIYPPHDFGVANTMITNFHTPKSTLIMMIAAFAGRDFIMQAYEEAVKEKYKFYSYGDAMLIL

SEQ ID NO: 65285 - protein, 349 aa, Chryseobacterium koreense
  REGION 1..349: note = tr|A0A0J7J080|A0A0J7J080_9FLAO S-adenosylmethionine:tRNA ribosyltransferase-isomerase; OS = Chryseobacterium koreense CCUG 49689 OX=1304281 GN=queA; PE = 3 SV=1
MKTSDFNFHLPEHLLAEHPSEHRDEAKLMVLNRKDQTIEHKLFKDVVDYFDEHDLFIFNNTKVFPARLYGNKEKTGAKIEVFLLRELDKETRVWDVLVDPARKIRIGNKLFFTEDESLVAEVIDNTTSRGRTLRFLYDGSYEEFRAKLKELGETPLPKYIKREVEPEDAERYQTIYAKIEGAVAAPTAGLHFSKHLMKRLEIKGIDFAEITLHVGLGTFNPIEVEDLSKHKMESEEAIIDQKNADIINKAVEEQRRVCAVGTTTMRALETSVSSNKKIGPYHGWTNKFIFPPHDFGVANAMITNFHTPKSTLLMMIAAFAGKDFVMHAYEEAIKNEYKFYSYGDAMLIL

SEQ ID NO: 65286 - protein, 349 aa, unidentified
  source 1..349: note = Chryseobacterium kwangjuense
  REGION 1..349: note = tr|A0A135WJG5|A0A135WJG5_9FLAO S-adenosylmethionine:tRNA ribosyltransferase-isomerase; OS = Chryseobacterium kwangjuense OX=267125 GN=queA PE=3 SV=1
MKTSDFNFDLPDELLAEHPSEHRDEARLMVLNRKTETIEHKLFKDVVDYFDEKDLFIFNNTKVFPARLYGNKEKTGAKIEVFLLRELDKETRVWDVLVDPARKIRIGNKLFFTEDESLVAEVIDNTTSRGRTLRFLFDGSYDEFRTKLKELGETPLPKYIKRAVEPEDAERYQTIYAKIEGAVAAPTAGLHFSKHLMKKLEIKGIDFAEVTLHVGLGTFNPIEVEDLSKHKMESEEIIIDEKNAAIINNAVESHRRVCAVGTTTMRALETSVSSNKKISAFNGWTNKFIYPPHDFGVANSMITNFHTPKSTLLMMIAAFAGKDFIMHAYEEAVKEKYKFYSYGDAMLIL

SEQ ID NO: 65287 - protein, 349 aa, unidentified
  source 1..349: note = Chryseobacterium lactis
  REGION 1..349: note = tr|A0A3G6RJ63|A0A3G6RJ63_9FLAO S-adenosylmethionine:tRNA ribosyltransferase-isomerase; OS = Chryseobacterium lactis OX=1241981 GN=queA PE=3 SV=1
MKTSDFNFDLPAELLAEHPSEHRDEARLMVLDRKTQTIEHKLFRDVVDYFDEDDLFIFNNTKVFPARLYGNKEKTGAKIEVFLLRELDKETRVWDVLVDPARKIRIGNKLFFTEDESLVAEVIDNTTSRGRTLRFLFDGSYEEFRSKLKELGETPLPKYIKRAVEPEDAERYQTIYAKIEGAVAAPTAGLHFSRHLMKRLEIKGINFAEVTLHVGLGTFNPIEVEDLSKHKMESEEIIIDEKNADIINKAVDSHRRVCAVGTTTMRALETSVSSNKKISAFNGWTNKFIYPPHDFGVANSMITNFHTPKSTLIMMIAAFAGRDFIMHAYEEAVKEKYKFYSYGDAMLIL

SEQ ID NO: 65288 - protein, 349 aa, Chryseobacterium lathyri
  REGION 1..349: note = tr|A0A511Y881|A0A511Y881_9FLAO S-adenosylmethionine:tRNA ribosyltransferase-isomerase; OS = Chryseobacterium lathyri OX=395933 GN=queA PE=3 SV=1
MKTSDFNFDLPAELLAEHPSEHRDEAKLMVLNRKTQTIEHKLFKDVVDYFEEKDLFIFNNTKVFPARLYGNKEKTGAKIEVFLLRELDKETRVWDVLVDPARKIRIGNKLFFTEDESLVAEVIDNTTSRGRTLRFLFDGSYDEFRTKLKELGETPLPKYIKRAVEPEDAERYQTIYAKIEGAVAAPTAGLHFSKHLMKKLEIKGIDFAEVTLHVGLGTFNPIEVEDLSKHKMESEEIIIDEKNADIINKAVDAHRRVCAVGTTTMRALETSVSSNKKISAFNGWTNKFIYPPHDFGVANSMITNFHTPKSTLLMMIAAFAGKDFIMHAYEEAVKEKYKFYSYGDAMLIL

SEQ ID NO: 65289 - protein, 349 aa, unidentified
  source 1..349: note = Chryseobacterium limigenitum
  REGION 1..349: note = tr|A0A1K2IQN4|A0A1K2IQN4_9FLAO S-adenosylmethionine:tRNA ribosyltransferase-isomerase; OS = Chryseobacterium limigenitum OX=1612149 GN=queA PE=3; SV = 1
MKTSDFNFDLPEELLAEHPSEHRDEARLMVLDRKTQTIEHKLFKDVVDYFDEKDLFIFNNTKVFPARLYGNKEKTGAKIEVFLLRELDKETRVWDVLVDPARKIRIGNKLFFTEDESLVAEVIDNTTSRGRTLRFLFDGSYEEFRTKLKELGETPLPKYIKRAVEPEDAERYQTIYAKIEGAVAAPTAGLHFSRHLMKRLEIKGIDFAEVTLHVGLGTFNPIEVEDLSKHKMESEEIIIDEKNADIINRAVDEHRRVCAVGTTTMRALETSVSSNKKISAFNGWTNKFIYPPHDFGVANTMITNFHTPKSTLLMMIAAFAGRDFIMQAYEEAVKEKYKFYSYGDAMLIL

SEQ ID NO: 65290 - protein, 349 aa, Chryseobacterium luteum
  REGION 1..349: note = tr|A0A085ZFB3|A0A085ZFB3_9FLAO S-adenosylmethionine:tRNA ribosyltransferase-isomerase; OS = Chryseobacterium luteum OX=421531 GN=queA PE=3 SV=1
MKTSDFNFDLPAELLAEHPSEHRDEARLMVLNRKTETIEHKLFKDVVDYFDEKDLFIFNNTKVFPARLYGNKEKTGAKIEVFLLRELDKETRVWDVLVDPARKIRIGNKLFFTEDESLVAEVIDNTTSRGRTLRFLFDGSYDEFRTKLKELGETPLPKYIKRAVEPEDAERYQTIYAKVEGAVAAPTAGLHFSRHLMKKLEIKGIDFAEVTLHVGLGTFNPIEVEDLSKHKMESEEVIIDEKNADIINKAVDAHRRVCAVGTTTMRALETSVSSNRKISAFNGWTNKFIYPPHDFGVASAMITNFHTPKSTLLMMIAAFAGKEFIMHAYEEAVKEKYKFYSYGDAMLIL

SEQ ID NO: 65291 - protein, 349 aa, Chryseobacterium molle
  REGION 1..349: note = tr|A0A1M6RWP3|A0A1M6RWP3_9FLAO S-adenosylmethionine:tRNA ribosyltransferase-isomerase; OS = Chryseobacterium molle OX=216903 GN=queA PE=3 SV=1
MKTSDFNFDLPAELLAEHPSENRDEARLMVLDRKTETITHRLFKDVIDYFDEKDLFIFNNTKVFPARLFGNKEKTGAKIEVFLLRELDAETRVWDVLVDPARKIRIGNKLFFTEDESLVAEVIDNTTSRGRTLRFLFDGSYEEFRAKLTELGETPLPKYIKREVEPEDAERYQTIYAKVEGAVAAPTAGLHFSKHLMKRLEIKGIDFAEITLHVGLGTFNPIEVEDLSKHKMESEEAIIDEKNAEIINRAVEEGRRVCAVGTTTMRALETSVSSNKKISAYRGWTNKFIYPPHDFGVANAMITNFHTPKSTLIMMIAAFANKDFVMRAYEEAIKEGYKFYSYGDAMLIL

SEQ ID NO: 65292 - protein, 349 aa, unidentified; identical to SEQ ID NO: 64741
  source 1..349: note = Chryseobacterium mucoviscidosis
  REGION 1..349: note = tr|A0A202C4Q9|A0A202C4Q9_9FLAO S-adenosylmethionine:tRNA ribosyltransferase-isomerase; OS = Chryseobacterium mucoviscidosis OX=1945581 GN=queA PE=3; SV = 1

SEQ ID NO: 65293 - protein, 349 aa, unidentified
  source 1..349: note = Chryseobacterium nakagawai
  REGION 1..349: note = tr|A0A3S4VHA0|A0A3S4VHA0_9FLAO S-adenosylmethionine:tRNA ribosyltransferase-isomerase; OS = Chryseobacterium nakagawai OX=1241982 GN=queA PE=3 SV=1
MKTSDFNFDLPAELLAEHPSEHRDEARLMVLDRKTQTIEHKLFKDVVDYFDESDLFIFNNTKVFPARLYGNKEKTGAKIEVFLLRELDKETRVWDVLVDPARKIRIGNKLFFTEDESLVAEVIDNTTSRGRTLRFLFDGSYDEFRTKLKELGETPLPKYIKRAVEPEDAERYQTIYAKIEGAVAAPTAGLHFSRHLMKRLEIKGIDFAEVTLHVGLGTFNPIEVEDLSKHKMESEEIIIDEKNAAIINKAVESHRRVCAVGTTTMRALETSVSSNKKISAFNGWTNKFIYPPHDFGVANSMITNFHTPKSTLIMMIAAFAGRDFIMHAYEEAVKEKYKFYSYGDAMLIL

SEQ ID NO: 65294 - protein, 349 aa, unidentified
  source 1..349: note = Chryseobacterium nakagawai
  REGION 1..349: note = tr|A0A3N2F7V7|A0A3N2F7V7_9FLAO S-adenosylmethionine:tRNA ribosyltransferase-isomerase; OS = Chryseobacterium nakagawai OX=1241982 GN=queA PE=3 SV=1
MKTSDFNFDLPAELLAEHPSEHRDEARLMVLDRKTQTIEHKLFKDVVDYFDEKDLFIFNNTKVFPARLYGNKEKTGAKIEVFLLRELDKETRVWDVLVDPARKIRIGNKLFFTEDESLVAEVIDNTTSRGRTLRFLFDGSYDEFRTKLKELGETPLPKYIKRAVEPEDAERYQTIYAKIEGAVAAPTAGLHFSKHLMKRLEIKGIDFAEVTLHVGLGTFNPIEVEDLSKHKMESEEIIIDEKNADIINKAVESHRRVCAVGTTTMRALETSVSSNKKISAFNGWTNKFIYPPHDFGVANSMITNFHTPKSTLIMMIAAFAGRDFIMQAYEEAVKEKYKFYSYGDAMLIL

SEQ ID NO: 65295 - protein, 349 aa, unidentified
  source 1..349: note = Chryseobacterium nematophagum
  REGION 1..349: note = tr|A0A3M7LDS9|A0A3M7LDS9_9FLAO S-adenosylmethionine:tRNA ribosyltransferase-isomerase; OS = Chryseobacterium nematophagum OX=2305228 GN=queA PE=3; SV = 1
MKTSDFNFDLPAELLAEHPSEHRDEARLMVLNRKTETIEHKLFKDVVDYFDEKDLFIFNNTKVFPARLYGNKEKTGAKIEVFLLRELDKETRVWDVLVDPARKIRIGNKLFFTEDESLVAEVIDNTTSRGRTLRFLFDGSYDEFRTKLKELGETPLPKYIKRAVEPEDAERYQTIYAKVEGAVAAPTAGLHFSKHLMKRLEIKGIDFAEITLHVGLGTFNPIEVEDLSKHKMESEEITIDERNADIINNAVDAHRRVCAVGTTTMRALETSVSSNKKISAFHGWTNKFIYPPHDFGVANSMITNFHTPKSTLIMMIAAFAGRDFIMHAYEEAVKEKYKFYSYGDAMLIL

SEQ ID NO: 65296 - protein, 349 aa, unidentified
  source 1..349: note = Chryseobacterium nematophagum
  REGION 1..349: note = tr|A0A3M7TES7|A0A3M7TES7_9FLAO S-adenosylmethionine:tRNA ribosyltransferase-isomerase; OS = Chryseobacterium nematophagum OX=2305228 GN=queA PE=3; SV = 1
MKTSDFNFDLPAELLAEHPSEHRDEARLMVLNRKTETIEHKLFKDVVDYFDEKDLFIFNNTKVFPARLYGNKEKTGAKIEVFLLRELDKETRVWDVLVDPARKIRIGNKLFFTEDESLVAEVIDNTTSRGRTLRFLFDGSYDEFRTKLKELGETPLPKYIKRAVEPEDAERYQTIYAKVEGAVAAPTAGLHFSKHLMKRLEIKGIDFAEITLHVGLGTFNPIEVEDLSKHKMESEEITIDERNAEIINNAVDAHRRVCAVGTTTMRALETSVSSNKKISAFHGWTNKFIYPPHDFGVANSMITNFHTPKSTLIMMIAAFAGRDFIMHAYEEAVKEKYKFYSYGDAMLIL

SEQ ID NO: 65297 - protein, 349 aa, unidentified
  source 1..349: note = Chryseobacterium oleae
  REGION 1..349: note = tr|A0A1I4VSQ0|A0A1I4VSQ0_9FLAO S-adenosylmethionine:tRNA ribosyltransferase-isomerase; OS = Chryseobacterium oleae OX=491207 GN=queA PE=3 SV=1
MKTSDFNFDLPAELLAEHPSEHRDEARLMVLNRKTETIEHKLFKDVVDYFDEKDLFIFNNTKVFPARLYGNKEKTGAKIEVFLLRELDKETRVWDVLVDPARKIRIGNKLFFTEDESLVAEVIDNTTSRGRTLRFLFDGSYDEFRTKLKELGETPLPKYIKRAVEPEDAERYQTIYAKIEGAVAAPTAGLHFSKHLMKKLEIKGIDFAEVTLHVGLGTFNPIEVEDLSKHKMESEEIIIDEKNADIINKAVDAHRRVCAVGTTTMRALETSVSSNKKISAFNGWTNKFIYPPHDFGVANSMITNFHTPKSTLLMMIAAFAGREFIMHAYEEAVKEQYKFYSYGDAMLIL

SEQ ID NO: 65298 - protein, 349 aa, Chryseobacterium oncorhynchi
  REGION 1..349: note = tr|A0A316X2J5|A0A316X2J5_9FLAO S-adenosylmethionine:tRNA ribosyltransferase-isomerase; OS = Chryseobacterium oncorhynchi OX=741074 GN=queA PE=3 SV=1
MKTSDFNFDLPEELLAEHPSEHRDEARLMVLDRKTQTIEHKLFKDVVDYFDEKDLFIFNNTKVFPARLYGNKEKTGAKIEVFLLRELDKETRVWDVLVDPARKIRIGNKLFFTEDESLVAEVIDNTTSRGRTLRFLFDGSYDEFRTKLKELGETPLPKYIKRAVEPEDAERYQTIYAKVEGAVAAPTAGLHFSRHLMKKLEIKGIDFAEVTLHVGLGTFNPIEVEDLSKHKMESEEIIIDEKNAAIINNAVESHRRVCAVGTTTMRALETSVSSNKKISAFNGWTNKFIYPPHDFGVANTMITNFHTPKSTLIMMIAAFAGRDFIMQAYEEAVKEKYKFYSYGDAMLIL

SEQ ID NO: 65299 - protein, 349 aa, Chryseobacterium oranimense
  REGION 1..349: note = tr|A0A1M5KKQ1|A0A1M5KKQ1_9FLAO S-adenosylmethionine:tRNA ribosyltransferase-isomerase; OS = Chryseobacterium oranimense OX=421058 GN=queA PE=3 SV=1
MKTSDFNFDLPAELLAEHPSEHRDEARLMVLNRKTETIEHKLFKDVVDYFDEKDLFIFNNTKVFPARLYGNKEKTGAKIEVFLLRELDKETRVWDVLVDPARKIRIGNKLFFTEDESLVAEVIDNTTSRGRTLRFLFDGSYDEFRTKLKELGETPLPKYIKRAVEPEDAERYQTIYAKVEGAVAAPTAGLHFSKHLMKKLEIKGIDFAEVTLHVGLGTFNPIEVEDLSKHKMESEEIIIDEKNAEIINKAVEAHRRVCAVGTTTMRALETSVSSNKKISAFNGWTNKFIYPPHDFGVANSMITNFHTPKSTLLMMIAAFAGKDFIMHAYEEAVKEKYKFYSYGDAMLIL

SEQ ID NO: 65300 - protein, 349 aa, Chryseobacterium piperi
  REGION 1..349: note = tr|A0A086B2G7|A0A086B2G7_9FLAO S-adenosylmethionine:tRNA ribosyltransferase-isomerase; OS = Chryseobacterium piperi OX=558152 GN=queA PE=3 SV=1
MKTSDFNFDLPAELLAEHPSEHRDDARLMVLDRKTETIEHKLFKDVVDYFDEKDLFIFNNTKVFPARLYGNKEKTGAKIEVFLLRELDKETRVWDVLVDPARKIRIGNKLFFTEDESLVAEVIDNTTSRGRTLRFLFDGSYEEFRAKLKELGETPLPKYIKRAVEPEDAERYQTIYAKIEGAVAAPTAGLHFSKHLMKRLEIKGIDFAEVTLHVGLGTFNPIEVEDLSKHKMESEEIIIDEKNAEIINKAVDAHRRVCAVGTTTMRALETSVSSNKKISAFNGWTNKFIYPPHDFGVANSMITNFHTPKSTLIMMIAAFAGRDFIMHAYEEAVKEKYKFYSYGDAMLIL

SEQ ID NO: 65301 - protein, 349 aa, Chryseobacterium piscicola
  REGION 1..349: note = tr|A0A1N7LS97|A0A1N7LS97_9FLAO S-adenosylmethionine:tRNA ribosyltransferase-isomerase; OS = Chryseobacterium piscicola OX=551459 GN=queA PE=3 SV=1
MKTSDFNFDLPEELLAEHPAEHRDEARLMVLDRKNQTITHKQFKDVVDYFDEKDLFIFNNTKVFPARLYGNKEKTGAKIEVFLLRELDKETRVWDVLVDPARKIRIGNKLFFTEDESLVAEVIDNTTSRGRTLRFLYDGPYEEFRTKLKELGETPLPKYIKRDVEPEDAERYQTIYAKVEGAVAAPTAGLHFSRHLMKRLEIKGIDFAEVTLHVGLGTFNPIEVEDLSKHKMESEEIFIDEKNAEIINKAVDENRRVCAVGTTTMRTLETSVSSNKKISAFSGWTNKFIFPPHDFGVANCMITNFHTPKSTLMMMIAAFAGKDFLMQAYEEAVREKYKFYTYGDAMLIL

SEQ ID NO: 65302 - protein, 349 aa, Chryseobacterium piscium
  REGION 1..349: note = tr|A0A3D9BMW9|A0A3D9BMW9_9FLAO S-adenosylmethionine:tRNA ribosyltransferase-isomerase; OS = Chryseobacterium piscium OX=333702 GN=queA PE=3 SV=1
MKTSDFNFDLPEELLAEHPSEHRDEARLMVLDRKTQTIEHKLFKDVVDYFDEKDLFIFNNTKVFPARLYGNKEKTGAKIEVFLLRELDKETRVWDVLVDPARKIRIGNKLFFTEDESLVAEVIDNTTSRGRTLRFLFDGSYEEFRSKLKELGETPLPKYIKRDVEPEDAERYQTIYAKVEGAVAAPTAGLHFSKHLMKRLEIKGIDFAEVTLHVGLGTFNPIEVEDLSKHKMESEEIIIDEKNAEIINKAVQENRRVCAVGTTTMRAIETSVSSNRKISAFNGWTNKFIYPPHDFGIANTMITNFHTPKSTLMMMIAAFAGKDFLMHAYEEAVKEKYKFYSYGDAMLII

SEQ ID NO: 65303 - protein, 349 aa, unidentified
  source 1..349: note = Chryseobacterium polytrichastri
  REGION 1..349: note = tr|A0A1M6UUP1|A0A1M6UUP1_9FLAO S-adenosylmethionine:tRNA ribosyltransferase-isomerase; OS = Chryseobacterium polytrichastri OX=1302687 GN=queA PE=3; SV = 1
MKTSDFNFDLPEELLAEHPSEHRDESRLMVLDRKTQTIEHKLFKDVVDYFDEKDLFIFNNTKVFPARLYGNKEKTGAKIEVFLLRELDKETRVWDVLVDPARKIRIGNKLFFTEDESLVAEVIDNTTSRGRTLRFLFDGSYEEFRTKLKELGETPLPKYIKRSVEPEDAERYQTIYAKIEGAVAAPTAGLHFSRHLMKRLEIKGIDFAEVTLHVGLGTFNPIEVEDLSKHKMESEEIIIDEKNADIINRAVDEHRRVCAVGTTTMRALETSVSSNKKISAFNGWTNKFIYPPHDFGVANTMITNFHTPKSTLLMMIAAFAGREFIMHAYEEAVKEKYKFYSYGDAMLIL

SEQ ID NO: 65304 - protein, 349 aa, unidentified
  source 1..349: note = Chryseobacterium rhizoplanae
  REGION 1..349: note = tr|A0A521DGT6|A0A521DGT6_9FLAO S-adenosylmethionine:tRNA ribosyltransferase-isomerase; OS = Chryseobacterium rhizoplanae OX=1609531 GN=queA PE=3; SV = 1
MKTSDFNFDLPAELLAEHPSEHRDEARLMVLDRKTQTIEHKLFKDVVDYFDEDDLFIFNNTKVFPARLYGNKEKTGAKIEVFLLRELDKETRVWDVLVDPARKIRIGNKLFFTEDESLVAEVIDNTTSRGRTLRFLFDGSYDEFRTKLKELGETPLPKYIKRAVEPEDAERYQTIYAKIEGAVAAPTAGLHFSKHLMKRLEIKGINFAEVTLHVGLGTFNPIEVEDLSKHKMESEEIIIDEKNAELINRAVESHRRVCAVGTTTMRALETSVSSNKKISAFNGWTNKFIYPPHDFGVATSMITNFHTPKSTLLMMIAAFAGKDFVMHAYEEAVKEKYKFYSYGDAMLIL

SEQ ID NO: 65305 - protein, 349 aa, Chryseobacterium rhizosphaerae
  REGION 1..349: note = tr|A0A3D9DFW4|A0A3D9DFW4_9FLAO S-adenosylmethionine:tRNA ribosyltransferase-isomerase; OS = Chryseobacterium rhizosphaerae OX=395937 GN=queA PE=3; SV = 1
MKTSDFNFDLPEELLAEHPSEHRDEARLMVLDRKTETIEHKLFKDVVDYFDEKDLFIFNNTKVFPARLYGNKEKTGAKIEVFLLRELDKETRVWDVLVDPARKIRIGNKLFFTEDESLVAEVIDNTTSRGRTLRFLFDGSYDEFRTKLKELGETPLPKYIKRAVEPEDAERYQTIYAKIEGAVAAPTAGLHFSRHLMKRLEIKGIDFAEVTLHVGLGTFNPIEVEDLSKHKMESEEIIIDEKNAEIINRAVETHRRVCAVGTTTMRALETSVSSNKKISAFNGWTNKFIYPPHDFGVANSMITNFHTPKSTLLMMIAAFAGRDFVMHAYEEAVKEKYKFYSYGDAMLIL

SEQ ID NO: 65306 - protein, 349 aa, Chryseobacterium scophthalmum
  REGION 1..349: note = tr|A0A1N6FHA9|A0A1N6FHA9_9FLAO S-adenosylmethionine:tRNA ribosyltransferase-isomerase; OS = Chryseobacterium scophthalmum OX=59733 GN=queA PE=3 SV=1
MKTSDFNFDLPEELLAEHPSEHRDESRLMVLDRKAQTIEHKLFKDVVDYFDEKDLFIFNNTKVFPARLYGNKEKTGAKIEVFLLRELDKETRVWDVLVDPARKIRIGNKLFFTEDESLVAEVIDNTTSRGRTLRFLFDGSYEEFRSKLKELGETPLPKYIKRDVEPEDAERYQTIYAKVEGAVAAPTAGLHFSKHLMKRLEIKGIDFAEVTLHVGLGTFNPIEVEDLSKHKMESEEIIIDEKNAEIINKAVQENRRVCAVGTTTMRAIETSVSSNRKISAFNGWTNKFIYPPHDFGIANTMITNFHTPKSTLMMMIAAFAGKDFLMHAYEEAVKEKYKFYSYGDAMLII

SEQ ID NO: 65307 - protein, 349 aa, unidentified
  source 1..349: note = Chryseobacterium sediminis
  REGION 1..349: note = tr|A0A5B2UCN5|A0A5B2UCN5_9FLAO S-adenosylmethionine:tRNA ribosyltransferase-isomerase; OS = Chryseobacterium sediminis OX=1679494 GN=queA PE=3 SV=1
MKTSDFNFDLPAELLAEHPSEHRDEARLMVLDRKTQTIEHKLFKDVVDYFDEDDLFIFNNTKVFPARLYGNKEKTGAKIEVFLLRELDKETRVWDVLVDPARKIRIGNKLFFTEDESLVAEVIDNTTSRGRTLRFLFDGSYDEFRTKLKELGETPLPKYIKRAVEPEDAERYQTIYAKVEGAVAAPTAGLHFSKHLMKRLEIKGINFAEVTLHVGLGTFNPIEVEDLSKHKMESEEIIIDEKNAALINRAVESHRRVCAVGTTTMRALETSVSSNKKISAFNGWTNKFIYPPHDFGVATSMITNFHTPKSTLLMMIAAFAGKDFVMQAYEEAVREKYKFYSYGDAMLIL

SEQ ID NO: 65308 - protein, 349 aa, unidentified
  source 1..349: note = Chryseobacterium shandongense
  REGION 1..349: note = tr|A0A3G6QWW1|A0A3G6QWW1_9FLAO S-adenosylmethionine:tRNA ribosyltransferase-isomerase; OS = Chryseobacterium shandongense OX=1493872 GN=queA PE=3; SV = 1
MKTSDFNFDLPAELLAEHPSEHRDEARLMVLDRKTETIEHKLFKDVVDYFDEGDLFIFNNTKVFPARLYGNKEKTGAKIEVFLLRELDKETRVWDVLVDPARKIRIGNKLFFTEDESLVAEVIDNTTSRGRTLRFLFDGSYEEFRAKLKELGETPLPKYIKRDVEPEDAERYQTIYAKVEGAVAAPTAGLHFSKHLMKRLEIKGIDFAEVTLHVGLGTFNPIEVEDLSKHKMESEEIFIDEKNAQIINNAVDAHKRVCAVGTTTMRTLETSVSSNKKISAFHGWTNKFIYPPHEFGVANCMITNFHTPKSTLIMMIAAFAGRDFIMHAYEEAVKEKYKFYSYGDAMLIL

SEQ ID NO: 65309 - protein, 349 aa, Chryseobacterium shigense; identical to SEQ ID NO: 65252
  REGION 1..349: note = tr|A0A376DRE8|A0A376DRE8_9FLAO S-adenosylmethionine:tRNA ribosyltransferase-isomerase; OS = Chryseobacterium shigense OX=297244 GN=queA PE=3 SV=1

SEQ ID NO: 65310 - protein, 349 aa, Chryseobacterium shigense
  REGION 1..349: note = tr|A0A1N7HZP7|A0A1N7HZP7_9FLAO S-adenosylmethionine:tRNA ribosyltransferase-isomerase; OS = Chryseobacterium shigense OX=297244 GN=queA PE=3 SV=1
MKTSDFNFDLPEELLAEHPSEHRDEAKLMVLNRKTETIEHKLFKDVVDYFDEKDLFIFNNTKVFPARLYGNKEKTGAKIEVFLLRELDKETRVWDVLVDPARKIRIGNKLFFTEDESLVAEVIDNTTSRGRTLRFLFDGSYDEFRTKLKELGETPLPKYIKRAVEPEDAERYQTIYAKIEGAVAAPTAGLHFSKHLMKKLEIKGIDFAEVTLHVGLGTFNPIEVEDLSKHKMESEEIIIDEKNADIINKAVDAHRRVCAVGTTTMRALETSVSSNKKISAFNGWTNKFIYPPHDFGVANSMITNFHTPKSTLLMMIAAFAGKDFIMHAYEEAVKEKYKFYSYGDAMLIL

SEQ ID NO: 65311 - protein, 349 aa, Chryseobacterium soldanellicola
  REGION 1..349: note = tr|A0A1H1CPK8|A0A1H1CPK8_9FLAO S-adenosylmethionine:tRNA ribosyltransferase-isomerase; OS = Chryseobacterium soldanellicola OX=311333 GN=queA PE=3; SV = 1
MKTSDFNFDLPAELLAEHPSEHRDEARLMVLDRKTQTIEHKLFKDVVDYFDEHDLFIFNNTKVFPARLYGNKEKTGAKIEVFLLRELDKETRVWDVLVDPARKIRIGNKLFFTEDESLVAEVIDNTTSRGRTLRFLFDGSYEEFRSKLKELGETPLPKYIKREVEPEDAERYQTIYAKVEGAVAAPTAGLHFSRHLMKRLEIKGIDFAEVTLHVGLGTFNPIEVEDLSKHKMESEEIIIDEKNAEIINKAVQENRKVCAVGTTTMRAIETSVSSNRKISAFNGWTNKFIYPPHDFGVANTMITNFHTPKSTLLMMIAAFAGREFVMHAYEEAVKEKYKFYSYGDAMLIL

SEQ ID NO: 65312 - protein, 349 aa, Chryseobacterium soli
  REGION 1..349: note = tr|A0A086A2M0|A0A086A2M0_9FLAO S-adenosylmethionine:tRNA ribosyltransferase-isomerase; OS = Chryseobacterium soli OX=445961 GN=queA PE=3 SV=1
MKTSDFNFDLPEELLAEHPSEHRDEARLMVLDRKTETIEHKLFKDVVDYFDEKDLFIFNNTKVFPARLYGNKEKTGAKIEVFLLRELDKETRVWDVLVDPARKIRIGNKLFFTEDESLVAEVIDNTTSRGRTLRFLFDGSYEEFRSKLKELGETPLPKYIKRAVEPEDAERYQTIYAKIEGAVAAPTAGLHFSKHLMKRLEIKGIDFAEVTLHVGLGTFNPIEVEDLSKHKMESEEIIIDEKNADIINKAVDEHRRVCAVGTTTMRALETSVSSNKKISAFNGWTNKFIYPPHDFGVANSMITNFHTPKSTLLMMIAAFAGREFVMHAYEEAVKEKYKFYSYGDAMLIL

SEQ ID NO: 65313 - protein, 349 aa, Chryseobacterium solincola
  REGION 1..349: note = tr|A0A0C1F5R2|A0A0C1F5R2_9FLAO S-adenosylmethionine:tRNA ribosyltransferase-isomerase; OS = Chryseobacterium solincola OX=510955 GN=queA PE=3 SV=1
MKTSDFNFDLPEELLAEHPAEHRDDAKLMVLNRATQTIEHRLFKDVVDYFEEKDLFIFNNTKVFPARLYGNKEKTGAKIEVFLLRELDKETRVWDVLVDPARKIRIGNKLFFTEDEGLVAEVIDNTTSRGRTLRFLYDGSYEEFRAKLKELGETPLPKYFKREVEPEDAERYQTIYAKHEGAVAAPTAGLHFSRHLMKKLEIKGIDFAEVTLHVGLGTFNPIEVEDLSKHKMESEEAIIDQKNADIINKAVSEGRRVCAVGTTTMRTIETSVSSNKKIGPYHGWTNKFIFPPHEFGVANCMITNFHMPKSTLMMMIAAFAGKDFLMHAYEEAIKHKYKFYSYGDAMLIL

SEQ ID NO: 65314 - protein, 349 aa, Chryseobacterium sp.
  REGION 1..349: note = tr|A0A0T0M7M0|A0A0T0M7M0_9FLAO S-adenosylmethionine:tRNA ribosyltransferase-isomerase; OS = Chryseobacterium sp. Leaf394 OX=1736361 GN=queA PE=3; SV = 1
MKTSDFNFDLPEELLAEHPSEHRDEARLMVLDRKTQTIEHKLFKDVVDYFDEKDLFIFNNTKVFPARLYGNKEKTGAKIEVFLLRELDKETRVWDVLVDPARKIRIGNKLFFTEDESLVAEVIDNTTSRGRTLRFLYDGPYEEFRAKLKELGETPLPKYIKREVEPEDAERYQTIYAKVEGAVAAPTAGLHFSRHLMKRLEIKGIDFAEVTLHVGLGTFNPIEVEDLSKHKMESEEIFIDEKNAEIINKAVEENRRVCAVGTTTMRTLETSVSSNKKISAFHGWTNKFIFPPHDFGVANCMITNFHTPKSTLMMMIAAFAGKDFVMHAYEEAVKEKYKFYSYGDAMLIL

SEQ ID NO: 65315 - protein, 349 aa, Chryseobacterium sp.
  REGION 1..349: note = tr|A0A316XGD6|A0A316XGD6_9FLAO S-adenosylmethionine:tRNA ribosyltransferase-isomerase; OS = Chryseobacterium sp. ISE14 OX=475075 GN=queA PE=3 SV=1
MKTSDFNFDLPEELLAEHPSEHRDEARLMVLDRKTETIEHKLFKDVVDYFDENDLFIFNNTKVFPARLYGNKEKTGAKIEVFLLRELDKETRVWDVLVDPARKIRIGNKLFFTEDESLVAEVIDNTTSRGRTLRFLFDGSYDEFRTKLKELGETPLPKYIKRAVEPEDAERYQTIYAKIEGAVAAPTAGLHFSKHLMKKLEIKGIDFAEVTLHVGLGTFNPIEVEDLSKHKMESEEIIIDEKNAAIINKAVDAHRRVCAVGTTTMRALETSVSSNKKISAFNGWTNKFIYPPHDFGVANSMITNFHTPKSTLLMMIAAFAGRDFVMHAYEEAVKEKYKFYSYGDAMLIL

SEQ ID NO: 65316 - protein, 349 aa, Chryseobacterium taeanense
  REGION 1..349: note = tr|A0A1G8LXU1|A0A1G8LXU1_9FLAO S-adenosylmethionine:tRNA ribosyltransferase-isomerase; OS = Chryseobacterium taeanense OX=311334 GN=queA PE=3 SV=1
MKTSDFNFDLPAELLAEHPSEHRDEARLMVLDRKTETIEHKLFKDVVDYFDEGDLFIFNNTKVFPARLYGNKEKTGAKIEVFLLRELDKETRVWDVLVDPARKIRIGNKLFFTEDESLVAEVIDNTTSRGRTLRFLFDGSYEEFRAKLKELGETPLPKYIKRDVEPEDAERYQTIYAKVEGAVAAPTAGLHFSRHLMKRLEIKGIDFAEVTLHVGLGTFNPIEVEDLSKHKMESEEIFIDEKNAQIINNAVDSHRRVCAVGTTTMRTLETSVSSNKKISAFHGWTNKFIYPPHDFGVANCMITNFHTPKSTLIMMIAAFAGRDFVMHAYEEAVKEKYKFYSYGDAMLIL

SEQ ID NO: 65317 - protein, 349 aa, Chryseobacterium taichungense; identical to SEQ ID NO: 65308
  REGION 1..349: note = tr|A0A1H8DSG3|A0A1H8DSG3_9FLAO S-adenosylmethionine:tRNA ribosyltransferase-isomerase; OS = Chryseobacterium taichungense OX=295069 GN=queA PE=3; SV = 1

SEQ ID NO: 65318 - protein, 349 aa, unidentified; identical to SEQ ID NO: 65269
  source 1..349: note = Chryseobacterium taihuense
  REGION 1..349: note = tr|A0A1G9N0H0|A0A1G9N0H0_9FLAO S-adenosylmethionine:tRNA ribosyltransferase-isomerase; OS = Chryseobacterium taihuense OX=1141221 GN=queA PE=3 SV=1

SEQ ID NO: 65319 - protein, 349 aa, Chryseobacterium taiwanense
  REGION 1..349: note = tr|A0A0B4CR75|A0A0B4CR75_9FLAO S-adenosylmethionine:tRNA ribosyltransferase-isomerase; OS = Chryseobacterium taiwanense OX=363331 GN=queA PE=3 SV=1
MKTSDFNFDLPAELLAEHPSEHRDEARLMVLDRKTETIQHKLFKDVVDYFDEGDLFIFNNTKVFPARLYGNKEKTGAKIEVFLLRELDKETRVWDVLVDPARKIRIGNKLFFTEDESLVAEVIDNTTSRGRTLRFLFDGSYEEFRTKLKELGETPLPKYIKRDVEPEDAERYQTIYAKVEGAVAAPTAGLHFSKHLMKRLEIKGIDFAEVTLHVGLGTFNPIEVEDLSKHKMESEEIFIDEKNAQIINNAVEANRRVCAVGTTTMRTLETSVSSNKKISAFHGWTNKFIYPPHDFGVANCMITNFHTPKSTLIMMIAAFAGRDFIMHAYEEAVKEKYKFYSYGDAMLII

SEQ ID NO: 65320 - protein, 349 aa, unidentified
  source 1..349: note = Chryseobacterium takakiae
  REGION 1..349: note = tr|A0A1M4WID0|A0A1M4WID0_9FLAO S-adenosylmethionine:tRNA ribosyltransferase-isomerase; OS = Chryseobacterium takakiae OX=1302685 GN=queA PE=3 SV=1
MKTSDFNFDLPAELLAEHPSEHRDEARLMVLDRKTETIEHKLFKDVVDYFDEGDLFIFNNTKVFPARLYGNKEKTGAKIEVFLLRELDKETRVWDVLVDPARKIRIGNKLFFTEDESLVAEVIDNTTSRGRTLRFLFDGSYEEFRAKLKELGETPLPKYIKRDVEPEDAERYQTIYAKVEGAVAAPTAGLHFSKHLMKRLEIKGIDFAEVTLHVGLGTFNPIEVEDLSKHKMESEEIFIDEKNAQIINNAVDAHKRVCAVGTTTMRTLETSVSSNKKISAFHGWTNKFIYPPHEFGVANCMITNFHTPKSTLIMMIAAFAGRDFVMHAYEEAVKEKYKFYSYGDAMLIL

SEQ ID NO: 65321 - protein, 349 aa, unidentified
  source 1..349: note = Chryseobacterium taklimakanense
  REGION 1..349: note = tr|A0A239WH57|A0A239WH57_9FLAO S-adenosylmethionine:tRNA ribosyltransferase-isomerase; OS = Chryseobacterium taklimakanense OX=536441 GN=queA PE=3; SV = 1
MKTSDFNFDLPEELLAEHPSEHRDEARLMVLDRKTETIEHKLFKDVVDYFDEGDLFIMNNTKVFPARLYGNKEKTGAKIEVFLLRELDRETRVWDVLVDPARKIRIGNKLFFTEDESLVAEVIDNTTSRGRTLRFLYDGTYEEFRAKLKELGETPLPKYIKRAVEPEDAERYQTIYAKHEGAVAAPTAGLHFSKHLMKRLEIKGIDFAEVTLHVGLGTFNPIEVEDLSKHKMESEEAIIDQKNADIINKAVEENRRICAVGTTTMRALETSVSSNRKIGPYHGWTNKFIYPPHDFGVANAMITNFHTPKSTLIMMIAAFAGKDFVMRAYEEAIKEKYKFYSYGDAMLIL

SEQ ID NO: 65322 - protein, 349 aa, Chryseobacterium treverense
  REGION 1..349: note = tr|A0A1I3K334|A0A1I3K334_9FLAO S-adenosylmethionine:tRNA ribosyltransferase-isomerase; OS = Chryseobacterium treverense OX=631455 GN=queA PE=3 SV=1
MKTSDFNFDLPEELLAEHPAEHRDDAKLMVLNRATQTIEHRLFKDVVDYFEEKDLFIFNNTKVFPARLYGNKEKTGAKIEVFLLRELDKETRVWDVLVDPARKIRIGNKLFFTEDEGLVAEVIDNTTSRGRTLRFLYDGSYEEFRAKLKELGETPLPKYFKREVEPEDAERYQTIYAKHEGAVAAPTAGLHFSRHLMKKLEIKGIDFAEVTLHVGLGTFNPIEVEDLSKHKMESEEAIIDQKNADIINKAVSEGRRVCAVGTTTMRTIETSVSSNKKIGPYHGWTNKFIFPPHEFGVANCMITNFHMPKSTLMMMIAAFAGKDFLMQAYEEAIKHKYKFYSYGDAMLIL

SEQ ID NO: 65323 - protein, 349 aa, Chryseobacterium ureilyticum
  REGION 1..349: note = tr|A0A1N7K9P1|A0A1N7K9P1_9FLAO S-adenosylmethionine:tRNA ribosyltransferase-isomerase; OS = Chryseobacterium ureilyticum OX=373668 GN=queA PE=3 SV=1
MKTSDFNFDLPAELLAEHPSEHRDEARLMVLDRKTQTIEHKLFKDVVDYFDEEDLFIFNNTKVFPARLYGNKEKTGAKIEVFLLRELDKETRVWDVLVDPARKIRIGNKLFFTEDESLVAEVIDNTTSRGRTLRFLFDGSYDEFRAKLKELGETPLPKYIKRAVEPEDAERYQTIYAKVEGAVAAPTAGLHFSKHLMKRLEIKGINFAEVTLHVGLGTFNPIEVEDLSKHKMESEEIIIDEKNALIINKAVESHRRVCAVGTTTMRALETSVSSNKKISAFNGWTNKFIYPPHDFGVANTMITNFHTPKSTLIMMIAAFAGRDFVMHAYEEAVKEKYKFYSYGDAMLIL

SEQ ID NO: 65324 - protein, 349 aa, unidentified
  source 1..349: note = Chryseobacterium viscerum
  REGION 1..349: note = tr|A0A316WS66|A0A316WS66_9FLAO S-adenosylmethionine:tRNA ribosyltransferase-isomerase; OS = Chryseobacterium viscerum OX=1037377 GN=queA PE=3 SV=1
MKTSDFNFDLPEELLAEHPSEHRDEARLMVLDRKTQTIEHKLFKDVVDYFDEDDLFIFNNTKVFPARLYGNKEKTGAKIEVFLLRELDKETRVWDVLVDPARKIRIGNKLFFTEDESLVAEVIDNTTSRGRTLRFLFDGSYDEFRTKLKELGETPLPKYIKRAVEPEDAERYQTIYAKIEGAVAAPTAGLHFSRHLMKRLEIKGINFAEVTLHVGLGTFNPIEVEDLSKHKMESEEIIIDEKNALIINKAVETHRRVCAVGTTTMRALETSVSSNKKISAFNGWTNKFIYPPHDFGVATSMITNFHTPKSTLLMMIAAFAGRDFIMQAYEEAIKEKYKFYSYGDAMLIL

SEQ ID NO: 65325 - protein, 349 aa, Chryseobacterium wanjuense
  REGION 1..349: note = tr|A0A1I0NSJ2|A0A1I0NSJ2_9FLAO S-adenosylmethionine:tRNA ribosyltransferase-isomerase; OS = Chryseobacterium wanjuense OX=356305 GN=queA PE=3 SV=1
MKTSDFNFDLPAELLAEHPSEHRDEARLMVLDRKTQTIEHKLFKDVVDYFSEEDLFIFNNTKVFPARLYGNKEKTGAKIEVFLLRELDKETRVWDVLVDPARKIRIGNKLFFTEDESLVAEVIDNTTSRGRTLRFLFDGSYEEFRAKLKELGETPLPKYIKRAVEPEDAERYQTIYAKIEGAVAAPTAGLHFSKHLMKRLEIKGINFAEITLHVGLGTFNPIEVEDLSKHKMESEEVFIDERNAEIINKAVDGNRRVCAVGTTTMRALETSVSSNKKISAFHGWTNKFIYPPHDFGVANSMITNFHTPKSTLIMMIAAFAGRDFIMHAYEEAVKEKYKFYSYGDAMLIL

SEQ ID NO: 65326 - protein, 349 aa, unidentified
  source 1..349: note = Chryseobacterium xixisoli
  REGION 1..349: note = tr|A0A4R8I9B8|A0A4R8I9B8_9FLAO S-adenosylmethionine:tRNA ribosyltransferase-isomerase; OS = Chryseobacterium xixisoli OX=1476462 GN=queA PE=3 SV=1
MKTSDFNFDLPEELLAEHPTENRDEARLMVLDRKTETITHRLFKDVIEYFDEKDLFIFNNTKVFPARLFGNKEKTGAKIEVFLLRELDAETRVWDVLVDPARKIRIGNKLFFTEDESLVAEVIDNTTSRGRTLRFLFDGSYEEFRAKLTELGETPLPKYIKREVEPEDAERYQTIYAKHEGAVAAPTAGLHFSKHLMKRLEIKGIDFAEITLHVGLGTFNPIEVEDLSKHKMESEEAIIDEKNAEIINKAVAEGRRVVAVGTTTMRALETSVSSNKKISAYRGWTNKFIYPPHEFGVANAMITNFHTPKSTLIMMIAAFANKDFVMRAYEEAIKEKYKFYSYGDAMLIL

SEQ ID NO: 65327 - protein, 349 aa, unidentified
  source 1..349: note = Chryseobacterium zeae
  REGION 1..349: note = tr|A0A1N6F1J2|A0A1N6F1J2_9FLAO S-adenosylmethionine:tRNA ribosyltransferase-isomerase; OS = Chryseobacterium zeae OX=1416779 GN=queA PE=3 SV=1
MKTSDFNFDLPAELLAEHPTENRDEARLMVLNRKTETIEHRLFKDVIEYFDEKDLFIFNNTKVFPARLFGNKEKTGAKIEVFLLRELDAETRVWDVLVDPARKIRIGNKLFFTEDESLVAEVIDNTTSRGRTLRFLFDGSYEEFRAKLTELGETPLPKYIKREVEPEDAERYQTIYAKVEGAVAAPTAGLHFSKHLMKRLEIKGIDFAEITLHVGLGTFNPIEVEDLSKHKMESEEAIIDEKNAEIINRAVQEGRRVCAVGTTTMRALETSVSSNKKISAYRGWTNKFIYPPHEFGVANAMITNFHTPKSTLIMMIAAFANKDFIMRAYEEAIKEKYKFYSYGDAMLIL

SEQ ID NO: 65328 - protein, 348 aa, unidentified
  source 1..348: note = Chryseolinea flava
  REGION 1..348: note = tr|A0A364XVZ0|A0A364XVZ0_9BACT S-adenosylmethionine:tRNA ribosyltransferase-isomerase; OS = Chryseolinea flava OX=2059302 GN=queA PE=3 SV=1
MKLSEFKFELPNSLIALDPAENRDESRLMVVHKDTGKIEHKVFKDIVEYFGEGDVMVGNDTMVFPARLYGRKEKTGAKIEVFLLRELNADMHLWDVLVDPARKIRVGNKLYFGNGDLVAEVIDNTTSRGRTIRFLFDGDSAAFDKVVETLGETPLPKYIKRKVKSEDKERFQTIFAKNKGAVSAPTAGLHFTRQLLKRLQLRGVDMAFITLHIGLGTFRPVDVEDLTKHKMDSENFIVSNEAVDIVNKALDNKNKVCAIGTTTMRALESAVSATNRLKAREGWTDKFIFPPYDFKICNAMITNFHMPESTLLMMASAFGGYELITEAYKVAKKEKYKFLTYGDAMLII

SEQ ID NO: 65329 - protein, 399 aa, unidentified
  source 1..399: note = Chryseolinea flava
  REGION 1..399: note = tr|A0A364XY53|A0A364XY53_9BACT S-adenosylmethionine:tRNA ribosyltransferase-isomerase; OS = Chryseolinea flava OX=2059302 GN=queA PE=3 SV=1
MKPQLFIKDYTYDLPHERIAKFPLEKRDDSKLLVYQAGQIEHAAFRNILDFLPSNSFLVFNDTKVIPARLHFTKETGASIETFLLHPLLPSTLVVEAMIAHPSATWQCTIGNLKKWTTGTILQKKLGSTTLEAHLIDREKGVVEFRWNSSQSFAEIVSLSGETPLPPYLKRDVESSDKERYQTVYAHHDGAVAAPTAGLHFTDKILSAIQQQKMSTDFVTLHVSAGTFQPVKAEVASEHTMHEEQIIVRRETIINLLKANHFIVPVGTTAMRTLESLYWFGVRLLNDPAASFSIHQDEPYTIKQSATRTQILERILQQMDKKGIDMLTGETSIFIMPGYQFRMCDGLITNFHQPGSTLILLVAALVGDDWKKIYHEAMTNDYRFLSYGDSSLLLPSISS

SEQ ID NO: 65330 - protein, 396 aa, unidentified
  source 1..396: note = Chryseolinea serpens
  REGION 1..396: note = tr|A0A1M5LWG8|A0A1M5LWG8_9BACT S-adenosylmethionine:tRNA ribosyltransferase-isomerase; OS = Chryseolinea serpens OX=947013 GN=queA PE=3 SV=1
MDISISNYTYTLPPERIAVYPLANRDQSKLLFYDQGTIHHQVFSSLPDLLPADTLLFFNDTKVIPARLHFQKDTGAVIEIFLLHPVLPSTLVMEAMQAHHHCTWQCTLGNLKRWKDEPLFKTFHGITLKATLRDREAGLVEFEWATDHSFAEVVNLAGETPLPPYLHRKAEQADRERYQTIYSHHEGAVAAPTAGLHFTPAIFDQLKAKGIAHDFVTLHVSAGTFQPVKVENAVEHVMHNEQVVVTRDNLDHLLSGRYIVPVGTTSMRTLESLYWYGVKLLKDPQAVFAISQHEAYTAADHRPTRDEALRAVVDYMDRNQLELLTGETSIYIMPGYTFRVCEALITNFHQPGSTLILLVAAFIGEDWRKVYNESLANGYRFLSYGDSSLLIPRTRS

SEQ ID NO: 65331 - protein, 376 aa, unidentified
  source 1..376: note = Chryseolinea serpens
  REGION 1..376: note = tr|A0A1M5RPT3|A0A1M5RPT3_9BACT S-adenosylmethionine:tRNA ribosyltransferase-isomerase; OS = Chryseolinea serpens OX=947013 GN=queA PE=3 SV=1
MSKRAILDLFLPLIKKFTLYWAPFAFTNMKLSEFKFELPNNLIALDPAENRDESRLMVVHKDTGKIEHKIFKDVVEYFKEGDVMVGNDTMVFPARLYGRKEKTGAKIEVFLLRELNAEMHLWDVLVDPARKIRVGNKLYFGNGDLVAEVIDNTTSRGRTIRFLFDGDSAAFDKVVETLGETPLPKYIKRKIKPEDKERFQTIFAKHKGAVSAPTAGMHFTRQLLKRLQIKGVDMTYVTLHIGLGTFRPVDVEDLTKHKMDSENFIVGQEAVDIVNKALDNKNHVCAIGTTTMRALESAVSATNRLKAREGWTDKFIFPPYDFKICNAMITNFHMPESTLLMMASAFAGYDLAMEAYKVAKKEKYKFLTYGDAMLII

SEQ ID NO: 65332 - protein, 348 aa, unidentified
  source 1..348: note = Chryseolinea sp.
  REGION 1..348: note = tr|A0A385SCD5|A0A385SCD5_9BACT S-adenosylmethionine:tRNA ribosyltransferase-isomerase; OS = Chryseolinea sp. KIS68-18 OX=2321403 GN=queA PE=3 SV=1
MKLSEFKFELPNNLIALDPAENRDESRLMVVHKDTGKIEHKIFKDVVDYFKEGDVMVGNDTMVFPARLYGRKEKTGAKIEVFLLRELNAEMHLWDVLVDPARKIRVGNKLYFGNGDLVAEVIDNTTSRGRTIRFLFDGDSAAFDKVVETLGETPLPKYIKRKIKPEDKERFQTIFAKHKGAVSAPTAGMHFTRQLLKRLQIKGVDMTYVTLHIGLGTFRPVDVEDLTKHKMDSENFIVGQEAVDIVNKALDNKNHVCAIGTTTMRALESAVSATNRLKAREGWTDKFIFPPYDFKICNAMITNFHMPESTLLMMASAFAGYDLAMEAYKVAKKEKYKFLTYGDAMLII

SEQ ID NO: 65333 - protein, 396 aa, unidentified
  source 1..396: note = Chryseolinea sp.
  REGION 1..396: note = tr|A0A385SX08|A0A385SX08_9BACT S-adenosylmethionine:tRNA ribosyltransferase-isomerase; OS = Chryseolinea sp. KIS68-18 OX=2321403 GN=queA PE=3 SV=1
MDISISDYTYTLPPERIAVYPLANRDQSKLLFYDRGVIDHQIFSSLPDLLPADTLLFFNDTKVIPARLHFQKDTGAVIEIFLLHPVLPSPLVMEAMQAHHRCTWQCTLGNLKRWKDEPLFKTFHGITLKATLSDREEGLVEFEWATEHSFAEVVNLAGETPLPPYLHRKPEQADRDRYQTIYSHHEGAVAAPTAGLHFTPAIFEQLKAKGIAHDFVTLHVSAGTFQPVKVENAMEHVMHNEQVVVTRANLDRLLSGRYIVPVGTTSMRTLESLYWYGVKLLKDPRAVFTISQHEAYAAADRWPSRDEALRAVVAYMERNQLDLLTGETSIYIMPGYTFRVCEALITNFHQPGSTLILLVAAFIGADWRKVYDESLANGYRFLSYGDSSLLIPRTEG

SEQ ID NO: 65334 - protein, 347 aa, unidentified
  source 1..347: note = Chryseomicrobium excrementi
  REGION 1..347: note = tr|A0A2M9F209|A0A2M9F209_9BACL S-adenosylmethionine:tRNA ribosyltransferase-isomerase; OS = Chryseomicrobium excrementi OX=2041346 GN=queA PE=3 SV=1
MKVEDFDFHLPEELIAQTPLADRTSSKLLVADYPNNELHHTTFQHILDELRAGDCLILNDTKVMPARLMGVKEETGASVEVLLLTQLADDEWETLVKPAKRVKIGTVISFGDGLLTATCTAIKDHGGRVFKMNYDGVFFEVLDQLGEMPLPPYIHEKLEDRDRYQTVYAKEQGSAAAPTAGLHFTSELLEAVEKKGVKIGYVTLHVGLGTFRPVSVDTIESHEMHAEFYRMPQVTADLINETKATGGRVVAVGTTSTRTLESVAKKFDGEVKEDSDWTSIFIYPGFEFKVIDAMITNFHLPKSTLVMLVSALTSRDFILNAYQEAIDQRYRFFSFGDAMLIKGKDFK

SEQ ID NO: 65335 - protein, 340 aa, unidentified
  source 1..340: note = Chrysiogenales bacterium
  REGION 1..340: note = tr|A0A524JN47|A0A524JN47_9BACT S-adenosylmethionine:tRNA ribosyltransferase-isomerase (Fragment) OS=Chrysiogenales bacterium OX=2528039 GN=queA; PE = 3 SV=1
MKLTDFDFVLPAERIARFPTDRRDESRLLVLDRKSGKITHATFKQLPDVLAADDFLVMNNSRVRPARLLGRIGGKAVEMLVVRNLGDKKVEVLCQPAKYFNLGAIFCGADGLEAEVLETGRRGRRLLLCNREYEQVLAQGYAPLPPYIKRKSAEAINYRSFDLERYQTIYARNAGSIAAPTAGLHFTPEVLARIRSSNPLLEITLEVGEATFQKIEAEDISRHRMGSEKIRIAAEVAHRILALKEQDKKLLAVGTTSVRALESYALLSEPCQEFDSDIFISPGFHFRMVDKLLTNFHLPRSSLFILAAAFAGQDLLQETYRQAIAQGYRFFSYGDAMLIV

SEQ ID NO: 65336 - protein, 345 aa, unidentified
  source 1..345: note = Chrysiogenales bacterium
  REGION 1..345: note = tr|A0A524PVV3|A0A524PVV3_9BACT S-adenosylmethionine:tRNA ribosyltransferase-isomerase; OS = Chrysiogenales bacterium OX=2528039 GN=queA PE=3 SV=1
MRDDEYSLDDFDFELPPELIAQEPAEKRDESRLLVLDRATGKVTHSRFSRISEFLRPGDLLVFNDARVMHARVPCMRESGGAVELILLAHCGNLRWTAISNRTKKLKPGGRLIPLRGEGVEFRITGRVGDIIELETNVPLTPDALDSIGVVPLPPYITREAAEYDMERYQTVYARASGAVAAPTAGLHFTDDLLRRIDEMGVQTEFVTLLVSWGTFQPVRSKNIAEHKMHFERFDIRDETAVAINKARIEGRRVVAVGTTSLRVLESTFHSGRNIPGEGDTNIFIRPPGKVLSIDALITNFHTPRSTLLMLVSAFAGHDTVMAAYREAVEMRYRFFSYGDAMFII

SEQ ID NO: 65337 - protein, 322 aa, unidentified
  source 1..322: note = Chthoniobacter flavus
  REGION 1..322: note = tr|B4DBL0|B4DBL0_9BACT S-adenosylmethionine:tRNA ribosyltransferase-isomerase OS=Chthoniobacter flavus Ellin428 OX=497964 GN=queA PE=3 SV=1
MLLTSDYDYSLPDDLIASHPLARREDSRMMVLHRAEQRIEHRFFREFPGFLRAGDLVVLNDTRVIPARVFADGGKIELLFLETVREDTWKCLVKPGRKMRLGATVQIRGVTGTVEEILPDGERIIAFTGPVDLDAAGELPLPPYFARAVEPADSERYQTVFARERGAVAAPTAGLHFTPEILAQVPHTFVTLHVGVGTFRPVQVDDLTQHRMHSERFRISEESARAINAAQRLVAIGTTTARVLESQGLPVSACESSTDIFIYPPYQPRAVGALLTNFHLPKSTLLMLVSALAGREFVLRAYAEAIAQRYRFYSYGDCMLIL

SEQ ID NO: 65338 - protein, 179 aa, unidentified
  source 1..179: note = Chthoniobacterales bacterium
  REGION 1..179: note = tr|A0A2W5Z9J9|A0A2W5Z9J9_9BACT S-adenosylmethionine:tRNA ribosyltransferase-isomerase (Fragment) OS=Chthoniobacterales bacterium OX=2201154; GN = DLM52_00830 PE=3 SV=1
MDETLHDYEYQLPRELIAQRPLARRDQSRMMVLRRGRESIEHATFADLPRFISRDDLLVLNDSRVLPARHFSDDGAVEFLFLRKVAPCRWHALVKPGRRFRKGAVTMINGVRAEAGESDEEGAREIILAEDVDVQRAGVMPLPPYIARLSESEDEARYQTVFARTDGSIAAPTAGLHFT

SEQ ID NO: 65339 - protein, 326 aa, unidentified
  source 1..326: note = Chthoniobacterales bacterium
  REGION 1..326: note = tr|A0A2W6ADC9|A0A2W6ADC9_9BACT S-adenosylmethionine:tRNA ribosyltransferase-isomerase; OS = Chthoniobacterales bacterium OX=2201154 GN=queA PE=3; SV = 1
MSSRLSDYDYPLPEELIARRPLPRRDESRMMVLHRREERIEHRRFAELGVFLTPGDFLVLNDTRVVTARRFSDDGKIEFLFLERLGQTQWKCLVRPGSKMRAGAVTVIAGAIARVDEVLPEGQRVVSLECEINLWEGGMVPLPPYLRRQGDRDDVERYQTVFAKFPGAVAAPTAGLHFTPELLEKLPHAFITLHVSAGTFQPVKTEAIAEHRMHREEFSISASAAAAINNATRIVAVGTTTVRVLESAARQEDRLFEQKGATDIFIYPPAQIRRVDCLLTNFHLPRSTLLMLVSAFAGREFILAAYQEAIRERYRFYSYGDCMLIV

SEQ ID NO: 65340 - protein, 342 aa, Chthonomonas calidirosea
  REGION 1..342: note = tr|S0EVY9|S0EVY9_CHTCT S-adenosylmethionine:tRNA ribosyltransferase-isomerase OS=Chthonomonas calidirosea (strain DSM 23976 / ICMP 18418 / T49) OX=1303518 GN=queA; PE = 3 SV=1
MNAMRTELFDYELPPHLIAQTPLPRGESRLLVLHRKEERIEHRKFSDLPDYLVEGDVLVLNDTRVSARRVQAQRENGKPAEVLLLRPVAETDWEALVHPGLKPGRKLTLIGPNDDRVEAIVVGVTPEGGRLLSLPNREWRDRIASWGEIPLPPYIHQSVEDEERYQTVYGHRPGSAAAPTAGLHFNEALLDALARKGVKRVELTLHISVDTFRPVREENVEEHKMHGEQVMLSEEAAQVINQASGRIVAVGTTCVRALETAAQHARPGQRVAPFQGETHLFITPGYTFRAVDALITNFHLPKSTLLMLVSAFAGRELVLRAYREAVEKEYRFYSFGDAMLIL

SEQ ID NO: 65341 - protein, 360 aa, unidentified
  source 1..360: note = Ciceribacter sp.
  REGION 1..360: note = tr|A0A4Q2TDI5|A0A4Q2TDI5_9RHIZ S-adenosylmethionine:tRNA ribosyltransferase-isomerase; OS = Ciceribacter sp. F8825 OX=2509717 GN=queA PE=3 SV=1
MRVDLFDFDLPDERIALRPVSPRDSARMLVVRPDREPVLEDRHVFDLPSFLSPGDALVFNDTKVIPAQLEGKRLREGGQETPVSATLHMRIGPERWKAFARPGKRIKVGDRIEFGHSGNACLLGTLGAVVEEKGEAGEVTLRFDFSGPALDEAIMTVGHIPLPPYIASKRGEDEKDRTDYQTVYARKEGAVAAPTAGLHFTPALFEALDRAGIERHFVTLHVGAGTFLPVKADDTDDHKMHLETGHVSAETAARLNAVKARGGRIVCVGTTSLRLIESAANASGQIEPWSGATGIFITPGYRFRAVDVLMTNFHLPKSTLFMLVSAFAGLDTMRAAYAHAIESGYRFYSYGDASLLFRKS

SEQ ID NO: 65342 - protein, 349 aa, Citreicella sp.
  REGION 1..349: note = tr|A0A357RWN9|A0A357RWN9_9RHOB S-adenosylmethionine:tRNA ribosyltransferase-isomerase; OS = Citreicella sp. OX=1960284 GN=queA PE=3 SV=1
MLLSDFDFPLPEDLIATRPASPRSAARLLVADGARLTDSVVRDLPDWLRPGDRLVLNDTRVIPARLSGLRHRHGAQGDTAAQIELTLLEPRPGGLWAALVKPLKKLREGETVVLSDELSATLEGREDGQGLFRFNLTGEDFDAALARAGAMPLPPYIAAKRPADEQDKTDYQTVWARHSGAVAAPTASLHFDAPLLAALEARGVSFTHVTLHVGAGTFLPVKVEDVTTHRMHGEWGEVTAQAAAEIAATKAAGGRVIPVGTTALRLIETAARDSGQVVPWQGVTDIFIYPGFTFRAADALMTNFHLPKSTLMMLVAAFMGKARIDQVYAHALAERYRFFSYGDASLLIP

SEQ ID NO: 65343 - protein, 349 aa, Citreicella sp.
  REGION 1..349: note = tr|D0D3K8|D0D3K8_9RHOB S-adenosylmethionine:tRNA ribosyltransferase-isomerase OS=Citreicella sp. SE45; OX = 501479 GN=queA PE=3 SV=1
MKLSDFDFDLPEALIATRPANPRSSARLLVADGDTLTDAVVRDLTQWLRPGDRLVLNDTKVIPARLSGTRERDGAQGLTRAQIEVTLLEPRADGCWAALVKPLKKLREGETVVFSDALSAVLESRDEGQGLLRFNLVGEDFDAALAEAGAMPLPPYIAARRAADAQDKQDYQTVWAERKGAVAAPTASLHFDEPLLESLRAHGVAFTKVTLHVGAGTFLPVKVEDVTTHRMHGEWGEVSDSAAAEIAATKAAGGRVIPVGTTALRLLETAARDTGAIAPWQGVTDIFIYPGFTFRVTDALMTNFHLPKSTLMMLVSALMGQERMKRIYDHAITERYRFFSYGDSSLLIP

SEQ ID NO: 65344 - protein, 349 aa, Citreimonas salinaria
  REGION 1..349: note = tr|A0A1H3G3C8|A0A1H3G3C8_9RHOB S-adenosylmethionine:tRNA ribosyltransferase-isomerase; OS = Citreimonas salinaria OX=321339 GN=queA PE=3 SV=1
MKLSDFDFDLPDELIATRPAQPRSSARLLVAQGDAITDAVVRDLPDWLRPGDRLVLNDTRVIPARLSGTRTRPGAAGEGTARIEVTLLEPQADGSWAALVRPLRKLREGEVVVFSDTLSATCESKEDGQARLRFNLSGEDFDAALNEAGAMPLPPYIEAKRKADARDREDYQTVWARRSGAVAAPTASLHFDEPLLAALAARGVDFTHVTLHVGAGTFLPVKVDDVTEHKMHGEWGEVTETAAAEIAATKAAGGRVVPVGTTALRLIETAAQGGAIAPFRGVTDIFIYPGFTFRVTDALMTNFHLPRSTLMMLVSALMGRARMMRVYEHAVEDRYRFFSYGDASLLIPD

SEQ ID NO: 65345 - protein, 356 aa, Citrobacter amalonaticus
  REGION 1..356: note = tr|A0A3R9CH81|A0A3R9CH81_CITAM S-adenosylmethionine:tRNA ribosyltransferase-isomerase; OS = Citrobacter amalonaticus OX=35703 GN=queA PE=3 SV=1
MRVADFSFELPESLIAHYPMPERSSCRLLSLDGPTGELTHGTFTDLLDKLNPGDLLVFNNTRVIPARLFGRKASGGKIEVLVERMLDDKRILAHIRASKAPKPGAELLLGDDESIKATMTARHDALFEVEFDDARTVLDILNAIGHMPLPPYIERPDEEADRELYQTVYSEKPGAVAAPTAGLHFDEPLLEKLREKGVEMAFVTLHVGAGTFQPVRVDTIEDHIMHSEYAEVPQEVVDAVLAAKTRGNRVIAVGTTSVRSLESAAQAAKNALIEPFFGDTQIFIYPGYQYKVIDALVTNFHLPESTLIMLVSAFAGYQHTMNAYKAAVEQHYRFFSYGDAMFITYNPQAISERVGE

SEQ ID NO: 65346 - protein, 356 aa, Citrobacter amalonaticus
  REGION 1..356: note = tr|A0A0F6RDT6|A0A0F6RDT6_CITAM S-adenosylmethionine:tRNA ribosyltransferase-isomerase; OS = Citrobacter amalonaticus Y19 OX=1261127 GN=queA PE=3; SV = 1
MRVTDFSFELPESLIAHYPQPERSSCRLLSLDGPTGALTHGTFTDLLDKLNPGDLLVFNNTRVIPARLFGRKASGGKIEVLVERMLDDKRILAHIRASKAPKPGAELLLGDDESINATMTARHGALFEVEFNDARPVLDILNAIGHMPLPPYIDRPDEDADRELYQTVYSEKPGAVAAPTAGLHFDEPLLEKLREKGIEMAFVTLHVGAGTFQPVRVDTIEDHIMHSEYAEVPQEVVDAVLAAKARGNRVIAVGTTSVRSLESAAQAAKHALIEPFFGDTQIFIYPGYQYNVIDALVTNFHLPESTLIMLVSAFAGYQHTMNAYKAAVEQNYRFFSYGDAMFITYNPQALNERVGE

SEQ ID NO: 65347 - protein, 356 aa, Citrobacter braakii
  REGION 1..356: note = tr|A0A1R0G031|A0A1R0G031_CITBR S-adenosylmethionine:tRNA ribosyltransferase-isomerase; OS = Citrobacter braakii OX=57706 GN=queA PE=3 SV=1
MRVTDFTFELPESLIAHYPQAERSSCRLLSLDGPTGALTHGTFTDLLDKLNPGDLLVFNNTRVIPARLFGRKASGGKIEVLVERMLDDKRILAHIRASKAPKPGAELLLGDDESIKATMVARHDALFEVEFNDERSVLDILNAIGHMPLPPYIDRPDEDADRELYQTVYSEKPGAVAAPTAGLHFDDPLLAKLRDKGIEMAFVTLHVGAGTFQPVRVDTIEDHIMHSEYAEVPQDVVDAVLAAKARGNRVIAVGTTSVRSLESAAQAAKNDLIEPFFGDTQIFIYPGYKYQVIDALVTNFHLPESTLIMLVSAFAGYKNTMHAYHEAVKAEYRFFSYGDAMFITYNPQAISERVGE

SEQ ID NO: 65348 - protein, 356 aa, Citrobacter braakii
  REGION 1..356: note = tr|A0A1V8P0S8|A0A1V8P0S8_CITBR S-adenosylmethionine:tRNA ribosyltransferase-isomerase; OS = Citrobacter braakii OX=57706 GN=queA PE=3 SV=1
MRVTDFTFELPEFLIAHYPQAERSSCRLLSLDGPTGALTHGTFTDLLDKLNPGDLLVFNNTRVIPARLFGRKASGGKIEVLVERMLDDKRILAHIRASKAPKPGAELLLGDDESIKATMVARHDALFEVEFNDERSVLDILNAIGHMPLPPYIDRPDEDADRELYQTVYSEKPGAVAAPTAGLHFDDPLLAKLRDKGIEMAFVTLHVGAGTFQPVRVDTIEDHIMHSEYAEVPQDVVDAVLAAKARGNRVIAVGTTSVRSLESAAQAAKNDLIEPFFGDTQIFIYPGYKYQVIDALVTNFHLPESTLIMLVSAFAGYKNTMHAYHEAVKAEYRFFSYGDAMFITYNPQAISERVGE

SEQ ID NO: 65349 - protein, 356 aa, Citrobacter farmeri
  REGION 1..356: note = tr|A0A223JN76|A0A223JN76_9ENTR S-adenosylmethionine:tRNA ribosyltransferase-isomerase; OS = Citrobacter farmeri OX=67824 GN=queA PE=3 SV=1
MRVTDFSFELPESLIAHYPQPERSRCRLLSLDGPTGALTHGTFTDLLDKLNPGDLLVFNNTRVIPARLFGRKASGGKIEVLVERMLDDKRILAHIRASKAPKPGAELLLGDDENINATMTARHGALFEVEFNDARPVLDILNAIGHMPLPPYIDRPDEDADRELYQTVYSEKPGAVAAPTAGLHFDEPLLNKLREKGIEMAFVTLHVGAGTFQPVRVDTIEDHIMHSEYAEVPQEVVDAVLAAKARGNRVIAVGTTSVRSLESAAQAAKNALIEPFFGDTQIFIYPGYQYNVIDALVTNFHLPESTLIMLVSAFAGYQHTMNAYKAAVEQNYRFFSYGDAMFITYNPQALNERVGE

SEQ ID NO: 65350 - protein, 354 aa, Citrobacter freundii
  REGION 1..354: note = tr|A0A2S4QAG7|A0A2S4QAG7_CITFR S-adenosylmethionine:tRNA ribosyltransferase-isomerase; OS = Citrobacter freundii OX=546 GN=queA PE=3 SV=1
MRVTDFTFELPESLIAHYPQAERSSCRLLSLDGPTGALTHGTFTDLLDKLNPGDLLVFNNTRVIPARLFGRKASGGKIEVLVERMLDDKRILAHIRASKAPKPGAELLLGDDENINATMVARHDALFEVEFNDERSVLDILNAIGHMPLPPYIDRPDEDADRELYQTVYSEKPGAVAAPTAGLHFDDPLLAKLRDKGIEMAFVTLHVGAGTFQPVRVDTIEDHIMHSEYAEVPQDVVDAVLAAKARGNRVIAVGTTSVRSLESAAQAAKNDLIEPFFGDTQIFIYPGYKYQVIDALVTNFHLPESTLIMLVSAFAGYKNTMHAYHEAVKAEYRFFSYGDAMFITYNPQAISERP

SEQ ID NO: 65351 - protein, 356 aa, Citrobacter freundii
  REGION 1..356: note = tr|A0A336QLM7|A0A336QLM7_CITFR S-adenosylmethionine:tRNA ribosyltransferase-isomerase; OS = Citrobacter freundii OX=546 GN=queA PE=3 SV=1
MRVTDFTFELPESLIAHYPQAERSSCRLLSLDGPTGALTHGTFTDLLDKLNPGDLLVFNNTRVIPARLFGRKASGGKIEVLVERMLDDKRILAHIRASKAPKPGAELLLGDDESIKATMVARHDALFEVEFNDERSVLDILNAIGHMPLPPYIDRPDEDADRELYQTVYSEKPGAVAAPTAGLHFDDPLLARLREKGIEMAFVTLHVGAGTFQPVRVDTIEDHIMHSEYAEVPQDVVDAVLAAKARGNRVIAVGTTSVRSLESAAQAAKNDLIEPFFGDTQIFIYPGYKYQVIDALVTNFHLPESTLIMLVSAFAGYKNTMHAYHEAVKAEYRFFSYGDAMFITYNPQAISERVGE

SEQ ID NO: 65352 - protein, 356 aa, Citrobacter gillenii
  REGION 1..356: note = tr|A0A3E2KWX1|A0A3E2KWX1_9ENTR S-adenosylmethionine:tRNA ribosyltransferase-isomerase; OS = Citrobacter gillenii OX=67828 GN=queA PE=3 SV=1
MRVTDFTFELPESLIAHYPQAERSSCRLLSLDGPTGALTHGTFTDLLDKLNPGDLLVFNNTRVIPARLFGRKASGGKIEVLVERMLDDKRILAHIRASKAPKPGAELLLGDDESIKATMVARHDALFEVAFDDERSVLDILNAIGHMPLPPYIDRPDEDADRELYQTVYSEKPGAVAAPTAGLHFDDPLLAKLREKGIEMAFVTLHVGAGTFQPVRVDTIEDHIMHSEYAEVPQDVVDAVLAAKARGNRVIAVGTTSVRSLESAAQAAKNDLIEPFFGDTQIFIYPGYQYNVIDALVTNFHLPESTLIMLVSAFAGYKNTMNAYHEAVKAEYRFFSYGDAMFITYNPQAISERVGE

SEQ ID NO: 65353 - protein, 356 aa, Citrobacter koseri
  REGION 1..356: note = tr|A0A427PI33|A0A427PI33_CITKO S-adenosylmethionine:tRNA ribosyltransferase-isomerase; OS = Citrobacter koseri OX=545 GN=queA PE=3 SV=1
MRVTDFSFELPESLIAHYPQPERSRCRLLSLDGPTGALTHGTFTDLLDKLNPGDLLVFNNTRVIPARLFGRKASGGKIEVLVERMLDDKRILAHIRASKAPKPGAELLLGDDESINATMTARHGALFEVEFNDARPVLEILNAIGHMPLPPYIDRPDEDADRELYQTVYSEKPGAVAAPTAGLHFDDPLLAALREKGIEMAFVTLHVGAGTFQPVRVETIEDHIMHSEYAEVPQEVVDAVLAAKARGNRIIAVGTTSVRSLESAAQAAKSDLIEPFFGDTQIFIYPGYQYKVIDALVTNFHLPESTLIMLVSAFAGYQHTMNAYKAAVEQNYRFFSYGDAMFITYNPQALNERVGK

SEQ ID NO: 65354 - protein, 356 aa, Citrobacter koseri
  REGION 1..356: note = sp|A8AK49|QUEA_CITK8 S-adenosylmethionine:tRNA ribosyltransferase-isomerase OS=Citrobacter koseri (strain ATCC BAA-895 / CDC 4225-83 / SGSC4696) OX=290338 GN=queA; PE = 3 SV=1
MRVTDFSFELPESLIAHYPQPERSRCRLLSLDGPTGALTHGTFTDLLDKLNPGDLLVFNNTRVIPARLFGRKASGGKIEVLVERMLDDKRILAHIRASKAPKPGAELLLGDDESINATMTARHGALFEVEFNDARPVLEILNAIGHMPLPPYIDRPDEDADRELYQTVYSEKPGAVAAPTAGLHFDDPLLAALREKGIEMAFVTLHVGAGTFQPVRVETIEDHIMHSEYAEVPQEVVDAVLAAKARGNRIIAVGTTSVRSLESAAQAAKNDLIEPFFGDTQIFIYPGYQYKVIDALVTNFHLPESTLIMLVSAFAGYQHTMNAYKAAVEQNYRFFSYGDAMFITYNPQALNERVGK

SEQ ID NO: 65355 - protein, 356 aa, Citrobacter murliniae
  REGION 1..356: note = tr|A0A4V6RTP7|A0A4V6RTP7_9ENTR S-adenosylmethionine:tRNA ribosyltransferase-isomerase; OS = Citrobacter murliniae OX=67829 GN=queA PE=3 SV=1
MRVTDFTFELPESLIAHYPQAERSSCRLLSLDGPTGALTHGTFTDLLDKLNPGDLLVFNNTRVIPARLFGRKASGGKIEVLVERMLDDKRILAHIRASKAPKPGAELLLGDDESIKATMVARHDALFEVEFDDERSVLDILNAIGHMPLPPYIDRPDEDADRELYQTVYSEKPGAVAAPTAGLHFDDPLLAKLRDKGIEMAFVTLHVGAGTFQPVRVDTIEDHIMHSEYAEVPQDVVDAVLAAKARGNRVIAVGTTSVRSLESAAQAAKNDLIEPFFGDTQIFIYPGYQYKVIDALVTNFHLPESTLIMLVSAFAGYKNTMNAYHEAVKAEYRFFSYGDAMFITYNPQAISERVGE

SEQ ID NO: 65356 - protein, 354 aa, unidentified
  source 1..354: note = Citrobacter pasteurii
  REGION 1..354: note = tr|A0A0A1RWG5|A0A0A1RWG5_9ENTR S-adenosylmethionine:tRNA ribosyltransferase-isomerase; OS = Citrobacter pasteurii OX=1563222 GN=queA PE=3 SV=1
MRVTDFTFELPESLIAHYPQAERSSCRLLSLDGPTGALTHGTFTDLLDKLNPGDLLVFNNTRVIPARLFGRKASGGKIEVLVERMLDDKRILAHIRASKAPKPGAELLLGDDESIKATMVARHDALFEVEFNDERSVLDILNAIGHMPLPPYIDRPDEDADRELYQTVYSEKPGAVAAPTAGLHFDDPLLAKLRDKGIEMAFVTLHVGAGTFQPVRVDTIEDHIMHSEYAEVPQDVVDAVLAAKARGNRVIAVGTTSVRSLESAAQAAKNDLIEPFFGDTQIFIYPGYQYKVIDALVTNFHLPESTLIMLVSAFAGYKNTMHAYHEAVKAEYRFFSYGDAMFITYNPQAISERP

SEQ ID NO: 65357 - protein, 354 aa, unidentified
  source 1..354: note = Citrobacter portucalensis
  REGION 1..354: note = tr|A0A5A9CJH5|A0A5A9CJH5_9ENTR S-adenosylmethionine:tRNA ribosyltransferase-isomerase; OS = Citrobacter portucalensis OX=1639133 GN=queA PE=3 SV=1
MRVTDFTFELPESLIAHYPQAERSSCRLLSLDGPTGALTHGTFTDLLDKLNPGDLLVFNNTRVIPARLFGRKASGGKIEVLVERMLDDKHILAHIRASKAPKPGAELLLGDDESIKATMVARHDALFEVEFNDERSVLDILNAIGHMPLPPYIDRPDEDADRELYQTVYSEKPGAVAAPTAGLHFDDPLLAKLRDKGIEMAFVTLHVGAGTFQPVRVDTIEDHIMHSEYAEVPQDVVDAVLAAKARGNRVIAVGTTSVRSLESAAQAAKNDLIEPFFGDTQIFIYPGYKYQVIDALVTNFHLPESTLIMLVSAFAGYKNTMHAYHEAVKAEYRFFSYGDAMFITYNPQAISERP

SEQ ID NO: 65358 - protein, 354 aa, unidentified
  source 1..354: note = Citrobacter portucalensis
  REGION 1..354: note = tr|A0A4P7UN07|A0A4P7UN07_9ENTR S-adenosylmethionine:tRNA ribosyltransferase-isomerase; OS = Citrobacter portucalensis OX=1639133 GN=queA PE=3 SV=1
MRVTDFTFELPESLIAHYPQAERSSCRLLSLDGPTGALTHGTFTDLLDKLNPGDLLVFNNTRVIPARLFGRKASGGKIEVLVERMLDDKRILAHIRASKAPKPGAELLLGDDESIKATMVARHDALFEVEFNDERSVLDILNAIGHMPLPPYIDRPDEDADRELYQTVYSEKPGAVAAPTAGLHFDDPLLAKLRDKGIEMAFVTLHVGAGTFQPVRVDTIEDHIMHSEYAEVPQDVVDAVLAAKARGNRVIAVGTTSVRSLESAAQAAKNDLIEPFFGDTQIFIYPGYKYQVIDALVTNFHLPESTLIMLVSAFAGYKNTMHAYHEAVKAEYRFFSYGDAMFITYNPQAISERP

SEQ ID NO: 65359 - protein, 356 aa, Citrobacter rodentium
  REGION 1..356: note = tr|A0A482PLH8|A0A482PLH8_CITRO S-adenosylmethionine:tRNA ribosyltransferase-isomerase; OS = Citrobacter rodentium OX=67825 GN=queA PE=3 SV=1
MRVTDFSFELPESLIAHYPQPERSSCRLLSLDGPTGALTHGTFTDLLAKLNPGDLLVFNNTRVIPARLFGRKASGGKIEVLVERMLDDKRILAHIRASKAPKPGAELLLGDDESINATMTARHGALFEVEFNDARPVLDILNAIGHMPLPPYIDRPDEDADRELYQTVYSEKPGAVAAPTAGLHFDEPLLAALREKGIEMAFVTLHVGAGTFQPVRVDSIEDHIMHSEYAEVPQEVVDAVLAAKARGNRVIAVGTTSVRSLESAAQAAKSDLIEPFFGDTQIFIYPGYQYKVIDALVTNFHLPESTLIMLVSAFAGYQHTMNAYKAAVEQKYRFFSYGDAMFITYNPQALHERVGE

SEQ ID NO: 65360 - protein, 356 aa, Citrobacter sp.; identical to SEQ ID NO: 65345
  REGION 1..356: note = tr|A0A3S7D842|A0A3S7D842_9ENTR S-adenosylmethionine:tRNA ribosyltransferase-isomerase; OS = Citrobacter sp. CFNIH10 OX=1920110 GN=queA PE=3 SV=1

SEQ ID NO: 65361 - protein, 356 aa, Citrobacter sp.; identical to SEQ ID NO: 65347
  REGION 1..356: note = tr|A0A0J1KWA6|A0A0J1KWA6_9ENTR S-adenosylmethionine:tRNA ribosyltransferase-isomerase; OS = Citrobacter sp. MGH103 OX=1686378 GN=queA PE=3 SV=1

SEQ ID NO: 65362 - protein, 356 aa, Citrobacter werkmanii
  REGION 1..356: note = tr|A0A090TYH4|A0A090TYH4_9ENTR S-adenosylmethionine:tRNA ribosyltransferase-isomerase; OS = Citrobacter werkmanii NBRC 105721 OX=1114921 GN=queA; PE = 3 SV=1
MRVTDFTFELPESLIAHYPQAERSSCRLLSLDGPTGALTHGTFTDLLDKLNPGDLLVFNNTRVIPARLFGRKASGGKIEVLVERMLDDKRILAHIRASKAPKPGAELLLGDDESIKATMVARHDALFEVAFDDERSVLDILNAIGHMPLPPYIDRPDEDADRELYQTVYSEKPGAVAAPTAGLHFDEPLLAKLRDKGIEMAFVTLHVGAGTFQPVRVDTIEDHIMHSEYAEVPQDVVDAVLAAKARGNRVIAVGTTSVRSLESAAQAAKNDLIAPFFGDTQIFIYPGYKYQVIDALVTNFHLPESTLIMLVSAFAGYKNTMHAYHEAVKAEYRFFSYGDAMFITYNPQAISERVGE

SEQ ID NO: 65363 - protein, 356 aa, Citrobacter werkmanii; identical to SEQ ID NO: 65362
  REGION 1..356: note = tr|A0A422V5M4|A0A422V5M4_9ENTR S-adenosylmethionine:tRNA ribosyltransferase-isomerase; OS = Citrobacter werkmanii OX=67827 GN=queA PE=3 SV=1

SEQ ID NO: 65364 - protein, 354 aa, Citrobacter youngae
  REGION 1..354: note = tr|D4BD62|D4BD62_9ENTR S-adenosylmethionine:tRNA ribosyltransferase-isomerase OS=Citrobacter youngae ATCC 29220 OX=500640 GN=queA PE=3 SV=1
MRVTDFTFELPESLIAHYPQAERSSCRLLSLDGPTGALTHGTFTDLLDKLNPGDLLVFNNTRVIPARLFGRKASGGKIEVLVERMLDDKRILAHIRASKAPKPGAELLLGDDESIKATMVARHDALFEVEFDDERSVLDILNAIGHMPLPPYIDRPDEDADRELYQTVYSEKPGAVAAPTAGLHFDERLLAKLREKGIEMAFVTLHVGAGTFQPVRVDTIEDHIMHSEYAEVPQDVVDAVLAAKARGNRVIAVGTTSVRSLESAAQAAKNDLIAPFFGDTQIFIYPGYQYKVIDALVTNFHLPESTLIMLVSAFAGYKNTMHAYHEAVKAEYRFFSYGDAMFITYNPQAISERP

SEQ ID NO: 65365 - protein, 356 aa, Citrobacter youngae
  REGION 1..356: note = tr|A0A549VAR0|A0A549VAR0_9ENTR S-adenosylmethionine:tRNA ribosyltransferase-isomerase; OS = Citrobacter youngae OX=133448 GN=queA PE=3 SV=1
MRVTDFTFELPESLIAHYPQAERSSCRLLSLDGPTGALTHGTFTDLLDKLNPGDLLVFNNTRVIPARLFGRKASGGKIEVLVERMLDDKRILAHIRASKAPKPGAELLLGDDESIKATMVARHDALFEVEFNDERSVLDILNAIGHMPLPPYIDRPDEDADRELYQTVYSEKPGAVAAPTAGLHFDEPLLAKLRDKGIEMAFVTLHVGAGTFQPVRVDTIEDHIMHSEYAEVPQDVVDAVLAAKARGNRVIAVGTTSVRSLESAAQAAKNDLIEPFFGDTQIFIYPGYQYKVIDALVTNFHLPESTLIMLVSAFAGYKNTMRAYHEAVKAEYRFFSYGDAMFITYNPQAISERVGE

SEQ ID NO: 65366 - protein, 349 aa, unidentified
  source 1..349: note = Citromicrobium sp.
  REGION 1..349: note = tr|A0A0P7ACE7|A0A0P7ACE7_9SPHN S-adenosylmethionine:tRNA ribosyltransferase-isomerase; OS = Citromicrobium sp. RCC1885 OX=1647104 GN=queA PE=3 SV=1
MKVDLFDFDLPPERIALRPVAPRDAAKMLVVDGAAPFADRQVRDLPDLLRAGDVLVFNDTRVIPAQLEGERIREGASGAAIGATLHKRIDARRWQAFVRNAKRLREGDVIRFPDGVSVTAEARAEDGSWTLAFAGEEPVQELLARAGAMPLPPYIAQRRAADERDAQDYQTLFADKAGAVAAPTAALHFTPELVERLDAAGIVRETLTLHVGAGTFLPVKADDTAQHKMHAEWGEITAEAAARLNAARAEGRRVIAVGTTSLRLLESAADQNHTIQPFAGDTDIFITPGYEFRAVDGLMTNFHLPKSTLMMLVSALMGRERMMETYAYAIAHEYRFYSYGDSSLLLPPR

SEQ ID NO: 65367 - protein, 349 aa, unidentified
  source 1..349: note = Citromicrobium sp.
  REGION 1..349: note = tr|A0A2E4CTN5|A0A2E4CTN5_9SPHN S-adenosylmethionine:tRNA ribosyltransferase-isomerase; OS = Citromicrobium sp. OX=2024827 GN=queA PE=3 SV=1
MKVDLFDFDLPPELIALRPVAPRDAARMLVVDGDAPFADRHVRDLPELLRAGDVLVFNDTRVIPARLEGERIREGASGAAVGATLHKRIDARRWQAFVRNAKRLREGDRIVFPQDVSAIAETRAEDGSWTLAFEGEEPVELLLERAGAMPLPPYIAQRRPTDERDAQDYQTLFAEKAGAVAAPTAALHFTPDLVARLGKAGIATETLTLHVGAGTFLPVKADDTADHSMHAEWGEITPEAAERLNAARAEGRRVIAVGTTSLRLLESAADEDGTIHPFAEDTDIFITPGYRFRAIDGLMTNFHLPKSTLFMLVSALMGRERMLAAYAYAIKNEYRFYSYGDSSLLLPRS

SEQ ID NO: 65368 - protein, 351 aa, unidentified
  source 1..351: note = Cloacibacillus porcorum
  REGION 1..351: note = tr|A0A1B2I4Z4|A0A1B2I4Z4_9BACT S-adenosylmethionine:tRNA ribosyltransferase-isomerase; OS = Cloacibacillus porcorum OX=1197717 GN=queA PE=3 SV=1
MERDLTKTAAYDYQLPKELIAQDPAEPRDSSRLLVVHRENGGTEDRIFRDITEYLHPGDLLVMNDTRVLPARVEGVKNNEGGGGAKVEIFFLNPGASGNEWTALVRPGRKLPEGTRVTLGGETEVIVGARLEDGLRTIIFAPEDDPLALIHRFGSTPLPHYITDSHADPERYQTVYAKREKENSVAAPTAGLHFTPELLKKLADMGVPHIFITLQVGLGTFRPVKAENIAEHVMHTEFCEIPPEAAAAIKAAKERGGRVVAVGTTVVRTLESFAQRYGEIVPGVLDTKLFISPGYRFRVIDALITNFHLPMSTLLMLVSAFGGYETMMRVYNEAVEKRYRFFSFGDSMFIE

SEQ ID NO: 65369 - protein, 350 aa, Cloacibacillus sp.
  REGION 1..350: note = tr|A0A1Y4G869|A0A1Y4G869_9BACT S-adenosylmethionine:tRNA ribosyltransferase-isomerase; OS = Cloacibacillus sp. An23 OX=1965591 GN=queA PE=3 SV=1
MERDLTKTAAYDYELPKELIAQDPAEPRDSSRLMVVHRDCGATEDRIFRDVTEYLDDGDLLVLNDTRVLPARVKGVKKSGEHGAHVEIFFLNPGGAPNEWTALVRPGRKLPEGTKVALDAETEVVVGARLEDGLRTLIFDEKADPLAIIHKFGKTPLPHYITETHAEPERYQTVYAKAEKENSVAAPTAGLHFTPELLNKLEDKGVPHVFVTLRVGLGTFRPVKAENIADHIMHEEFCEIPRETADAINAAKARGGRVVAVGTTVVRTLESFAMRYGKVVPGALDTRLFISPGFEFRVIDALITNFHLPMSTLLMLVSAFGGYDTMMNAYNEAVRKRYRFFSFGDSMLIE

SEQ ID NO: 65370 - protein, 349 aa, Cloacibacterium normanense
  REGION 1..349: note = tr|A0A1E5UD94|A0A1E5UD94_9FLAO S-adenosylmethionine:tRNA ribosyltransferase-isomerase; OS = Cloacibacterium normanense OX=237258 GN=queA PE=3 SV=1
MKTSDFNFHLPEHLLAEHPSEHRDEARLMVLDRKTQTIEHKLFKDVIDYFNEDDLFIFNNTKVFPARLYGNKEKTGAKIEVFLLRELDKETRVWDVLVDPARKIRIGNKLFFTEDESLVAEVIDNTTSRGRTLRFLFDGSYEEFRAKLKELGETPLPKYIKREVEPEDAERYQTIYAKIEGAVAAPTAGLHFSKHLMKRLEIKGINFAEVTLHVGLGTFNPIEVEDLSKHKMECEEAIIDEKTADIINKAADENRRICAVGTTTMRALETSVSSNKKISAYQGWTNKFIYPPYDFGVANAMITNFHTPKSTLIMMIAAFAGTDFIMHAYEEAVKNEYKFYSYGDAMLIL

SEQ ID NO: 65371 - protein, 346 aa, unidentified
  source 1..346: note = Cloacimonas acidaminovorans
  REGION 1..346: note = tr|B0VJ80|B0VJ80_CLOAI S-adenosylmethionine:tRNA ribosyltransferase-isomerase OS=Cloacimonas acidaminovorans (strain Evry) OX=459349 GN=queA PE=3 SV=1
MMPDLLATDTYDYYLPKELIAQFPAEKRTDSRLMQVKRQSREIYHHRFTAILELLKEGDLVIINSSKVFPARLFATKETGAKIEILLLHQLNENTWQCIAKPGKKLKSPQWLHFSDNLSGYISQGNSEGIREIQFTCKTDFWDEIKRIGHIPLPPYIERSDTILDSERYQTVYAKENGSIAAPTAGFHFDAEILKALKKKGVLFSEVILHIGIGTFRPVKTKRITDHKMHSELATIPEITAAAINLAKKEGRRVVCVGTTSVRSVESFWQDGEMQSGSKWTDLFIYPGFNFKVTDALLTNFHLPKSTLLMMISAFGGWETIRKAYNIAVQEKYRFFSYGDAMFIED

SEQ ID NO: 65372 - protein, 341 aa, unidentified
  source 1..341: note = Clostridia bacterium
  REGION 1..341: note = tr|A0A523BRJ0|A0A523BRJ0_9FIRM S-adenosylmethionine:tRNA ribosyltransferase-isomerase; OS = Clostridia bacterium OX=2044939 GN=queA PE=3 SV=1
MKVSYFDYELPEELIAQEPVYPRDAARLLVVHRETDRMEFRQFQEIVDYLRPGDVLVLNETRVMPARLRGEKESSGGKVEVLLLHPIGPDLWEVLVRPGRRVQAGASLIFAGGRLRASVVEVKPGGRRVLAFTSPEAVAAVIEEIGLVPLPPYIKKPLADSGRYQTVYARIPGSAAAPTAGLHFTPELLARVREAGVAVARVLLHIGLGTFRPVRVENVEEHQMHAEYFQIGAEACEVINRCREGGGRIVAVGTTAVRVLETAADQDGRVRPQEGWADLFIYPGYQFRAVEALVTNFHLPRSTLLMLVCAFAGQERVLRAYQEAVSRRFRFYSFGDAMLII

SEQ ID NO: 65373 - protein, 340 aa, unidentified
  source 1..340: note = Clostridia bacterium
  REGION 1..340: note = tr|A0A2V2CX48|A0A2V2CX48_9FIRM S-adenosylmethionine:tRNA ribosyltransferase-isomerase; OS = Clostridia bacterium OX=2044939 GN=queA PE=3 SV=1
MKKSDFYFDLPEELIAQTPLQQRDHSRLLRLDKNSGEIEHCHFYQLPAYLRAGDCLVLNDSRVLPARLLGSRPGGGSVELVLLRDLGAGCWECLSRPGRKTKPGTRLSFGGGELEATVERVAEGGNRIVRFEYEGIFLEVLERLGKMPLPPYIKEELKDSERYQTVYSRELGSAAAPTAGLHFTPELLEKIRAKGVEICYVTLHVGLGTFRPVKEDEIEDHAMHSEFCMIPEETARIVTETKRSGGRVIAVGTTSCRTLESFASADGTLPAASGWTDIFIYPGYKFKCVDGLITNFHLPESTLIMLVSALAGREHVLEAYKAAVEERYRFFSFGDAMIIE

SEQ ID NO: 65374 - protein, 341 aa, unidentified
  source 1..341: note = Clostridiaceae bacterium
  REGION 1..341: note = tr|A0A355SGE0|A0A355SGE0_9CLOT S-adenosylmethionine:tRNA ribosyltransferase-isomerase; OS = Clostridiaceae bacterium OX=1898204 GN=queA PE=3 SV=1
MKLEEFDYNLPEELIAQEPLKQRDQSRLMILHKDTGKIEHRIFKDIIDYLNPGDCLVLNNTRVMPARLYGRREDTGGKIEVLLLKRVEKDKWEVLVNPGRKARIGERIIFGNGELAAKILSHTDAGGRIIEFEYSGIFEEILDRLGEMPLPHYIKKKLADKESYQTVYSKVEGSAAAPTAGLHFTKELLNNIKEKGISIVYITLHVGLGTFRPVKEENIEEHKMHSEYYMIDGLSAITINECRKKGGRIIAAGTTSTRTLETASRPDGIMEAKSGWTDMYIYPGYKFKAVDCLITNFHLPKSSLIMLVSALAGRERILNAYNCAVMNKYRFYSFGDAMFIV

SEQ ID NO: 65375 - protein, 344 aa, unidentified
  source 1..344: note = Clostridiaceae bacterium
  REGION 1..344: note = tr|A0A3R6TY47|A0A3R6TY47_9CLOT S-adenosylmethionine:tRNA ribosyltransferase-isomerase; OS = Clostridiaceae bacterium AF29-16BH OX=2292179 GN=queA; PE = 3 SV=1
MNLHDFYYDLPQELIAQDPLEDRSSSRLMVLDQETGHIEHHIFREIIDYLNPGDCLVVNNTKVIPARLMGSKVGTDAHIEVLLLKRNENDVWETLVKPGKKAKPGTKISFGDGLLVGEVLDVVEDGNRMIKFTYEGIFEEILDQLGQMPLPPYITHQLKDKNRYQTVYAKHEGSAAAPTAGLHFTPELLQAIKDKGVNIAHVTLHVGLGTFRPVKVENILEHHMHSEFYMVEEDQAKLINETKKNGGRIIAVGTTSCRTLESATGEDGILKAGSGWTEIFIYPGYQFKLIDCLITNFHLPESTLMMLVSALAGRDKIMAAYEEAVKERYRFFSFGDAMFIKKDK

SEQ ID NO: 65376 - protein, 337 aa, unidentified
  source 1..337: note = Clostridiales bacterium
  REGION 1..337: note = tr|A0A3B9QDY8|A0A3B9QDY8_9FIRM S-adenosylmethionine:tRNA ribosyltransferase-isomerase; OS = Clostridiales bacterium UBA9857 OX=2060923 GN=queA PE=3; SV = 1
MKTEEFDYHLPEELIAQTPAERRDSSRLLILDRAHKTITHGLFSDIVNYIHPGDALVINNTRVIKARLLGRRRTGGRVEVLLLNPVGRDTWECLVRPGNKMPPGEQVFVGDMVGRIEAKTSYGGRLIKWQYQGRWEDVLERYGEIPLPPYIKTPLKDPERYQTVYAEVPGSAAAPTAGLHFTPSLLETLKSKGVEIVPVTLNVGLGTFRPVKAKYVEEHKMHSEHYEVSEEAAETINRCRESGHRVFAVGTTVVRVLETVGKGGKIVAGKGSTDLFIYPGYQFKAVDCLITNFHLPKSTLLMLVSAFAGKQFVMEAYQEAIKHRYRFFSFGDAMLIL

SEQ ID NO: 65377 - protein, 340 aa, unidentified
  source 1..340: note = Clostridiales bacterium
  REGION 1..340: note = tr|A0A354UDQ4|A0A354UDQ4_9FIRM S-adenosylmethionine:tRNA ribosyltransferase-isomerase; OS = Clostridiales bacterium OX=1898207 GN=queA PE=3 SV=1
MLKKSDFYYDLPEELIAQTPLEPRDSSRLLVYDKKTDKTEEKIFRDITEYFHEGDLLVVNNTKVYPARIYAHAKTGGKMEILLLKRLNLTQWECLVKPGKRAKIGETFTVNEELSFTVLDNADGGGRKIEFIFSGVFEDILSRVGEMPLPPYIKEKLKNQSRYQTVYAKREGSSAAPTAGLHFTKELIQKLKDKGVKFAEVELNVGLGTFRPVKEENVLEHKMHTEHYYIDEQNANLINEYKKNGGRIIAVGTTSVRTLETVADENGFVKPCSGDTSIFIYPPYKFKCVNCLITNFHLPESTLIMLVSAFLTREKTLELYNYAVKEKFRFFSFGDAMLLL

SEQ ID NO: 65378 - protein, 351 aa, unidentified
  source 1..351: note = Clostridiales Family
  REGION 1..351: note = tr|A0A2V2FS97|A0A2V2FS97_9FIRM S-adenosylmethionine:tRNA ribosyltransferase-isomerase; OS = Clostridiales Family XIII bacterium OX=2137877 GN=queA; PE = 3 SV=1
MNINDFDYELPEELIAQHPADKRDASRLLVVHRATGETEHKHFYDIIDYLKPSDCLVLNNSKVIPARLFGVKKETGAKIEFLLVKRIDGDKWETMVRPGKRIKPGDIVSFSDDSLFEAEVLGFGDEGTRIVEFKYEGLFAEKLEEIGRIPLPPYIDRESTSEDKERYQTVYASDSEEGSVAAPTAGLHFTPELLEKAAEKGVKIAYVTLHVGIGTFRPVKCENIEEHQMHFEEYHIDEETARVINETKKNGGRIVSVGTTSTRTLESAAVFNEESGVYEVRAGADSTGIFIYPGYEFKMVDSLITNFHLPKSTLLMLISALYNREDILRIYNMAVKEKYRFFSYGDAMFIE

SEQ ID NO: 65379 - protein, 341 aa, unidentified
  source 1..341: note = Clostridioides difficile
  REGION 1..341: note = sp|Q183N9|QUEA_CLOD6 S-adenosylmethionine:tRNA ribosyltransferase-isomerase OS=Clostridioides difficile (strain 630) OX=272563 GN=queA PE=3 SV=1
MKTRDFKFDLPQELIAQVPIEDRASSRLMVLDKETGNIEHKVFRDIIEYLNPGDCLVLNNTRVIPARLIGEKLETGGKIEFLLLKRTEEDTWQALVKPGKRAKVGTKFSFGNGKLIGEVVDLSDEGSRIIKFHYDGIFEEILDELGNMPLPPYITARLDEKERYQTVYSKHNGSAAAPTAGLHFTEELLNKIKEKGVDIAFVTLHVGLGTFRPVKVEDVLNHKMHSEYYMVSQEAADKINRAKENGKNVICVGTTSCRTIESACNEDGKMKETSGWTEIFIYPGYKFKVLDKLITNFHLPESTLIMLVSAICGKDNVLNAYNEAVKERYRFFSFGDAMIIK

SEQ ID NO: 65380 - protein, 341 aa, unidentified
  source 1..341: note = Clostridioides difficile
  REGION 1..341: note = tr|A0A3T1GR50|A0A3T1GR50_CLODI S-adenosylmethionine:tRNA ribosyltransferase-isomerase; OS = Clostridioides difficile OX=1496 GN=queA PE=3 SV=1
MKTSDFKFDLPQELIAQVPIEDRASSRLMVLDKETGNIEHKVFRDIIEYLNPGDCLVLNNTRVIPARLIGEKLETGGKIEFLLLKRTEEDTWQALVKPGKRAKVGTKFSFGNGKLIGEVVDLSDEGSRIIKFHYDGIFEEILDELGNMPLPPYITARLDEKERYQTVYSKHNGSAAAPTAGLHFTEELLNKIKEKGVDIAFVTLHVGLGTFRPVKVEDVLNHKMHSEYYMVSQEAADKINRAKENGNNVICVGTTSCRTIESACNEDGKMKETSGWTEIFIYPGYKFKVLDKLITNFHLPESTLIMLVSAICGKDNVLNAYNEAVKERYRFFSFGDAMIIK

SEQ ID NO: 65381 - protein, 341 aa, Clostridium aceticum
  REGION 1..341: note = tr|A0A0D8IFR0|A0A0D8IFR0_9CLOT S-adenosylmethionine:tRNA ribosyltransferase-isomerase; OS = Clostridium aceticum OX=84022 GN=queA PE=3 SV=1
MKTKDFYFDLPEELIAQKPLEKRDQSRLLVLDKKTGEMDHTYFYNILDFLKEGDCIVVNDTRVLPARLIGEKEGTGGKIEFLLLKRKELDTWETLVKPGKKAKVGSRFVFGDGLLQAEVIDIAEEGNRIIKFHYDGVFEELLDQLGKMPLPPYITETLEDNERYQTVYSKNQGSAAAPTAGLHFTEELLEKIKQKGVKIVYITLHVGLGTFRPVKVEDIESHKMHAEYYIIGKEAADTINATKAQGGKVIAVGTTSCRTLESAAIETSKIKEGSGWTDIFIYPGYQFKIVDSLITNFHLPESTLIMLVSALSEKDMIMKAYETAVKERYRFFSFGDAMFIK

SEQ ID NO: 65382 - protein, 341 aa, Clostridium acetireducens
  REGION 1..341: note = tr|A0A1E8EWX1|A0A1E8EWX1_9CLOT S-adenosylmethionine:tRNA ribosyltransferase-isomerase; OS = Clostridium acetireducens DSM 10703 OX=1121290 GN=queA; PE = 3 SV=1
MKAEEFDFYLPEELIAQYPLEKRDEARLMVVDKKTGQIKHKIFKDIIDYFQPGDCLVLNDTRVIPARLLGVKEGTGGKMEFLLLKRIDKDSWEILVKPGKRAKVGSRFVFGNGELVGEIKSIGEEGSRIVEFQYEGIFEEVLDKLGQMPLPPYIKEKLENKEMYQTVYSKEQGSAAAPTAGLHFTEELLNKIRDIGVNVVFLTLHVGLGTFRPVKVENIEDHNMHSEYYNMSKETADIINKTKENGKKVIAVGTTSSRTLETIGDENGRVKEQSGWTNIFIYPGYKFKIVDELITNFHLPQSTLIMLVSALEGKELIMKAYNEAVKDKYRFFSFGDAMLLK

SEQ ID NO: 65383 - protein, 341 aa, Clostridium acetobutylicum
  REGION 1..341: note = sp|Q97GT2|QUEA_CLOAB S-adenosylmethionine:tRNA ribosyltransferase-isomerase OS=Clostridium acetobutylicum (strain ATCC 824 / DSM 792 / JCM 1419 / LMG 5710 / VKM B-17 87) OX=272562 GN=queA PE=3 SV=1
MQLEDFDYYLPEELIAQHPCDKRDECRLMVVDKKSGEVEHRIFKDVIDYLNPGDCLVLNDTRVLPARLIGNKVGTGGKMEFLLLKRIDKDTWETLVKPGKRAKVGAEFEFGGGVLKAVIKSIGEDGNRVVEFKYEGIFEEILDKLGQMPLPPYITEELENKEEYQTVYSKNNGSAAAPTAGLHFTNELLDKIRAKGIKTVFLTLHVGLGTFRPVKVENIESHHMHSEYYMLSKESADTINETRKNGGRIISVGTTSTRTLETIADEKGNVREQSGWTDIYIYPGYKYKIVDGLITNFHLPKSTLVMLVSALSSRDNILNAYKIAVENRYRFFSFGDAMFIK

SEQ ID NO: 65384 - protein, 341 aa, Clostridium acidisoli
  REGION 1..341: note = tr|A0A1W1XB88|A0A1W1XB88_9CLOT S-adenosylmethionine:tRNA ribosyltransferase-isomerase; OS = Clostridium acidisoli DSM 12555 OX=1121291 GN=queA PE=3; SV = 1
MQLKDFDFDLPEELIAQHPAAKRDECRLMILDKESGSIEHKVFKDVINYLNPGDCLVMNDTRVIPARLIGTKEGSGGKMEFLLLKRIDKDHWETLVKPGKKAKIGARFEFGEGHLKAEVTEIKEEGNRIVRFEYEGIFEEILDRLGEMPLPPYITEKLEDKEQYQTVYSKNEGSAAAPTAGLHFTNELLDKIRAKGIKTVFLTLHVGLGTFRPVKVEKIEEHHMHSEFYIMSKDTADIINETKAKGGKVFSVGTTSTRTLETIADENGLVKESSGWTDIFIYPGYKYKVVDGLITNFHLPESTLIMLVSALSDREKIMNAYEVAVNERYRFFSFGDAMFIR

SEQ ID NO: 65385 - protein, 341 aa, Clostridium algidicarnis
  REGION 1..341: note = tr|A0A2S6G1A1|A0A2S6G1A1_9CLOT S-adenosylmethionine:tRNA ribosyltransferase-isomerase; OS = Clostridium algidicarnis DSM 15099 OX=1121295 GN=queA; PE = 3 SV=1
MKVSDFDFDLPEELIAQYPLKDRAKSRIMVLDKYTGQIEHKIFYDIVDYLNKGDTLVLNNTRVIPARIIGEKEDSGGKIEFLLLKRTEGDSWEALAKPGKRAKVGAIFSFGDGRLKAEVTKVKDDGNRIIKFCYEGIFEEVLDELGQMPLPPYIKATLEDKERYQTVYSKESGSAAAPTAGLHFTKELLENIEKKGVNIAYLTLHVGLGTFRPVKVETIEEHDMHSEYYHIDKENADIINKTKENGGKVIAVGTTSCRTLETLGKDGFPLKESSGWTNIFIYPGYEFKVVDKLITNFHLPESTLIMLVSALAKKENVIKAYEVAIEEKYRFFSFGDAMFIK

SEQ ID NO: 65386 - protein, 341 aa, Clostridium amylolyticum
  REGION 1..341: note = tr|A0A1M6CVM1|A0A1M6CVM1_9CLOT S-adenosylmethionine:tRNA ribosyltransferase-isomerase; OS = Clostridium amylolyticum OX=1121298 GN=queA PE=3 SV=1
MEVSEFNFDLPEELIAQHPLEQRDSSRLMVLNKETGNIEHRIFKDILDYLNEGDTLVLNDTRVIPARLIGEKIESGGKIEFLLLKRISQDQWECLAKPGKKAKPGAEFTFGQGKLKAVVKEVLENGNRIIKFKYTGIFEQILDELGQMPLPPYIHESLEDKERYQTVYSKEKGSAAAPTAGLHFTKELLEKIQDKKINIVYVTLHVGLGTFRPVKVDKIEEHEMHSEYYIMSKETADIINDTKRKGKRIIAVGTTSCRTLETIGDECSKVKEQSGWTDIFIYPGYKFKIVDALITNFHLPESTLIMLVSALAGKENVLNAYHTAISKKYRFFSFGDAMFIK

SEQ ID NO: 65387 - protein, 341 aa, Clostridium argentinense
  REGION 1..341: note = tr|A0A0C1U6Y2|A0A0C1U6Y2_9CLOT S-adenosylmethionine:tRNA ribosyltransferase-isomerase; OS = Clostridium argentinense CDC 2741 OX=1418104 GN=queA; PE = 3 SV=1
MKVKDFYFDLPQELIAQVPLEKRDESKLMVVNKINGEIEHKKFKDIIDYFEEGDTLVLNDTRVLPARLHGIKEETGAKMEFLLLRRLEKDIWETLVKPGKRAKLGSRFIFGNGELKAEIIEVLENGNRKVRFEYEGIFEEVLDMLGEMPLPPYITEKLEDRERYQTVYSKEVGSAAAPTAGLHFTEELLEQIKSKGVKVVFITLHVGLGTFRPVKAENIEEHEMHSEYYYLSKETADIINATKEAGKRVIAVGTTSNRTLESVSDENGRVKEASGYTNIFIYPGYKFKIVDALITNFHLPESTLIMLISAFSNKDIVMNAYKIAVENKYRFFSFGDAMFLH

SEQ ID NO: 65388 - protein, 341 aa, unidentified
  source 1..341: note = Clostridium autoethanogenum
  REGION 1..341: note = tr|U5RVE5|U5RVE5_9CLOT S-adenosylmethionine:tRNA ribosyltransferase-isomerase OS=Clostridium autoethanogenum DSM 10061 OX=1341692 GN=queA PE=3 SV=1
MKVTDFDFYLPEELIAQHPLMQRDEARLMVLDKKTGDIEHKVFKDILDYLNPGDCLVLNDTRVLPARLIGSKEGSGGKMEILLLKRNADDTWETLVKPGKRAKVGSRFDFGDGELKAEIVSVKEDGNRIVKFEYEGIFEEVLDRLGQMPLPPYIKEKLEDKEMYQTVYSKEEGSAAAPTAGLHFTKELLKKIEDKGIKLAFLTLHVGLGTFRPVKVENIEEHNMHSEYYCMTKETADMINETREKGGSIIAVGTTSCRTLETIGDENGKVREQSGWTDIFIYPGYKYKVVDKLITNFHLPQSTLIMLVSALCGREKILNAYNCAVKEKYRFFSFGDAMFLK

SEQ ID NO: 65389 - protein, 341 aa, unidentified; identical to SEQ ID NO: 65388
  source 1..341: note = Clostridium autoethanogenum
  REGION 1..341: note = tr|A0A3M0S5I9|A0A3M0S5I9_9CLOT S-adenosylmethionine:tRNA ribosyltransferase-isomerase; OS = Clostridium autoethanogenum OX=84023 GN=queA PE=3 SV=1

SEQ ID NO: 65390 - protein, 341 aa, Clostridium baratii
  REGION 1..341: note = tr|A0A0F3FMF4|A0A0F3FMF4_9CLOT S-adenosylmethionine:tRNA ribosyltransferase-isomerase; OS = Clostridium baratii OX=1561 GN=queA PE=3 SV=1
MKVSDFDFYLPEELIAQHPLEKRDTSRLMVLDKKTGEIEHKIFKDIIDYLNEGDTLVLNNTRVMPARLIGEKENTGGKIEFLLLKRLEGDKWECLAKPGKTAKPGRRFTFGDGKLKCEVLEVLETGNRVIEFEYDGIFEEVLDSLGEMPLPPYIHERLEDSERYQTVYSKEKGSAAAPTAGLHFTEELLEQIKAKGVNIAYVTLHVGLGTFRPVKAETIDEHVMHSEFYQVSEETARIVNETKDRGGKIISVGTTSTRTLETIGDENGRIKECSGWTNIFIYPGYKFKVVDRLITNFHLPESTLIMLVSTLAGKDHVLNAYNEAVKERYRFFSFGDAMFIK

SEQ ID NO: 65391 - protein, 341 aa, Clostridium baratii
  REGION 1..341: note = tr|A0A174PXQ5|A0A174PXQ5_9CLOT S-adenosylmethionine:tRNA ribosyltransferase-isomerase; OS = Clostridium baratii OX=1561 GN=queA PE=3 SV=1
MKVSDFDFYLPEELIAQHPLEKRDTSRLMVLDKKTGEIEHKIFKDIIDYLNEGDTLVLNNTRVMPARLIGEKENTGGKIEFLLLKRLEGDKWECLAKPGKTAKPGRRFTFGDGKLKCEVLEVLETGNRVIEFEYDGIFEEVLDSLGEMPLPPYIHERLEDSERYQTVYSKEKGSAAAPTAGLHFTEELLEQIKAKGVNIAYVTLHVGLGTFRPVKAETIDEHVMHSEFYQVSEETARIVNETKDRGGKIISVGTTSTRTLETIGDENGRIKECSGWTNIFIYPGYKFKVVDNLITNFHLPESTLIMLVSTLAGKDHVLNAYNEAVKERYRFFSFGDAMFIK

SEQ ID NO: 65392 - protein, 341 aa, Clostridium beijerinckii
  REGION 1..341: note = sp|A6LTM8|QUEA_CLOB8 S-adenosylmethionine:tRNA ribosyltransferase-isomerase OS=Clostridium beijerinckii (strain ATCC 51743 / NCIMB 8052) OX=290402 GN=queA PE=3; SV = 1
MNVKDFDFYLPEELIAQHPLEQRDSSRLMVLDKKTGEIKHKKFHDIIEYLNEGDTLVLNNTRVMPARLIGEKEGTGGKIEFLLLKRIEKDRWECLAKPGKSAKVGRKFTFGEGKLKAEVVEVEENGNRIVEFFYDGIFEEVLDSLGEMPLPPYIHERLEDRERYQTVYSKENGSAAAPTAGLHFTKELLQEIKNKGINIVYLTLHVGLGTFRPVKVESLEEHEMHSEFYMLSKESADIINETKKRGNAVISVGTTSTRTLETIGDENGFVKEQSGWTNIFIYPGYKFKVVDKLITNFHLPESTLIMLVSTLAGRENVMNAYEEAVNEKYRFFSFGDAMFIK

SEQ ID NO: 65393 - protein, 341 aa, Clostridium beijerinckii
  REGION 1..341: note = tr|A0A0K2MGP0|A0A0K2MGP0_CLOBE S-adenosylmethionine:tRNA ribosyltransferase-isomerase; OS = Clostridium beijerinckii NRRL B-598 OX=1428454 GN=queA; PE = 3 SV=1
MNVKDFDFYLPEELIAQHPLEQRDSSRLMVLDKKTGEIKHKKFHDIIEYLNEGDTLVLNNTRVMPARLIGEKEGTGGKIEFLLLKRIEKDRWECLAKPGKSAKVGRKFTFGEGKLKAEVVEVKENGNRIVEFFYDGIFEEVLDSLGEMPLPPYIHERLEDRERYQTVYSKENGSAAAPTAGLHFTKELLQEIKNKGINIVYLTLHVGLGTFRPVKVESLEEHEMHSEFYMLSKESADIINETKKRGNAVISVGTTSTRTLETIGDENGFVKEQSGWTNIFIYPGYKFKVVDKLITNFHLPESTLIMLVSTLAGRENVMNAYEEAVNEKYRFFSFGDAMFIK

SEQ ID NO: 65394 - protein, 349 aa, Clostridium bolteae
  REGION 1..349: note = tr|A8RIE8|A8RIE8_CLOBW S-adenosylmethionine:tRNA ribosyltransferase-isomerase OS=Clostridium bolteae (strain ATCC BAA-613 / WAL 16351) OX=411902 GN=queA PE=3; SV = 1
MDVKDFDYELPEELIAQDPLEDRSASRLMVLDRETGEIQHRIFKDITEYLRPGDCLVINDTKVIPARLFGVKKDTGAKIEILLLKRRENDVWETLVRPGKKAKPGTVIEFGEGLLTGTVVDTVDDGNRLIQFHYKGIFEEILDQLGQMPLPPYITHQLKDKNRYQTVYARHEGSAAAPTAGLHFTQELLAEIEGMGVKIAHVTLHVGLGTFRPVKVENVQDHHMHSEFYIVEESEAKKVNDTRAAGGRVICVGTTSCRTVESASTEDGVLKAGTGWTEIFIYPGYRFKVLDALITNFHLPQSTLVMLVSALAGREHILDAYREAVKEGYRFFSFGDAMFIAAHPAAEKR

SEQ ID NO: 65395 - protein, 349 aa, Clostridium bolteae
  REGION 1..349: note = tr|R5FHR7|R5FHR7_9CLOT S-adenosylmethionine:tRNA ribosyltransferase-isomerase OS=Clostridium bolteae CAG:59; OX = 1263064 GN=queA PE=3 SV=1
MDVKDFDYELPEELIAQDPLEDRSASRLMVLDRETGEIQHRIFKDITEYLRPGDCLVINDTKVIPARLFGVKKDTGAKIEILLLKRRENDIWETLVRPGKKAKPGTVIEFGEGLLTGTVVDTVDDGNRLIQFHYTGIFEEILDQLGQMPLPPYITHQLKDKNRYQTVYARHEGSAAAPTAGLHFTQELLAEIEGMGVKIAHVTLHVGLGTFRPVKVENVQDHHMHSEFYIVEESEAKKVNDTRAAGGRVICVGTTSCRTVESASTEEGVLKAGTGWTEIFIYPGYRFKVLDALITNFHLPQSTLVMLVSALAGREHILDAYREAVKEGYRFFSFGDAMFIAAHPAAEKR

SEQ ID NO: 65396 - protein, 340 aa, unidentified
  source 1..340: note = Clostridium bornimense
  REGION 1..340: note = tr|W6RXJ8|W6RXJ8_9CLOT S-adenosylmethionine:tRNA ribosyltransferase-isomerase OS=Clostridium bornimense; OX = 1216932 GN=queA PE=3 SV=1
MKVSDFDFHLPEELIGQTPYKDRDQCRLLVMDKETGEIEHKHFYDIYDQLEKGDTLVLNDTRVIPARLIGEKEDTKGKMEFLLLKRIDKDKWQTLVKPGKRAKIGATFVFGDGLLKAKVIDISDEGSRIVEFYYEGIFEEVLDKLGEMPLPPYITEKLEDKEAYQTVYSKNSGSAAAPTAGLHFTEELLERIKEKGINIVYVTLHVGLGTFRPVKVEDIENHFMHSEYFEISEESAKVINETKENGGRVICVGTTSIRTVESSSEKGKVIPGSGWTNIFIYPGYEFKVVDALITNFHLPESTLLMLVSALSDREKILNAYNIAVEERYKFFSFGDAMFIK

SEQ ID NO: 65397 - protein, 341 aa, Clostridium botulinum
  REGION 1..341: note = sp|B2TMZ3|QUEA_CLOBB S-adenosylmethionine:tRNA ribosyltransferase-isomerase OS=Clostridium botulinum (strain Eklund 17B / Type B) OX=935198 GN=queA PE=3 SV=1
MNVKDFDFYLPEELIAQHPLEKRDTSRLMVLDKETGEISHKNFYDIIDYLNEGDTLVLNNTRVMPARLIGEKEGTGGKIEFLLLKRVEKDRWECLAKPGKSARVGRRFTFGDGKLKAEVVEVKDNGNRIVEFYYEGIFEEVLDSLGEMPLPPYIHERLEDRERYQTVYSKENGSAAAPTAGLHFTEELLHKIKDRGINIAYVTLHVGLGTFRPVKVDTIEDHEMHSEYYHLSKEDAEVINATKKRGNKVISVGTTSTRTLETIADEDGNVKETNGWTNIFIYPGYKFKVVDRLITNFHLPESTLIMLVSTLAGKEHVMNAYEEAVKEKYRFFSFGDAMFIK

SEQ ID NO: 65398 - protein, 341 aa, Clostridium botulinum
  REGION 1..341: note = sp|A7GHT7|QUEA_CLOBL S-adenosylmethionine:tRNA ribosyltransferase-isomerase OS=Clostridium botulinum (strain Langeland / NCTC 10281 / Type F) OX=441772 GN=queA; PE = 3SV=1
MKVKDFDFYLPEELIAQHPMEKRDEARLLVLDKETGEIEHKIFKDILDYLTPNDCLVLNNTRVLPARLIGSKEETGGKMEFLLLKRKEKDVWETLVKPGKRAQIGARFIFGNGELEAEVIGMGEEGSRIVKFYYEGIFEEILDQLGQMPLPPYIKEKLDDKEMYQTVYSKEEGSAAAPTAGLHFTEELLKKIEEKGVKLAFLTLHVGLGTFRPVKVEDIQEHVMHSEYYKMDKKTAEIINDTKENGGRVIAVGTTSCRTLETIGDIEGKVGEQSGWTDIFIYPGYKYKVVDALITNFHLPQSTLLMLVSALAGRDNIMNAYNVAVEKEYRFFSFGDAMFIK

SEQ ID NO: 65399 - protein, 341 aa, Clostridium butyricum
  REGION 1..341: note = tr|A0A512TLS5|A0A512TLS5_CLOBU S-adenosylmethionine:tRNA ribosyltransferase-isomerase; OS = Clostridium butyricum OX=1492 GN=queA PE=3 SV=1
MNVKDFDFYLPEELIAQHPLEKRDTSRLMVLDKKTGEIEHKVFHDIVDYLNAGDTLVLNNTRVMPARLIGEKEETGGKIEFLLLKRVERDRWECLAKPGKSARVGRKFTFGEGKLKAEVVEVKENGNRIVEFHYEGIFEEVLDSLGEMPLPPYIHERLEDRERYQTVYSKENGSAAAPTAGLHFTNQLLEQIKEKGINVVYLTLHVGLGTFRPVKVENLEEHEMHSEFYMLSKESADIINETKRNGGRVISVGTTSTRTLETIGDENGFVKEQSGWTNIFIYPGYKFKVVDNLITNFHLPESTLIMLVSTLAGKEHVMNAYKTAVEEKYRFFSFGDAMFIK

SEQ ID NO: 65400 - protein, 341 aa, Clostridium butyricum; identical to SEQ ID NO: 65399
  REGION 1..341: note = tr|W1UB98|W1UB98_CLOBU S-adenosylmethionine:tRNA ribosyltransferase-isomerase OS=Clostridium butyricum DORA_1 OX=1403941 GN=queA PE=3 SV=1

SEQ ID NO: 65401 - protein, 341 aa, Clostridium cadaveris
  REGION 1..341: note = tr|A0A1I2MQ73|A0A1I2MQ73_9CLOT S-adenosylmethionine:tRNA ribosyltransferase-isomerase; OS = Clostridium cadaveris OX=1529 GN=queA PE=3 SV=1
MKVTDFDFVLPEELIAQHPLENREQSRLMVVDKNTGELQHKHFYNVVEYFNPGDTLVLNNTRVLPARLIGHKKGSTGKIEFLLLKRLSDNRWEALSKPGKRARVGAEFVFGDGLLEAEVVEVKEDGNRIIEFKYEGIFEEILDRLGQMPLPPYIKETLDDKERYQTVYSKESGSAAAPTAGLHFTNELLKEIKDKGVNIVYLTLHVGLGTFRPVKVENIESHNMHSEFYMLSKESADIINNTKKSGKKVIAVGTTSTRTLETIADEDGTVRESSGWTDIFIYPGYKFKVVDNLITNFHLPESTLIMLVSALAGRENILRAYNTAVEEKYRFFSFGDAMFLH

SEQ ID NO: 65402 - protein, 341 aa, Clostridium carboxidivorans
  REGION 1..341: note = tr|C6PXP9|C6PXP9_9CLOT S-adenosylmethionine:tRNA ribosyltransferase-isomerase OS=Clostridium carboxidivorans P7 OX=536227 GN=queA PE=3 SV=1
MKVTDFDFYLPEELIAQCPLEKRDEARLMLLDKNTGEIEHKIFKDIIDYLEPGDCLVLNDTRVLPARLIGSKENTGGKIEFLLLKRIDKDKWETLVKPGKRAQVGTRFVFGDGELKAEVVSVEEDGNRIVKFEYEGIFEEVLDKLGQMPLPPYIKEKLEDKEMYQTVYSKEQGSAAAPTAGLHFTEELLKKIEEKGVNIAFLTLHVGLGTFRPVKVENIQDHNMHSEYYTMSKETADIINKTRKNGKSIIAVGTTSCRTLETIGNDEGEVREQSGWTDIFIYPGYKYKMVDKLITNFHLPESTLIMLVSALAGRENVMNAYDTAVKERYRFFSFGDAMFIK

SEQ ID NO: 65403 - protein, 341 aa, Clostridium carnis
  REGION 1..341: note = tr|A0A3P6K5V5|A0A3P6K5V5_9CLOT S-adenosylmethionine:tRNA ribosyltransferase-isomerase; OS = Clostridium carnis OX=1530 GN=queA PE=3 SV=1
MDVKDFYFYLPEELIAQHPLEKRDTSRLMVLDKESGEITHRTFHDIIEYLNKGDTLVLNNTRVMPARLIGEKEKTGGKIEFLLLKRIEGDKWECLAKPGKSAREGRRFSFGEGKLKAEVVEVLENGNRIVEFYYKGIFEEVLDSLGEMPLPPYIHEKLEDKERYQTVYSKENGSAAAPTAGLHFTKELLEQIKEKGVKIVYLTLHVGLGTFRPVKVEKIEEHEMHSEFYILSKESADIINETKKRGNKVISVGTTSTRTLETIGDENGFVKEQSGWTNIFIYPGYKFKVVDRLITNFHLPESTLIMLVSTLAGKEHTMKAYEEAVKEKYRFFSFGDAMFIK

SEQ ID NO: 65404 - protein, 341 aa, Clostridium cavendishii
  REGION 1..341: note = tr|A0A1M6ABL8|A0A1M6ABL8_9CLOT S-adenosylmethionine:tRNA ribosyltransferase-isomerase; OS = Clostridium cavendishii DSM 21758 OX=1121302 GN=queA; PE = 3 SV=1
MKVNDFYFDLPEELIAQCPLEKRDASRLMVLDRNTGEVEHKSFHDIIDYLNPGDTLVLNNTRVLPARLIGEKEGTGGKIEFLLLKRLHGDTWEALAKPGKRAKIGTVFTFGDGKLKATVKEIGEEGNRIIEFSYDGIFEQVLDELGQMPLPPYIHEKLEDKERYQTVYSKEKGSAAAPTAGLHFTKELIEEIKAKGINIAFLTLHVGLGTFRPVKVDTIENHVMHSEFYQLSKEDADIINKTKQLGHRVISVGTTSTRTLETIADENGIVKPQSGWTDIFIYPGYKYKVVDSLITNFHLPESTLIMLVSALAGKENVMNAYNTAVKEKYRFFSFGDSMFIK

SEQ ID NO: 65405 - protein, 341 aa, Clostridium celatum
  REGION 1..341: note = tr|L1QDY4|L1QDY4_9CLOT S-adenosylmethionine:tRNA ribosyltransferase-isomerase OS=Clostridium celatum DSM 1785 OX=545697 GN=queA PE=3 SV=1
MKTSDFDFYLPEELIAQHPLEKRDYSRLMVLDKETGEIEHKHFYDVLDYLNEGDTLVLNNTRVMPARIIGEKAETGGKIEFLLLKRIEGDKWECLAKPGKRAKIGAEFTFGEGKLKCTVVDIVEEGNRIIEFSYDGIFEQVLDELGEMPLPPYITERLDDRERYQTVYSKEQGSAAAPTAGLHFTKELLEKVKEKGVNIAYVTLHVGLGTFRPVKVDDVNAHVMHSEFYHLDEENANIINETKKRGNKVISVGTTSTRTLETIGDENGFVKEQSGWTNIFIYPGYKFKVVDKLITNFHLPESTLIMLVSALAGKEKVMNAYNEAVKERYRFFSFGDSMIIK

SEQ ID NO: 65406 - protein, 341 aa, Clostridium cellulovorans
  REGION 1..341: note = tr|D9SMV8|D9SMV8_CLOC7 S-adenosylmethionine:tRNA ribosyltransferase-isomerase OS=Clostridium cellulovorans (strain ATCC 35296 / DSM 3052 / OCM 3 / 743B) OX=573061 GN =queA PE=3 SV=1
MDVKDYYYDLPEELIAQHPSEERDLCRLLLLDKISGETEHKIFKDIIDELHTGDCLVLNDTRVLPARLIGEKEDTHGKMEFLLLKRIEKDTWQALVKPGKRAKIGSRFSFGDGILKAEVVDISDEGSRIIKFFYDGIFEEVLDSLGEMPLPPYITEKLDDKEKYQTVYSKNNGSAAAPTAGLHFTKELLSKIEAKGIKIAYLTLHVGLGTFRPVKVDKIEEHFMHSEYFNVSEETSNIINSTKANGGRIICVGTTSVRTLETVAEKDGKVIAKDGWTDIFIYPGYQYKVVDALITNFHLPESTLLMLVSALSSRENIINAYELAVKEQYRFFSFGDAMFIR

SEQ ID NO: 65407 - protein, 341 aa, Clostridium chauvoei
  REGION 1..341: note = tr|S6ELF1|S6ELF1_9CLOT S-adenosylmethionine:tRNA ribosyltransferase-isomerase OS=Clostridium chauvoei JF4335 OX=1351755 GN=queA PE=3 SV=1
MKVSDFDFYLPEELIAQHPLEKRDSSRLMVLDRKTGKVEHKHFHDIIEYLNEGDTLVLNNTRVLPARLIGEKQGTGGKIEFLLLKRIEGDKWECLAKPGKRAKIGQKFVFGEGKLTCEVVDIIEEGNRIIEFSYEGIFEQVLDELGEMPLPPYITERLEDRERYQTVYSKEKGSAAAPTAGLHFTEDLLKQIKAKGINIAYLTLHVGLGTFRPVKAETIDDHIMHSEYYLLDEEDAKIINETKKRGNRVISVGTTSTRTLETIADENGFVKAQSGWTNIFIYPGYKFKVVDNLITNFHLPESTLIMLVSALAGKENVMNAYKEAVEEKYRFFSFGDSMFIK

SEQ ID NO: 65408 - protein, 341 aa, Clostridium chromiireducens
  REGION 1..341: note = tr|A0A1V4IHJ6|A0A1V4IHJ6_9CLOT S-adenosylmethionine:tRNA ribosyltransferase-isomerase; OS = Clostridium chromiireducens OX=225345 GN=queA PE=3 SV=1
MDVKDFDFYLPEELIAQHPLEQRDASRLMVLDKKTGEILHKRFHDVLEYLNKGDTLVLNNTRVMPARLIGEKEGTGGKIEFLLLRRIEKDKWECLAKPGKSARVGRKFTFGEGKLKAEVIEVKEDGNRIVEFFYEGIFEEVLDSLGEMPLPPYIHERLDDRERYQTVYSKETGSAAAPTAGLHFTKELLHEIKERGINVVYLTLHVGLGTFRPVKVESLEEHEMHSEFYMLSKESADIINETKKRGNSVISVGTTSTRTLETIGDENGFVKEQSGWTNIFIYPGYKFKVVDKLITNFHLPESTLIMLVSTLAGRDNVMNAYKEAVNESYRFFSFGDAMFIK

SEQ ID NO: 65409 - protein, 354 aa, Clostridium clostridioforme
  REGION 1..354: note = tr|R7PRB5|R7PRB5_9CLOT S-adenosylmethionine:tRNA ribosyltransferase-isomerase OS=Clostridium clostridioforme CAG:511 OX=1263066 GN=queA PE=3 SV=1
MDVKDFDYELPEELIAQDPLEDRSASRLMVLDRETGEIQHRIFKDITQYLRPGDCLVINDTKVIPARLFGVKKDTGAKIEILLLKRGENDIWETLVRPGKKAKPGTVIEFGEGLLTGTVVDTVDDGNRMIQFYYKGIFEEILDQLGQMPLPPYITHQLKDKNRYQTVYARHEGSAAAPTAGLHFTQELLAEIEGMGVKIAHVTLHVGLGTFRPVKVENVQDHHMHSEFYIVEESEAKKVNDTKAAGGRVICVGTTSCRTVESASTEDGVLKSGTGWTEIFIYPGYRFKVLDALITNFHLPQSTLVMLVSALAGREHILNAYREAVKERYRFFSFGDAMFIAAHPAAEKRQGLWE

SEQ ID NO: 65410 - protein, 341 aa, Clostridium clostridioforme
  REGION 1..341: note = tr|R6JDP6|R6JDP6_9CLOT S-adenosylmethionine:tRNA ribosyltransferase-isomerase OS=Clostridium clostridioforme CAG:132 OX=1263065 GN=queA PE=3 SV=1
MDVKDFDYELPEELIAQDPLEDRSASRLMVLDRETGEIQHRIFKDITQYLRPGDCLVINDTKVIPARLFGVKKDTGAKIEILLLKRGENDIWETLVRPGKKAKPGTVIEFGEGLLTGTVVDTVDDGNRLIQFYYKGIFEEILDQLGQMPLPPYITHQLKDKNRYQTVYARHEGSAAAPTAGLHFTQELLDEIEGMGVKIAHVTLHVGLGTFRPVKVENVQDHHMHSEFYIVEESEAKKVNDTKAAGGRVICVGTTSCRTVESASTEDGVLKSGTGWTEIFIYPGYRFKVLDALITNFHLPQSTLVMLVSALAGREHILNAYREAVKERYRFFSFGDAMIIL

SEQ ID NO: 65411 - protein, 341 aa, Clostridium cochlearium
  REGION 1..341: note = tr|A0A1G9HHQ5|A0A1G9HHQ5_CLOCO S-adenosylmethionine:tRNA ribosyltransferase-isomerase; OS = Clostridium cochlearium OX=1494 GN=queA PE=3 SV=1
MKAKDFDYYLPEELIAQHPLEKRDECRLMILDKETGQVEHKVFKDILDYLNKGDCLVLNDTRVMPARLIGEKEETRGKMEFLLLKRKDKDTWETLVKPGKRAKIGSRFVFGQGELKAEVIGMEEEGSRIVKFQYEGVFEEVLDRLGQMPLPPYITEKLEDKEKYQTVYSKETGSAAAPTAGLHFTEELLNKIKEKGIKIAFLTLHVGLGTFRPVKEEEIENHIMHSEYYSINKETADIINSTKENGGRVIAVGTTSCRTLETLGTKYGKVIEDSGWTDIFMYPGYEFKVTDALITNFHLPQSTLIMLVSALCGREKVLNAYEIAVKERYRFFSFGDAMFVK

SEQ ID NO: 65412 - protein, 341 aa, Clostridium cochlearium
  REGION 1..341: note = tr|A0A240AQS6|A0A240AQS6_CLOCO S-adenosylmethionine:tRNA ribosyltransferase-isomerase; OS = Clostridium cochlearium OX=1494 GN=queA PE=3 SV=1
MKAKDFDYYLPEELIAQHPLEKRDECRLMILDKETGQVEHKVFKDILDYLNKGDCLVLNDTRVMPARLIGEKEETRGKMEFLLLKRKDKDTWETLVKPGKRAKIGSRFVFGQGELKAEVIGMGEEGSRIVKFQYEGVFEEVLDRLGQMPLPPYITEKLEDKEKYQTVYSKETGSAAAPTAGLHFTEELLNKIKEKGIKIAFLTLHVGLGTFRPVKEEEIENHIMHSEYYSINKETADIINSTKENGGRVIAVGTTSCRTLETLGTKYGKVIEDSGWTDIFMYPGYEFKVTDALITNFHLPQSTLIMLVSALCGREKVLNAYEIAVKERYRFFSFGDAMFVK

SEQ ID NO: 65413 - protein, 341 aa, Clostridium colicanis
  REGION 1..341: note = tr|A0A151AR44|A0A151AR44_9CLOT S-adenosylmethionine:tRNA ribosyltransferase-isomerase; OS = Clostridium colicanis DSM 13634 OX=1121305 GN=queA PE=3; SV = 1
MKVKDFDFYLPEELIAQHPLEKRDESRLMVVDKNSGNIEHRIFKNIIDYLNEGDCLVLNNTRVLPARLIGEKEGTGGKMEFLLLKRIDVNTWETLVKPGKRAKIGARFIFGGGELKAEVKEIGEDGSRIVQFEYEGVFEEVLDRLGEMPLPPYITETLEDKERYQTVYSKEAGSAAAPTAGLHFTEELLTKIKDKGIKLAFVTLHVGLGTFRPVKVDTIEEHHMHSEYYTMSKETAEIINETKEKGGRVIAVGTTSCRTLETIANEEGRVREQSGWTSIFMYPGYKFKIVDALITNFHLPESTLIMLVSAFSSREIIMKAYEEAVKEKYRFFSFGDAMFLK

SEQ ID NO: 65414 - protein, 342 aa, Clostridium collagenovorans
  REGION 1..342: note = tr|A0A1M5YD23|A0A1M5YD23_9CLOT S-adenosylmethionine:tRNA ribosyltransferase-isomerase; OS = Clostridium collagenovorans DSM 3089 OX=1121306 GN=queA; PE = 3 SV=1
MKVKDFDFYLPEESIAQHPAAKRDESRLMVLQKETGEIEHKKFKDIVDYLRAGDCLVLNNTRVLPARLFGAKEDTNGKMEFLLLKRVEKDTWETLVKPGKRAKIGNRFVFGNGELKAEVVGMGEEGSRLVRFEYEGIFEEVLDSLGQMPLPPYITEQLEEKERYQTVYSKEVGSAAAPTAGLHFTEELLQRIKDKGVEIAFVTLHVGLGTFRPVKVDDINDHHMHSEYYQMSQETADTINRCKENGGRLIGVGTTSCRTIESIADENGKLKEQSGWTEIFIYPGYKFKALDCLITNFHLPQSTLIMLVSALAGKEHVMNAYEVAVKDGYRFFSFGDAMFIHK

SEQ ID NO: 65415 - protein, 341 aa, unidentified
  source 1..341: note = Clostridium combesii
  REGION 1..341: note = tr|A0A2G7HJ44|A0A2G7HJ44_9CLOT S-adenosylmethionine:tRNA ribosyltransferase-isomerase; OS = Clostridium combesii OX=39481 GN=queA PE=3 SV=1
MKVKDFDFYLPEELIAQHPMEKRDEARLLVLDKETGEIEHKIFKDILDYLTPNDCLVLNNTRVLPARLIGSKEETGGKMEFLLLKRKEKDVWETLVKPGKRAQIGARFIFGNGELKAEVIGMGEEGSRIVKFYYEGIFEEILDQLGQMPLPPYIKEKLDDKEMYQTVYSKEEGSAAAPTAGLHFTEELLKKIEEKGVKLAFLTLHVGLGTFRPVKVEDIQEHVMHSEYYKMDKETAEIINDTRENGGRVIAVGTTSCRTLETIGDIEGKVREQSGWTDIFIYPGYKYKVVDALITNFHLPQSTLLMLVSALAGRDNIMNAYNVAVEKEYRFFSFGDAMFIK

SEQ ID NO: 65416 - protein, 341 aa, unidentified; identical to SEQ ID NO: 65388
  source 1..341: note = Clostridium coskatii
  REGION 1..341: note = tr|A0A166U5M5|A0A166U5M5_9CLOT S-adenosylmethionine:tRNA ribosyltransferase-isomerase; OS = Clostridium coskatii OX=1705578 GN=queA PE=3 SV=1

SEQ ID NO: 65417 - protein, 341 aa, Clostridium cylindrosporum
  REGION 1..341: note = tr|A0A0J8G0E7|A0A0J8G0E7_CLOCY S-adenosylmethionine:tRNA ribosyltransferase-isomerase; OS = Clostridium cylindrosporum DSM 605 OX=1121307 GN=queA; PE = 3 SV=1
MKVSDFYFDLPEELIAQEPLEERDNSRLLVLDKNTGEINHRRFKDILEYLKEGDTLVLNNSRVIPARLFGIKKETGAKIEFVLLKRVDKDKWETLVKPGKKAKPGTEFVFGNGELECKVLETTEIGGRIIEFKYEGIFEEVLDKLGQMPLPPYITKQLEDKERYQTVYSKINGSAAAPTAGLHFTKELMEKIKEKGVNIAYVTLHVGLGTFRPVKVEDINEHIMHSEFYSIDKENADIINNTKRQGKRVITVGTTSTRTLETVGDENGFIKECSGWTDIFIYPGYKFKVVDNLITNFHLPESTLIMLVSTLAGQENTMNAYKEAVEEKYRFFSFGDAMFIK

SEQ ID NO: 65418 - protein, 341 aa, Clostridium diolis; identical to SEQ ID NO: 65392
  REGION 1..341: note = tr|A0A2P8RKY7|A0A2P8RKY7_9CLOT S-adenosylmethionine:tRNA ribosyltransferase-isomerase; OS = Clostridium diolis OX=223919 GN=queA PE=3 SV=1

SEQ ID NO: 65419 - protein, 341 aa, Clostridium disporicum
  REGION 1..341: note = tr|A0A174HTI9|A0A174HTI9_9CLOT S-adenosylmethionine:tRNA ribosyltransferase-isomerase; OS = Clostridium disporicum OX=84024 GN=queA PE=3 SV=1
MKTSDFDFYLPEELIAQHPLERRDYSRLMVLDKETGEIEHKHFYDVINYLNPGDTLVLNNTRVMPARLIGEKAESGGKIEFLLLKRIEGDKWECLAKPGKRAKIGAEFVFGEGKLRCKVVDIIEEGNRIIEFSYDGIFEQVLDELGEMPLPPYITERLDDKERYQTVYSKEKGSAAAPTAGLHFTKELLEEVKEKGINIAYVTLHVGLGTFRPVKVDDVNEHVMHSEFYHLEEEDAKIINETKKRGNKIISVGTTSTRTLETIGDENGFVKAQSGWTNIFIYPGYKFKVVDKLITNFHLPESTLIMLVSALAGKEKVMNAYNEAVKERYRFFSFGDSMIIK

SEQ ID NO: 65420 - protein, 341 aa, Clostridium disporicum
  REGION 1..341: note = tr|A0A174DUR5|A0A174DUR5_9CLOT S-adenosylmethionine:tRNA ribosyltransferase-isomerase; OS = Clostridium disporicum OX=84024 GN=queA PE=3 SV=1
MKTSDFNFDLPEELIAQHPLEKRDYSRLMVLDKKTGEIEHRHFYDILEYLKEGDTLVLNNTRVMPARLFGQKEETGAKIEFLLLKRIEGDKWECLAKPGKKAKIGATFTFGEGKLKCKVVDIVEEGNRIIEFSYDGIFEQVLDELGEMPLPPYITERLDDRERYQTVYSKEKGSAAAPTAGLHFTEELLEKVREKGVNIAYLTLHVGLGTFRPVKVDDVNEHVMHSEYYCLSEEDADIINNTKKNGGRVISVGTTSTRTLETIGDENGYVSAKSGWTNIFIYPGYKFKVVDNLITNFHLPESTLIMLVSALAGKEHVMNAYNEAVKEKYRFFSFGDSMFIK

SEQ ID NO: 65421 - protein, 341 aa, Clostridium drakei
  REGION 1..341: note = tr|A0A2U8DVK4|A0A2U8DVK4_9CLOT S-adenosylmethionine:tRNA ribosyltransferase-isomerase; OS = Clostridium drakei OX=332101 GN=queA PE=3 SV=1
MKVTDFDFYLPEELIAQCPLEKRDEARLMLLDKNTGEIEHKIFKDIIDYLEPGDCLVLNDTRVLPARLIGSKENTGGKIEFLLLKRIDKDKWETLVKPGKRAQVGTRFVFGDGELKAEVVSVEEDGNRIVQFEYEGIFEEVLDKLGQMPLPPYIKEKLEDKEMYQTVYSKEQGSAAAPTAGLHFTEELLKKIEEKGVNIAFLTLHVGLGTFRPVKVENIQDHNMHSEYYTMSKETADIINKAKKSEKKVIAVGTTSCRTLETIGDDKGEVREQSGWTDIFIYPGYKYKVVDRLITNFHLPESTLIMLVSALAGREKIMNAYNTAVKERYRFFSFGDAMFIK

SEQ ID NO: 65422 - protein, 341 aa, Clostridium estertheticum
  REGION 1..341: note = tr|A0A1J0GHA7|A0A1J0GHA7_9CLOT S-adenosylmethionine:tRNA ribosyltransferase-isomerase; OS = Clostridium estertheticum subsp. estertheticum OX=1552; GN = queA PE=3 SV=1
MKVKDFYFDLPKELIAQHPLEKRDESRLMVINKTKKEIEHKHFKNIIDYLNPGDCLVLNDTRVLPARLLGFKEGTGGKMEFLLLKRIDINKWETLVKPGKKAKIGATFIFGNGELKATVISDSEGGSRIVEFEYDGIFEEILDKLGEMPLPPYITEKLEDKERYQTVYSREEGSAAAPTAGLHFTKQLLAQIKAKGVEIAFVTLHVGLGTFRPVKAEEVEEHEMHSEHYMLNSETAQLINETKENGGRVIAVGTTSNRTLESIADDNGRVCAKSGWTDIFIYPGYKFKIVDALITNFHLPESTLIMLVSAFADKDLIMGAYEVAVKEKYRFFSFGDAMFLY

SEQ ID NO: 65423 - protein, 341 aa, Clostridium fallax
  REGION 1..341: note = tr|A0A1M4UBN4|A0A1M4UBN4_9CLOT S-adenosylmethionine:tRNA ribosyltransferase-isomerase; OS = Clostridium fallax OX=1533 GN=queA PE=3 SV=1
MKVTDFDFYLPEELIAQHPLKDRDSSRLMVLDRETGKVSHKVFHDIIDYLNPGDTLVLNNTRVLPARLIGEKAETGGKIEFLLLKRIEGDKWECLAKPGKRAKVGTEFTFGDGKLKGIVREIGEEGNRIVEFIYDGIFETVLDELGQMPLPPYIHERLEDRERYQTVYSKEKGSAAAPTAGLHFTKDLLEKIKEKGVNIAYLTLHVGLGTFRPVKVDTIENHIMHSEYYHLDKEDAKIINDTKENGGRVIAVGTTSTRTLETIGDENGRVKESSGWTDIFIYPGYKFKIVDSLITNFHLPESTLIMLVSALAGKENVMNAYKEAVEEKYRFFSFGDAMFIK

SEQ ID NO: 65424 - protein, 341 aa, Clostridium felsineum
  REGION 1..341: note = tr|A0A1S8LKK8|A0A1S8LKK8_9CLOT S-adenosylmethionine:tRNA ribosyltransferase-isomerase; OS = Clostridium felsineum DSM 794 OX=1121310 GN=queA PE=3; SV = 1
MQLEDFDYYLPEELIAQHPCDKRDECRLMVMNKKSGEVEHKIFKDIINYLNTGDCLVLNDTRVLPARLIGNKMETGGKMEFLLLKRIDKDTWETLVKPGKRAKVGAKFEFGNGILKAEVKSIGEDGNRIVEFQYDGIFEEILDELGQMPLPPYITEELENKEEYQTVYSKNNGSAAAPTAGLHFTNELLNKIRAKGIKTVFLTLHVGLGTFRPVKVENVESHHMHSEFYMLSKESADIINETKKNGGRVISVGTTSTRTLETIADEDGKVREQSGWTDIYIYPGYKYKIVDGLITNFHLPKSTLVMLVSALSSRENILNAYKNAVENKYRFFSFGDAMFIK

SEQ ID NO: 65425 - protein, 341 aa, Clostridium formicaceticum
  REGION 1..341: note = tr|A0A1D9FP01|A0A1D9FP01_9CLOT S-adenosylmethionine:tRNA ribosyltransferase-isomerase; OS = Clostridium formicaceticum OX=1497 GN=queA PE=3 SV=1
MKTKDFYFDLPEELIAQKPLEKRDQSRLLVLDKKTGEMEHTYFYNILNYLKAGDCLVVNDTRVLPARLIGEKEGTGGKVEFLLLKRKELDTWETLVKPGKKAKLGSRFVFGDGLLQAEVIDIVEEGNRVIKFHYTGVFEEILDQLGKMPLPPYITETLEDNERYQTVYSKNQGSAAAPTAGLHFTEELLEKIKEKGVKIVYITLHVGLGTFRPVKVEDIESHKMHSEYYTISKEAADSINATKAQGGQVIAVGTTSCRTLESAAIEASKIKEGSGWTDIFIYPGYEFKIVDHLITNFHLPESTLIMLVSALSQKDIIMKAYETAVKERYRFFSFGDAMFIK

SEQ ID NO: 65426 - protein, 341 aa, Clostridium frigidicarnis
  REGION 1..341: note = tr|A0A1I0VJT4|A0A1I0VJT4_9CLOT S-adenosylmethionine:tRNA ribosyltransferase-isomerase; OS = Clostridium frigidicarnis OX=84698 GN=queA PE=3 SV=1
MNVKDFDFYLPEELIAQHPLKERETSRLMVLDRNTGDIDHKHFYDVLNYFNEGDTLVLNNTRVIPARLIGEKADTGGKIEFLLLKRIEGDKWEALAKPGKRARVGREFTFGDGKLKATVVEVLENGNRIIEFSYEGIFEQILDDLGQMPLPPYITETLEDKERYQTVYSKEKGSAAAPTAGLHFTTELLEKIKEKGVNIAYLTLHVGLGTFRPVKVDVIEEHDMHSEFYCLDKENADIINKTKERGNKVIAVGTTSCRTLETIGDGNNRVQEQSGWTDIFIYPGYKFKVVDRLITNFHLPESTLIMLVSALATKENVMNAYSTAVENRYRFFSFGDAMFIK

SEQ ID NO: 65427 - protein, 341 aa, Clostridium gasigenes
  REGION 1..341: note = tr|A0A1H0UD01|A0A1H0UD01_9CLOT S-adenosylmethionine:tRNA ribosyltransferase-isomerase; OS = Clostridium gasigenes OX=94869 GN=queA PE=3 SV=1
MKVSDFDFELPQELIAQHPLEKRDSSRLMVLDKKTGELNHKNFHDILEYLGCGDTLVLNNTRVMPARLIGEKEETGSKIEFLLLKRIEGDKWECLAKPGKRAKIGQRFIFGDGKLKCVVVDIVEEGNRIIEFSYEGIFEQVLDELGEMPLPPYITERLEDRERYQTVYSKEEGSAAAPTAGLHFTQELLKKIKAKGVNIAYLTLHVGLGTFRPVKVESTDDHVMHSEFYSLTKEDADLINDTKRKGNRVISVGTTSTRTLETIGDENGFVKEDSGWTNIFIYPGYKFKVIDALITNFHLPESTLIMLVSALSTKENVMNAYNEAVKEKYRFFSFGDSMFIQ

SEQ ID NO: 65428 - protein, 341 aa, Clostridium grantii
  REGION 1..341: note = tr|A0A1M5SK65|A0A1M5SK65_9CLOT S-adenosylmethionine:tRNA ribosyltransferase-isomerase; OS = Clostridium grantii DSM 8605 OX=1121316 GN=queA PE=3; SV = 1
MKVKDFDFYLPEELIAQHPMKKRDESRLMVLDKVTGKVQHKVFKDIIDYLEEGDCLVLNDTRVMPARLFGVKKDTQSKIEFLLLKRLNDNKWETLVKPGKKAKIGAEIIFGEGILTGTIVDICEDGSRIIQFNYKGIFEEILDELGQMPLPPYITERLEDKERYQTVYSKEVGSAAAPTAGLHFTKDLMEKIKDKGIKIAFLTLHVGLGTFRPVKVENIDDHHMHSEFYVMTKETAEIINETKKNKGRIIAVGTTSCRTLETVADENGWISEKTGWTDIFIYPGYKFKVVDKMITNFHLPQSTLLMLISALSSQKIIMDAYEEAIEQRYRFFSFGDSMFIK

SEQ ID NO: 65429 - protein, 341 aa, Clostridium haemolyticum
  REGION 1..341: note = tr|A0A1V2Y6H0|A0A1V2Y6H0_CLOHA S-adenosylmethionine:tRNA ribosyltransferase-isomerase; OS = Clostridium haemolyticum OX=84025 GN=queA PE=3 SV=1
MKVKDFDFYLPEELIAQHPMEKRDESRLMVVDRISGHIEHKIFKDILGYFNEGDCIVLNNTRVLPARLIGEKENTGGKIEFLLLKRIEGDKWETLVKPGKKAKIGARFVFGLGELKAEVKGMGEDGSRIIEFEYEGIFEEVLDKLGQMPLPPYITEKLDDKERYQTVYSKEKGSAAAPTAGLHFTKELLKDIENKGVKIAFVTLHVGLGTFRPVKVEDIEEHHMHSEYYTMSKETADIINKTKENGGKVIAVGTTSCRTLETIGDENGKVKETSGWTDIFMYPGYKFKIVDRLITNFHLPQSTLLMLVSAFSRRENIMNAYKEAVDEKYRFFSFGDAMFLK

SEQ ID NO: 65430 - protein, 341 aa, Clostridium haemolyticum
  REGION 1..341: note = tr|A0A0A0IW94|A0A0A0IW94_CLOHA S-adenosylmethionine:tRNA ribosyltransferase-isomerase; OS = Clostridium haemolyticum NCTC 8350 OX=1443115 GN=queA; PE = 3 SV=1
MKVKDFDFYLPEELIAQHPMEKRDESRLMVVDRISGHIEHKIFKDILGYFNEGDCLVLNNTRVLPARLIGEKENTGGKIEFLLLKRIEGDNWETLVKPGKKAKIGARFVFGLGELKAEVKGMGEDGSRIIEFEYEGIFEEVLDKLGQMPLPPYITEKLDDKERYQTVYSKEKGSAAAPTAGLHFTKELLKDIENKGVKIAFVTLHVGLGTFRPVKVEDIEEHHMHSEYYTMSKETADIINKTKENGGKVIAVGTTSCRTLETIGDENGKVKETSGWTDIFMYPGYKFKIVDRLITNFHLPQSTLLMLVSAFSRRENIMNAYKEAVDEKYRFFSFGDAMFLK

SEQ ID NO: 65431 - protein, 365 aa, Clostridium hathewayi
  REGION 1..365: note = tr|R5U267|R5U267_9CLOT S-adenosylmethionine:tRNA ribosyltransferase-isomerase OS=Clostridium hathewayi CAG:224 OX=1263067 GN=queA PE=3 SV=1
MNVKDFNFELPQELIAQDPLEDRSSSRLLVLDKKTGEIEHRTFRDILSYLRKGDCLVINDTKVIPARLFGVKEGTEAKIEILLLKRRENDIWETLVKPGKKAKIGTVITFGEGLLTGTVVDIVDEGNRLIQFSYEGIFEEILDRLGQMPLPPYITHQLKDQTRYQTVYAKHEGSAAAPTAGLHFTKELLAEIEAMGVVIAHVTLHVGLGTFRPVKVDEIEDHHMHSEFYIVDEAEAKKVNDTKKNGGRIVCVGTTSCRTVESASSDDGVLKAGSGWTEIFIYPGYRFKTLDCLITNFHLPESTLVMLVSALAGREHVLNAYEEAIRERYRFFSFGDAMFITDLHEGVSSDDGDQTGKETGERTER

SEQ ID NO: 65432 - protein, 341 aa, Clostridium homopropionicum
  REGION 1..341: note = tr|A0A0L6ZDR5|A0A0L6ZDR5_9CLOT S-adenosylmethionine:tRNA ribosyltransferase-isomerase; OS = Clostridium homopropionicum DSM 5847 OX=1121318 GN=queA; PE = 3 SV=1
MKVTDFDFYLPEELIAQHPLEKRDESRLMVISKDTGKIEHKRFKNIIEYLNDGDCLVLNNTRVLPARLIGEKENTGGKMEFLLLKRIDKDTWETLVKPGKRAKVGSKFIFGNGELKAKVKDIGEEGSRIVQFQYEGIFEEVLDKLGQMPLPPYIRERLEDKERYQTVYSKENGSAAAPTAGLHFTEELLKKIKDKGVKIAFVTLHVGLGTFRPVKVENIEEHPMHSEYYTILKEDVELINKTKRNGGRIIAVGTTSCRTLETISTIDGSVREQSGWTNIFIYPGYKFKVVDALITNFHLPQSTLLMLVSAFSSRELILKAYSEAVEEKYRFFSFGDAMIIK

SEQ ID NO: 65433 - protein, 341 aa, Clostridium intestinale
  REGION 1..341: note = tr|A0A1M5Z2T9|A0A1M5Z2T9_9CLOT S-adenosylmethionine:tRNA ribosyltransferase-isomerase; OS = Clostridium intestinale DSM 6191 OX=1121320 GN=queA; PE = 3 SV=1
MKVEDFYFDLPEELIAQHPLEDRTSSRLMVLDRETGEVSHKHFYDVIEYFNKGDTLVLNNTRVLPARLIGEKEGTGGRIEFLLLKKVGEDLWECLSKPGKKAKPKARFTFGSGKLTAEVKEVLDNGNRIVKFYYEGLFENVLDDLGEMPLPPYIHEALEDKERYQTVYSKEKGSAAAPTAGLHFTEELLEKIKAKGVNVVYLTLHVGLGTFRPVKVENIEEHDMHSEFYVLSEETAKVINETKKRGNKVISVGTTSTRTLETVGDENGEVKEASGWTNIFIYPGYRFKVVDNLITNFHLPESTLIMLVSTLAGQDNVMKAYKTAVEEKYRFFSFGDAMFIK

SEQ ID NO: 65434 - protein, 341 aa, Clostridium intestinale
  REGION 1..341: note = tr|U2N5F6|U2N5F6_9CLOT S-adenosylmethionine:tRNA ribosyltransferase-isomerase OS=Clostridium intestinale URNW OX=1294142 GN=queA PE=3 SV=1
MKVEDFYFDLPEELIAQHPLEDRTSSRLMVLDRETGEVSHKHFYDVIEYFNEGDTLVLNNTRVLPARLIGQKEGTGGRIEFLLLKKVGEDLWECLSKPGKKAKPKARFTFGSGKLTAEVKEVLDNGNRIVKFYYEGLFENVLDDLGEMPLPPYIHETLDDKERYQTVYSKEKGSAAAPTAGLHFTEELLEKIKAKGVNVVYLTLHVGLGTFRPVKVENIEEHDMHSEYYVLSEETAKIINETKKRGNKVISVGTTSTRTLETVGDENGEVKEASGWTNIFIYPGYKFKVVDNLITNFHLPESTLIMLVSTLAGQGNVMKAYKTAVEEKYRFFSFGDAMFIK

SEQ ID NO: 65435 - protein, 342 aa, Clostridium isatidis
  REGION 1..342: note = tr|A0A343JAJ1|A0A343JAJ1_9CLOT S-adenosylmethionine:tRNA ribosyltransferase-isomerase; OS = Clostridium isatidis OX=182773 GN=queA PE=3 SV=1
MKVSEFNFYLPEELIAQHPLKERDASRLMVLDKKNGKIEHKKFHDIIDYLNPGDTLVLNNTRVLPARLIGEKESTGGKIEFLLLKRIEGDKWECLAKPGKRAKIGTIFTFGNGRLKCEVVDIAEEGNRIIEFSYDGIFEEVLDELGEMPLPPYITERLEDKERYQTVYSKEEGSAAAPTAGLHFTEKLLNDIKNKGINIAYLTLHVGLGTFRPVKVEDTDDHIMHSEFYQLDEENAKIINETKKRGNKIISVGTTSTRTLETIGDENGFVRAQNGWTDIFIYPGYKFKVVDQLITNFHLPESTLIMLVSALAGKENILRAYNEAVKERYRFFSFGDAMFIKE

SEQ ID NO: 65436 - protein, 341 aa, Clostridium kluyveri
  REGION 1..341: note = tr|A0A1L5FC34|A0A1L5FC34_CLOKL S-adenosylmethionine:tRNA ribosyltransferase-isomerase; OS = Clostridium kluyveri OX=1534 GN=queA PE=3 SV=1
MEVTDFDFYLPEELIAQKPLKQRDEGRLMVLDKKTGKVCHKVFKDIVDYLNPGDCVVLNDTRVLPARLIGVREDTMGKMEFLLLKRRDNCTWETLVKPGKRARVGNRFNFGDGELMAEVVSINEDGNRIVRFEYNGVFEEILDKLGQIPLPPYIKEKLENKELYQTVYSREEGSAAAPTAGLHFTEELLRELREKGVNLAFLTLHVGLGTFRPVKVENIEEHTMHSEFYSMSKETADMINAAKESGHSVISVGTTSCRTLETIGDENGRVKEQSGWTDIFIYPGYKYKVVDKLITNFHLPKSTLIMLVSAFYGRENTLHAYNVAVKEKYRFFSFGDAMFIK

SEQ ID NO: 65437 - protein, 341 aa, Clostridium kluyveri
  REGION 1..341: note = sp|A5N205|QUEA_CLOK5 S-adenosylmethionine:tRNA ribosyltransferase-isomerase OS=Clostridium kluyveri (strain ATCC 8527 / DSM 555 / NCIMB 10680) OX=431943; GN = queA PE=3SV=1
MEVTDFDFYLPEELIAQKPLEQRDEGRLMVLDKKTGKVCHKIFKDIVYYLNPGDCVVLNDTRVLPARLIGVREDTMGKIEFLLLKRRDNFTWETLVKPGRRAKVGNRFNFGSGQLKAEVVSINEDGNRIVRFEYNGVFEEILDKLGQIPLPPYIKEKLENKELYQTVYSKEEGSAAAPTAGLHFTEELLRELREKGVNLAFLTLHVGLGTFRPVKVENIEDHAMHSEFYSMSKETADMINAAKESGHSVISVGTTSCRTLETIGDENGRVKEQSGWTDIFIYPGYKYKVVDKLITNFHLPKSTLIMLVSAFYGRENTLHAYNVAVKEKYRFFSFGDAMFIK

SEQ ID NO: 65438 - protein, 344 aa, Clostridium leptum; identical to SEQ ID NO: 62533
  REGION 1..344: note = tr|R6N5M4|R6N5M4_9CLOT S-adenosylmethionine:tRNA ribosyltransferase-isomerase OS=Clostridium leptum CAG:27; OX = 1263068 GN=queA PE=3 SV=1

SEQ ID NO: 65439 - protein, 341 aa, unidentified
  source 1..341: note = Clostridium liquoris
  REGION 1..341: note = tr|A0A2T0AZT8|A0A2T0AZT8_9CLOT S-adenosylmethionine:tRNA ribosyltransferase-isomerase; OS = Clostridium liquoris OX=1289519 GN=queA PE=3 SV=1
MQVKDFDYYLPKELIAQCPLEKRDEARLMILDKKSGEIEHKIFKDIIDYLNPGDCLVLNDTRVIPARLIGEKQDTHGKMEFLLLKRIDKDTWETLVKPGKRAKIGTKFSFGNGELTAEIMALGEEGSRIVKFEYDGIFEEVLDRLGQMPLPPYIKEKLEDKEQYQTVYSKEQGSAAAPTAGLHFTEELLQRIKDKGVNLAFLTLHVGLGTFRPVKVDDVLEHHMHSEYYRMTKETAELINKTKEAGKRVIAVGTTSSRTLETIGDESGRVREQSGWTDIFIYPGYKFKIVDALITNFHLPKSTLIMLVSALCGRDKIINAYNIAVKEKYRFFSFGDAMFIK

SEQ ID NO: 65440 - protein, 341 aa, Clostridium ljungdahlii
  REGION 1..341: note = tr|A0A166S9R0|A0A166S9R0_9CLOT S-adenosylmethionine:tRNA ribosyltransferase-isomerase; OS = Clostridium ljungdahlii OX=1538 GN=queA PE=3 SV=1
MKVTDFDFYLPEELIAQHPLMQRDEARLMVLDKETGDIEHKVFKDILDYLNPGDCLVLNDTRVLPARLIGAKEGSGGKMEILLLKRNEDDTWETLVKPGKRAKVGSRFDFGDGELKAEIVSVKEDGNRIVKFEYEGIFEEVLDRLGQMPLPPYIKEKLEDKEMYQTVYSKEEGSAAAPTAGLHFTKELLKKIEDKGVKLAFLTLHVGLGTFRPVKVENIEEHNMHSEYYCMTKETADMINETREKGGSIISVGTTSCRTLETIGDENGRVREQSGWTDIFIYPGYKYKVVDKLITNFHLPQSTLIMLVSALCGREKILNAYNCAVKEKYRFFSFGDAMFLK

SEQ ID NO: 65441 - protein, 344 aa, Clostridium ljungdahlii
  REGION 1..344: note = tr|D8GRQ8|D8GRQ8_CLOLD S-adenosylmethionine:tRNA ribosyltransferase-isomerase OS=Clostridium ljungdahlii (strain ATCC 55383 / DSM 13528 / PETC) OX=748727 GN=queA; PE = 3 SV=1
MKILKVTDFDFYLPEELIAQHPLMQRDEARLMVLDKKTGDIEHKVFKDILDYLNPGDCLVLNDTRVLPARLIGSKEGSGGKMEILLLKRNADDTWETLVKPGKRAKVGSRFDFGDGELKAEIVSVKEDGNRIVKFEYEGIFEEVLDRLGQMPLPPYIKEKLEDKEMYQTVYSKEEGSAAAPTAGLHFTKELLKKIEDKGIKLAFLTLHVGLGTFRPVKVENIEEHNMHSEYYCMTKETADMINETREKGGSIIAVGTTSCRTLETIGDENGKVREQSGWTDIFIYPGYKYKVVDKLITNFHLPQSTLIMLVSALCGREKILNAYNCAVKEKYRFFSFGDAMFLK

SEQ ID NO: 65442 - protein, 341 aa, unidentified
  source 1..341: note = Clostridium luticellarii
  REGION 1..341: note = tr|A0A2T0BLL2|A0A2T0BLL2_9CLOT S-adenosylmethionine:tRNA ribosyltransferase-isomerase; OS = Clostridium luticellarii OX=1691940 GN=queA PE=3 SV=1
MKVTDFDFYLPKELIAQHPLKQRDEARLMVLDKETGKVEHRVFKDIIDYLNPGDCLVLNDTRVLPARLIGKKEGTGGKMEILLLKRNGDNTWETLVKPGKRARVGDRFDFGDGELKAEISQIKEDGNRIVKFEYEGIFEEVLDRLGQMPLPPYIKEKLKDKEMYQTVYSKEEGSAAAPTAGLHFTEDLLQKIEEKGVKLAFLTLHVGIGTFRPVKVENIEDHDMHSEYYRMSRKTADIINGARKNGHSVISVGTTSCRTLETIADENGEVREQSGWTDIFIYPGYKYKIVDKLITNFHLPQSTLIMLVSALCGRENILNAYQEAVKNRYRFFSFGDAMFIK

SEQ ID NO: 65443 - protein, 341 aa, Clostridium magnum
  REGION 1..341: note = tr|A0A162UCQ2|A0A162UCQ2_9CLOT S-adenosylmethionine:tRNA ribosyltransferase-isomerase; OS = Clostridium magnum DSM 2767 OX=1121326 GN=queA PE=3 SV=1
MKVTDFDFNLPEELIAQHPMEKRDEARLMVMNKENGEIEHKVFKDIIDYLEPGDCIVLNDTRVLPARLIGSKEGTGGKIEFLLLKRVDKDTWETLVKPGKRAQIGTRFVFGDGELKAEVIGLGEEGSRIVKFEYEGIFEEVLDKLGQMPLPPYITERLEDKEMYQTVYSREQGSAAAPTAGLHFTKELLEKIEGKGVSIAFLTLHVGLGTFRPVKVENIEEHNMHAEYYCMSKATADIINKTKENGKNVIAVGTTSCRTLETIGDESGKVREQSGWTDIFIFPGYKYKVVDKLITNFHLPQSTLIMLVSALAGKENVMNAYETAVREKYKFFSFGDAMFVK

SEQ ID NO: 65444 - protein, 341 aa, unidentified
  source 1..341: note = Clostridium neonatale
  REGION 1..341: note = tr|A0A2A7MHN4|A0A2A7MHN4_9CLOT S-adenosylmethionine:tRNA ribosyltransferase-isomerase; OS = Clostridium neonatale OX=137838 GN=queA PE=3 SV=1
MDVKDFDFYLPEELIAQHPLEKRDTSRLMVLDKESGEITHRTFHDIIEYLNKGDTLVLNNTRVMPARLIGEKEKTGGKIEFLLLKRIKGDKWECLAKPGKSAREGRRFSFGEGKLKAEVVEVLENGNRIVEFYYKGIFEEVLDSLGEMPLPPYIHEKLEDKERYQTVYSKENGSAAAPTAGLHFTKELLEQIKEKGVNIVYLTLHVGLGTFRPVKVEKIEEHEMHSEFYILSKESADIINETKKRGNKIISVGTTSTRTLETIGDENGFVKEQSGWTNIFIYPGYKFKVVDILITNFHLPESTLIMLVSTLAGKEHTMKAYEEAVKERYRFFSFGDAMFIK

SEQ ID NO: 65445 - protein, 341 aa, Clostridium nexile
  REGION 1..341: note = tr|R6QQ98|R6QQ98_9CLOT S-adenosylmethionine:tRNA ribosyltransferase-isomerase OS=Clostridium nexile CAG:348; OX = 1263069 GN=queA PE=3 SV=1
MRKEDFYFDLPEELIAQDPLEDRSSSRLLVLDKETGKVEHHVFREIIDYLQEGDCLVINDTKVIPARLIGSKIGTDAKIEVLLLKRKENDVWETLVKPGKKAKVGTRISFGDGLLVGEVVDIVEEGNRLIHFEYEGIFEEILDQLGQMPLPPYITHQLEDKNRYQTVYAKHSGSAAAPTAGLHFTPELLKEIEEKGVQIARVTLHVGLGTFRPVKVDNILEHHMHSEFYQIDEEAAEKINRAKESGHRVICVGTTSCRTIESAADKNGKLHATNGWTEIFIYPGYEFKVLDCLITNFHLPESTLVMLVSALAGREQVLSAYEEAVKEKYRFFSFGDAMFIK

SEQ ID NO: 65446 - protein, 341 aa, Clostridium novyi
  REGION 1..341: note = tr|A0A386YP90|A0A386YP90_CLONO S-adenosylmethionine:tRNA ribosyltransferase-isomerase; OS = Clostridium novyi OX=1542 GN=queA PE=3 SV=1
MKVKDFDFYLPEELIAQHPMEKRDESRLMVVDRKSGHIEHKIFKDILGYFNEGDCLVLNNTRVLPARLIGEKENTGGKIEFLLLKRIEGDKWETLVKPGKKAKIGARFVFGSGELKAEVKGMGEDGSRIIEFEYEGIFEEVLDKLGQMPLPPYITEKLDDKERYQTVYSKEKGSAAAPTAGLHFTKELLKEIENKGVKIAFVTLHVGLGTFRPVKVEDIEEHHMHSEYYTMSKETADIINKTKENGGKVIAVGTTSCRTLETIGDENGKVKETSGWTDIFMYPGYKFKIVDRLITNFHLPQSTLLMLVSAFSSRENIMNAYKEAVDEKYRFFSFGDAMFLK

SEQ ID NO: 65447 - protein, 341 aa, Clostridium novyi
  REGION 1..341: note = tr|A0A072YIM4|A0A072YIM4_CLONO S-adenosylmethionine:tRNA ribosyltransferase-isomerase; OS = Clostridium novyi B str. NCTC 9691 OX=1443122 GN=queA; PE = 3 SV=1
MKVKDFDFYLPEELIAQHPMEKRDESRLMVVDRISGHIEHKIFKDILGYFNEGDCLVLNNTRVLPARLIGEKENTGGKIEFLLLKRIEGDKWETLVKPGKKAKIGARFVFGLGELKAEVKGMGEDGSRIIEFEYEGIFEEVLDKLGQMPLPPYITEKLDDKERYQTVYSKEKGSAAAPTAGLHFTKELLKDIENKGVKIAFVTLHVGLGTFRPVKVEDIEEHHMHSEYYTMSKETADIINKTKENGGKVIAVGTTSCRTLETIGDENGKVKETSGWTDIFMYPGYKFKIVDRLITNFHLPQSTLLMLVSAFSRRENIMNAYKEAVDEKYRFFSFGDAMFLK

SEQ ID NO: 65448 - protein, 348 aa, unidentified
  source 1..348: note = Clostridium oryzae
  REGION 1..348: note = tr|A0A1V4I4H9|A0A1V4I4H9_9CLOT S-adenosylmethionine:tRNA ribosyltransferase-isomerase; OS = Clostridium oryzae OX=1450648 GN=queA_3 PE=3 SV=1
MKLETFKYDLPEQLIAQQTIYPKHCCRMMYANPKTEEIKDFHFYDFNNFIDSNDVIVVNDTRVLSAVLRGKRQNGSQIEIKMVSRKENNVWDCVVESRKGVEIGERLYFGENSELVGKVINENWCETGWLIKFSINNGSVEDEIKKIGQYFLPLHLPQKLNDNEDYQTVYSKVEGSLQPPTAGLHFTDKYLNFLSEKGIKIIKITQHVGRLDKRLENDNIESHQMYEEHYDVSEEAASEINQARKNGGRIIGIGTTVTRTLETVVDDDGIIHSGSGWTKLYIYPGFKFKAIDALLTNFQSPGITTLILACAFGGTEFTLNAYREAVRRNYRFLEFGDCIFFENTKSHR

SEQ ID NO: 65449 - protein, 344 aa, unidentified
  source 1..344: note = Clostridium oryzae
  REGION 1..344: note = tr|A0A1V4I5C4|A0A1V4I5C4_9CLOT S-adenosylmethionine:tRNA ribosyltransferase-isomerase; OS = Clostridium oryzae OX=1450648 GN=queA_2 PE=3 SV=1
MKIDNFNFDLPETLVAKKLCNPRDGARMAVLNRKNNEIVDDYFYNIINYFEEGDLFVINNTKVFPCVLRGRKENGGLIEIKLGSRKDEYIWDCIVESARELKTGEKLFFGDNNEIIANVIERNSFDTGYLMKFDSETNIEEQIEKIGSYFFPIYLPQKIDNPEDYQTIYASEWGSMQPPVAGMHFTDELFKKAKDKNINVCNITLHIGRLDKLALQNGKMEIEEHKMYKEHYILDDDTAKLINKTKENGKRIVAIGTTAVRTLESIADEKGYVHGGEGWTDLYIYPGYKFKIIDALLSNLQPPMTTNLMLACAFGGREQVMNLYEHAVRDNYKFLEYGDCALYI

SEQ ID NO: 65450 - protein, 341 aa, Clostridium paraputrificum
  REGION 1..341: note = tr|A0A174RPB6|A0A174RPB6_9CLOT S-adenosylmethionine:tRNA ribosyltransferase-isomerase; OS = Clostridium paraputrificum OX=29363 GN=queA PE=3 SV=1
MKVSDFDFYLPEELIAQHPLEKRDTSRLMVLNKETGEIEHKRFYDIIDYLDKGDTLVLNNTRVLPARLIGEKEHTGGKIEFLLLKRLEGDKWECLAKPGKSAREGRRFTFGDGKLKAEVVEVLENGNRIVQFFYEGIFEEVLDSLGEMPLPPYIHERLEDKERYQTVYSKEEGSAAAPTAGLHFTEELLQKIKDKGINIAYVTLHVGLGTFRPVKVEDIESHDMHSEFYVLDEENAQIINDTKKRGNRVISVGTTSTRTIETIADDNGLVKAQTGWTNIFIYPGYKFKTIDNLITNFHLPESTLIMLVSALAGKEHVLNAYNEAVKEKYRFFSFGDAMFIK

SEQ ID NO: 65451 - protein, 341 aa, Clostridium pasteurianum
  REGION 1..341: note = tr|R4K650|R4K650_CLOPA S-adenosylmethionine:tRNA ribosyltransferase-isomerase OS=Clostridium pasteurianum BC1 OX=86416 GN=queA PE=3 SV=1
MQLKDFDFYLPEELIAQHPAEKRDECRLMVLSKDKGHIENKVFKDIIDYLNPGDCLVLNDTRVIPARLIGNKESSGGKIELLLLKRVNKDSWETLVKPGKKAKVGAKFEFGDGLLTAEVKSIAEEGNRIIEFQYDGIFEEILDKLGQMPLPPYITEKLEDKEQYQTVYSKNEGSAAAPTAGLHFTEELLDKIREKGIKTVFLTLHVGLGTFRPVKVENIEQHHMHSEFYILSKESADIINDVKDKGGRVISVGTTSTRTLETIGDENGRVKESTGWTDIFIYPGYKYKVVDGLITNFHLPESTLIMLVSALSNREIIMNAYETAVKERYRFFSFGDAMFIR

SEQ ID NO: 65452 - protein, 341 aa, Clostridium pasteurianum
  REGION 1..341: note = tr|A0A1D9N4J8|A0A1D9N4J8_CLOPA S-adenosylmethionine:tRNA ribosyltransferase-isomerase; OS = Clostridium pasteurianum OX=1501 GN=queA PE=3 SV=1
MQLKDFDFDLPEELIAQHPSEKRDECRLMVLNKQTGEIEHKIFKDIIEYLDPKDCLVLNDTRVIPARLIGSKEDSGGKIELLLLKRLNKNTWETLVKPGKKAKVGAKFEFGEGMLKAQVKSIAEEGNRIIEFQYSGIFEEILDKLGQMPLPPYITERLKDREQYQTVYSKNEGSAAAPTAGLHFTEELLDKIRGKGIKIVFLTLHVGLGTFRPVKVDNIQEHHMHSEFYQLSKESADIINKTKEEGGRIISVGTTSTRTLETIGDEQGKVKEASGWTDIFIYPGYKYKVVDGLITNFHLPESTLIMLVSALSNREIIMKAYNTAVREKYRFFSFGDAMFIR

SEQ ID NO: 65453 - protein, 341 aa, Clostridium perfringens
  REGION 1..341: note = sp|Q0TP14|QUEA_CLOP1 S-adenosylmethionine:tRNA ribosyltransferase-isomerase OS=Clostridium perfringens (strain ATCC 13124 / DSM 756 / JCM 1290 / NCIMB 6125 / NCTC 82 37 / Type A) OX=195103 GN=queA PE=3 SV=1
MKVSDFYFELPEELIAQYPLEKRDSSRLMVLDKKTGEIEHRKFHDILEYLNEGDTLVLNNTRVLPARLIGEKEETGGKIEFLLLKRIEGDKWECLAKPGRKAKVGTVFTFGEGKLKAIVREIGEEGNRIIEFKYDGIFEQVLDELGQMPLPPYIHEKLEDKERYQTVYSKEKGSAAAPTAGLHFTEELLKEIKDKGVNIAYLTLHVGLGTFRPVKVDDVNNHVMHSEYYHLDKENAELINKTKEAGKRVIAVGTTSSRTLETIGDENGRVREQSGWTDIFIYPGYKFKIVDNLITNFHLPESTLIMLVSALAGQDNIMNAYNTAVKEKYRFFSFGDSMFIK

SEQ ID NO: 65454 - protein, 341 aa, Clostridium perfringens
  REGION 1..341: note = sp|Q0SRN4|QUEA_CLOPS S-adenosylmethionine:tRNA ribosyltransferase-isomerase OS=Clostridium perfringens (strain SM101 / Type A) OX=289380 GN=queA PE=3 SV=1
MKVSDFYFELPEELIAQYPLEKRDSSRLMVLDKKTGEIEHRKFHDILEYLNEGDTLVLNNTRVLPARLIGEKEETGGKIEFLLLKRIEGDKWECLAKPGRKAKVGTVFTFGEGKLKAIVREIGEEGNRIIEFKYDGIFEQVLDELGQMPLPPYIHEKLEDKERYQTVYSKEKGSAAAPTAGLHFTEDLLKEIKDKGVNIAYLTLHVGLGTFRPVKVDDVNNHVMHSEYYHLDKENAELINKTKEAGKRVIAVGTTSSRTLETIGDENGRVREQSGWTDIFIYPGYKFKIVDNLITNFHLPESTLIMLVSALAGQDNIMNAYNTAVKEKYRFFSFGDSMFIK

SEQ ID NO: 65455 - protein, 341 aa, Clostridium puniceum
  REGION 1..341: note = tr|A0A1S8TDY7|A0A1S8TDY7_9CLOT S-adenosylmethionine:tRNA ribosyltransferase-isomerase; OS = Clostridium puniceum OX=29367 GN=queA PE=3 SV=1
MNVKDFDFYLPEELIAQHPLEKRDSSKLMVLDKKTGDISHKRFHDIVEYLKEGDTLVLNNTRVMPARLIGEKEETGGKIEFLLLKRVEKDKWECLAKPGKSARLGRKFTFGDGKLKAEVVEVKDNGNRIVEFFYDGIFEEVLDTLGEMPLPPYIHERLEDKERYQTVYSKENGSAAAPTAGLHFTKELLSEIKVKGINIVYLTLHVGLGTFRPVKVESLEEHEMHSEFYMLSKESADIINETKKRGNYVISVGTTSTRTLETIGDENGLVKEQSGWTNIFIYPGYNFKVVDKLITNFHLPESTLIMLVSTLAGRDNVMNAYKEAVNERYRFFSFGDAMFIN

SEQ ID NO: 65456 - protein, 341 aa, Clostridium putrefaciens
  REGION 1..341: note = tr|A0A381J802|A0A381J802_9CLOT S-adenosylmethionine:tRNA ribosyltransferase-isomerase; OS = Clostridium putrefaciens OX=99675 GN=queA PE=3 SV=1
MKVSDFDFDLPEGLIAQYPLKDRAKSRIMVLDKYTGEIEHKIFYDVLDYLNKGDTLVLNNTRVIPARIIGEKQDSGGKIEFLLLKRTEGDSWEALAKPGKRAKVGAVFNFGDGRLRAEVTGVKEDGNRIIKFCYEGIFEEVLDELGQMPLPPYIKATLEDKERYQTVYSKESGSAAAPTAGLHFTEELIKAIEEKGVNIAYLTLHVGLGTFRPVKVETIEEHDMHSEYYHIDKENADIINRTKESGGKVIAVGTTSCRTLETLGKDGFPLKESSGWTNIFIYPGYEFKVVDRLITNFHLPESTLIMLVSALAKKENVIKAYELAIEEKYRFFSFGDAMFIK

SEQ ID NO: 65457 - protein, 341 aa, unidentified
  source 1..341: note = Clostridium ragsdalei
  REGION 1..341: note = tr|A0A1A6AQR8|A0A1A6AQR8_9CLOT S-adenosylmethionine:tRNA ribosyltransferase-isomerase; OS = Clostridium ragsdalei P11 OX=1353534 GN=queA PE=3 SV=1
MKVTDFDFYLPEELIAQHPLMQRDEARLMVLDKKTGDIEHKVFKDILDYLNPGDCLVLNDTRVLPARLIGAKEGSGGKMEILLLKRNEDDTWETLVKPGKRAKVGSRFGFGDGELKAEIVSVKEDGNRIVKFEYEGIFEEVLDRLGQMPLPPYIKEKLEDKEMYQTVYSKEEGSAAAPTAGLHFTKELLKKIEDRGVKLAFLTLHVGLGTFRPVKVENIEEHNMHSEYYCMTKETADMINGTREKGGSIIAVGTTSCRTLETIGDENGRVREQSGWTDIFIYPGYKYKVVDKLITNFHLPESTLIMLVSALCGREKILNAYNCAVKEKYRFFSFGDAMFLK

SEQ ID NO: 65458 - protein, 341 aa, Clostridium roseum
  REGION 1..341: note = tr|A0A1S8MHX8|A0A1S8MHX8_9CLOT S-adenosylmethionine:tRNA ribosyltransferase-isomerase; OS = Clostridium roseum OX=84029 GN=queA PE=3 SV=1
MQLEDFDYYLPEELIAQHPCDKRDECRLMVMNKKSGEVEHKIFKDIIDYLNTGDCLVLNDTRVLPARLIGNKIETGGKMEFLLLKRIDKDTWETLVKPGKRAKIGAKFEFGNGILKAEVKSIGEDGNRIVEFQYDGIFEEILDELGQMPLPPYITEELENKEEYQTVYSKNNGSAAAPTAGLHFTNELLNKIRAKGIKTVFLTLHVGLGTFRPVKVENVESHHMHSEFYMLSKESADIINETKKNGGRVISVGTTSTRTLETIADEDGKVREQSGWTDIYIYPGYKYKIVDGLITNFHLPKSTLVMLVSALSSRENILNAYKNAVENKYRFFSFGDAMFIK

SEQ ID NO: 65459 - protein, 341 aa, Clostridium saccharobutylicum
  REGION 1..341: note = tr|A0A1S8MZA0|A0A1S8MZA0_CLOSA S-adenosylmethionine:tRNA ribosyltransferase-isomerase; OS = Clostridium saccharobutylicum OX=169679 GN=queA PE=3; SV = 1
MNVKDFDFYLPEELIAQHPLEKRDTSRLMVLDKESGEIKHRVFHDVVEYLNEGDTLVLNNTRVMPARLIGEKEETGGKIEFLLLKRIEGDKWECLAKPGKSARVGRRFTFGEGKLKAEVIEVKEDGNRIVEFYYDGIFEEVLDSLGEMPLPPYIHERLDDRERYQTVYSKEKGSAAAPTAGLHFTKELLKQIQDKGVNVVYLTLHVGLGTFRPVKVENIEEHDMHSEYYHLSRETAEIINETKRRGNKVISVGTTSTRTLETIGDENGFVKEQSGWTNIFIYPGYKFKVVDRLITNFHLPESTLIMLVSTLAGRDHVLNAYNEAVKEKYRFFSFGDAMFIK

SEQ ID NO: 65460 - protein, 341 aa, Clostridium saccharobutylicum
  REGION 1..341: note = tr|U5MTC0|U5MTC0_CLOSA S-adenosylmethionine:tRNA ribosyltransferase-isomerase OS=Clostridium saccharobutylicum DSM 13864 OX=1345695 GN=queA PE=3 SV=1
MNVKDFDFYLPEELIAQHPLEKRDTSRLMVLDKESGEIKHRVFHDVVEYLNEGDTLVLNNTRVMPARLIGEKEETGGKIEFLLLKRIEGDKWECLAKPGKSARVGRRFTFGEGKLKAEVIEVKEDGNRIVEFYYDGIFEEVLDSLGEMPLPPYIHERLDDRERYQTVYSKEKGSAAAPTAGLHFTKELLKQIQDKGVNVVYLTLHVGLGTFRPVKVENIEEHDMHSEYYHLSKETAEIINETKRRGNKVISVGTTSTRTLETIGDENGFVKEQSGWTNIFIYPGYKFKVVDRLITNFHLPESTLIMLVSTLAGRDHVLNAYNEAVKEKYRFFSFGDAMFIK

SEQ ID NO: 65461 - protein, 349 aa, Clostridium saccharolyticum
  REGION 1..349: note = tr|D9R600|D9R600_CLOSW S-adenosylmethionine:tRNA ribosyltransferase-isomerase OS=Clostridium saccharolyticum (strain ATCC 35040 / DSM 2544 / NRCC 2533 / WM1) OX=6101 30 GN=queA PE=3 SV=1
MNVRDFNFNLPQELIAQDPLEDRSASRLLVLDKHTGEIQHRHFRDILSYLRKGDCLVINDTKVIPARLFGVKEGTEAKIEILLLKRRENDIWETLVKPGKKAKMGTVISFGEGLLKGTVIDVVEEGNRLIQFSYEGIFEEILDRLGQMPLPPYITHQLKDKNRYQTVYAKHEGSAAAPTAGLHFTKELLKEIEDMGVSIAHVTLHVGLGTFRPVKVDEIEAHHMHSEFYMVEEEEARKVNDAKKNGGRIVCVGTTSCRTVESASGSDGMLRAGSGWTEIFIYPGYRFKLLDCLITNFHLPESTLVMLVSALAGRDHVLHAYEEAIKERYRFFSFGDAMFLTDLQDGQTS

SEQ ID NO: 65462 - protein, 341 aa, Clostridium saccharoperbutylacetonicum
  REGION 1..341: note = tr|M1MJ30|M1MJ30_9CLOT S-adenosylmethionine:tRNA ribosyltransferase-isomerase OS=Clostridium saccharoperbutylacetonicum N1-4(HMT) OX=931276 GN=queA; PE = 3 SV=1
MNVKDFDFYLPEELIAQHPLEERDSSRLIVLNKKTGEINHKKFRDIIGYLNEGDTLVLNNTRVMPARLIGEKEETGGKIEFLLLKRVEKDQWECLAKPGKSARVGRRFTFGEGKLKAEVIEVKDNGNRIVEFYYDGIFEEVLDSLGEMPLPPYIHERLDDRERYQTVYSKENGSAAAPTAGLHFTKELLEEIKAKGVNVVYLTLHVGLGTFRPVKVDTIEDHEMHSEFYMLSKETADIINKTKKRGNAVISVGTTSTRTLETIGDENGFVKEQSGWTNIFIYPGYKFKVVDKLITNFHLPESTLIMLVSTLAGKDNVMNAYKEAVNERYRFFSFGDAMFIN

SEQ ID NO: 65463 - protein, 342 aa, Clostridium sartagoforme
  REGION 1..342: note = tr|A0A4S2DQ13|A0A4S2DQ13_9CLOT S-adenosylmethionine:tRNA ribosyltransferase-isomerase; OS = Clostridium sartagoforme OX=84031 GN=queA PE=3 SV=1
MKVSDFDFYLPEELIAQHPLEKRDASRLMVLDKKTGSIEHKSFHDVIDYLNEGDTLVLNNTRVMPARLIGEKENTGGKIEFLLLKRIEGDKWECLAKPGKRAKIGQRFTFGEGKLKCEVVDIVEEGNRIIEFSYDGIFEQVLDELGEMPLPPYITERLEDKERYQTVYSKEKGSAAAPTAGLHFTEELLKEIKAKGINIAYLTLHVGLGTFRPVKVDDINEHIMHSEFYHLDKENADIINETKKRGNKVIAVGTTSTRTLETIGDENGFVREQSGWTDIFLYPGYKYKVIDELITNFHLPESTLIMLVSALAGKENVMNAYNEAVKERYRFFSFGDSMLIKE

SEQ ID NO: 65464 - protein, 342 aa, Clostridium sartagoforme
  REGION 1..342: note = tr|R9C0E0|R9C0E0_9CLOT S-adenosylmethionine:tRNA ribosyltransferase-isomerase OS=Clostridium sartagoforme AAU1 OX=1202534 GN=queA PE=3 SV=1
MKVSDFDFYLPEELIAQHPLEKRDSSRLMILDKKTGVIKHKYFHDVIEYLNEGDTLVLNNTRVMPARLIGEKEETGGKIEFLLLKRIQGDKWECLAKPGKRAKIGQKFTFGEGKLTCTVVDIVEEGNRIIEFSYDGIFEQVLDELGEMPLPPYITEKLQDKERYQTVYSKEKGSAAAPTAGLHFTEELLQQIRAKGVNIAYLTLHVGLGTFRPVKVEDINEHIMHSEYYVLDRENADIINKTKKNGNKIIAVGTTSTRTLETIGDENGFVREQSGWTDIFIYPGYKYKVIDELITNFHLPESTLIMLVSALAGKENVMNAYNEAVKEKYRFFSFGDSMLIKE

SEQ ID NO: 65465 - protein, 341 aa, Clostridium scatologenes
  REGION 1..341: note = tr|A0A0E3MBP8|A0A0E3MBP8_CLOSL S-adenosylmethionine:tRNA ribosyltransferase-isomerase; OS = Clostridium scatologenes OX=1548 GN=queA PE=3 SV=1
MKVTDFDFYLPEQLIAQCPLEKRDEARLMLLDKNTGEIEHKIFKDIINYLEPGDCLVLNDTRVLPARLIGSKENTGGKIEFLLLKRIDKDKWETLVKPGKRAQVGTRFVFGDGELKAEVVSVEEDGNRIVQFEYEGIFEEVLDKLGQMPLPPYIKEKLEDKEMYQTVYSKEQGSAAAPTAGLHFTEELLKKIEEKGVNIAFLTLHVGLGTFRPVKVENIQDHNMHSEYYTMSKETADIINKSKKSGKKVIAVGTTSCRTLETIGDDKGEVREQSGWTDIFIYPGYKYKVVDRLITNFHLPESTLIMLVSALAGREKIMNAYNTAVKERYRFFSFGDAMFIK

SEQ ID NO: 65466 - protein, 343 aa, Clostridium scindens
  REGION 1..343: note = tr|B0NJ87|B0NJ87_CLOS5 S-adenosylmethionine:tRNA ribosyltransferase-isomerase OS=Clostridium scindens (strain ATCC 35704 / DSM 5676 / VPI 13733 / 19) OX=411468; GN = qu eA PE=3 SV=1
MKRQDFYYELPEELIAQDPLEDRSSSRLLVLDKESGAVSHHVFKEITDYLHEGDCLVINDTKVIPARLIGSKVGTEAKIEILLLKRKENNIWETLVKPGKKAKIGTKISFGEGLLVGEVVDIVDEGNRLIQFTYEGIFEEILDKLGQMPLPPYITHQLEDKNRYQTVYATHTGSAAAPTAGLHFTPELLEEIERKGIDIARITLHVGLGTFRPVKVDEITEHHMHSEFFQIDEEAAMKINRAKDSGKRVICVGTTSCRTIESAADETGHLKACSGWTEIFIYPGYQFKILDCLITNFHLPESTLIMLVSALAGREHVLAAYEEAVKERYRFFSFGDAMLIGEI

SEQ ID NO: 65467 - protein, 341 aa, Clostridium septicum
  REGION 1..341: note = tr|A0A386PJP6|A0A386PJP6_CLOSE S-adenosylmethionine:tRNA ribosyltransferase-isomerase; OS = Clostridium septicum OX=1504 GN=queA PE=3 SV=1
MKVSDFDFYLPEELIAQHPLERRDSSRLMVLDRNTGDVEHKHFHDIIEYLNEGDTIVLNNTRVMPARLIGEKEGTGGKIEFLLLKRIEGDKWECLAKPGKKAKIGQKFVFGSGKLNCEVIDIIEEGNRIIEFSYEGIFEQVLDELGEMPLPPYITERLEDRERYQTVYSKEKGSAAAPTAGLHFTEELLNEIKAKGINIAYLTLHVGLGTFRPVKAETIDEHVMHSEYYSLDEKDAEIINDTKIRGNRVISVGTTSTRTLETIANEDGLVRPQSGWTNIFIYPGYKFKVVDNLITNFHLPESTLIMLVSALAGKENVMNAYKEAVEEKYRFFSFGDSMFIK

SEQ ID NO: 65468 - protein, 341 aa, Clostridium sp.
  REGION 1..341: note = tr|A0A099S5R7|A0A099S5R7_9CLOT S-adenosylmethionine:tRNA ribosyltransferase-isomerase; OS = Clostridium sp. HMP27 OX=1487921 GN=queA PE=3 SV=1
MQVKDFDYYLPEELIAQHPTAKRDEARLMILDKATGELEHKVFKDIIDYLKPGDCLVLNDTRVLPARLIGEKEETHGKIEFLLLKRTDKDTWETLVKPGKRAKIGSKFVFGNGELNAEVIGLGEEGSRIVRFQYEGIFEEVLDRLGQMPLPPYITETLEDKEMYQTVYSKEQGSAAAPTAGLHFTEELLEDIKNKGIKLAFLTLHVGLGTFRPVKVDEIENHTMHSEYYSMTKETAEIINSTKEAGGRVIAVGTTSNRTLETIADAYGRVKEQSGWTDIFIYPGYKFKVVDALITNFHLPQSTLLMLISALAGRDKIMNAYETAVKEKYRFFSFGDAMFIK

SEQ ID NO: 65469 - protein, 344 aa, Clostridium sp.
  REGION 1..344: note = tr|R6LZQ5|R6LZQ5_9CLOT S-adenosylmethionine:tRNA ribosyltransferase-isomerase OS=Clostridium sp. CAG:302; OX = 1262793 GN=queA PE=3 SV=1
MKTDDFDYYLPEELIAQVPLEHREESRLLVMDRDTGKLEDKKFYNIVDYLHKGDVLVLNDTKVMPARLIGEKEDTGAIIEVLLLKNIDGNNWECLVKPAKRIHKDTIVSFGNGLLKAKCTGVNDEGIRNFEFIYDGIFYEILDKLGTMPLPPYIKTKLDDQSRYQTVYAKNIGSAAAPTAGLHFTKELLKQIEDIGVTVCYITLHVGLGTFRPVNVEDVTKHKMHSEFYSMNKVAADILNKAKEENRCIVAVGTTTTRTLETIMSKYNTFKECNGWTDIFIYPGYEFKGIDSLITNFHLPKSTLIMLVSALAGKENIMNAYKHAVEEKYRFFSFGDAMFIKKNK

SEQ ID NO: 65470 - protein, 341 aa, Clostridium sporogenes
  REGION 1..341: note = tr|A0A1V9IRT1|A0A1V9IRT1_CLOSG S-adenosylmethionine:tRNA ribosyltransferase-isomerase; OS = Clostridium sporogenes OX=1509 GN=queA PE=3 SV=1
MKVKDFDFYLPEELIAQHPMEKRDEARLLVLDKETGEIEHKIFKDILDYLTPNDCLVLNNTRVLPARLIGSKEETGGKMEFLLLKRKEKDVWETLVKPGKRAQIGARFIFGNGELKAEVIGMGEEGSRIVKFYYEGIFEEILDQLGQMPLPPYIKEKLDDKEMYQTVYSKEEGSAAAPTAGLHFTEELLKKIREKGVKLAFLTLHVGLGTFRPVKVEDIQEHVMHSEYYKMDKETAEIINDTKENGGRVIAVGTTSCRTLETIGDIEGKVREQSGWTDIFIYPGYKYKVVDALITNFHLPQSTLLMLVSALAGRDNIMNAYNVAVEKEYRFFSFGDAMFIK

SEQ ID NO: 65471 - protein, 341 aa, Clostridium sporogenes
  REGION 1..341: note = tr|A0A1V9I7E3|A0A1V9I7E3_CLOSG S-adenosylmethionine:tRNA ribosyltransferase-isomerase; OS = Clostridium sporogenes OX=1509 GN=queA PE=3 SV=1
MKVKDFDFYLPEELIAQHPMEKRDEARLLVLDKKTGEIEHKIFKDILDYLTPNDCLVLNNTRVLPARLIGSKEETGGKMEFLLLKRTGNDEWETLVKPGKRAQIGAKFIFGNGELKAEVIAMGEEGSRIVKFYYEGIFEEILDQLGQMPLPPYIKEKLDDKEMYQTVYSKEEGSAAAPTAGLHFTEELLEKIKEKGVKLAFLTLHVGLGTFRPVKVEEIQEHIMHSEYYKMDKETAKIINTTREKGGRVIAVGTTSCRTLETIGDIEGKVKEQSGWTDIFIYPGYKYKVVDALITNFHLPQSTLLMLVSALAGRDNIMNAYNMAVEKEYRFFSFGDAMFIK

SEQ ID NO: 65472 - protein, 342 aa, Clostridium sulfidigenes
  REGION 1..342: note = tr|A0A084J951|A0A084J951_9CLOT S-adenosylmethionine:tRNA ribosyltransferase-isomerase; OS = Clostridium sulfidigenes OX=318464 GN=queA PE=3 SV=1
MKVKDFYFDLPKELIAQHPLEKRDESRLMVLNKKSGEVEHKVFKDIIEYLNPGDCLVLNDTRVMPARLYGAKEGSGGKMEFLLLNRHEDDIWETLVKPGKRGKVGAKFVFGNGELKAEVVEVLDNGNRKVKFYYDGIFEEVLDRLGEMPLPPYIEEKLEDRERYQTVYSKEVGSAAAPTAGLHFTDELLQAIKKKGINIAFVTLHVGLGTFRPVKAEEIQDHEMHSEYYILDKENAEIINNAKRSGKRVIAVGTTSNRTLESIANEEGQVKEQSGYTSIFIYPGYKFKIVDAIITNFHLPESTLIMLISAFSTREIVMNAYKIAVENKYRFFSFGDAMFIHE

SEQ ID NO: 65473 - protein, 347 aa, Clostridium symbiosum; identical to SEQ ID NO: 62542
  REGION 1..347: note = tr|A0A413JJV4|A0A413JJV4_CLOSY S-adenosylmethionine:tRNA ribosyltransferase-isomerase; OS = Clostridium symbiosum OX=1512 GN=queA PE=3 SV=1

SEQ ID NO: 65474 - protein, 347 aa, Clostridium symbiosum
  REGION 1..347: note = tr|A0A174FJ02|A0A174FJ02_CLOSY S-adenosylmethionine:tRNA ribosyltransferase-isomerase; OS = Clostridium symbiosum OX=1512 GN=queA PE=3 SV=1
MDVKDFYYDLPEELIAQDPLEDRSSSRLLVLNKDTGEIQHKVFRDILSYLRKGDCLVINDTKVIPARLIGSKEGTDAKIEVLLLKRRENDIWETLVKPGKKAKIGTVINFGEGLLKGTVVDVVEEGNRLIQFSYKGIFEEILDELGQMPLPPYITHQLQDKNRYQTVYAKHEGSAAAPTAGLHFTNELLGKIAEKGIEIAHVTLHVGLGTFRPVKVDNVLEHHMHSEFYIVEEEEARKINDTKKKGGRVICVGTTSCRTLESAAGEDGILKVGSGWTDIFIYPGYRFKILDCLITNFHLPESTLVMLVSALAGREHVLKAYEEAIKERYRFFSFGDAMFIASKPEQD

SEQ ID NO: 65475 - protein, 341 aa, unidentified
  source 1..341: note = Clostridium taeniosporum
  REGION 1..341: note = tr|A0A1D7XIA3|A0A1D7XIA3_9CLOT S-adenosylmethionine:tRNA ribosyltransferase-isomerase; OS = Clostridium taeniosporum OX=394958 GN=queA PE=3 SV=1
MNVKDFDFYLPEELIAQHPLEKRDTSRLMVLDKETGEIYHKKFYDIIDYLNEGDTLVLNNTRVMPARLIGEKEETGGKIEFLLLKRVEKDRWECLAKPGKSARVGRKFTFGEGKLKAEVVEVKENGNRIVEFYYDGIFEEVLDSLGEMPLPPYIHEKLEDKERYQTVYSKENGSAAAPTAGLHFTEELLQKIKDKGINIAYVTLHVGLGTFRPVKVEIIEEHEMHSEYYHLSKEDADIINETKKRGNKVISVGTTSTRTLETIADEKGNVKETSGWTSIFIYPGYKFKIVDRLITNFHLPESTLIMLVSTLAGKEHVMKAYEEAVKERYRFFSFGDAMFIK

SEQ ID NO: 65476 - protein, 341 aa, Clostridium tagluense
  REGION 1..341: note = tr|A0A401UJB8|A0A401UJB8_9CLOT S-adenosylmethionine:tRNA ribosyltransferase-isomerase; OS = Clostridium tagluense OX=360422 GN=queA PE=3 SV=1
MKVKDFNFDLPQELIAQHPLQKRDESRLMVINKTSSEIQQKKFKDIIDYLNPEDCLVLNDTRVLPARLLGVKEGTGGKMEFLLLKRIDINHWETLVKPGKKAKIGTKFIFGNGELKAEVISISEGGSRIVEFEFEGIFEEVLDKLGEMPLPPYITEKLEDKERYQTVFSKQIGSAAAPTAGLHFTEDLLSKIKAKGVKIAFVTLHIGLGTFRPVKAETVEEHEMHSEYYVLNKQTADVINETKENGGRIIAVGTTSNRTLESIANENGRVEEKSGWTDIFIYPGYKFKIVDALITNFHLPESTLIMLVSAFAGQNLVMGAYDMAVKEKYRFFSFGDAMFLY

SEQ ID NO: 65477 - protein, 341 aa, Clostridium tepidiprofundi
  REGION 1..341: note = tr|A0A151B8B0|A0A151B8B0_9CLOT S-adenosylmethionine:tRNA ribosyltransferase-isomerase; OS = Clostridium tepidiprofundi DSM 19306 OX=1121338 GN=queA; PE = 3 SV=1
MKVKDFDFDLPQEYIAQHPIEKRDESRLLVLDKKTGNIEHRKFKNIIEYLRDGDCLILNNTKVLPARLFGIKENTGGKMEFLLLKRVSEDTWETLVKPGKRAKIGSRFVFGDGELKAEIMGMGEDGSRIVKFEYEGIFEQVLDQLGQMPLPPYITEQLEDKDRYQTVYSKELGSAAAPTAGLHFTQELLKKIEEKGVKIGYVTLHVGLGTFRPVKSDTIEEHHMHSEYYEMSKETAELINRTKENGGRVIAVGTTSCRTLESIADESGNVEAKSGWTDIFIYPGYKFKVLDALITNFHLPQSTLIMLVSALAGKEKVMNAYKIAVEEKYRFFSFGDAMFIK

SEQ ID NO: 65478 - protein, 341 aa, unidentified
  source 1..341: note = Clostridium tepidum
  REGION 1..341: note = tr|A0A1S9IA06|A0A1S9IA06_9CLOT S-adenosylmethionine:tRNA ribosyltransferase-isomerase; OS = Clostridium tepidum OX=1962263 GN=queA PE=3 SV=1
MKVKDFDFYLPEELIAQHPMAKRDEARLLVLNKETGEIEHKIFKDILDYLKPNDCLVLNDTRVLPARLIGSKAETGGKMEFLLLKRKEKDVWETLVKPGKRAQIGTKFIFGNGELKAEVIAMGEEGSRIVKFYYEGIFEEILDQLGQMPLPPYIKEKLDDKEMYQTVYSKEQGSAAAPTAGLHFTEELLEKIKDKGIKLAFLTLHVGLGTFRPVKVEDIQDHIMHSEYYKMDKETAEIINSTKEKGGRVIAVGTTSCRTLETIGDEEGKVKEQSGWTDIFIYPGYKYKVVDSLITNFHLPQSTLLMLVSALAGRNNIMNAYNTAVEREYRFFSFGDAMFIK

SEQ ID NO: 65479 - protein, 341 aa, Clostridium tetani
  REGION 1..341: note = sp|Q891Z9|QUEA_CLOTE S-adenosylmethionine:tRNA ribosyltransferase-isomerase OS=Clostridium tetani (strain Massachusetts / E88) OX=212717 GN=queA PE=3 SV=2
MKAKDFDYYLPEELIAQHPLEKRDECRLMVLDKETGHVEHKVFKDILDYLNKGDCLVLNDTRVMPARLIGEKEETKGKMEFLLLKRTDKDTWETLVKPGKRAKIGSRFIFGQGELKAEVIGMAEEGSRIVKFEYDGIFEEVLDRLGQMPLPPYITEKLEDKEKYQTVYSKESGSAAAPTAGLHFTEELLNKIKEKGIKIVFLTLHVGLGTFRPVKEGEIENHIMHSEYYCISKETADIINTTKEAGGRVIAVGTTSCRTLETLGSKHGKIIEDSGWTNIFMYPGYEFKVTDALITNFHLPQSTLIMLVSALSERERVLNAYEIAVREKYRFFSFGDAMFVK

SEQ ID NO: 65480 - protein, 341 aa, Clostridium tetani
  REGION 1..341: note = tr|A0A4Q0VBY2|A0A4Q0VBY2_CLOTA S-adenosylmethionine:tRNA ribosyltransferase-isomerase; OS = Clostridium tetani OX=1513 GN=queA PE=3 SV=1
MKAKDFDYYLPEELIAQHPLEKRDECRLMILDKETGHVEHKVFKDILDYLNKGDCLVLNDTRVMPARLIGEKEETKGKMEFLLLKRTDKDTWETLVKPGKRAKIGSRFIFGQGELKAEVIGMAEEGSRIVKFEYDGIFEEVLDRLGQMPLPPYITEKLEDKEKYQTVYSKESGSAAAPTAGLHFTEELLNKIKEKGIKIVFLTLHVGLGTFRPVKEGEIENHIMHSEYYCISKETADIINTTKEAGGRVIAVGTTSCRTLETLGSKHGKIIEDSGWTNIFMYPGYEFKVTDALITNFHLPQSTLIMLVSALSERERVLNAYEIAVREKYRFFSFGDAMFVK

SEQ ID NO: 65481 - protein, 341 aa, Clostridium tetanomorphum
  REGION 1..341: note = tr|A0A037ZDR3|A0A037ZDR3_CLOTT S-adenosylmethionine:tRNA ribosyltransferase-isomerase; OS = Clostridium tetanomorphum DSM 665 OX=1230342 GN=queA; PE = 3 SV=1
MRVKDFDYYLPEELIAQHPLERRDEARLMVLDKESGEIQHKIFKDIVDYLNPGDCLVLNDTRVIPARLIGEKEDTHGKMEFLLLKRIDKDIWQTLVKPGKRAKVGTRFSFGDGELKAEVIDIGEEGSRIVRFEYEGIFEEVLDRLGQMPLPPYIKEKLDDKEQYQTVYSKEQGSAAAPTAGLHFTEKLLEKIKQRGVNLAFLTLHVGLGTFRPVKAEEIEEHHMHSEYYRMSKDTADLINKTKEAGKRVISVGTTSCRTLETIGDETGRVREQSGWTDIFIYPGYKFNIVDALITNFHLPQSTLVMLVSALSGRENIMNAYNTAVKEKYRFFSFGDAMFIK

SEQ ID NO: 65482 - protein, 341 aa, Clostridium thermobutyricum
  REGION 1..341: note = tr|A0A1V4SXX0|A0A1V4SXX0_9CLOT S-adenosylmethionine:tRNA ribosyltransferase-isomerase; OS = Clostridium thermobutyricum DSM 4928 OX=1121339 GN=queA; PE = 3 SV=1
MKVSDFNFDLPEELIAQHPLEKRDSSRLMVLNKETGEIEHKVFSDIIDYLNPGDTLILNNTRVMPARLIGEKEETGGKIEFLLLKRLEGDKWECLAKPGKTARVGRKFTFGNGQLKCEVVEVLETGNRVIEFSYDGIFEEVLDSLGEMPLPPYIHEKLDDRERYQTVYSKEKGSAAAPTAGLHFTKDLLKKIEDKGVNVGYLTLHVGLGTFRPVKVDDINDHVMHSEFYQLSKETADLINKTKENGGRIISVGTTSTRTLETIGDENGKVRECSGWTDIFIYPGYKFKIVDNLITNFHLPESTLIMLVSALAGQEHVLNAYKTAVKDKYRFFSFGDAMFIK

SEQ ID NO: 65483 - protein, 341 aa, Clostridium thermobutyricum
  REGION 1..341: note = tr|N9Y1W7|N9Y1W7_9CLOT S-adenosylmethionine:tRNA ribosyltransferase-isomerase OS=Clostridium thermobutyricum OX=29372 GN=queA PE=3 SV=1
MKVSDFNFDLPEELIAQHPLEKRDSSRLMVLNKETGEIEHKVFSDIIDYLNPGDTLILNNTRVMPARLIGEKEETGGKIEFLLLKRLEGDKWECLAKPGKTARIGRKFTFGNGQLKCEVVEVLETGNRVIEFSYDGIFEEVLDSLGEMPLPPYIHEKLDDRERYQTVYSKEKGSAAAPTAGLHFTKDLLKKIEDKGVNVGYLTLHVGLGTFRPVKVDDINDHVMHSEFYQLSKETADLINKTKENGGRIISVGTTSTRTLETIGDENGKVRECSGWTDIFIYPGYKFKIVDNLITNFHLPESTLIMLVSALAGQEHVLNAYKTAVKDKYRFFSFGDAMFIK

SEQ ID NO: 65484 - protein, 341 aa, Clostridium thermopalmarium
  REGION 1..341: note = tr|A0A2T0AX75|A0A2T0AX75_9CLOT S-adenosylmethionine:tRNA ribosyltransferase-isomerase; OS = Clostridium thermopalmarium DSM 5974 OX=1121340 GN=queA; PE = 3 SV=1
MKVKDFDFYLPEELIAQHPLEKRDESRLMVVDKNSGNIEHRIFKNIIDYLNEGDCLVLNNTRVLPARLIGEKEGTGGKMEFLLLKRIDVNTWETLVKPGKRAKIGARFIFGGGELKAEVKEIGEDGSRIVQFEYEGIFEEVLDRLGEMPLPPYITETLEDKERYQTVYSKEAGSAAAPTAGLHFTEELLTKIKDKGIKLAFVTLHVGLGTFRPVKVDTIEEHHMHSEYYTMSKETAEIINETKEKGGRVIAVGTTSCRTLETIANEEGRVREQSGWTSIFMYPGYKFKIVDALITNFHLPESTLIMLVSAFSSREIIMKAYEEAVKEKYRFFSFGDAMFLK

SEQ ID NO: 65485 - protein, 341 aa, Clostridium tyrobutyricum
  REGION 1..341: note = tr|W6N442|W6N442_CLOTY S-adenosylmethionine:tRNA ribosyltransferase-isomerase OS=Clostridium tyrobutyricum DIVETGP OX=1408889 GN=queA PE=3 SV=1
MRITDFDFYLPKELIAQHPLKQRDEARLMVLDKNSGNVEHKVFRDIIDYLNQGDCLVLNDTRVLPARLIGSKEGTGGKMEILLLKRTEDDTWETLVKPGKRARVGSRFNFGNGELKAEILEEKEDGNRMVKFEYAGIFEEVLDRLGQMPLPPYIKEKLEDKEMYQTVYSKEEGSAAAPTAGLHFTKELLSKIAEKGVEIAFLTLHVGLGTFRPVKVENIEDHDMHSEYYRMTKDTSDKINKAKETGHKIVAVGTTSCRTLETIGDEDGRVREQSGWTDIFIYPGYKYKVVDNLITNFHLPESTLIMLVSALCGRENILNAYKIAVDEEYRFFSFGDAMFIK

SEQ ID NO: 65486 - protein, 341 aa, Clostridium tyrobutyricum
  REGION 1..341: note = tr|A0A4P8A2X9|A0A4P8A2X9_CLOTY S-adenosylmethionine:tRNA ribosyltransferase-isomerase; OS = Clostridium tyrobutyricum OX=1519 GN=queA PE=3 SV=1
MRITDFDFYLPKELIAQYPLKQRDEARLMVLDKNSGNVEHKVFRDIIDYLNPGDCLVLNDTRVLPARLIGSKEGTGGKMEILLLKRTEDDTWETLVKPGKRARVGSRFNFGNGELKAEILEEKEDGNRMVKFEYAGIFEEVLDRLGQMPLPPYIKEKLEDKEMYQTVYSKEEGSAAAPTAGLHFTKELLSKIAEKGVEIAFLTLHVGLGTFRPVKVENIEDHDMHSEYYRMTKDTSDKINKAKETGHKIVAVGTTSCRTLETIGDEDGRVREQSGWTDIFIYPGYKYKVVDNLITNFHLPESTLIMLVSALCGRENILNAYKIAVDEEYRFFSFGDAMFIK

SEQ ID NO: 65487 - protein, 341 aa, Clostridium uliginosum
  REGION 1..341: note = tr|A0A1I1PW08|A0A1I1PW08_9CLOT S-adenosylmethionine:tRNA ribosyltransferase-isomerase; OS = Clostridium uliginosum OX=119641 GN=queA PE=3 SV=1
MNVKDFDFYLPEELIAQHPLEQRDSSRLMVLDKETGEVEHKTFHGIIDYLNSGDTLVLNNTRVMPARLIGEKEETGGKIEFLLLKRIEGDKWECLAKPGKSARVGRRFTFGNGKLKAEVIEVKEDGNRIIEFYYASIFEEVLDSLGEMPLPPYIHEKLDDKERYQTVYSKEKGSAAAPTAGLHFTKELLKQIEEKGVNVVYLTLHVGLGTFRPVKAEKLEEHEMHSEFYHLSKESADIINATKKRGNKIISVGTTSVRTLETIGDENGIVREQSGWTNIFIYPGYKFNIVDKLITNFHLPQSTLIMLVSTLAGKENVMNAYNEAVKEKYRFFSFGDAMFIK

SEQ ID NO: 65488 - protein, 341 aa, unidentified
  source 1..341: note = Clostridium ventriculi
  REGION 1..341: note = tr|A0A174BF53|A0A174BF53_CLOVE S-adenosylmethionine:tRNA ribosyltransferase-isomerase; OS = Clostridium ventriculi OX=1267 GN=queA PE=3 SV=1
MKVSDFDFYLPEELIAQCPLKERDSSRFMVVDRKTGEIEHKVFHDVIDYLEKGDTLVLNNTRVMPARLIGEKEETGGKIEFLLLKRIEGDKWECLAKPGKKAKVGAMFTFGEGKLKAVVREIGLEGNRVIEFIYNGIFEEILDELGQMPLPPYIHEKLDDRERYQTVYSKEKGSAAAPTAGLHFTEDLLEKIREKGVNIAFVTLHVGLGTFRPVKVESIDEHIMHSEYYELDEENAKIINDTKKRGNRVIAVGTTSTRTLETIGNENGEVRAQSGWTNIFIFPGYKFNIVDALITNFHLPESTLIMLVSALAGKENIMNAYKKAVEEKYRFFSFGDSMFIR

SEQ ID NO: 65489 - protein, 341 aa, Clostridium vincentii
  REGION 1..341: note = tr|A0A2T0BBE2|A0A2T0BBE2_9CLOT S-adenosylmethionine:tRNA ribosyltransferase-isomerase; OS = Clostridium vincentii OX=52704 GN=queA PE=3 SV=1
MNVSDFNFNLPEGLIAQHPLEKRDESRLMVLDKKTGEIQHEKFYDIIDYLKTGDTLVLNNTRVMPARLIGQKEITGGKIEFLLLKKIEGDTWEALAKPGRSAKVGKKFTFGDGKLKAEVIEVLENGNRIIELYYEGIFEQVLDELGEMPLPPYIHERLEEQERYQTVYSKEKGSAAAPTAGLHFTKELMDKIEAKGINIVYVTLHVGLGTFRPVKVAIIEDHDMHSEFYMLSQDSADIINETKKRGNKIISVGTTSTRTLETIGDENGIVREQSGWTNIFIYPGYKFKVIDKLITNFHLPESTLIMLVSTLATREYVMHAYDEAVKEKYRFFSFGDAMFIK

SEQ ID NO: 65490 - protein, 410 aa, unidentified
  source 1..410: note = Cnuella takakiae
  REGION 1..410: note = tr|A0A1M4WI32|A0A1M4WI32_9BACT S-adenosylmethionine:tRNA ribosyltransferase-isomerase; OS = Cnuella takakiae OX=1302690 GN=queA PE=3 SV=1
MKQKPQEIKIADYTYELPNERIAAFPLPKRDDSKLLVYKSGRISDERFYQLPSQLPPNTTLVVNNTKVIEARVLFRKPSGGVIEIFCLEPHNTSMEMALQGGGVCSWNCLVGGASKWKPGQVLEKEVPGGGTLQAFYVSKEVDHFVIRFAWQPAHLPFADVLHQTGAIPLPPYIKRDAQTEDSTRYQTVFADKEGSVAAPTAALHFTDEVFSALAAKNIHTAPVTLHVGAGTFKPVKSETIGEHPMHAEHFQVSQHTLRKLIDSENIVAVGTTSLRTLESLHWIGIKLLNGAFLSNEEELELVQWECYELAAQTITYKESLQALLQHLEQKNQELLFCRTSLIIVPGYTFKSASAIVTNFHQPQSTLLLLVAAFVGPEWKKVYRHALDNEYRFLSYGDSSLLSRTPPLSP

SEQ ID NO: 65491 - protein, 349 aa, unidentified
  source 1..349: note = Cnuella takakiae
  REGION 1..349: note = tr|A0A1M5I8D2|A0A1M5I8D2_9BACT S-adenosylmethionine:tRNA ribosyltransferase-isomerase; OS = Cnuella takakiae OX=1302690 GN=queA PE=3 SV=1
MKLSQFKFDLPLNLIAQNPAKKREDSRLMVIDRKSGNIENKNFRDILDYFDDKDAFVVNNTKVFPARMYGRKEKTGAKIEVFLLRELNKEHKLWDVIVDPARKIRVGNKLYFGDNEDLVAEVIDNTTSRGRTIKFLFDGTEDEFRQVLEVHGETPLPKYIKRKPDEEDRERYQTVYAKYEGAVAAPTAGLHFSRELIKRCEIKGIRFAEVTLHTGLGTFRPIEVEDLSKHKMDAEYYRIEDTACKIVNKAKETGHRICSIGTTTMRALESSFTAQKFLKPSEGWTNTFIHPPYDFSIADSLVTNFHLPKTSLLIMTCAFAGYDLTMEAYKKAIKDKYRFFSYGDALLVL

SEQ ID NO: 65492 - protein, 342 aa, Cobetia crustatorum
  REGION 1..342: note = tr|A0A558HGA9|A0A558HGA9_9GAMM S-adenosylmethionine:tRNA ribosyltransferase-isomerase; OS = Cobetia crustatorum OX=553385 GN=queA PE=3 SV=1
MRSDYDFSLPDELIARYPSEQRSNCRLLHLDGKSGDIAHRRFPELIELLEPGDVVVFNDTRVIPARLHGHKASGGKIEMLLERPLDAQRGLAHIRSSKSPKPGTELIFEGGITAVVEGRQDALFELRFHGETPMIELLNQHGHMPLPPYITRDDELSDRERYQTVYAKRDGAVAAPTAGLHFDEPMMAAMANKGIETTFVTLHVGAGTFQPVRVDSILEHHMHSEWIDVGQDTCDKIARARANGHRVMAVGTTSVRCLESAAKAHGGTLAPYSGDTDIFIYPGYEWQVVDRLITNFHLPESTLLMLVSAFAGYENTIAAYQAAVEERYQFFSYGDAMLLERV

SEQ ID NO: 65493 - protein, 363 aa, Cobetia marina
  REGION 1..363: note = tr|A0A4U1LSL2|A0A4U1LSL2_COBMA S-adenosylmethionine:tRNA ribosyltransferase-isomerase; OS = Cobetia marina OX=28258 GN=queA PE=3 SV=1
MSRIDSGDASGVAPSASERPLQRSDYDFSLPDELIARYPSEQRSDCRLLHLDGKSGEIVHRHFPDLLEQLEPGDVVVFNDTRVIPARLHGQKASGGKIEMLLERPLDAHRGLAHIRSSKSPKPGTELIFEGGITAVVEGRQDALFELRFHGETPMIELLNQHGHMPLPPYITRDDELSDRERYQTVYARRDGAVAAPTAGLHFDEPIMAAMAEKGIETAFVTLHVGAGTFQPVRVDSILEHHMHSEWIEVGQEACDTIARARAAGRRVVAVGTTSVRCLESAAKAHGGELAPYSGDTDIFIYPGYEWQVVDLLITNFHLPESTLLMLVSAFAGYEHTMAAYQAAVQERYQFFSYGDAMLLERA

SEQ ID NO: 65494 - protein, 363 aa, Cobetia sp.; identical to SEQ ID NO: 65493
  REGION 1..363: note = tr|A0A2S4JXL9|A0A2S4JXL9_9GAMM S-adenosylmethionine:tRNA ribosyltransferase-isomerase; OS = Cobetia sp. MM1IDA2H-1 OX=1268241 GN=queA PE=3 SV=1

SEQ ID NO: 65495 - protein, 343 aa, Cobetia sp.
  REGION 1..343: note = tr|A0A2E4Q3N7|A0A2E4Q3N7_9GAMM S-adenosylmethionine:tRNA ribosyltransferase-isomerase; OS = Cobetia sp. OX=1873876 GN=queA PE=3 SV=1
MQRSDYDFSLPDELIARYPSEQRSDCRLLHLDGKSGEIVHRRFPDLLEQLEPGDVVVFNDTRVIPARLHGQKASGGKIEMLLERPLDAHRGLAHIRSSKSPKPGTELIFEGGITAVVEGRQEALFELRFHGETPMIELLNQHGHMPLPPYITRDDELSDRERYQTVYAKRDGAVAAPTAGLHFDEPIMAAMAEKGIETAFVTLHVGAGTFQPVRVDSILEHHMHSEWIEVGQEACDKIARARAAGRRVVAVGTTSVRCLESAAKAHAGELAPYSGDTDIFIYPGYEWQVVDLLITNFHLPESTLLMLVSAFAGYEHTMAAYQAAVEERYQFFSYGDAMLLERA

SEQ ID NO: 65496 - protein, 347 aa, Cocleimonas flava
  REGION 1..347: note = tr|A0A4R1F6I3|A0A4R1F6I3_9GAMM S-adenosylmethionine:tRNA ribosyltransferase-isomerase; OS = Cocleimonas flava OX=634765 GN=queA PE=3 SV=1
MQLSDFSYSLPPELIAQEALEDRTASRLLHLNTGITPAEVHDKHFSDIVDLIQPNDLLIFNDTRVIPARLNGFKESGGKVEVLIERILDDHRALAHIRANKSPKVGGCLLLENAINAEVLDRHDALYEIKFKNEESIFKLLDQYGHIPLPPYIEREDTEADKERYQTVFADKVGAVAAPTAGLHFTDELLQSLKDKGVETAQITLHVGAGTFLPVRVDNLEDHVMHAEWVEVTQQTCDAVAACKARGSKVVAVGTTSVRSLESAAKETGKLEPFASDTRLFITPGFKFNVVDAMVTNFHVPESTLLMLVSAFSGYENIMSAYEHAVAEKYRFFSYGDAMFLEKANQI

SEQ ID NO: 65497 - protein, 348 aa, unidentified
  source 1..348: note = Cognatishimia maritima
  REGION 1..348: note = tr|A0A1M5JF54|A0A1M5JF54_9RHOB S-adenosylmethionine:tRNA ribosyltransferase-isomerase; OS = Cognatishimia maritima OX=870908 GN=queA PE=3 SV=1
MQLSDFDFDLPERLIATRPAKPRTSAKLLVATADTITDAHVHDIAQFFRPGDRLVLNDTKVIPARLTGVRRRESAQGPVEAKIEVTLLDPKGEGQWSALLKPLKKIKEGELIHFAEDFSAELLRKEDGQAVLRFDAEGEAFEAALQSSGAMPLPPYIAAKRPADEQDRTDYQTVFARHSGAVAAPTASLHFDEELLAKLNALGVQFSHVTLHVGAGTFLPVKVDDVTTHKMHAEWGRVSEKAAAEIAETKAQGGRVIPVGTTALRLIESAARGGEIAPWEGETDIFIYPGFQFQVTDALMTNFHLPKSTLMMLVSALMGQDRVREIYRHAIDQEYRFFSYGDSSLLLP

SEQ ID NO: 65498 - protein, 349 aa, unidentified
  source 1..349: note = Cognatiyoonia koreensis
  REGION 1..349: note = tr|A0A1I0PN59|A0A1I0PN59_9RHOB S-adenosylmethionine:tRNA ribosyltransferase-isomerase; OS = Cognatiyoonia koreensis OX=364200 GN=queA PE=3 SV=1
MKLSDFDFVLPEELIATRPARPRTSARLLVANGDEFNDLHVRDIVDQLAPGDRLILNDTKVIPARLTGHRTRESAESHTTARIEVTLLEPQTNGNWSALIKPLKKVKDGETIVFSDDLSAVVASRSDGQAILAFNLAGDDFDTALADVGAMPLPPYIAAKRPADEADKIDYQTAWAKHAGAVAAPTASLHFDADLLAALKQKGVTFSHVTLHVGAGTFLPVKVDDITQHKMHAEWGHVSQSAAAEINATKAAGGRIIPVGTTALRLIESAAKKGQVGPWKGPTDIFITPGYQFQITDGLMTNFHLPKSTLMMLVSALMGTDRIKAIYKHAISHRYRFFSYGDSSLLLPP

SEQ ID NO: 65499 - protein, 354 aa, unidentified
  source 1..354: note = Cognatiyoonia sediminum
  REGION 1..354: note = tr|A0A1M5LKY3|A0A1M5LKY3_9RHOB S-adenosylmethionine:tRNA ribosyltransferase-isomerase; OS = Cognatiyoonia sediminum OX=1508389 GN=queA PE=3 SV=1
MKLSDFDFDLPEHLIATRPANPKTSAKLLVAGPDRIEDLIVADLTKVLRAGDRLVLNDTKVIPARLSGTRTRTGEAGTTQAAIEVTLLEPQASGTWSALVKPLKKVRDGETIKFSDALSAELVSRADGQASLVFNLTGDDFDAALADVGAMPLPPYIAAKRAADEQDKTDYQTEWAKHSGAVAAPTASLHFDQPLLDTLAEMGVEFSFVTLHVGAGTFLPVKVDDIKDHKMHAELGYVSAQAADEINATKRAGGRVIPVGTTALRLIESAAKGGELHAWEGPTDIFITPGFPFQIADALMTNFHLPKSTLMMLVSALIGSDRIKDIYAHAISQNYRFFSYGDASLLMPNGSELP

SEQ ID NO: 65500 - protein, 347 aa, Cohaesibacter gelatinilyticus
  REGION 1..347: note = tr|A0A285NDQ7|A0A285NDQ7_9RHIZ S-adenosylmethionine:tRNA ribosyltransferase-isomerase; OS = Cohaesibacter gelatinilyticus OX=372072 GN=queA PE=3; SV = 1
MLVDLFDFDLPPENIALRPHSPRDEARLLFVPFTGAFQNYQVTSLPDFLQPGDALVFNDTKVIPAELSGIRVRGDSRAKISFNLHKREDGATWRAFARPAKKVKLDDVIEFGTNLNAIITEKGDAGEITLSFDKSGPILDQEIAKIGHIPLPPYIASKRKEDEKDKVDYQTIYAEREGAVAAPTAGLHFTDRLFDALDAKKIERHFVTLHVGAGTFLPVKAENTMDHKMHAEWGEIPQDLADHLNAVRARGNRVIAVGTTSLRLLESAAQEKGQLSGFCGDTDIFITPGYEFKAIDGLMTNFHLPKSTLFMLVSALMGRERMQQAYAHAVEHGYKFYSYGDSSLLLR

SEQ ID NO: 65501 - protein, 360 aa, Cohaesibacter marisflavi
  REGION 1..360: note = tr|A0A1I5I8D5|A0A1I5I8D5_9RHIZ S-adenosylmethionine:tRNA ribosyltransferase-isomerase; OS = Cohaesibacter marisflavi OX=655353 GN=queA PE=3 SV=1
MRVDSFDFDLPQDSIALRPHNPRDEAKLLLVPPTGAFEDHSVLNLPDFLEPGDALVFNDTKVIPAELSGTRVRGEIRAGIHFNLHKREDLSTWRAFARPAKKVQLGDRIDFSDRFSAEISEKGDAGEVCLRFNCDGTALDQAIASVGHIPLPPYIASKRAEDEKDKTDYQTIYADKDGAVAAPTAGLHFTDRLFSMLDEKKIERHFVTLHVGAGTFLPVKAEDTDDHKMHAEWGEISPALADKLNAVHARGNRIIAVGTTSLRLLESAAGDDGIIRPFCGDTDIFITPGYRFRAIDGLMTNFHLPKSTLFMLVSAIMGRDRMQAAYVHAIANGYRFYSYGDSSLLLPERHKGAAQGEETK

SEQ ID NO: 65502 - protein, 351 aa, Cohaesibacter sp.
  REGION 1..351: note = tr|A0A2N5XT58|A0A2N5XT58_9RHIZ S-adenosylmethionine:tRNA ribosyltransferase-isomerase; OS = Cohaesibacter sp. H1304 OX=2067669 GN=queA PE=3 SV=1
MRVDLFDFNLPTERIALRPHNPRDEAKLLYIPPSGPFENHVVLDLVDFLNPGDALVFNDTKVIPAELSGTRVRGDIRANIHFNLHKREDLSVWRAFARPAKKVQIGDLLEFGDTLTAKIEEKGDAGEVTLRFDCSGPALDRAIAEVGSIPLPPYIASKRPEDEQDLTDYQTIYAREEGAVAAPTAGLHFTDRLFNRLQIKGVERHFATLHVGAGTFLPVKADDTDDHKMHAEWGEITADLAGKLNAVNARGNRIIAVGTTSLRLLESATDPDGTIKPFCGDTDIFITPGYQFRAIDGLMTNFHLPKSTLFMLVSAIMGQDRMQAAYAHAIENKYSFYSYGDSSLLLRPKKG

SEQ ID NO: 65503 - protein, 349 aa, Cohaesibacter sp.
  REGION 1..349: note = tr|A0A285M9A2|A0A285M9A2_9RHIZ S-adenosylmethionine:tRNA ribosyltransferase-isomerase; OS = Cohaesibacter sp. ES.047 OX=1798205 GN=queA PE=3 SV=1
MLVNLFDFDLPPECIALRPHNPRDEAKLLFVPPEGAFEDYQVLDLPDFLAPGDALIFNNTKVIPAELEGTRVRGDIRAGVHFNLHKREDLSTWRAFARPAKKVQLGDRVEFGAHLSATICEKGDAGEVVLRFDCEGQQLDAAIAEVGHVPLPPYIASKRAEDERDKSDYQTIYAREEGAVAAPTAGLHFTDRLFERLDAKGIERHFVTLHVGAGTFLPVKADDTNDHKMHAEWGVITPELADHLNAVRARGNRIIAVGTTSLRLLESAADADGTIRPFSGDTDIFITPGYAFRAIDGLMTNFHLPKSTLFMLVSAIMGPERMQAAYAYAIENGYRFYSYGDSSLLLRPK

SEQ ID NO: 65504 - protein, 353 aa, unidentified
  source 1..353: note = Cohnella kolymensis
  REGION 1..353: note = tr|A0A0C2R5P5|A0A0C2R5P5_9BACL S-adenosylmethionine:tRNA ribosyltransferase-isomerase; OS = Cohnella kolymensis OX=1590652 GN=queA PE=3 SV=1
MNVSDFDFELPESLIAQAPLAERTSSRLLVLHRKEGSVEHRSFTDLAEYLKPGDTLVLNDTRVLPARLFGVKAETGAKAEVLLLKNLDGDRWEALVRPGKKIHKGTKLLFGMQGDEAPSGDQAALTAVIEEEGEMGARTLRFEYDGIFNELLDRLGQMPLPPYIKERLPDRERYQTVYSKHEGSAAAPTAGLHFTDDFLQQLQDSGVKLCPITLHVGLGTFRPVSVDNLEEHAMHAEWYSVSEESASMLNEAKAGSGRIVAVGTTSARTLETIGQRFQGGPVQACSGWTDIFIYPGYEFTMVNALLTNFHLPKSTLVMLVSALAGREAVLGAYREAIERRYRFFSFGDAMFIT

SEQ ID NO: 65505 - protein, 348 aa, Cohnella luojiensis
  REGION 1..348: note = tr|A0A4Y8M5G8|A0A4Y8M5G8_9BACL S-adenosylmethionine:tRNA ribosyltransferase-isomerase; OS = Cohnella luojiensis OX=652876 GN=queA PE=3 SV=1
MNVSDYDFDLPESLIAQTPLLERTSSRLLVLDRRNGKIEHRAFTDLADYLNPGDTLVLNDTRVLPARLFGVKADTGAKVELLLLKRIEGDRWEALVKPGKRVHTGARLNFGSSEDASPLLSAIVEDEGEMGARTIRFEYKGIFNELLDRLGQMPLPPYIKESLSDRERYQTVYSRNEGSAAAPTAGLHFTDSFLERLQANGVKLCPITLHVGLGTFRPVSVNKIEEHEMHSEWYSVSEESAKLLNEARASGGRIVAVGTTSARTLETVGQRFQDQSIEACSGWTNIFIYPGYEFTMANALLTNFHLPKSTLVMLVSALAGRDNVLNAYQEAIAHQYRFFSFGDAMFIT

SEQ ID NO: 65506 - protein, 357 aa, unidentified
  source 1..357: note = Cohnella lupini
  REGION 1..357: note = tr|A0A3D9IR61|A0A3D9IR61_9BACL S-adenosylmethionine:tRNA ribosyltransferase-isomerase; OS = Cohnella lupini OX=1294267 GN=queA PE=3 SV=1
MNVSDYDFDLPESLIAQTPLLERTSSRLLALNRINGKIEHRAFTDLAEFLKPGDTLVVNDTRVLPARLFGFKADTGAKVELLLLKRLEGDRWEALVRPGKKIHKGAKLSFGLAEKPDGTTEQENLVPLLSAFVEEEGEMGSRVIRFEYEGIFNELLDKLGQMPLPPYIKESLDDRERYQTVYSRHEGSAAAPTAGLHFTDEFLDRLQSEGVKLCRITLHVGLGTFRPVSAETIEEHEMHAEWYSVSEESAKLLNEAKASGGKIVAVGTTSARTLETVGQRFRDQPIESCNGWTDIFIFPGYEFTMVDALLTNFHLPKSTLVMLVSALAGRENVLNAYREAVEEQYRFFSFGDAMYIY

SEQ ID NO: 65507 - protein, 347 aa, Cohnella phaseoli
  REGION 1..347: note = tr|A0A3D9KNH3|A0A3D9KNH3_9BACL S-adenosylmethionine:tRNA ribosyltransferase-isomerase; OS = Cohnella phaseoli OX=456490 GN=queA PE=3 SV=1
MNVSDYDFELPESLIAQTPLLERTSSRLLVLHRQTGRVEHRVFTELEDHLQPGDTLVLNDTRVLPARLFGSKADTGAKAELLLLKRLDGDRWETLVRPGKKLHRGARIVFGPAEQPLLSATVEEEGELGARVVRFEYEGIFNELLDRLGHMPLPPYIKETLSDRERYQTVYSRNEGSAAAPTAGLHFTKEFLERLQAKGVKLCPITLHVGLGTFRPVSAETIEEHEMHAEWYSVSEESAKLLNEAKASGGRIVAVGTTSARTLETIGQRFKEGGQVEACSGWTSIFIFPGYEFTMVDALLTNFHLPRSTLVMLVSALAGRENILAAYREAVEREYRFFSFGDAMFIS

SEQ ID NO: 65508 - protein, 349 aa, Cohnella sp.
  REGION 1..349: note = tr|A0A1I1ART6|A0A1I1ART6_9BACL S-adenosylmethionine:tRNA ribosyltransferase-isomerase; OS = Cohnella sp. OV330 OX=1855288 GN=queA PE=3 SV=1
MNVGDYDFELPERLIAQTPLSDRTSSRLLVLHKDGGRVEHRSFKDLADYLVPGDTLVLNDTKVIPARLFGRKADTGAKAEVLLLKALGDDRWEALVRPGKKLHKGAVLHFGETEDSMKPLLAAVVEEEGEMGARTIRFQYDGIFNEILDRLGEMPLPPYIKERLEDRDRYQTVYAQNEGSAAAPTAGLHFTEDFLRELQGRGIAVCRVTLHVGLGTFRPVSVDNVLEHKMHEEWYGVDEENAALLNRARQAGTRIVAVGTTSARTLETLGQRFGDRPIEACSGWTGIFIYPGYEFRLVSALLTNFHLPKSTLVMLVSALAGREAVLAAYREAVADEYRFFSFGDAMFIT

SEQ ID NO: 65509 - protein, 350 aa, Cohnella sp.
  REGION 1..350: note = tr|A0A3G3JY64|A0A3G3JY64_9BACL S-adenosylmethionine:tRNA ribosyltransferase-isomerase; OS = Cohnella sp. 18JY8-7 OX=2480923 GN=queA PE=3 SV=1
MNVSDFDFELPERLIAQTPLANRTASRLLVLHREDGRTEHRTFTDLAEYLGPGDTLVLNDTRVLPARLFGTKADTGAKAELLLLKRREGDRWEALVRPGKKIRQGAVLHFGQASEGGKPLLTATILDEGDMGARVLEFSYEGIFQELLDRLGHMPLPPYIKETLDDRERYQTVYARHEGSAAAPTAGLHFTEEFLGQLQAKGVRLCWITLHVGLGTFRPVSADTIEEHEMHSEWYSVSEESAAMLNETRAAGGRIAAVGTTSARTLETIGQKFGDAPIEACSGWTDIFIYPGYRFTMVNALLTNFHLPKSTLVMLVSALAGREAILNAYREAVQKEYRFFSFGDAMFITR

SEQ ID NO: 65510 - protein, 386 aa, unidentified
  source 1..386: note = Coleofasciculus chthonoplastes
  REGION 1..386: note = tr|B4VP97|B4VP97_9CYAN S-adenosylmethionine:tRNA ribosyltransferase-isomerase OS=Coleofasciculus chthonoplastes PCC 7420 OX=118168 GN=queA PE=3 SV=1
MIEPSMTNDLLLSSYNYDLPEGRIAQTPISPRDSSRLLVVESPTQHQHRIFRDLPQLLRSGDLLVLNNTRVIPARLYGRKVTGTPVEVLLLEEREQNCWLALVKPGRRLKVGSTIVFEPDQPIVPASYGKTPLSSDDTETLRQDNLKNRSPLKATIIARDDATSGRLLQFDLPKGQSLVTLLPNYGQVPFPPYITHSQATPDQYQTVYAQIPGAVAAPTAGLHFTPELLEQCHISGIEQASITLHVGVGTFRPVEVEDVTNHQMHGEWLEISAATVAQIQQTKAAGGRVIAVGTTVVRALEGAAANGEFQPYCGKTELFIYPGYQWQVVDGLITNFHLPRSTLLMLVSALIGRERLLKLYAEAIAYNYRFYSFGDAMLILPEAVNH

SEQ ID NO: 65511 - protein, 352 aa, Collimonas arenae
  REGION 1..352: note = tr|A0A0A1F634|A0A0A1F634_9BURK S-adenosylmethionine:tRNA ribosyltransferase-isomerase; OS = Collimonas arenae OX=279058 GN=queA PE=3 SV=1
MATRALFFIIYPNMHSLSDYDFDLPPELIAQTPLSERSASRLLHLDGEQLIDRQFTDIVAQLNAGDLLVFNDTRVLKARFFGVKETGGKVEVLVERVVDNRTVHAQVRASKSPPAGTRIRLAEVFDVVVGERVGEFYTLVFPADVFDLIDAHGRLPLPPYIEHDADAFDETRYQTVYAKHAGAVAAPTAGLHFDQVLLEQLSQKGVSFGYVTLHVGAGTFQPVRSENLAEHKMHSEWYTITEATVDAVRATKAAGGKVVAVGTTSLRALESASQSGALQAGSADTTLFITPGYVFKTVDRLITNFHLPKSTLLMLVSAFAGYDRIRAAYAHAIVQRYRFFSYGDAMLLTYNV

SEQ ID NO: 65512 - protein, 339 aa, Collimonas arenae
  REGION 1..339: note = tr|A0A127QEN5|A0A127QEN5_9BURK S-adenosylmethionine:tRNA ribosyltransferase-isomerase; OS = Collimonas arenae OX=279058 GN=queA PE=3 SV=1
MHSLSDYDFDLPPELIAQTPLSERSASRLLHVDGEQLIDRQFTDIVDLLNAGDLLVFNDTRVLKARFFGIKETGGKVEVLVERVVDDRTVHAQVRASKSPPPGTRIRLAEAFDVVVGERVGEFYTLVFPGDVFELIEAHGRLPLPPYIEHDADAFDETRYQTVYAKHAGAVAAPTAGLHFDQALLERLRQKGIGFAYVTLHVGAGTFQPVRSENLAEHKMHSEWYTISEATVDAVQAAKAAGGKVVAVGTTSLRALESASQSGVLQSGSADTALFITPGYAFKTVDRLVTNFHLPKSTLLMLVSAFVGYERIRSAYAHAIAQRYRFFSYGDAMLLTYNV

SEQ ID NO: 65513 - protein, 339 aa, Collimonas fungivorans
  REGION 1..339: note = tr|A0A127P7L6|A0A127P7L6_9BURK S-adenosylmethionine:tRNA ribosyltransferase-isomerase; OS = Collimonas fungivorans OX=158899 GN=queA PE=3 SV=1
MHSLSDYDFELPPELIAQTPLSERSASRLLHVDGNRLIDRQFTDIVDQLNAGDLLVFNDTRVLKARFFGVKETGGKVEVLVERVVDNRTVHAQVRASKSPPAGSRICLAEAFDVVVSERVGEFYTLVFPADVFELIDAHGRLPLPPYIEHDADAFDETRYQTVYAKHAGAVAAPTAGLHFDQALLERLQQKGIGFAYVTLHVGAGTFQPVRSENLAEHKMHSEWYTITEATVEAVRATKAAGGKVIAVGTTSLRALESASQSGVLQAGSADTALFITPGYVFKTVERLITNFHLPKSTLLMLVSAFAGYDCIRAAYAHAIAQRYRFFSYGDAMLLTYNA

SEQ ID NO: 65514 - protein, 342 aa, Collimonas fungivorans
  REGION 1..342: note = tr|G0AI13|G0AI13_COLFT S-adenosylmethionine:tRNA ribosyltransferase-isomerase OS=Collimonas fungivorans (strain Ter331) OX=1005048 GN=queA PE=3 SV=1
MHSLSDYDFELPPELIAQTPLSERSASRLLHLDGDRLIDRQFTDIVDQLAAGDLLVFNDTRVLKARFFGVKETGGKVEVLVERVVDNRTVHAQVRASKSPPAGARICLAEAFDVVVGERVGEFYTLVFPADVFELIEAHGRLPLPPYIEHDADAFDETRYQTVYAKHAGAVAAPTAGLHFDQALLERLQQKGIGFAYVTLHVGAGTFQPVRSENLAEHKMHSEWYTITEATVEAVRATKAAGGKVIAVGTTSLRALESASQSGVLQAGSADTALFITPGYVFKTVERLITNFHLPKSTLLMLVSAFAGYDCIRAAYAHAIAQRYRFFSYGDAMLLSLQRASQ

SEQ ID NO: 65515 - protein, 339 aa, Collimonas pratensis
  REGION 1..339: note = tr|A0A127PZL2|A0A127PZL2_9BURK S-adenosylmethionine:tRNA ribosyltransferase-isomerase; OS = Collimonas pratensis OX=279113 GN=queA PE=3 SV=1
MHSLSDYDFDLPPELIAQTPLSERSASRLLHLDGEQLIDRQFTDIVEQLNAGDLLVFNDTRVLKARFFGIKETGGKVEVLVERVVDDRTVHAQVRASKSPPAGAVIRLADAFDVTVGERVGEFYTLRFPADVFELIDAHGRLPLPPYIEHDADAFDETRYQTVYAKHAGAVAAPTAGLHFDQALLERLQQKGIGFAYVTLHVGAGTFQPVRSENLAEHKMHSEWYTISDATVEAVRAAKAAGGKVVAVGTTSLRALESASQSGALQAGSADTALFITPGYRFKTVDRLITNFHLPKSTLLMLVSAFAGYDRIRAAYAHAIAQHYRFFSYGDAMLLTYTV

SEQ ID NO: 65516 - protein, 339 aa, Collimonas pratensis
  REGION 1..339: note = tr|A0A127QSL1|A0A127QSL1_9BURK S-adenosylmethionine:tRNA ribosyltransferase-isomerase; OS = Collimonas pratensis OX=279113 GN=queA PE=3 SV=1
MHSLSDYDFDLPPELIAQTPLSERSASRLLHLDGEQLVDRQFTDIVEQLNAGDLLVFNDTRVLKARFFGIKETGGKVEVLVERVVDDRTVHAQVRASKSPPAGAVIRLADAFDVTVGERVGEFYTLRFPADVFELIDAHGRLPLPPYIEHDADAFDETRYQTVYAKHAGAVAAPTAGLHFDQALLERLQQKGIGFAYVTLHVGAGTFQPVRSENLAEHKMHSEWYTISDATVEAVRAAKAAGGKVVAVGTTSLRALESASQSGALQAGSADTALFITPGYRFKAVDRLITNFHLPKSTLLMLVSAFAGYDRIRAAYAHAIAQHYRFFSYGDAMLLTYTV

SEQ ID NO: 65517 - protein, 339 aa, Collimonas sp.
  REGION 1..339: note = tr|A0A2A9KDB9|A0A2A9KDB9_9BURK S-adenosylmethionine:tRNA ribosyltransferase-isomerase; OS = Collimonas sp. PA-H2 OX=1881062 GN=queA PE=3 SV=1
MHSLSDYDFDLPPELIAQTPLSERSASRLLHLDGEQLIDRQFTDIVEQLNAGDLLVFNDTRVLKARFFGIKETGGKVEVLVERVVDDRTVHAQVRASKSPPAGARIRLADAFDVTVGERVGEFYTLQFPADVFELIEAHGRLPLPPYIEHDADAFDETRYQTVYAKHAGAVAAPTAGLHFDQALLEQLRQKGIVFAYVTLHVGAGTFQPVRSENLAEHKMHSEWYTISQATVDAVRGTKAAGGKVVAVGTTSLRALESASQSGALQAGSADTALFITPGYRFKTVDRLITNFHLPKSTLLMLVSAFAGYDRIRAAYVHAIAQHYRFFSYGDAMLLTYTV

SEQ ID NO: 65518 - protein, 339 aa, Collimonas sp.
  REGION 1..339: note = tr|A0A1I1JFD3|A0A1I1JFD3_9BURK S-adenosylmethionine:tRNA ribosyltransferase-isomerase; OS = Collimonas sp. OK412 OX=1801619 GN=queA PE=3 SV=1
MHSLSDYDFELPPELIAQTPLPQRSASRLLHIDGEQLVDRRFADIVDLLNPGDLLVFNDTRVLKARFFGVKETGGKVEVLVERVVDNRTVHAQVRASKSPPAGTRICLAEAFDVVVGERVGEFYTLVFPADVFELIEAHGRLPLPPYIEHDADAFDETRYQTVYAKHAGAVAAPTAGLHFDQALLQSLQQKGIGFAYVTLHVGAGTFQPVRSENLAEHKMHSEWYTIAEATVDAVRAAKAAGGKVVAVGTTSLRALESASQSGVLQAGSADTALFITPGYVFKTVDRLITNFHLPKSTLLMLVSAFAGYDCIRAAYAHAIAQRYRFFSYGDAMLLTYNV

SEQ ID NO: 65519 - protein, 403 aa, Collinsella aerofaciens
  REGION 1..403: note = tr|A4EAM0|A4EAM0_9ACTN S-adenosylmethionine:tRNA ribosyltransferase-isomerase OS=Collinsella aerofaciens ATCC 25986 OX=411903 GN=queA PE=3 SV=1
MRTDDFDYNLPEELIAQAPAEPRDSCRLLVVDRKGSQAGTPLEHGGTVEHRIFRDIIDYIEPGDVLVINQTRVMPARLIGRKTGSGGVVETLLLKRREDVDPLGHVWECLVKPGKRLKPGAQIEYRAGGAHAPEGAPVVLTAEVVDFVTDSRGGRLVRFEPAGCNAAGDPRTLDEAIHAAGHVPLPPYITDYEGDPEKYQTVYAMKEEHSAAAPTAGLHFTPELMAAIEAKGAKFAAVELEVGIDTFRLVEEDDPTQHVMHTERYHVSQEVVDAVHKAKAEGHRVIAVGTTAVRSLESAFDTDAPVSDPAVTARYFEGREDGADTLGRGDIVVRESATTQLYLMPGSTYHVVDALITNFHVPRSTLMMLVSALATRDQIMDAYAAAIEERYRFFSFGDAMLIC

SEQ ID NO: 65520 - protein, 405 aa, Collinsella aerofaciens
  REGION 1..405: note = tr|A0A5K1JBN5|A0A5K1JBN5_9ACTN S-adenosylmethionine:tRNA ribosyltransferase-isomerase; OS = Collinsella aerofaciens OX=74426 GN=queA PE=4 SV=1
MSMRTDDFDYNLPEELIAQAPAEPRDSCRLLVVDRKGSETGTPLEHGGTVEHRIFRDIIDYIEPGDVLVINQTRVMPARLIGRKAGSGGVVETLLLKRREDVDPLGHVWECLVKPGKRLKPGAQIEYRAGGAHAPEGAPVVLTAEVVDFVTDSRGGRLVRFEPAGCNAAGDPRTLDEAIHAAGHVPLPPYITDYEGDPEKYQTVYAMKEEHSAAAPTAGLHFTPELMAAIEAKGAKFAAVELEVGIDTFRLVEEDDPTQHVMHTERYHVSQEVVDAVHKAKAEGHRVIAVGTTAVRSLESAFDTDAPVSDPAVTARYFEGREDGADTLGRGDIVVRENATTQLYLMPGSTYHVVDALITNFHVPRSTLMMLVSALATRDQIMDAYAAAIEERYRFFSFGDAMLIL

SEQ ID NO: 65521 - protein, 408 aa, Collinsella intestinalis
  REGION 1..408: note = tr|A0A414G0U7|A0A414G0U7_9ACTN S-adenosylmethionine:tRNA ribosyltransferase-isomerase; OS = Collinsella intestinalis OX=147207 GN=queA PE=3 SV=1
MRTDDFDYNLPDELIAQAPAEPRDSCRLLVVNRELPGGPVRAADAVALEHGGSVEHRHFYDIVDYLEPGDLLVANQTRVMPARLIGKKPTGGVAETLLLRRREDVDPLGHVWECLVNPGKRLKPGNVVEYRAGGLLAPEGAPVVLTAEILDFIDDSKGGRLVRFEPVGENEGGVPRTLDEAIHAAGHVPLPPYITGYEGDPEKYQTVYAMSEEHSAAAPTAGLHFTPELIQRIKDKGCGWATVELEVGIDTFRLVEEDDPTEHVMHTERYHVPAEVVEAVHATKAAGHRVIAVGTTAVRSLESAWDASAPASDPAVTARGFEGREDGADVRGEGDITVREDATTNLYLMPGSTFHVVDALITNFHVPRSTLMMLVSALATRDQIIDAYEEAVREKYRFFSFGDAMLIE

SEQ ID NO: 65522 - protein, 408 aa, Collinsella intestinalis
  REGION 1..408: note = tr|A0A5K1IWN1|A0A5K1IWN1_9ACTN S-adenosylmethionine:tRNA ribosyltransferase-isomerase; OS = Collinsella intestinalis OX=147207 GN=queA PE=4 SV=1
MRTDDFDYNLPDELIAQAPAEPRDSCRLLVVNRELPGGPVRAADAVALEHGGSVEHRHFYDIVDYLEPGDLLVANQTRVMPARLIGKKPTGGVAETLLLRRREDVDPLGHVWECLVNPGKRLKPGNVVEYRAGGLLAPEGAPVVLTAEILDFIDDSKGGRLVRFEPVGENEGGVPRTLDEAIHAAGHVPLPPYITGYEGDPEKYQTVYAMSEEHSAAAPTAGLHFTPELIQRIKDKGCGWATVELEVGIDTFRLVEEDDPTEHVMHTERYHVPAEVVEAVHATKAAGHRVIAVGTTAVRSLESAWDAAAPASDPAVTARGFEGREDGADVRGEGDITVREDATTNLYLMPGSTFHVVDALITNFHVPRSTLMMLVSALATRDQIIDAYEEAVREKYRFFSFGDAMLIE

SEQ ID NO: 65523 - protein, 403 aa, Collinsella sp.
  REGION 1..403: note = tr|A0A412T224|A0A412T224_9ACTN S-adenosylmethionine:tRNA ribosyltransferase-isomerase; OS = Collinsella sp. AF16-8 OX=2292215 GN=queA PE=3 SV=1
MRTDDFDYNLPEELIAQAPAEPRDSCRLLVVDRKGSQAGKPLEHGGTVEHRIFRDIIDYIEPGDVLVINKTRVMPARLIGRKAGSGGVVETLLLKRREDVDPLGHVWECLVKPGKRLKPGAQIEYRAGGAHAPEGAPVVLTAEVIDFVTDSRGGRLVRFEPAGCNAAGEPRTLDEAIHAAGHVPLPPYITDYEGDPEKYQTVYAMKEEHSAAAPTAGLHFTPELMAAIEAKGAKFAAVELEVGIDTFRLVEEDDPTQHVMHTERYHVSQEVVDAVHKAKAEGHRVIAVGTTAVRSLESAFDADAPVSDPAVTARYFEGREDGADTLGRGDIVVRENATTQLYLMPGSTYHVVDALITNFHVPRSTLMMLVSALATRDQIMDAYAAAIEERYRFFSFGDAMLIL

SEQ ID NO: 65524 - protein, 406 aa, Collinsella sp.
  REGION 1..406: note = tr|A0A1Y4E6Q9|A0A1Y4E6Q9_9ACTN S-adenosylmethionine:tRNA ribosyltransferase-isomerase; OS = Collinsella sp. An268 OX=1965612 GN=queA PE=3 SV=1
MRTDDFDYELPDELIAQAPAEPRDSCRLLVLHRGEPVQTTGETVPLAHGGSVEHRHFYDVIDYIEPGDLLVINQTRVMPARLIGRKPTGGMAETLLLRRREDVDPLGHVWECLVNPGKRLKPGAVIEYRAGGPHAPADAPVVLTGEVLDFVPESRGGRLVRFAPEGADASGEPRTLDAAIHAAGHVPLPPYITQYEGDPEKYQTVYAMKEEHSAAAPTAGLHFTPELMRRIEEKGARFAAVELEVGIDTFRLVEEDDPTQHVMHTERYHVPAEVIDAVHETKRAGKRVIAVGTTAVRSLESAFDPEAPAADPALVARRFEGRADGADTRGRGDVVVRADATTNLYLMPGSTYHVVDALITNFHVPRSTLMMLVSAFATRDQIMDAYAEAVRERYRFFSFGDAMLIE

SEQ ID NO: 65525 - protein, 413 aa, Collinsella stercoris
  REGION 1..413: note = tr|B6GE52|B6GE52_9ACTN S-adenosylmethionine:tRNA ribosyltransferase-isomerase OS=Collinsella stercoris DSM 13279 OX=445975 GN=queA PE=3 SV=1
MKGGTMRTDDFDYNLPDELIAQAPAEPRDSCRLLVLNRELEGGPARAVDAVALAHGGSVEHRHFYDIIDYLEPGDLLVANQTRVMPARLIGKKPTGGVAETLLLRRREDIDALGHVWECLVNPGKRLKPGNVVEYRAGGLLAPEGSPVVLRAEIVDFVDDSKGGRLVRFEPVGANEQGEPRTLDEAIHAAGHVPLPPYITGYEGDPEKYQTVYAMSEEHSAAAPTAGLHFTPELIERIKAKGCGWATVELEVGIDTFRLVEEDDPTEHVMHTERYHVPAEVVEAVHAAKAAGRRVIAVGTTAVRSLESAWDANAAASVPPVTARGFEGREDGADMCGAGDIVTREDATTNLYLMPGSTYHVVDALITNFHVPRSTLMMLVSALATRDQVIDAYEEAVRERYRFFSFGDAMLIE

SEQ ID NO: 65526 - protein, 392 aa, Collinsella tanakaei
  REGION 1..392: note = tr|A0A3E4QPE1|A0A3E4QPE1_9ACTN S-adenosylmethionine:tRNA ribosyltransferase-isomerase; OS = Collinsella tanakaei OX=626935 GN=queA PE=3 SV=1
MRTDDFDYDLPDELIAQAPAEPRDMCRMLVLHREDGSVEHRVFRDIIDYLEPGDVLVANQTRVMPARLIGRKPTGGVAETLLLRRREDVDPMGHVWECLVNPGKRLKPGAVVEYRAGGAHAPQNSPVVLRATVEDFVDDSRGGRLVRFEPCGENVAGDPRTLDEAIHAAGHVPLPPYITQYEGDPEKYQTVYAMKEEHSAAAPTAGLHFTPELIERIEEKGVKFVTVELEVGIDTFRLVEEDDPTQHVMHTERYHVPAEAVDAVRAAKAAGRRVIAVGTTAVRSLESAWEADAPAANPAVVARRFEDAPDSAAVSGRGDIVARENATTNLYLMPGSTFHVVDAMITNFHVPRSTLMMLVSAFATRDQIMAAYQAAVGERYRFFSFGDAMFIE

SEQ ID NO: 65527 - protein, 392 aa, Collinsella tanakaei
  REGION 1..392: note = tr|G1WJU5|G1WJU5_9ACTN S-adenosylmethionine:tRNA ribosyltransferase-isomerase OS=Collinsella tanakaei YIT 12063 OX=742742 GN=queA PE=3 SV=1
MRTDDFDYDLPDELIAQAPAEPRDMCRMLVLHREDGSVEHKVFRDIIDYLEPGDVLVANQTRVMPARLIGRKPTGGAAETLLLRRREDVDPMGHVWECLVNPGKRLKPGAVVEYRAGGAHAPQNSPVVLRATVEDFVDDSRGGRLVRFEPCGENAAGVPRTLDEAIHAAGHVPLPPYITQYEGDPEKYQTVYAMKEEHSAAAPTAGLHFTPELIERIEEKGVKFVTVELEVGIDTFRLVEEDDPTQHVMHTERYHVPAEAVDAVRAAKAAGHRVIAVGTTAVRSLESAWEADAPAADPAVVARRFEDAPDSAAVSGRGDIVARENATTNLYLMPGSTFHVVDAMITNFHVPRSTLMMLVSAFATRDQIMAAYQAAVEERYRFFSFGDAMFIE

SEQ ID NO: 65528 - protein, 352 aa, unidentified
  source 1..352: note = Colwellia beringensis
  REGION 1..352: note = tr|A0A222GAB4|A0A222GAB4_9GAMM S-adenosylmethionine:tRNA ribosyltransferase-isomerase; OS = Colwellia beringensis OX=1967665 GN=queA PE=3 SV=1
MRVADFSFELPEELIARYPKANRSASRLMTLNGNDGVRKDETFTDIIDHVKAGDLLVFNNTRVIPARMFGQKASGGKLEVLVERLLDEHRVLAHIRCSKSPKPGSEIVLEGKVKATMVARHDALFELEFHGEQSVLSILDEVGHMPLPPYIDRPDEDSDRERYQTVYNEKPGAVAAPTAGLHFDDELMAQLKAKGVDFAFVTLHVGAGTFQPVKVDEIADHIMHAEYVEVPPSVVAQIEQTKASGGKVIAVGTTSVRSLESAAKIAAEQGKSFSEFYGDTDIFITPGYEFKIVDALITNFHLSESTLLMLVSAFAGYDNIMAAYQHAVAQQYRFFSYGDAMLLTKKDLNTGQ

SEQ ID NO: 65529 - protein, 352 aa, Colwellia chukchiensis
  REGION 1..352: note = tr|A0A1H7G320|A0A1H7G320_9GAMM S-adenosylmethionine:tRNA ribosyltransferase-isomerase; OS = Colwellia chukchiensis OX=641665 GN=queA PE=3 SV=1
MRVADFSFDLPEELIARYPKANRSGSRLMTLDGNTGQRQDQQFTDLIQHISPGDLLVFNNTRVIPARMFGQKASGGKLEVLVERLLDEHRVLAHIRCSKSPKPGSEILLEGKVKATMVARHDALFELKFHAQQSVLSILDDIGHMPLPPYIDRPDEDSDRERYQTVYNEKPGAVAAPTAGLHFDDELMAQLKAKGVEFAFVTLHVGAGTFQPVKVDQIADHIMHAEYVEVPSQVVSQIKATKANGGKVIAVGTTSVRSLESAAKVAQTQGQVMSEFYGDTDIFITPGYQFQVVDALITNFHLSESTLLMLVSAFAGYDNIMAAYRHAVSQKYRFFSYGDAMFLTKQEIQTQA

SEQ ID NO: 65530 - protein, 360 aa, Colwellia demingiae
  REGION 1..360: note = tr|A0A5C6QMA9|A0A5C6QMA9_9GAMM S-adenosylmethionine:tRNA ribosyltransferase-isomerase; OS = Colwellia demingiae OX=89401 GN=queA PE=3 SV=1
MRVSDFSFDLPEALIARYPKAERTASRLMTLNGNSGAITDGVFTDIVEQLNAGDLLVFNNTRVIPARMFGQKASGGKIEVLVERVVDQHTALAHIRASKSPKVGSELFLGNELGNEDSDVKVKATMVARHGALFELKFNSDESVLTILDKIGHMPLPPYIDRPDEDSDKERYQTVYNEKPGAVAAPTAGLHFDEALLEKIKAKGVELAFVTLHVGAGTFQPVKVDEIADHIMHAEYVEVSDEVVAQIAKTKAAGGRVVAVGTTSVRSLESAAKAAQDKNEPLSAFYGDTDIFITPGCQFQLIDALVTNFHLSESTLLMLVSAFSGYDHIMSAYQHAISQEYRFFSYGDAMFLTKQELNKS

SEQ ID NO: 65531 - protein, 350 aa, Colwellia hornerae
  REGION 1..350: note = tr|A0A5C6QEB5|A0A5C6QEB5_9GAMM S-adenosylmethionine:tRNA ribosyltransferase-isomerase; OS = Colwellia hornerae OX=89402 GN=queA PE=3 SV=1
MRVADFSFDLPEELIARYPKADRTSSRLMSVNGNSGEILDLGFTDIIEQLNDGDLLIFNNTRVIPARMFGQKESGGKIEVLVERILDEKRFLAHIRASKSPKVGNKLILESKVSATMLGRHGALFELKIEGEQSVLSVLEEIGHMPLPPYIDRPDEDSDRERYQTVYNEKPGAVAAPTAGLHFDENLLEKIKAKGVDLAFITLHVGAGTFQPVKVDEIADHIMHAEYVEVSDEVVQQIALTKANGGRVIAVGTTSVRSIESAAKVAKEQALPLSAFYGDTDIFITPGYEFQVIDALITNFHLSESTLLMLVSAFSGYEHMMSAYQHAVHEKYRFFSYGDAMFLTKKDNKI

SEQ ID NO: 65532 - protein, 362 aa, unidentified
  source 1..362: note = Colwellia marinimaniae
  REGION 1..362: note = tr|A0A1Z5HZT1|A0A1Z5HZT1_9GAMM S-adenosylmethionine:tRNA ribosyltransferase-isomerase; OS = Colwellia marinimaniae OX=1513592 GN=queA PE=3 SV=1
MRVSDFSFKLPQALIARYPKAERSASRLMSLNGNTGVITDGVFTDIVAQLNPGDLLVFNNTRVIPARMFGQKASGGKIEVLVERIIDDNTALAHIRASKSPKVGSEIYLGNGEGQGKVKATMVARHGALFELKFTGEQSVLAILDDIGHMPLPPYIDRPDEDSDKERYQTVYNEKPGAVAAPTAGLHFDNALLDKIKAKGVELAFITLHVGAGTFQPVKVDEIADHIMHAEYVEVSDEVVAQITKTKAAGGRVVAVGTTSVRSLESAAKAAQDKGEALSAFYGDTDIFITPGYQFQLIDALVTNFHLSESTLLMLVSAFSGYEHIMPAYQHAIDKEYRFFSYGDAMFLTKQELTKKSKARAK

SEQ ID NO: 65533 - protein, 359 aa, Colwellia psychrerythraea
  REGION 1..359: note = sp|Q487A3|QUEA_COLP3 S-adenosylmethionine:tRNA ribosyltransferase-isomerase OS=Colwellia psychrerythraea (strain 34H / ATCC BAA-681) OX=167879 GN=queA PE=3 SV=1
MRVSDFSFDLPEALIARYPKAERTASRLMTLNGNSGAITDGVFTDIVAQLNSGDLLVFNNTRVIPARMFGQKASGGKIEVLVERVIDQNTALAHIRASKSPKVGNELFLGNEDSDVKVKATMVARHGALFELKFNSDESVLTILDKIGHMPLPPYIDRPDEDSDKERYQTVYNEKPGAVAAPTAGLHFDEALLERIKAKGVELAFVTLHVGAGTFQPVKVDEIADHIMHAEYVEVSDEVVAQIAKTKAAGGRVVAVGTTSVRSLESAAKAALDKNKPLSAFYGDTDIFITPGCQFQIIDALVTNFHLSESTLLMLVSAFSGYDHIMSAYQHAISQEYRFFSYGDAMFLTKQELIKQDTP

SEQ ID NO: 65534 - protein, 368 aa, Colwellia psychrerythraea
  REGION 1..368: note = tr|A0A099KGR5|A0A099KGR5_COLPS S-adenosylmethionine:tRNA ribosyltransferase-isomerase; OS = Colwellia psychrerythraea OX=28229 GN=queA PE=3 SV=1
MRVSDFSFNLPEALIARYPKAERTASRLMALNGDSGAITDGVFTDIVGQLNPGDLLVFNNTRVIPARMFGQKASGGKIEVLIERIIDQNTALAHIRASKSPKVGNELFLRKEQGDELSDEENTIKATMVARHGALFELKFAKDQSVLQVLDQIGHMPLPPYIDRPDEDSDKERYQTVYNEKPGAVAAPTAGLHFDQALLEKIKAKGIELAFVTLHVGAGTFQPVKVDEIADHVMHAEYVEVSDEVVKQIIKTKAAGGRVVAVGTTSVRSLESAAKAATEKGEVLSAFYGDTDIFITPGCEFKIIDALVTNFHLSESTLLMLVSAFSGYENIMKAYQHAIDKEYRFFSYGDAMFLTKQALTKQVLSSST

SEQ ID NO: 65535 - protein, 350 aa, Colwellia sp.
  REGION 1..350: note = tr|A0A1D8RXY3|A0A1D8RXY3_9GAMM S-adenosylmethionine:tRNA ribosyltransferase-isomerase; OS = Colwellia sp. PAMC 20917 OX=1816218 GN=queA PE=3 SV=1
MRVADFSFDLPEELIARYPKADRTSSRLMSVNGNSGKILDLGFTDIIEQLNAGDLLIFNNTRVIPARMFGQKESGGKIEVLVERILDEKRFLAHIRASKSPKVGNKLILEGKVSATMLGRHGALFELEIQGDQSVLSVLEEIGHMPLPPYIDRPDEDSDRERYQTVYNEKPGAVAAPTAGLHFDENLLEKIKAKGVDLAFITLHVGAGTFQPVKVDEIADHIMHAEYVEVSDEVVQQIALTKANGGRVIAVGTTSVRSIESAAKVAKDKALPLSAFYGDTDIFITPGYEFQVIDALITNFHLSESTLLMLVSAFSGYEHMMSAYQHAVHEKYRFFSYGDAMFLTKKDYNI

SEQ ID NO: 65536 - protein, 343 aa, Colwellia sp.
  REGION 1..343: note = tr|A0A2G2EK70|A0A2G2EK70_COLSX S-adenosylmethionine:tRNA ribosyltransferase-isomerase; OS = Colwellia sp. OX=56799 GN=queA PE=3 SV=1
MRVADFSFDLPDELIARFPKKDRTSSRLLSLDGPTGEISHKVFSDILELVNENDLLIFNNTRVIPARMFGQKASGGKVEVLVERVLDEHRVLAHVRASKSLKPGNEVILEGKAKATMIARHDTLFELEFDHSKNVLDTLNDIGHMPLPPYIDRPDDEADRERYQTVYGEKPGAVAAPTAGLHFDEPLMAALKNKGVKMAFVTLHVGAGTFQPVRVETIDEHVMHSEYIEVPQDVVDAVAQTKASGGRVIAVGTTSMRSLESAAKIHGGKLDTYFGDTDIFIFPGYQFNVVDAMVTNFHLPESTLIMLVSAFSGQDNIMGAYNTAIEQKYRFFSYGDAMFLTRK

SEQ ID NO: 65537 - protein, 348 aa, unidentified
  source 1..348: note = Colwelliaceae bacterium
  REGION 1..348: note = tr|A0A2D6RI16|A0A2D6RI16_9GAMM S-adenosylmethionine:tRNA ribosyltransferase-isomerase; OS = Colwelliaceae bacterium OX=2026726 GN=queA PE=3 SV=1
MRVSDFAFDLPEELIARYPKSDRTASRLMTVDGNTGAIDNGQFSDVLDKLNKGDLLIFNDTRVIPARMFGKKASGGKLEVLVERMLDEHRVLAHVRCSKSPKPGTEIILEDQVSATMVERHGALFELKFNSDEKVLDILERIGHMPLPPYIDRPDEDSDKERYQTVYNDKPGAVAAPTAGLHFDDALLEKIKAKGVELAFITLHVGAGTFQPVKVDDIADHVMHAEYVEVSQEVVDKIEQTKAAGGRVVAVGTTSMRSLESAAKAADEEGKLIIPFYQDTDIFITPGFNFKVVDCLITNFHLSESTLLMLVSAFAGYEHMMAAYEQAIEEKYRFFSYGDAMFLTRKQG

SEQ ID NO: 65538 - protein, 389 aa, unidentified
  source 1..389: note = Comamonadaceae bacterium
  REGION 1..389: note = tr|A0A2H0IYD2|A0A2H0IYD2_9BURK S-adenosylmethionine:tRNA ribosyltransferase-isomerase; OS = Comamonadaceae bacterium CG12_big_fil_rev_8_21_14_0_65_59_15 OX=1973952 GN=q ueA; PE = 3 SV=1
MHLDATDSARTFSLCDFDFALPPDLIAQHPAPQRSGSRLLDGTYATPVDRVFTDLPAQLRAGDLLVLNDTRVMHARLFGEKPTGGKCELLIERVLDGNQVAAHLRVSKKPAPGTTLRLVAAAGCDDHPRATVLGRWPDEHGALFRLALSNDAGDDPYTLMARHGHVPLPPYITHTDSPEDAQRYQTVFASKLGAVAAPTAALHFDEAVLAQLDTMGVQRAYVTLHVGAGTFQPVKTENLAEHQMHSEWYQVPAATQQAIADCRARGGRVVAAGTTSVRALESWALQANGVRAHNRCAVGDLTPLTQTPLTLAPFTGDTRIFITPGFEFKVVDLLLTNFHLPKSTLMMLVSAFAGYERVMALYQHAMTQRYRFFSYGDAMLLQRQKLANT

SEQ ID NO: 65539 - protein, 277 aa, unidentified
  source 1..277: note = Comamonadaceae bacterium
  REGION 1..277: note = tr|A0A2M8E529|A0A2M8E529_9BURK S-adenosylmethionine:tRNA ribosyltransferase-isomerase (Fragment) OS=Comamonadaceae bacterium CG_4_9_14_0_8_um_filter_60_18 OX=1973950GN=queA PE=3 SV=1
MHHTVPGTSRPFALSDFDFCLPPELIAQHPASERSGSRLLDGTQSLPIDRTFTEVPDLLRAGDLMVFNDTRVMNARLFGEKPTGGKVELLVERVLDSNQVAAHMRVSKKPDVGTTIKLNAAAGCSDNPSATLLGRWPDAHGALFRLVLSNDAGDDPHALMARHGHVPLPPYITHSDSPEDVQRYQTVFAKNPGAVAAPTAALHFDGALLAKIDAMGVQRAHVTLHVGAGTFQPVKTENLAEHQMHSEWYNVPAATQQAVADCRARGGRVVAVGTTSV

SEQ ID NO: 65540 - protein, 362 aa, Comamonas aquatica
  REGION 1..362: note = tr|A0A014MP85|A0A014MP85_9BURK S-adenosylmethionine:tRNA ribosyltransferase-isomerase; OS = Comamonas aquatica DA1877 OX=1457173 GN=queA PE=3 SV=1
MSLSPRAHTLSDFDFVLPEHLIAQHPAAERSASRLLDARAPELVDRIFKDLPGLLHEGDLLVFNDTKVVKARVFGEKASGGKLELLIERVLQGNEVVAHMKVSKKPLPGARIHLCGGLQGGGFDAVLLGRWPDESGPLFRFALTGAHGETPWELMDQFGHLPLPPYIERQQNAEVDPDAAEDTERYQTVFASHPGAVAAPTAALHFDDQVLAALKAKGVETATVTLHVGAGTFQPVKTENLAEHQMHSEWYNIPFETLAALERCRQRRGRIIAVGTTSVRTLESWARTGQITGDTNIFITPGFEFRVVDALITNFHLPKSTLMMLVSAFAGYQHIMQVYQHAIAQGYRFFSYGDSMLLERRR

SEQ ID NO: 65541 - protein, 362 aa, Comamonas aquatica
  REGION 1..362: note = tr|A0A1B2D0P4|A0A1B2D0P4_9BURK S-adenosylmethionine:tRNA ribosyltransferase-isomerase; OS = Comamonas aquatica OX=225991 GN=queA PE=3 SV=1
MSLSPRAHTLSDFDFVLPEHLIAQHPAAERSASRLLDARAPELVDRIFKDLPGLLHEGDLLVFNDTKVVKARVFGEKASGGKLELLIERVLQGNEVVAHMKVSKKPLPGARIHLCGGLQGGGFDAVLLGRWPDDNGPLFRFALTGARGETPWELMDQFGHLPLPPYIERQQNAEVDPDAAEDTERYQTVFASHPGAVAAPTAALHFDDQVLAALKAKGVETAAVTLHVGAGTFQPVKTENLAEHQMHSEWYNIPLETLAALERCRQRRGRIIAVGTTSVRTLESWARTGQITGDTNIFITPGFEFRVVDALITNFHLPKSTLMMLVSAFAGYQHIMQVYQHAIAQGYRFFSYGDSMLLERRR

SEQ ID NO: 65542 - protein, 363 aa, Comamonas kerstersii
  REGION 1..363: note = tr|A0A0W7YZE7|A0A0W7YZE7_9BURK S-adenosylmethionine:tRNA ribosyltransferase-isomerase; OS = Comamonas kerstersii OX=225992 GN=queA PE=3 SV=1
MSSSHRAPHTLSDFDFVLPEHLIAQHPAAERSASRLLDARAPELVDRVFKDLPDLLHEGDLLIFNDTKVVKARIFGEKASGGKLELLIERVLQGNEVVAHMKVSKKPLPGARIHLCGGVKNGGFDAVLLGRWPDESGPLFRFALQGANNESPWELMDQFGHLPLPPYIERNQNAEEDPDEEEDSERYQTVFASHPGAVAAPTAALHFDEKVLAALKEKGVETAAVTLHVGAGTFQPVKVENIAEHQMHSEWYNIPLETLAALERCRQRRGRIIAVGTTSVRTLESWARTGQISGDTNIFITPGFEFRVVDCLITNFHLPKSTLMMLVSAFAGYKHIMDTYQHAIQNEYRFFSYGDSMILERRR

SEQ ID NO: 65543 - protein, 381 aa, Comamonas sp.
  REGION 1..381: note = tr|A0A363RM08|A0A363RM08_9BURK S-adenosylmethionine:tRNA ribosyltransferase-isomerase; OS = Comamonas sp. JNW OX=2170731 GN=queA PE=3 SV=1
MTAFSGARRTFQLSDFDFELPEALIAQHPAAERSGSRLLDAREPGLVDRRFHELPDLLQAGDLLVFNDTEVIKARIFGEKSSGGKIELLIERVLQDNEVVAHMKVSKKPAVGGVLHMMGGKKAGGFDATLLGRWPNEMGALFRLRLSGPNGESPWELMQQHGHIPLPPYIEREQQTGQDPNQAEDEQRYQTVFAKNPGAVAAPTAALHFDEKVLAALEAKGVERASVTLHVGAGTFQPVKTENLKDHQMHSEWYNIPLPTLAALERCRLRGGRVIAVGTTTVRTLESWARTGQLSDDTNIFITPGFPFRVVDMLVTNFHLPKSSLMMLVSAFAGYEHIMGLYQHAIAQQYRFFSYGDSMLLQRQKEPAAADAATEQLPAAF

SEQ ID NO: 65544 - protein, 365 aa, Comamonas sp.
  REGION 1..365: note = tr|A0A1D2UA15|A0A1D2UA15_9BURK S-adenosylmethionine:tRNA ribosyltransferase-isomerase; OS = Comamonas sp. SCN 67-35 OX=1660096 GN=queA PE=3 SV=1
MTALTDRAYTLSNFDFHLPAELIAQHPAARRSDSRLLDGRGPAPVDLIFRDLPRLLTPGDLMVFNDTRVVKARLFGEKSSGGHVELLIERVLTGAEVIAHLKVSKKPAPGAVLRFGGGRARGGFDAVLLSRWPDAQGALFRLRLEGAAGESPWELMQRHGHLPLPPYIRREQEGGHDAWEAEDNERYQTVFAHTPGAVAAPTAALHFDEGVLARLAERGVQTAHVTLHVGAGTFQPVKTEHIAEHHMHSEWYRIPAETLAAIEACRTRGGRVLAIGTTTVRTLESWARSGKTSDDTDIFITPGFEFRVVDLLVTNFHLPKSTLMMLVSAFAGYEHVMRLYHHAIAGRYRFFSYGDAMLLARASAA

SEQ ID NO: 65545 - protein, 362 aa, Comamonas terrigena
  REGION 1..362: note = tr|A0A2A7UQB7|A0A2A7UQB7_COMTR S-adenosylmethionine:tRNA ribosyltransferase-isomerase; OS = Comamonas terrigena OX=32013 GN=queA PE=3 SV=1
MSFSPRPHTLSDFDFALPEHLIAQHPAAERSASRLLDGRQSPPVDRVFKELPDLLHEGDLLVFNDTKVVKARVFGEKASGGKLELLIERVLEGNEVVAHMKVSKKPLPGAKIHLHGGLGKGGFDATLLGRWPDESGPLFRFALQGAHNATPWDLMEQFGHLPLPPYIARNQNSDEDPDEAEDTERYQTVFASHPGAVAAPTAALHFDQGVLDALKERGVETASVTLHVGAGTFQPVKVENIAEHQMHSEWYNIPLGTLAALERCRQRRGRIIAVGTTSVRTLESWARTGQISGDTNIFITPGFEFRVVDCLITNFHLPKSTLMMLVSALAGYKHVMELYQHAVQNEYRFFSYGDSMLLERKR

SEQ ID NO: 65546 - protein, 362 aa, Comamonas testosteroni
  REGION 1..362: note = tr|A0A076PR99|A0A076PR99_COMTE S-adenosylmethionine:tRNA ribosyltransferase-isomerase; OS = Comamonas testosteroni TK102 OX=1392005 GN=queA PE=3; SV = 1
MSSSTREFTLSDFDFDLPESLIAQHPTAVRSASRLLDGRSLPATDRIFRELPDLLQPGDLLVFNDTKVIKARVFGEKASGGKIELLVERVLQNNEVVAHMRVSKKPLPGAKIHLCGGLRNGGFEATLLGRWPDENGPLFHLSFKGNQGESPYELLEQFGHLPLPPYIERQQNAEHDPDEKEDSERYQTVFAAHPGAVAAPTAALHFDETVLAALQAKGVERASVTLHVGAGTFQPVKTENLADHTMHSEWYDIPLPTLAAMERCRQRGGRIIAVGTTTVRTLESWAKYGNITGDTSIFITPGFQYQVVDMLITNFHLPKSTLMMLVSAFAGYEHIMAMYQHAIAQHYRFFSYGDSMLLERQR

SEQ ID NO: 65547 - protein, 362 aa, Comamonas testosteroni
  REGION 1..362: note = tr|A0A5A7MA49|A0A5A7MA49_COMTE S-adenosylmethionine:tRNA ribosyltransferase-isomerase; OS = Comamonas testosteroni OX=285 GN=queA PE=3 SV=1
MSSCTREFTLSDFDFDLPESLIAQHPTAVRSASRLLDGRSLPATDRIFRELPDLLQPGDLLVFNDTKVIKARVFGEKASGGKIELLVERVLQNNEVVAHMRVSKKPLPGAKIHLCGGLRNGGFEATLLGRWPDENGPLFHLSFKGNQGESPYELLEQFGHLPLPPYIERQQNAEHDPDEKEDSERYQTVFAAHPGAVAAPTAALHFDETVLAALQAKGVERASVTLHVGAGTFQPVKTENLADHTMHSEWYDIPLPTLAAMERCRQRGGRIIAVGTTTVRTLESWAKYGNISGDTSIFITPGFQYQVVDMLITNFHLPKSTLMMLVSAFAGYEHIMGMYQHAIAQHYRFFSYGDSMLLERQR

SEQ ID NO: 65548 - protein, 362 aa, Comamonas thiooxydans
  REGION 1..362: note = tr|A0A0E3C0C0|A0A0E3C0C0_9BURK S-adenosylmethionine:tRNA ribosyltransferase-isomerase; OS = Comamonas thiooxydans OX=363952 GN=queA PE=3 SV=1
MSSSTREFTLSDFDFDLPESLIAQHPTAVRSASRLLDGRSLPATDRIFRELPDLLQPGDLLVFNDTKVIKARVFGEKASGGKIELLVERVLQNNEVVAHMRVSKKPLPGAKIHLCGGLKNGGFEATLLGRWPDENGPLFHLSFKGNQGESPYELLEQFGHLPLPPYIERQQNAEHDPDEKEDSERYQTVFAAHPGAVAAPTAALHFDETVLAALQAKGVERASVTLHVGAGTFQPVKTENLADHTMHSEWYDIPLPTLAAMERCRQRGGRIIAVGTTTVRTLESWAKYGNISGDTSIFITPGFQYQVVDMLITNFHLPKSTLMMLVSAFAGYEHIMGMYQHAIAQHYRFFSYGDSMLLERRR

SEQ ID NO: 65549 - protein, 362 aa, Comamonas thiooxydans
  REGION 1..362: note = tr|A0A0E3BLY0|A0A0E3BLY0_9BURK S-adenosylmethionine:tRNA ribosyltransferase-isomerase; OS = Comamonas thiooxydans OX=363952 GN=queA PE=3 SV=1
MSSCTREFTLSDFDFDLPESLIAQHPTAVRSASRLLDGRSLPATDRIFRELPDLLQPGDLLVFNDTKVIKARVFGEKASGGKIELLVERVLQNNEVVAHMRVSKKPLPGAKIHLCGGLKNGGFEATLLGRWPDENGPLFHLSFKGNQGESPYELLEQFGHLPLPPYIERQQNAEHDPDEKEDSERYQTVFAAHPGAVAAPTAALHFDETVLAALQAKGVERASVTLHVGAGTFQPVKTENLADHTMHSEWYDIPLPTLAAMERCRQRGGRIIAVGTTTVRTLESWAKYGNISGDTSIFITPGFQYQVVDMLITNFHLPKSTLMMLVSAFAGYEHIMGMYQHAIAQHYRFFSYGDSMLLERQR

SEQ ID NO: 65550 - protein, 349 aa, unidentified
  source 1..349: note = Commensalibacter intestini
  REGION 1..349: note = tr|G6F160|G6F160_9PROT S-adenosylmethionine:tRNA ribosyltransferase-isomerase OS=Commensalibacter intestini A911 OX=1088868 GN=queA PE=3 SV=1
MTDQTADFDFDLPETCIAHQPMRPKDLAKLLYIPTGQALEDKIIRDLPSFFRKGDILVANDTKVIHAKLSAMRGAAHIGITLDRPMGDGRWHVLIKNSKRLKLGDKLDFPDGQVYATVDELEDGGSGFIRFSVEGDAFDQWLRDIGTLALPPYIERPTGPTEQDEKDYHTIFSHHPGAVAAPTAGLHFTDQLLAQLDEVGVERLTLTLHVGAGTFLPVRSDNISDHHMHAEYGIITPEVAERLNKAKAEKRRIIAVGTTSLRLLESAVDEHGVIHPFHKETSIFIRPGYRFKAVDMLMTNFHLPRSTLFMLVCAFGGTEKMRHAYEHAIKTGYRFYSYGDACLIEKASL

SEQ ID NO: 65551 - protein, 349 aa, unidentified; identical to SEQ ID NO: 65550
  source 1..349: note = Commensalibacter intestini
  REGION 1..349: note = tr|A0A251ZX19|A0A251ZX19_9PROT S-adenosylmethionine:tRNA ribosyltransferase-isomerase; OS = Commensalibacter intestini OX=479936 GN=queA PE=3 SV=1

SEQ ID NO: 65552 - protein, 349 aa, unidentified
  source 1..349: note = Commensalibacter sp.
  REGION 1..349: note = tr|W7DYM6|W7DYM6_9PROT S-adenosylmethionine:tRNA ribosyltransferase-isomerase OS=Commensalibacter sp. MX01; OX = 1208583 GN=queA PE=3 SV=1
MTDQTADFDFDLPQSCIAHHPMRPKDMAKLLYIPTTGLPEDHIIRDLPSFFRKGDILVANDTKVIHAKLSAMRGAAHIGITLDRPMGDERWHVLIKNSKRLKQGDRLDFPDGKVYATIDELEVGGSGFIRFSIEGDAFDAWLRDIGKLALPPYIERPDGPTVEDEEDYHTIFSQFPGAVAAPTAGLHFTDQLLTQLDDIGVERLTLTLHVGAGTFLPVRSDNISDHHMHAEYGIITPAVATRLNQAKTEKRRIIAVGTTSLRLLESAVDENGVIHPFHKETSIFIRPGYKFKAVDMLMTNFHLPRSTLFMLVSAFGGAEKMRHAYQHAIQNGYRFYSYGDACLIEKAFM

SEQ ID NO: 65553 - protein, 350 aa, unidentified
  source 1..350: note = Commensalibacter sp.
  REGION 1..350: note = tr|A0A318N1K2|A0A318N1K2_9PROT S-adenosylmethionine:tRNA ribosyltransferase-isomerase; OS = Commensalibacter sp. ESL0284 OX=2070537 GN=queA PE=3; SV = 1
MTDLTADFDFKLPEHCIAQHPARPREAAKLLYIPSKSGKFQDKTIRDLPCYFQKGDILIANDTKVIPAKLFAQRGMAHIGITLDRPMGDGTWHVLIKNSKRLKKQDRLDFPDKKCFATVVKLETGGGAFIRFNLEGNEFDKWLNTSGQLALPPYIRRPYGPTERDELDYYTIFSQNPGAVAAPTAGLHFTEELLTQLDHKGVERLALTLHVGAGTFLPVRSENINDHHMHAEYGVLSPENAERLNQAKVEKRRIIAVGTTTLRLLESAIDQQGIFHPFQQETSIFIRPGHQFRSIDILMTNFHLPRSTLFMLVCAFGGTEKMRQAYEHAIRNNYRFYSYGDACIIEKEFL

SEQ ID NO: 65554 - protein, 340 aa, Conchiformibius steedae
  REGION 1..340: note = tr|A0A3P2A231|A0A3P2A231_9NEIS S-adenosylmethionine:tRNA ribosyltransferase-isomerase; OS = Conchiformibius steedae OX=153493 GN=queA PE=3 SV=1
MRLADFDFELPEQLIAQHPPAERGGSRLLAALPDMPLRDGVFADLPDFVAAGDLLVFNNTKVMKARLFGHKASGGKIEALVERVLDAHTALAHIRSSKSPKAGTELLFDGGIRAVMQERAGELFCLRFLGEQNVYELLEQNGKLPLPPYIVRAADDDDDARYQTVYAKYQGAVAAPTAGLHFTDDLLAQLKQKDVNMAEVTLHVGAGTFQPVRSDNIAEHKMHSEWFDVPQSVVEAVAETRQRGGKVWAVGTTSLRALESAARSGSLQAGTGDTDIFITPGYRFQVTDRLITNFHLPKSTLLMLVSALAGTEHIRAVYRHAVEQQYRFFSYGDAMLLGRN

SEQ ID NO: 65555 - protein, 349 aa, unidentified
  source 1..349: note = Confluentibacter sp.
  REGION 1..349: note = tr|A0A2N3HNQ5|A0A2N3HNQ5_9FLAO S-adenosylmethionine:tRNA ribosyltransferase-isomerase; OS = Confluentibacter sp. 3B OX=1909700 GN=queA PE=3 SV=1
MKLSHFGFNLPDELLAEYPAENRDESRLMVLNRKTQTIEHKMFKDIMDYFDEGDVMIINNTKVFPARLYGNKEKTGARIEVFLLRELNEEQRLWDVLVDPARKIRIGNKLYFGDDDTLVAEVIDNTTSRGRTLRFLYDGSYKEFRNKLTELGETPLPKYIKREVQPEDEERYQTIFAKNEGAVAAPTAGLHFSKHLLKRLEIKGVNFAEVTLHVGLGTFNPVEVEDLSKHKMDSEELIINSKAVDIVNNGIKNKKRICAVGTTAMRAIESSVSSNGKLNEMEGWTNKFIFPPYDFSIANCMITNFHTPKSTLLMMASAFGGVDFVKKAYQEAIKEKYKFYSYGDAMLII

SEQ ID NO: 65556 - protein, 349 aa, unidentified
  source 1..349: note = Confluentimicrobium lipolyticum
  REGION 1..349: note = tr|A0A238KJ97|A0A238KJ97_9RHOB S-adenosylmethionine:tRNA ribosyltransferase-isomerase; OS = Confluentimicrobium lipolyticum OX=1524263 GN=queA PE=3; SV = 1
MKLSDFDFDLPEELIATRPARPRTSARLLLAKGDQISDLHVHDLPGLLQAGDRLVLNNTKVIPARLFGRRQRQTPEGLVEAKVEITLLEPQPDGGWVALAKPLRKLKEGEEVVFSDALSARVAAKGDGDVTLSFNLTGDDFDAALADAGAMPLPPYIAAKRPADAQDKEDYQTVFARHSGAVAAPTASLHFDDALLDELRAKGVQFSEVTLHVGAGTFLPVKVEDVETHKMHAEWGQVTQKAADEMNQTRAEGGRIIPVGTTALRLIESAAQDDGTMVPWQGETDIFIRPGYRFKVTDALMTNFHLPKSTLLMLVSALMGQDRMRTVYDHAVTQKYRFFSYGDSSLLIP

SEQ ID NO: 65557 - protein, 356 aa, unidentified
  source 1..356: note = Confluentimicrobium sp.
  REGION 1..356: note = tr|A0A2D9VLK6|A0A2D9VLK6_9RHOB S-adenosylmethionine:tRNA ribosyltransferase-isomerase; OS = Confluentimicrobium sp. OX=1931204 GN=queA PE=3 SV=1
MKLSDFDFDLPEDLIATRPARPRSSARLLVADGQVPGGPLRDAVVTDLPSFLRPGDRLILNNTRVIPARLSGLRHRDGAEGATAARIGITLLEPRGDGSWAALAKPAKKVRDGEDIVFAPGFSARVEGRAEGQVHLRFSVTGDDFDAALAQAGAMPLPPYIAAKRPADEADHTDYQTVFARHSGAVAAPTASLHFDQPLLERIAAMGVDFSEVTLHVGAGTFLPVKVDDVTTHRMHAEWGEVGAQAAAEINATRAAGGRIIPVGTTALRLIESAATPEGRMKPWDGETDIFIYPGYEFRIADGLMTNFHLPKSTLMMLVSALMGQARMREVYDHATAERYRFFSYGDSSLLLPGGV

SEQ ID NO: 65558 - protein, 349 aa, unidentified
  source 1..349: note = Confluentimicrobium sp.
  REGION 1..349: note = tr|A0A0N9NP84|A0A0N9NP84_9RHOB S-adenosylmethionine:tRNA ribosyltransferase-isomerase; OS = Confluentimicrobium sp. EMB200-NS6 OX=1609966 GN=queA; PE = 3 SV=1
MKLSDFDFDLPEELIATRPARPRTAARMLVAEGDTLRDCHVYDLPSLLRAGDRLVLNNTKVIPARLFGRRLRHTPEGVVEAKVEITLLEPQPGGGWAALAKPLRKLKQGEEIVFSDALSARVTERREGDVVLGFNLAGDDFDAALAEAGAMPLPPYIAAKRPADAQDKTDYQTVFARHAGAVAAPTASLHFDAELLEKLRTIGVTFTEVTLHVGAGTFLPVKVEDVETHKMHAEWGEVTAQAAAEINATRAAGARIIPVGTTALRLIESAAQADGTMVPWRGETDIFIRPGYRFRVTGALMTNFHLPKSTLLMLVSALMGVERMRAVYAHAVAGRYRFFSYGDASLLIP

SEQ ID NO: 65559 - protein, 352 aa, Congregibacter litoralis
  REGION 1..352: note = tr|A4ADH1|A4ADH1_9GAMM S-adenosylmethionine:tRNA ribosyltransferase-isomerase OS=Congregibacter litoralis KT71 OX=314285 GN=queA PE=3 SV=1
MQRSDFSYDLPQELIAQTPLAERSASRLLCVNGMQKSFEHKVFTDLPEQLNAGDLLVFNNTRVLPARLFGVKETGGRVEILIERLTGDCSALAHIRASKTPKPGMSIALAADVDSPATDVRLTVQGREGELFKITSAESLGPLLARIGHMPLPPYIDRADAAEDKERYQTVYAQRDGAVAAPTAGLHFDEALLKRLDALGVRRAEVTLHVGAGTFQPVRSDDIRDHEMHAEYLEVDQAVCDAVEATRARGGRVVAVGTTAVRSLETAAASGRLGPYVGDTQLFIYPGYRFHCVDAMVTNFHLPESTLLMLVSAFSGKDLMLAAYNEAVKERYRFFSYGDAMFLTPQTGVRDA

SEQ ID NO: 65560 - protein, 362 aa, unidentified
  source 1..362: note = Conservatibacter flavescens
  REGION 1..362: note = tr|A0A2M8S2Z4|A0A2M8S2Z4_9PAST S-adenosylmethionine:tRNA ribosyltransferase-isomerase; OS = Conservatibacter flavescens OX=28161 GN=queA PE=3 SV=1
MLVSDFHFDLPDELIARYPTEKRTASRLLQLNGDTGAIKHGHFPDILDLIHDGDLLVFNNTRVIPARLFGRKATGGKIEVLIERVLTDDCILAHVRASKAPKAGAELILGEDKLGEGNGIKAQMIARQGALFEIKILQKHTALFELLQQIGHMPLPPYIDRPDEEADQERYQTVYNKVPGAVAAPTAGLHFDDALLAKLKAKGVNFAFVTLHVGAGTFQPVRVEKIEDHHMHAEYAEVPQDVVEAILSTKANGKRVIAVGTTSVRSIESAALASEERQTGNLLDPFFSDTSIFIYPGKQFRIIDGLITNFHLPESTLIMLVSAFAGYEHTMHAYQSAVENRYRFFSYGDSMFITKNHSTQRA

SEQ ID NO: 65561 - protein, 351 aa, unidentified
  source 1..351: note = Consotaella salsifontis
  REGION 1..351: note = tr|A0A1T4LU29|A0A1T4LU29_9RHIZ S-adenosylmethionine:tRNA ribosyltransferase-isomerase; OS = Consotaella salsifontis OX=1365950 GN=queA PE=3 SV=1
MRVDLFDFELPEDRIALRPVVPREAARLLAVSRGGALADAHVGDLPDLLRSGDVLVFNDTRVIPARLFGVRRRGENAARVEATLHLRESPECWRAFLKPAKRVASGETLIFEGGGEVLMARIEEKGEGGEALLAFDRSGADLDAALAAVGLIPLPPYIAARRDIDEQDRADYQTIYARENGAVAAPTAGLHFTPDLLARLDARGIRHEFLTLHVGAGTFLPVKADETAGHKMHAEIGHLDAATAERLNRARVEGGRIVAVGTTSLRLLESAAREDGTIEAFTGSTSIFITPGYRFRTADLLMTNFHLPRSTLFMLVSAFSGLETMRAAYAHAIAGGYRFYSYGDACLLERV

SEQ ID NO: 65562 - protein, 353 aa, unidentified
  source 1..353: note = Convivina intestini
  REGION 1..353: note = tr|A0A2U1D981|A0A2U1D981_9LACT S-adenosylmethionine:tRNA ribosyltransferase-isomerase; OS = Convivina intestini OX=1505726 GN=queA PE=3 SV=1
MTENKVYQLSDFDYHLPEELIAQTPLKQRDQSRLLVLNAKTGEYQDRHFYDVLDYLNPGDALVMNNSRVLPARLHGVRPETGGHAEVLLLRQDHGDVWETLVKPAKKSPIGSTIVFGNNPDHPLMTATVVGELEHGGRYVEFSYDGIFMELLEQLGEMPLPPYIKEKLSDQERYQTVYSKVEGSAAAPTAGLHWTPELLEKVRAKGVQTVELTLHVGLGTFRPVEEENIEDHKMHSEFYQLTQAAADTLNAVRAQGGKIVATGTTTIRTLETIGTKFNGQLQADSGWTDIFIKPGYQWQVVDAFITNFHLPKSTLIMLVAAFTGRENILAAYEHAVQAGYRFFSFGDAMYVHK

SEQ ID NO: 65563 - protein, 341 aa, Coprobacillus cateniformis
  REGION 1..341: note = tr|E7GAM3|E7GAM3_9FIRM S-adenosylmethionine:tRNA ribosyltransferase-isomerase OS=Coprobacillus cateniformis; OX = 100884 GN=queA PE=3 SV=1
MKLSEFDYHLPEELIAQTPLKKRDTSRLMVLDRKNETIEDKHFYDILDYLYEGDILVRNNTKVIPARLYGTKEETNGHVEVLLLKDLGNDVWECLVGNARIVKIDTIITFGDGSLKAKCIHIGDEGIRHFEMIYEGIFYEILDTLGTMPLPPYIKEKLEDQERYQTVYAKIEGSAAAPTAGLHFTDDIIDKVKAKGVKILDVTLHVGLGTFRPVKVDDVLEHHMHSEFYMIDEDVAQQLNNAKANGQRIISVGTTSTRTLEANFKKYGQFKATQESTDIFIYPGYQFEAIDALITNFHLPKSTLVMLVSAFANKEFILKAYHHAVEEKYRFFSFGDCMFIQ

SEQ ID NO: 65564 - protein, 341 aa, Coprobacillus sp.
  REGION 1..341: note = tr|A0A416WHX5|A0A416WHX5_9FIRM S-adenosylmethionine:tRNA ribosyltransferase-isomerase; OS = Coprobacillus sp. AF15-30 OX=2293061 GN=queA PE=3 SV=1
MKLSEFDFELPEELIAQHPVEKRDTSRLMVVNRENGNIEHRHFYDILDYLKPGDVLVRNNTKVIPARLFGIKEETNGHVEVLLLKELKKDTWECLCGNARIIKMNTVITFGEGLLKAKCIEIKDEGIRVFEMMYDGIFYEILDQLGTMPLPPYIKEKLEDKNRYQTVYAKIEGSAAAPTAGLHFTEEINQKIKDKGIEILDVCLHVGLGTFRPVKEENVLDHHMHSEFYMISEEVADKLNKAKANGQRIIAVGTTSTRTLEANMKKYGKFTATSENTDIFIYPGYKFEAIDCLITNFHLPKSTLLMLISAFASKELIFKAYKEAVKEKYRFFSFGDSMMIL

SEQ ID NO: 65565 - protein, 341 aa, Coprobacillus sp.; identical to SEQ ID NO: 65564
  REGION 1..341: note = tr|R5QMN1|R5QMN1_9FIRM S-adenosylmethionine:tRNA ribosyltransferase-isomerase OS=Coprobacillus sp. CAG:235; OX = 1262854 GN=queA PE=3 SV=1

SEQ ID NO: 65566 - protein, 407 aa, unidentified
  source 1..407: note = Coprobacter fastidiosus
  REGION 1..407: note = tr|A0A495VQ59|A0A495VQ59_9BACT S-adenosylmethionine:tRNA ribosyltransferase-isomerase; OS = Coprobacter fastidiosus NSB1 OX=1349822 GN=queA PE=3; SV = 1
MQKTRDIRIEEFNYPLPDERIAKFPLSQRDRSKLLLYRSGSVSESEFFHLPDLLPENSLLVFNNTKVIQARLHFRKETGALIEIFCLEPLSPNNYLLSFQSNRECVWACMVGNLKKWKSGTLSRTVIIEGKSVTLNADRLNAYGNSFEIRFSWDNPQISFAALLDAVGELPIPPYLNRETEESDKETYQTVYSKIEGSVAAPTAGLHFTEDVLAALKEKCIPCLELTLHVGAGTFKPVKSETIEGHEMHTEFISVERSLIVSLAETDRRIIAVGTTSVRTLESLYYIGRTLEYNPDAVPEELKVGQWQPYDDTVAEIDYRKALRNIVDYLDRKGLSRLVTATQIIIAPGYTFKIVRGMITNFHQPQSTLLLLVSAFVDGRWREIYDYALSHDFRFLSYGDSSLLLPD

SEQ ID NO: 65567 - protein, 349 aa, unidentified
  source 1..349: note = Coprobacter fastidiosus
  REGION 1..349: note = tr|A0A354M0A5|A0A354M0A5_9BACT S-adenosylmethionine:tRNA ribosyltransferase-isomerase; OS = Coprobacter fastidiosus OX=1099853 GN=queA PE=3 SV=1
MKLSQFKFKLTEEQIAKYPAKNRDESRLMVVHRNTGEIEHRIFKDILEYFDDKDVFVFNDTKVFPARLYGNKEKTGAKIEVFLLRELNEENRLWDVLVDPARKIRIGNKLYFGEDDSMVAEVIDNTTSRGRTLRFLFDGTHEEFKEALYKLGETPLPRYINRPAEPDDVDRYQNIFAKNEGAVVAPAAGLHFSRELLKRMEIKGIESGFLTLHSGLGNFREIDVEDLTKHKMDSEQMLVTPELVAFVNKAKDENRQVCAVGTSVMRAIESTVSTDGHMKPYSGWTNKFIFPPYDFTVATSLVSNFHMPLSTMLMMVAAFGGYDLVLDAYDKALKEGYRFGAYGDAMLII

SEQ ID NO: 65568 - protein, 351 aa, unidentified
  source 1..351: note = Coprobacter secundus
  REGION 1..351: note = tr|A0A0B2JP70|A0A0B2JP70_9BACT S-adenosylmethionine:tRNA ribosyltransferase-isomerase; OS = Coprobacter secundus OX=1501392 GN=queA PE=3 SV=1
MKLSQFKFKLPEDQIAKYPAKNRDESRLMVLHRNTGKIEHRIFKEILEYYDDKDVFVFNDTKVFPARLYGNKEKTGAKIEVFLLRELNEENRLWDVLVDPARKIRIGNKLYFGEDDSMVAEVIDNTTSRGRTLRFLFDGTHEEFKDALYKLGETPLPRYINRPVEPDDELRYQNIFAKNEGAVVAPAAGLHFSRELLKRMEIKGIEYNFLTLHSGLGNFREIDVEDLTKHKMDSEQMLVTQQLVDFVNKAKDENRQVCAVGTSVMRAIESTVSTDGHMKTYSGWTNKFIFPPYDFTVATSLISNFHMPLSTMLMMVAAFGGYDLVLEAYDVALKEKYRFGAYGDAMLILDR

SEQ ID NO: 65569 - protein, 405 aa, unidentified
  source 1..405: note = Coprobacter secundus
  REGION 1..405: note = tr|A0A0B2JM58|A0A0B2JM58_9BACT S-adenosylmethionine:tRNA ribosyltransferase-isomerase; OS = Coprobacter secundus OX=1501392 GN=queA PE=3 SV=1
MQKTQDIRIEDFNYPLPDERIAKFPLSKRDTSKLLLYRNGKISQTIFHNLPQILPEGSLLVFNNTRVIQARLHFRKKTGALIEIFCLEPLLPHDYALAFQSKGHCTWVCMIGNLKKWKEETLYRDLDFNGTSVRLSATKKNVHGNAFEIEFFWDNLELTFDTILEKIGELPIPPYLNRATEESDKETYQTVYAKVEGSVAAPTAGLHFTPEVLSELKNSGVPLLELTLHVGAGTFKPVKSETIEGHEMHTEFISVDISLIEQLARTTRKIIAVGTTSVRTLESLYYIGRTLEYHPEISPEELHVTQWRPYDSEIEIEPKKALENIVEYLHKHCSNRLVTSTQIIIAPGYTFKIVQGIITNFHQPKSTLLLLVSAFVDGHWREIYDYALANNFRFLSYGDSSLLLP

SEQ ID NO: 65570 - protein, 405 aa, unidentified
  source 1..405: note = Coprobacter sp.
  REGION 1..405: note = tr|A0A316SXY2|A0A316SXY2_9BACT S-adenosylmethionine:tRNA ribosyltransferase-isomerase; OS = Coprobacter sp. OX=1941478 GN=queA PE=3 SV=1
MQKTQDIRMDAYNYPLPDERIAKFPLPKRDMSKLLFYNGGTITERNFNELPDLLPDDALLVFNNTRVIQARLHFRKETGALIEVFCLEPFFPHDYLLSFQTTGECRWLCLVGNLKKWKEGALSRTLEIDGVPVTLNAVRGAAHGNSHEIIFTWDNPRITFAALLDAIGELPIPPYLNRETEESDKETYQTVYSKIEGSVAAPTAGLHFTPEVFNALKSNGVPCLELTLHVGAGTFKPVKSETIKGHEMHTEFISVERSLIERLARTEKRVIAVGTTSVRTLESLYYIGLTLEHRPDALPEELPVEQWQPYLQVASVSTSKALENILRWLDKRGSKRLVTATRIIIAPGYEFHVVKGMVTNFHQPQSTLLLLVSAFVNGNWREIYDYALEHDFRFLSYGDSSLLLP

SEQ ID NO: 65571 - protein, 349 aa, unidentified
  source 1..349: note = Coprobacter sp.
  REGION 1..349: note = tr|A0A316SRM7|A0A316SRM7_9BACT S-adenosylmethionine:tRNA ribosyltransferase-isomerase; OS = Coprobacter sp. OX=1941478 GN=queA PE=3 SV=1
MKLSQFKFKLPEDLIAKYPAKNRDESRLMVLHRKTGEIEHRIFKEVINYFDDKDIFVFNDTKVFPARLYGNKEKTGAKIEVFLLRELNEENRLWDVLVEPARKIRIGNKLYFGEDDSMVAEVIDNTTSRGRTLRFLFDGTHDEFKEALYKLGETPLPGYINRPVDEEDAERYQNIYAKNEGAVVTPAAGLHFSRELLKRMEIKGIEYGFLTLHSGLGNFREIDVEDLTKHKMDSEQMIVTPTLVEFVNHAKDTNHQVCAVGTSVMRAIESTVSTDGHMKAYNGWTNKFIFPPYDFTVATSLITNFHMPYSTMLMMAAAFGGYDAVMKAYDIALKEKYHFGAYGDAMLII

SEQ ID NO: 65572 - protein, 341 aa, Coprococcus catus
  REGION 1..341: note = tr|D4J8P0|D4J8P0_9FIRM S-adenosylmethionine:tRNA ribosyltransferase-isomerase OS=Coprococcus catus GD/7; OX = 717962 GN=queA PE=3 SV=1
MKTSDFYYDLPEELIAQDPLEDRSSSRLMVLDRESGEISHHIFKDIIDYLNPEDCLVINDTKVIPARLYGVKEDTGAHIEILLLKRRENDVWETLVRPGKKAKPGTRLTFGDGRLKAEVIDVVEEGNRLIHFEYEGIFEEILDQLGEMPLPPYITHKLQDKNRYQTVYAKHEGSAAAPTAGLHFTPELLAAIEAKGIRIARVTLHVGLGTFRPVKVEDVTQHHMHSEYYQVTQEAADIINDTKKRGGRVIAVGTTSTRTLESVADEDGTMHAAGGWTEIFIYPGYKFKCIDALITNFHLPESTLLMLVSALAGKEHIMHAYETAVQERYRFFSFGDAMFIE

SEQ ID NO: 65573 - protein, 341 aa, Coprococcus catus
  REGION 1..341: note = tr|A0A3E2TRT5|A0A3E2TRT5_9FIRM S-adenosylmethionine:tRNA ribosyltransferase-isomerase; OS = Coprococcus catus OX=116085 GN=queA PE=3 SV=1
MKTSDFYYDLPEELIAQDPLEDRSSSRLMVLDRESGNISHHIFKDIIDYLNPEDCLVINDTKVIPARLYGVKEDTGAHIEILLLKRRENDVWETLVRPGKKAKPGTRLTFGDGRLKAEVIDVVEEGNRLIHFEYEGIFEEILDQLGEMPLPPYITHKLQDKNRYQTVYAKHEGSAAAPTAGLHFTPELLAAIEAKGIRIARVTLHVGLGTFRPVKVEDVTQHHMHSEYYQVTQEAADIINDTKKRGGRVIAVGTTSTRTLESVADEDGTMHAAGGWTEIFIYPGYKFKCIDALITNFHLPESTLLMLVSALAGKEHIMHAYETAVQERYRFFSFGDAMFIK

SEQ ID NO: 65574 - protein, 341 aa, Coprococcus comes
  REGION 1..341: note = tr|R6MFK5|R6MFK5_9FIRM S-adenosylmethionine:tRNA ribosyltransferase-isomerase OS=Coprococcus comes CAG:19; OX = 1263070 GN=queA PE=3 SV=1
MKRQDFYFDLPEELIAQDPLEDRSSSRLLVLDKKTGATSHHIFREIKDYLKPGDCLVINDTKVIPARLIGEKEGTGGKVEVLLLKRKGNDVWETLVKPGKKMKPGARVSFGDGLLKGEVLEVVEEGNRLIHFEYEGIFEEILDQLGQMPLPPYITHQLEDKNRYQTVYAKHSGSAAAPTAGLHFTPELLEEIKAEGVEIAHVTLHVGLGTFRPVKADDILDHHMHSEFYRIEASEAEKINRAKESGHRVICVGTTSCRTVESAADENGKLKECSGWTEIFIYPGYKFKVLDCLITNFHLPESTLIMLVSALAGREHVLAAYEEAVKERYRFFSFGDAMFIE

SEQ ID NO: 65575 - protein, 341 aa, Coprococcus comes
  REGION 1..341: note = tr|A0A3E4GU69|A0A3E4GU69_9FIRM S-adenosylmethionine:tRNA ribosyltransferase-isomerase; OS = Coprococcus comes OX=410072 GN=queA PE=3 SV=1
MKRQDFYFDLPEELIAQDPLEDRSSSRLLVLDKKTGATSHHIFREIKDYLKPGDCLVINDTKVIPARLIGEKEGTGGKVEVLLLKRKGNDVWETLVKPGKKMKPGARVSFGDGLLKGEVLEVVEEGNRLIHFEYEGIFEEILDQLGQMPLPPYITHQLEDKNRYQTVYAKHSGSAAAPTAGLHFTPELLEEIKAEGVEIAHVTLHVGLGTFRPVKADDILDHHMHSEFYRIEASEAEKINRAKVSGHRVICVGTTSCRTVESAADENGKLKECSGWTEIFIYPGYKFKVLDCLITNFHLPESTLIMLVSALAGREHVLAAYEEAVKERYRFFSFGDAMFIE

SEQ ID NO: 65576 - protein, 355 aa, Coprococcus eutactus
  REGION 1..355: note = tr|A0A173WH55|A0A173WH55_9FIRM S-adenosylmethionine:tRNA ribosyltransferase-isomerase; OS = Coprococcus eutactus OX=33043 GN=queA PE=3 SV=1
MMKLTDFYYDLPQELIAQDPLLKRSESRLMVLDRKDNTIEHKHFYDVIDYLNPGDCLVINDTRVLPARLMGVKKDTGASIEVLLLKRKDDCTWETLVKPGKKCKVGARIVFGSESNEPDPETGLIKGKLVGEVVDIVEEGNRLIRFEFDGIFEEILDELGQMPLPPYITHKLEDKNRYQTVYAEHDGSAAAPTAGLHFTTELLEQIKAKGIKIAHVTLHVGLGTFRPVKEENILDHHMHSEFCIIEQDAADMINETKAAGGRVVSVGTTSTRTLESMSDDDGTVHAGSKWTDIFIYPGYKFKVIDALITNFHLPESTLLMLVSALYDREHILEAYKVAVEEKYRFFSFGDAMLIK

SEQ ID NO: 65577 - protein, 355 aa, Coprococcus eutactus
  REGION 1..355: note = tr|A0A174DT67|A0A174DT67_9FIRM S-adenosylmethionine:tRNA ribosyltransferase-isomerase; OS = Coprococcus eutactus OX=33043 GN=queA PE=3 SV=1
MMKLTDFYYDLPQELIAQDPLLKRSESRLMVLDRKDNTIEHKHFYDVIDYLNPGDCLVINDTRVLPARLMGVKEDTGASIEVLLLKRKDDCTWETLVKPGKKCKVGARIVFGSESNEPDPETGLIKGKLVGEVVDIVEEGNRLIRFEFDGIFEEILDELGQMPLPPYITHKLEDKNRYQTVYAEHDGSAAAPTAGLHFTTELLDQIKAKGIKIAHVTLHVGLGTFRPVKEENILDHHMHSEFCIIEQDAADMINETKAAGGRVVSVGTTSTRTLESMSDDDGTVHAGSKWTDIFIYPGYKFKVIDALITNFHLPESTLLMLVSALYDREHILEAYKVAVEEKYRFFSFGDAMLIK

SEQ ID NO: 65578 - protein, 341 aa, Coprococcus sp.
  REGION 1..341: note = tr|S2YMG4|S2YMG4_9FIRM S-adenosylmethionine:tRNA ribosyltransferase-isomerase OS=Coprococcus sp. HPP0048; OX = 1078091 GN=queA PE=3 SV=1
MRKEDFNFDLPEELIAQDPLEDRSSSRLLVLDKETGKTEHHVFREIIDYLEVGDCLVINDTKVIPARLIGSKIGTDAKIEVLLLKRKENDVWETLVKPGKKAKIGTRISFGDGLLVGEVVDIVEEGNRLIHFEYEGIFEEILDRLGQMPLPPYITHQLEDKNRYQTVYAKHSGSAAAPTAGLHFTPELLKKIEEKGVQIARVTLHVGLGTFRPVKVDNILEHHMHSEFYQIEEEAAEKINTAKANGKRVIAVGTTSCRTIESAAKEDGTIAPVSGWTDIFIYPGYQFKVLDCLITNFHLPESTLVMLVSALAGREHVLNAYEEAIKERYRFFSFGDAMFIR

SEQ ID NO: 65579 - protein, 354 aa, Coprococcus sp.
  REGION 1..354: note = tr|A0A374K6L1|A0A374K6L1_9FIRM S-adenosylmethionine:tRNA ribosyltransferase-isomerase; OS = Coprococcus sp. OM06-34AC OX=2293095 GN=queA PE=3 SV=1
MKLTDFYYDLPQELIAQDPLLKRSESRLMVLDRKDNTIEHKHFYDVIDYLNPGDCLVINDTRVLPARLMGVKEDTGASIEVLLLKRKDDRTWETLVKPGKKCKVGARIVFGSESNEPDPETGLIKGKLVGEVVGIVEEGNRLIRFEFDGIFEEILDELGQMPLPPYITHKLEDKNRYQTVYAEHDGSAAAPTAGLHFTTELLDQIKAKGIKIAHVTLHVGLGTFRPVKEENILDHHMHSEFCIIEQDAADMINETKAAGGRVVSVGTTSTRTLESMSDDDGTVHAGSKWTDIFIYPGYKFKVIDALITNFHLPESTLLMLVSALYDREHILEAYKVAVEEKYRFFSFGDAMLIK

SEQ ID NO: 65580 - protein, 343 aa, Coprothermobacter proteolyticus
  REGION 1..343: note = tr|B5Y8Y4|B5Y8Y4_COPPD S-adenosylmethionine:tRNA ribosyltransferase-isomerase OS=Coprothermobacter proteolyticus (strain ATCC 35245 / DSM 5265 / BT); OX = 309798 GN=que A PE=3 SV=1
MKRLSALEELLNYELPKHLIAQKLSDPRDACRLLVVHRDTGTLEDKRFYQIKDYVKPGDVLVLNNTKVLKARIKGRRKTGGAVEILLVRPLRDNVWECLLKPLRKIKIGEVLLLNGGAEVKLLERTERTAIIELGMSAQELDSYLDDWGEVPTPPYIRRKVPAEEYQTVFASKPGAVAAPTAGLHFTENLLQDLKNMGVKISYVTLHVALGTFESLASDWQEKSELHQETFFVSAETTKTVNEAKESGHSVFAVGTTVVRSLESAACDDGKLNSVFSDTSLFIKPGYSWKVVDKLVTNFHLPQTSLLLLVSSFATPDLILKAYRHAIEEEYKFYSLGDAMLIL

SEQ ID NO: 65581 - protein, 343 aa, Coprothermobacter sp.
  REGION 1..343: note = tr|A0A348VDJ3|A0A348VDJ3_9BACT S-adenosylmethionine:tRNA ribosyltransferase-isomerase; OS = Coprothermobacter sp. OX=55509 GN=queA PE=3 SV=1
MKRLSALEELLNYELPKHLIAQKLSDPRDACKLLVVHRDTGTLEDKCFYQIKEYVKPGDVLVLNNTKVLKARIKGRRKTGGAVEILLVRPLRDNVWECLLKPLRKIKTDEVLLLNGGAEVKLLERTERTAIVELGMSAQELDSYLDDWGEVPTPPYIRRKVPAEEYQTVFASKPGAVAAPTAGLHFTENLLQDLKNMGVKVTYVTLHVALGTFESLGSDWQEKSELHQETFFVSAETAKTVNEVKESGHSVFAVGTTVVRSLESAACDDGKLKAVFSDTSLFIKPGYNWKVVDKLVTNFHLPQTSLLLLVSSFATPELILKAYRHAIEEEYKFYSLGDAMLIL

SEQ ID NO: 65582 - protein, 361 aa, Coraliomargarita akajimensis
  REGION 1..361: note = tr|D5EK22|D5EK22_CORAD S-adenosylmethionine:tRNA ribosyltransferase-isomerase OS=Coraliomargarita akajimensis (strain DSM 45221 / IAM 15411 / JCM 23193 / KCTC 12865/ 04OKA010-24) OX=583355 GN=queA PE=3 SV=1
MDASLFDFHLPNECIAQEPAATRDASRLMVINRSTREVNHVHFADIGGFLPTNARFFRNNAAVLKARIYGQRPSGGKVECLLLQPAEDALTWWCLLRPGKKAAQTGFEMDGEYRAEVLEAGSNGNYKVRFHLERNETVTDLSERLGIMPLPPYIAREQDDPRRAADNERYQTVYADYAKRVAVAAPTAGLHFTPELIDQLSQAGAEFHDLTLQVGIGTFHPIQVEQIEDHNIHHEWYEIPSAAFQSLQDSSSGPRVAVGTTSVRSIEDALSRTQQSPESCLTPTGSVQAEADIFIYPPAKFAAVDHMITNFHLPKSTLLCLVSAFLTPGSTDGIDWLKELYADAIARKYRFYSYGDAMLIL

SEQ ID NO: 65583 - protein, 363 aa, Coraliomargarita sp.
  REGION 1..363: note = tr|A0A317ZIS3|A0A317ZIS3_9BACT S-adenosylmethionine:tRNA ribosyltransferase-isomerase; OS = Coraliomargarita sp. WN38 OX=2174842 GN=queA PE=3 SV=1
MGVKIDRFDYNLPKELIAQEPAAQRDASRLMVIDRATREVTHSTFAAIGDFLPAKSRFFRNNAAVLKARLYGQRPTGGKVECLLLQPAEDALSWWCLLKPGKKTLQAGQFGLDGEYTAEVLEVGANGNYKVRFQPVRDESVTALSERLGIMPLPPYIERSKDDPRRDSDNERYQTVYADYAKQLAVAAPTAGLHFTPELIAQLESSGASFYDLTLQVGIGTFHPVQTEHVEDHNIHHEWYEIPASALAELQSPDAGPRIAVGTTSVRSIEDALRRIPREPGCLTPGGDVQAEADIYIYPPSEFSGIDHMITNFHLPKSTLLCLVSAFLTPGSEEGIDWLKELYAEAIAKQYRFYSYGDAMLIL

SEQ ID NO: 65584 - protein, 361 aa, Coraliomargarita sp.
  REGION 1..361: note = tr|A0A2E0ND19|A0A2E0ND19_9BACT S-adenosylmethionine:tRNA ribosyltransferase-isomerase; OS = Coraliomargarita sp. OX=2024828 GN=queA PE=3 SV=1
MDAALFDYPLPRKCIAQEPASSRDASRLMVVDRNNHSVKHTYFAKLGQYLPSNARFYRNNAAVLKARIYGYRSSGGKVECLLLQPAEDPLTWWCLLRPGKKVTRGGFGLEGEFRADVIEVGSNGRYRVRFHLLRKESVTDLAERLGIMPLPPYISRTEDDPRYAQDAVRYQTVYADPGKRVAVAAPTAGLHFTDTLIDELKNNGAHFYDLTLQVGIGTFHPILVDDITQHAIHHESYEMPRAVHDSLLKEKGGPRVAVGTTSVRSIEDIMRRSTQQVEACRTPSGSIQAEADIFIYPPATFAGVDHLITNFHLPKSTLLCLVSAFLTPGSKAGIDWLKQLYAEAIEQQYRFYSYGDAMLIL

SEQ ID NO: 65585 - protein, 348 aa, unidentified
  source 1..348: note = Corallincola sp.
  REGION 1..348: note = tr|A0A368NGD2|A0A368NGD2_9GAMM S-adenosylmethionine:tRNA ribosyltransferase-isomerase; OS = Corallincola sp. C4 OX=2282215 GN=queA PE=3 SV=1
MQVSDFHFELPDELIARYPMADRTASRLLHLEGTDGAVHHRQFTDIESLVEPGDLVVFNNTRVIPARLHGCKSSGGKIEVLVERILDDHRVLAHVRSSKSPKAGAQLLLEDQIKVEMLGRDDALFELEFDPAKTVLEWLEQYGHMPLPPYIDRPDEGADRERYQTVYNQKPGAVAAPTAGLHFDDAILQRLQEKGVEQAFVTLHVGAGTFQPVRVDQVTEHKMHSEYAEVSDDVVAKILATKAAGKRVIAVGTTSVRSLESAAQASIAAGHEQLQPFAGETDIFIYPGYSFQIIDAMVTNFHLPESTLIMLVSAFAGYDAVMNAYAEAVAEKYRFFSYGDAMFVTRKP

SEQ ID NO: 65586 - protein, 362 aa, Corallococcus coralloides
  REGION 1..362: note = tr|A0A410RQL3|A0A410RQL3_CORCK S-adenosylmethionine:tRNA ribosyltransferase-isomerase; OS = Corallococcus coralloides OX=184914 GN=queA PE=3 SV=1
MSSLLSDYDFELPEAQIAQAPLPDRDASRLMVVSRATGAWSHQHFTGLADLLREGDLLVLNDARVIPARLLGQKSGTGGRVELLVVRPAAAATLTSAALGGAPESLEWVCLGQASKGLRPGQSVTFAGGLSAEVLEALGGGEYRVRFHAAPGASLASLLDAAGRLPLPPYITREPEAADAERYQTVYARASGAVAAPTAGLHFTQEVFAKLAAKGVQRAEVTLDVGPGTFLPVREEVLDKHHMHPERFTVPQATADAVNAAKAQGRRVVAVGTTVVRTLESATDPDTGKLRVGPGETAMFIRPGYVFRQVDVLLTNFHLPRSTLVMLVSALLGRERTLAAYQGAVRAGYRFFSYGDAMLVKE

SEQ ID NO: 65587 - protein, 362 aa, Corallococcus coralloides
  REGION 1..362: note = tr|H8MU07|H8MU07_CORCM S-adenosylmethionine:tRNA ribosyltransferase-isomerase OS=Corallococcus coralloides (strain ATCC 25202 / DSM 2259 / NBRC 100086 / M2) OX=11442 75 GN=queA PE=3 SV=1
MSSLLSDYDFELPEAQIAQAPLPNRDASRLMVVSRATGAWSHQHFTDLADLLREGDLLVLNDARVIPARLLGQKSGTGGRVELLVVRPAATATLTSAALGGAPESLEWVCLGQASKGLKPGQSVTFAGGLSAEILEALGGGEYRVRFHAAPGTSLASLLDAAGRLPLPPYITREPEAADAERYQTVYARASGAVAAPTAGLHFTQEVFAKLAAKGVQRAEVTLDVGPGTFLPVREEVLDKHHMHPERFTVPQATADAVNAAKAEGRRVVAVGTTVVRTLESATDPDTGRLRVGPGETAMFIRPGYVFRQVDVLLTNFHLPRSTLVMLVSALLGRERTLAAYQEAVRAGYRFFSYGDAMLVKE

SEQ ID NO: 65588 - protein, 344 aa, Corallococcus exiguus
  REGION 1..344: note = tr|A0A5C5DGU3|A0A5C5DGU3_9DELT S-adenosylmethionine:tRNA ribosyltransferase-isomerase; OS = Corallococcus exiguus OX=83462 GN=FH620_39105 PE=3 SV=1
MGGRMNAARWPREHPDAARLLHVQPRRERFTDTVASELPNLLREGDLLVMNDAATLPGSLTGRTGSGAAIELRLLSHEPDDTWTAVLFGAGDWRRRTEDRTPPPELPVGARLEVGGLTARVVEVLPPSPRLLRVAFDLTGAALWQALYSAGRPVQYAYTAGPLALWHVQTLYASRPWAAEMPSAGLPLTASVLLRMKARGVRWASLTHAAGLSSTGDAALDAALPRPERSDIPERTVSLVEETRGQGGRVVAVGTTVVRALEGRVTQHGMLVPGEEVTDLLLGPGYVPRVVHGLLTGVHDPGSSHHALLQAFAPLPLLLRASAHAEAAGYLGHEFGDTSLILDA

SEQ ID NO: 65589 - protein, 362 aa, Corallococcus exiguus
  REGION 1..362: note = tr|A0A5C5DT60|A0A5C5DT60_9DELT S-adenosylmethionine:tRNA ribosyltransferase-isomerase; OS = Corallococcus exiguus OX=83462 GN=queA PE=3 SV=1
MSSLLSDYDFELPEAQIAQAPLPNRDASRLMVVSRATGDWSHQHFTDLADLLREGDLLVLNDARVIPARLLGQKSGTGGRVELLVVRPAATATLTSAALGGAPESLEWVCLGQASKGLKPGQSVSFAGGLSAEVLEALGGGEYRVRFHAVPGASLASLLDAAGRLPLPPYITREPEAADAERYQTVYARASGAVAAPTAGLHFTEDVFAKLAAKGVRRAEVTLDVGPGTFLPVREEVLDKHHMHPERFTVPEATAAAVNATKAEGRRVVAVGTTVVRTLESATDPDTGRLRVGPGETAMFIRPGYAFRQVDVLLTNFHLPRSTLVMLVSALLGRERTLAAYQEAVRAGYRFFSYGDAMLVKE

SEQ ID NO: 65590 - protein, 344 aa, Corallococcus sp.
  REGION 1..344: note = tr|A0A3A8QN53|A0A3A8QN53_9DELT S-adenosylmethionine:tRNA ribosyltransferase-isomerase; OS = Corallococcus sp. AB047A OX=2316720 GN=D7X96_13180 PE=3; SV = 1
MGGRMNAARWPREHPDTARLLHVEPRRERISDTVASALPDLLREGDLLVMNDAATLPGSLMGRTHAGAAIELRLLSHEPDGTWTAVLFGAGDWRRRTEDRPPPPELPVGAHLVIGGLTARVVEVLPPSPRLLRVAFDLRGAALWQALYMAGRPVQYAYTAGPLALWHVQTLYASRPWAAEMPSAGLPLTASVLLRLKARGVRWASLTHAAGLSSTGDAVLDAALPRPERSDIPERTVSLVEETRKNGGRVVAVGTTVVRALEGRAVQHGALVPGEAVTDLLLGPGYVPRVVHGLLTGVHDPGSSHHALLQSFAPLALLHRASAHAEAAGYLGHEFGDTCLILDA

SEQ ID NO: 65591 - protein, 362 aa, Corallococcus sp.
  REGION 1..362: note = tr|A0A3A8JWT0|A0A3A8JWT0_9DELT S-adenosylmethionine:tRNA ribosyltransferase-isomerase; OS = Corallococcus sp. CA053C OX=2316732 GN=queA PE=3 SV=1
MSSLLSDYDFELPEAQIAQAPLPHRDASRLMVVSRATGAWSHQRFTDLGDLLREGDLLVLNDARVIPARLLGQKAGTGGRVELLVVRPAATATLTSAALGGAPESLEWICLGQASKGLKPGQSVTFAGGLSAEVLEALGGGEYRVRFHAAPGASLASLLDAAGRLPLPPYITREPAAADAERYQTVYARASGAVAAPTAGLHFTDAVFSSLAARGISRVEVTLDVGPGTFLPVREEVLDKHHMHPERFTVPEATAAAVNAAKAEGRRVVAVGTTVVRTLESATDPQTGRLRPGPGETAMFIRPGYVFRQVDVLLTNFHLPRSTLVMLVSALLGRERTLAAYQEAVRAGYRFFSYGDAMLVKE

SEQ ID NO: 65592 - protein, 361 aa, unidentified
  source 1..361: note = Coriobacteriaceae bacterium
  REGION 1..361: note = tr|A0A0A8B265|A0A0A8B265_9ACTN S-adenosylmethionine:tRNA ribosyltransferase-isomerase; OS = Coriobacteriaceae bacterium 68-1-3 OX=1531429 GN=queA; PE = 3 SV=1
MRTSDFDYNLPAELIAQEPAADRDGCRLLVMDRETGDLEDRIFRDIVDYLHPNDLLVVNETRVLPARLLGSKRGTGGAAEVFLLREVFDREPKTNKSALWEVLVRPGKRLKPGSGAVVDVRDADGNVALSAEIVDWVDGAGKGERIARLSTELPSLDEALHRVGHTPLPPYIKNYAGDEELYQTVYSKRESSAAAPTAGLHFTPELIERIKEKGARWETVELEVGLDTFRIVDEDDPADHEMHTEFYTVPEQTIRAIAETRAAKGRVIAVGTTSMRSLESCWDAQAQAPRARDREATSLFILPGYRFNVVDAIVTNFHVPRSTLMMLVSAFSTRDNVMRAYEHAIEQRYRLLSFGDAMFVR

SEQ ID NO: 65593 - protein, 344 aa, unidentified
  source 1..344: note = Coriobacteriaceae bacterium
  REGION 1..344: note = tr|A0A1V1RFZ6|A0A1V1RFZ6_9ACTN S-adenosylmethionine:tRNA ribosyltransferase-isomerase; OS = Coriobacteriaceae bacterium EMTCatB1 OX=1927122 GN=queA; PE = 3 SV=1
MRTADFDYDLPTGLIAQHPAEPRDACRLMVVERGSGQIDHKTFRDLPEYLHEGDVLVVNETRVLPARLKGAKDETGGAVEVLLLRPRYGTTWECLVRPGRRLKPGAKVVFGDGLLTGLIVDVIEETGGRVVTFSVREGTFMEAVHALGEVPLPPYITATLDDPEKYQTVYAAQEHSVAAPTAGLHFTEELLEKIQRQGVHLAKVELDVGLDTFRPVTAEDPREHRMHAEHYRVPAWTADAVNDAHRRGSRVFAVGTTTVRALESAYNEETRLVEASEGVTDLFILPGFSFGAVDALVTNFHMPRSTLLMMVSAFAGRDLIMRAYETAKRERYRFLSFGDAMLIV

SEQ ID NO: 65594 - protein, 361 aa, unidentified
  source 1..361: note = Coriobacteriales bacterium
  REGION 1..361: note = tr|A0A133Z8R5|A0A133Z8R5_9ACTN S-adenosylmethionine:tRNA ribosyltransferase-isomerase; OS = Coriobacteriales bacterium DNF00809 OX=1588753 GN=queA; PE = 3 SV=1
MKTDDFDYTLPPELIAQTPAEVRDACRLLVLNKRSGALQDCVFHDIGTFLHPGDLLVANETRVLPARMLGTKRGSGGSAEIFLLREIFNREPKTAHTALWEVLVRPGKRLKPQTGAVVDIPDAQGRVCLSIEVVDWAEKPSPGERIARLTTTLPSLDEALHACGHTPLPPYIKHYAGDEELYQTVYSKSEHSAAAPTAGLHFTPELIAALQEQGVGWETVDLEVGLDTFRLVDEDDPRNHVIHTETYSVPQKTIDAINRTKDAGGRVIAVGTTSMRSLESCYDEQAKCVKARTREHTSLYILPGYTFNVVDAMITNFHVPRSTLMMLVSALAGREHIMAAYQHAIHERYRFLSFGDAMFIQ

SEQ ID NO: 65595 - protein, 363 aa, unidentified
  source 1..363: note = Coriobacteriales bacterium
  REGION 1..363: note = tr|A0A437UWG9|A0A437UWG9_9ACTN S-adenosylmethionine:tRNA ribosyltransferase-isomerase; OS = Coriobacteriales bacterium OH1046 OX=2491116 GN=queA; PE = 3 SV=1
MLTSDFDYPLPDELIAQAPAEPRDSCRLLVLHRSDGSLEHRVFADIAGYLHPGDLLVANRTRVLPARLMGRKHATGGVSETLLLARREDLDPYGSVWECLVNPGKRLKEGAVVEYRAGGIAAPADAPIVLTGEIIDFVEGSRGGRLVRFAPASGRSLDEAIHEAGRVPLPPYITSYGGDPEKYQTVYAMEEEHSAAAPTAGLHFTPELIERIKQRGVGWATVELEVGIDTFRLVTEEHAEDHAIHTERYHVPQETVDAIAAARAAGGRVIAVGTTSVRSLESAWDAEAGALAARENASTDLFLMPGSRFHVVDALITNFHVPKSTLMMLVSAFATREQIMAAYASAIDKRYRFLSFGDAMFIE

SEQ ID NO: 65596 - protein, 374 aa, unidentified
  source 1..374: note = Coriobacteriia bacterium
  REGION 1..374: note = tr|A0A2V2EBH1|A0A2V2EBH1_9ACTN S-adenosylmethionine:tRNA ribosyltransferase-isomerase; OS = Coriobacteriia bacterium OX=2052159 GN=queA PE=3 SV=1
MKTDDFDYDLPERCIAQEPAAVRDACKMLVMNRETGELEDRIFRDIIEYLEPGDVLVANETRVMPARLLGAKRGTGGQAEVFLLRQRMGTAADAYVATEGPDGALGSNQQAIWEVLVRPGKRLKPGSGAIVDFCDAEGNVALSAEIVDWGADSGRGERIARLTTTRPSLDEALHAVGHTPLPPYIKHYAGDEELYQTVYSRHESSAAAPTAGLHFTPELIERLRAKGIEWHTVELEVGLDTFRIVDEDDPEKHTIHTEFYTVPQETVDACDAAHARGNRVIAVGTTSVRSLESAYDRELGRLRARNREATSLYILPGYTFGVVDALVTNFHVPRSTLMMLVSAFSTRENIMAAYKHAIESDYRLLSFGDAMFIE

SEQ ID NO: 65597 - protein, 353 aa, unidentified
  source 1..353: note = Coriobacteriia bacterium
  REGION 1..353: note = tr|A0A316P185|A0A316P185_9ACTN S-adenosylmethionine:tRNA ribosyltransferase-isomerase; OS = Coriobacteriia bacterium OX=2052159 GN=queA PE=3 SV=1
MKTEDFDYELPEKFIAQQPAIPRDSCKLMVVSRDGILEHRVFRDIGEYLHPGDLLVVNETRVLPARLLGHKKGTGGAAEALLLDKVADAPDTADEQTWNCLVKPGKRLKTCARMEFEHDGEVVLEGEVMGIDEANGSRSVRFTTPGAMSVDEAIHLVGHTPLPPYIKEYAGDDEFYQTVYSTEERSAAAPTAGLHFTVGLLDELKTAGVDIASVHLEVGLDTFRIVSEDDPLDHEMHTELYTVPPKTVRAIKEAKARGGRVIAVGTTSVRSLESAAAGGALEPCTRAATSLYILPGYEFKVCDAIITNFHVPRSTLMMLVSAFSGRETIMDAYETAKTEGYRFFSFGDAMLLL

SEQ ID NO: 65598 - protein, 403 aa, Coriobacterium glomerans
  REGION 1..403: note = tr|F2N873|F2N873_CORGP S-adenosylmethionine:tRNA ribosyltransferase-isomerase OS=Coriobacterium glomerans (strain ATCC 49209 / DSM 20642 / JCM 10262 / PW2); OX = 700015GN=queA PE=3 SV=1
MRTDDFDYDLPEELIAQAPVEPRDSCRMLVMHRRVASAAAAADARGDIEHRRFSDIIDYLAPGDLLVANETRVMPARLVGTKRETGGVAETLLLKRREDLDALGSVWECLVSPGRRLRPGSVIEYRAGGLHAPVQAPPVLIGQIEAFVENSKGGRLVRFHPVGSEALDGPCTLDAAIHAAGHVPLPPYITSYEGDPENYQTVYSMREEHSAAAPTAGLHFTEELIDRLRAKGVGWKTVELEVGIDTFRLVQEDDPTDHVMHTERYHVSADVIEAVRATKAGGGRVVAVGTTAVRSLESAFDTMRPASQPPVVARLFENAPDSAAVCCAGDLVERRDATTSLYLMPGSTFHVVDALITNFHVPRSTLMMLVSAFASREQIMDAYAQAVRERYRFLSFGDAMFID

SEQ ID NO: 65599 - protein, 382 aa, unidentified
  source 1..382: note = Corticibacter populi
  REGION 1..382: note = tr|A0A3M6QHJ9|A0A3M6QHJ9_9BURK S-adenosylmethionine:tRNA ribosyltransferase-isomerase; OS = Corticibacter populi OX=1550736 GN=queA PE=3 SV=1
MPDSAHRSPGEFCLSDFDYTLPPELIAQHPASERSASRLLDGRRLPPQDRHFHELPQLLRAGDLLVFNDTQVVKARIFGEKATGGKLEILIERVLQDGCVAAHMKVSKKPAAGAVLHLAGGLAAGGFDAELLGRWPDADGPLFLLRLHGAAGETPWSLMERFGHLPLPPYIERHQAEGDDADAEEDAERYQTVFARTPGAVAAPTAALHFDEKTLAALQAAGVERASITLHVGAGTFQPVKTEDLSQHRMHSEYYRIPPETVQAVEACRARGGRVVAVGTTSVRTLESWARTGQVQGDTQIFITPGFRFQVVDLLLTNFHLPKSTLMMLVSALAGYAHIRALYQHAVAGRYRFFSYGDCMLLERSDAASFVSNSASTALTSG

SEQ ID NO: 65600 - protein, 74 aa, unidentified
  source 1..74: note = Corynebacterium kefirresidentii
  REGION 1..74: note = tr|A0A243V812|A0A243V812_9CORY S-adenosylmethionine:tRNA ribosyltransferase-isomerase (Fragment) OS=Corynebacterium kefirresidentii OX=1979527; GN = CBI45_13470 PE=3 SV =1
VGLGTFRPVSVEDINDHEMHSEYYQMTQETANLLNQTKKEGHRIISVGTTSTRTLETIRRDYNEFVAVSGWTDI

SEQ ID NO: 65601 - protein, 357 aa, Cosenzaea myxofaciens
  REGION 1..357: note = tr|A0A198FNG6|A0A198FNG6_9GAMM S-adenosylmethionine:tRNA ribosyltransferase-isomerase; OS = Cosenzaea myxofaciens ATCC 19692 OX=1354337 GN=queA; PE = 3 SV=1
MRVSDFSFELPEALIAHYPQPQRSGCRLLSLEGETGALSHGVFTDVLDKLNAGDLLVFNNTRVIPARVYGRKASGGKIEMLVERMLDEHRVLAHIRASKSPKEGASLIFGEDESVQATMVARHDTLFEIRFDDKRDVLTILNSIGHMPLPPYIDRPDEESDKELYQTVYNERPGAVAAPTAGLHFDEPLLEALKNKGVEMAFVTLHVGAGTFQPVRVDNIEEHTMHSEYAEVPQDVVDAVLACKARGNRVIAVGTTSVRSLESAANAVQNALIAPFFDDTQIFIYPGYQYQVIDALITNFHLPESTLIMLVSAFAGYKNTINAYKNAVEEKYRFFSYGDAMFITRNPLAINEKVGQE

SEQ ID NO: 65602 - protein, 343 aa, Coxiella burnetii
  REGION 1..343: note = sp|Q83CC6|QUEA_COXBU S-adenosylmethionine:tRNA ribosyltransferase-isomerase OS=Coxiella burnetii (strain RSA 493 / Nine Mile phase I) OX=227377 GN=queA PE=3 SV=1
MKNQWKTSDFDYNLPVELIAQRPLADRSGSRLLYIDRSRRTVSHRQFNGFVEQVKPNDLVVLNDTKVIPARLFGHKQTGGKVECLVERILSKDRFLAHIRASKAPKLGSQIIIADNFKIIIEGRYNDLFECVLHSSASILDLLYQHGRIPLPPYIQREPDKDDQARYQTIFAERAGAVAAPTAGLHFNEETFDALRKKGAAITYVTLHVGAGTFQPVRADSLADHRMHHEWMEVSKAVCDAIAKCRKNNGRVIAVGTTVMRCLETATKNGECRPYAGETDLFIYPGFQFNCVDALLTNFHLPKSTLLMLVCAFGGYELVMEAYQKAVENRYRFFSYGDAMLIS

SEQ ID NO: 65603 - protein, 343 aa, Coxiella burnetii
  REGION 1..343: note = sp|A9NDS1|QUEA_COXBR S-adenosylmethionine:tRNA ribosyltransferase-isomerase OS=Coxiella burnetii (strain RSA 331 / Henzerling II) OX=360115 GN=queA PE=3 SV=1
MKNQWKTSDFDYNLPVELIAQRPLADRSGSRLLYIDRSRRTVSHRQFNGFVEQVKPNDLVVLNDTKVIPARLFGHKQTGGKVECLVERILSKDRFLAHIRASKAPKLGSQIIIADNFKIIIEGRYNDLFECVLHSSASILDLLYQHGRIPLPPYIQREPDKDDQARYQTIFAERAGAVAAPTAGLHFNEETFDALRKKGAAITYVTLHVGAGTFQPVRADSLADHRMHHEWMEVSKAVCDAIAKCRKNNGRVIAVGTTVMRCLETATKNSECRPYAGETDLFIYPGFQFNCVDALLTNFHLPKSTLLMLVCAFGGYELVMEAYQKAVENRYRFFSYGDAMLIS

SEQ ID NO: 65604 - protein, 347 aa, Coxiella sp.
  REGION 1..347: note = tr|A0A2G1ZWL1|A0A2G1ZWL1_9COXI S-adenosylmethionine:tRNA ribosyltransferase-isomerase; OS = Coxiella sp. (in: Bacteria) OX=59288 GN=queA PE=3 SV=1
MKTLETADFDYTLPQKLIAQYPLAERTASRLLVVNEDAYLHQHFGDILGHIRPDDLLVLNDTKVIPARLYGRKESGGKIECLIERVLSEHEALAHIRSSKSPKAGTQLILEDTMSAVVIGRDDALFHLRFDGETNLFDLLDQFGHMPLPPYIDRPDEINDRERYQTVFAKKRGAVAAPTASLHFSEALLEQIKAQGTHIANVTLHVGAGTFQPVRVDSIDDHKMHKEWIDVPQATVDAVHACRARGGRVIAIGTTAMRALESAAQSGTLQSYCGDTDIFIFPGFEFRCVDVLLTNFHLPKSTLLMLVSAFAGYKSTRAAYATAIEQSYRFFSYGDAMWVTKRCDMRL

SEQ ID NO: 65605 - protein, 346 aa, Coxiella sp.
  REGION 1..346: note = tr|A0A1F8VAF2|A0A1F8VAF2_9COXI S-adenosylmethionine:tRNA ribosyltransferase-isomerase; OS = Coxiella sp. RIFCSPHIGHO2_12_FULL_44_14 OX=1797697; GN = queA PE=3 SV=1
MTTFWKTDDFDYHLPVELIAQHPSAQRSECRLLLLERSSGKIIHLNFNELTNFMDNRDLVIFNDTKVIPARLLGCKLETGGRVEGLVERILPEQKLLVHLRASKPPQVGTRIRWAEAFDTRVLVQHGEGVYELQLEESACSVLELLYRYGAIPLPPYIQRLPTEQDQERYQTVFARQVGAVAAPTAGLHFDEALLSQVQLQGVSLAYVTLHVGAGTFQPVRVEEVSHHRMHAEVMEMTATTCEAIQYCRARGGRVITVGTTVARCLESAVRQGKIQPFYGETNLFIYPGYQFQCVDALVTNFHSPRSSLLMLVSALGGYELVRKAYREAVQQRYRFLSYGDAMMVI

SEQ ID NO: 65606 - protein, 349 aa, unidentified
  source 1..349: note = Coxiellaceae bacterium
  REGION 1..349: note = tr|A0A2E9Z8V7|A0A2E9Z8V7_9COXI S-adenosylmethionine:tRNA ribosyltransferase-isomerase; OS = Coxiellaceae bacterium OX=2026727 GN=queA PE=3 SV=1
MKLSHFNFDLPEDLLAEHPAEHRDESKLMVLHRETQTIEHKKFKDITEYFDEGDVMALNNTKVFPARLMGNKEKTGAKIEVFLLRELNKEQRLWDVLVDPARKIRIGNKLYFGIDESLVAEVIDNTTSRGRTLRFLFDGSYEEFRLKLKELGQTPLPKYIKRAEEDFDRERYQTIYAKHEGAVAAPTAGLHFSKHVLKRLEIKGVDLAELTLHVGLGTFNPVEVEDLSKHKMDSEELTIDVDAAAMVNKAKAAGHRICAIGTTSMRALESSVSSSGTLNPFQGWTHKFIFPPYDFKIGDAMVTNFHLPKSTLLMMVSAFAGHDFIKKAYDEAISHKYRFYSYGDAMLIL

SEQ ID NO: 65607 - protein, 348 aa, unidentified
  source 1..348: note = Coxiellaceae bacterium
  REGION 1..348: note = tr|A0A370CGA5|A0A370CGA5_9COXI S-adenosylmethionine:tRNA ribosyltransferase-isomerase; OS = Coxiellaceae bacterium RA15029 OX=2016198 GN=queA PE=3; SV = 1
MLNTTSSSYTRKDFSYLLPVKLIASYPSAQRTDSRMLCLDKSTGEIGHKKFKNILNFVNPGDLLVLNNTQVIPARLFAKKTTGGKVEILIERILDKKRVLAHLKSSKSLKIGTKLILENGISLEILARDESIFELYFLVEPPSILELLNKIGHIPLPPYLQRPDELFDWERYQTVFASSPGAVAAPTAGLHFDEVLLNALKSKGVNIAFITLHVGAGTFQPVRVERFEDHRMHREHVTVTEAVGEQIKKTKQENKRVIAVGTTVVRALETAALNGKIEVFAGDTDLFIYPGFRFRCVDALMTNFHLPESTLLILVSAFAGFKQVMAAYQSAMTFKYRFFSYGDAMWIS

SEQ ID NO: 65608 - protein, 341 aa, unidentified
  source 1..341: note = Crassaminicella sp.
  REGION 1..341: note = tr|A0A5C0SFF7|A0A5C0SFF7_9CLOT S-adenosylmethionine:tRNA ribosyltransferase-isomerase; OS = Crassaminicella sp. SY095 OX=2599308 GN=queA PE=3 SV=1
MKTSDFNFYLPEELIAQTPLENRDESRLMVLDKQTGEIQHKFFKNIIEYLKKGDCLVLNNTRVLPARLFGAKEHTGGKVEFLLLKRIDKDKWETLVKPGRKAKIGDRIVFGDGLLKAKIVDIGQEGSRIVEFEYNGIFEEILDKLGTMPLPPYIKETLKEKERYQTVYSKYEGSAAAPTAGLHFTNELLQQIEEKGIKIVYITLHVGLGTFRPVKSENILEHKMHSEFYMVSKEAAEVINNTKASGGRIISVGTTSTRTLESIADKKGFIHEGQGWTDIFIYPGYEFKVIDGLITNFHLPESTLIMLVSAFCGKDVTLNAYKEAVNNKYRFFSFGDAMFII

SEQ ID NO: 65609 - protein, 344 aa, unidentified
  source 1..344: note = Crenobacter cavernae
  REGION 1..344: note = tr|A0A4Q2J7G4|A0A4Q2J7G4_9NEIS S-adenosylmethionine:tRNA ribosyltransferase-isomerase; OS = Crenobacter cavernae OX=2290923 GN=queA PE=3 SV=1
MQLSDFDYHLPENLIAQHPPAERGASRLLLVDGAQRTDSTFASFVCQTRAGDVLVFNDTRVIKARLFGEKASGGKVEALVERVLDAHTVLAHVRASKSPKPGGLITFAGRWQAEMVERDGELFKLRFLAQDNVFDILEASGRLPLPPYIERDTDRDDDSRYQTVYAREQGAVAAPTAGLHFTDETLAELRAKGVTLAYVTLHVGAGTFQPVRVENIAEHKMHSEIYEIPQTTVDAIARARQTGGRVTAIGTTSLRALESAAQGGELKAGRGETDIFITPGYQFKVVDRLLTNFHLPKSTLLMLVSAFAGYDNIRAAYDHAVKHEYRFFSYGDAMLLEREQGDAR

SEQ ID NO: 65610 - protein, 347 aa, unidentified
  source 1..347: note = Crenobacter cavernae
  REGION 1..347: note = tr|A0A345Y333|A0A345Y333_9NEIS S-adenosylmethionine:tRNA ribosyltransferase-isomerase; OS = Crenobacter cavernae OX=2290923 GN=queA PE=3 SV=1
MQLSDFDYLLPENLIAQHPPAERGASRLLLVDGAQRTDSTFASFVDQTRAGDVLVFNDTRVIKARLFGEKASGGKVEALVERVLDAHTVLAHVRASKSPKPGGLITFAGRWQAEMVERDGELFKLRFLAQDNVFDILEASGRLPLPPYIERDTDLDDDARYQTVYAREQGAVAAPTAGLHFTDETLAELRAKGVTLAYVTLHVGAGTFQPVRVENIAEHKMHSEIYEIPQATVDAIAEAKAKGGRVMAIGTTSMRALESAAQQGELKAGRGETDIFITPGYRFRVVDRLLTNFHLPKSTLLMLVSAFAGYDNIRAAYQHAVKHEYRFFSYGDAMLLEREQGDARCPD

SEQ ID NO: 65611 - protein, 344 aa, unidentified
  source 1..344: note = Crenobacter luteus
  REGION 1..344: note = tr|A0A163C4P9|A0A163C4P9_9NEIS S-adenosylmethionine:tRNA ribosyltransferase-isomerase; OS = Crenobacter luteus OX=1452487 GN=queA PE=3 SV=1
MQLSDFDYHLPEHLIAQHPPAERGASRLLLVDGPRLEDSVFASFAEQVSAGDVLVFNDTRVIKARLFGEKASGGKVEALVERVLDEHTVLAHVRASKSPKPGGRIVFAERWEAEMVERVGELFKLRFLAADNVFDILDASGKLPLPPYIERDTDADDDARYQTVYAREQGAVAAPTAGLHFTDAMLAELEARGVTLAYVTLHVGAGTFQPVRVDNIAEHKMHSEIYEIPAATVEAIASAKAQGGRVTAVGTTSMRALESAARGGSLAAGRGETDIFITPGFRFQVVDRLLTNFHLPKSTLMMLVSAFAGYEHIRAAYAHAVEREYRFFSYGDAMLLEREKDTQA

SEQ ID NO: 65612 - protein, 345 aa, unidentified
  source 1..345: note = Crenobacter sp.
  REGION 1..345: note = tr|A0A4T0UKK3|A0A4T0UKK3_9NEIS S-adenosylmethionine:tRNA ribosyltransferase-isomerase; OS = Crenobacter sp. GY 70310 OX=2563443 GN=queA PE=3 SV=1
MQLSDFDYHLPEHLIAQHPPKQRGGSRLLHVDGLHLEDRLFSDLPAFLQAGDVLVFNDTRVIKARLFGEKDSGGKVEALIERVENEHEALAHVRASKSPKPGTRILFAGRWQAEMVERVGELFRLRFLDDENLFDILEASGKLPLPPYIARDTEGDDDERYQTVYAREKGAVAAPTAGLHFTEDMLTMLEGAGVKLAYVTLHVGAGTFQPVRVDNIAEHKMHSERYEISQATVDVIEAAHAAGRRVVAVGTTSMRALESAARGGVLAAGRGETDIFITPGFRFNVVDRLLTNFHLPKSTLLMLVSAFAGYDEMRAAYAHAVAAEYRFFSYGDAMLLERKEAACQG

SEQ ID NO: 65613 - protein, 349 aa, unidentified
  source 1..349: note = Crenotalea thermophila
  REGION 1..349: note = tr|A0A1I7NFN9|A0A1I7NFN9_9BACT S-adenosylmethionine:tRNA ribosyltransferase-isomerase; OS = Crenotalea thermophila OX=1393122 GN=queA PE=3 SV=1
MKLSQFKFDLPLNLIAQNPAKNRDESRLMVVHRDTGKIEHRIFKDIIEYFDDKDVFIVNNTKVFPARLYGRKEKTGAKIEVFLLRELNKANRLWDVVVDPARKIRVGNKLYFGEDDELVAEVIDNTTSRGRTIRFLFDGTDEEFRQLLEKLGETPLPKYIKRKPTEEDKERYQTVYAKYEGAVAAPTAGLHFTKELIKRMEIKGIRFAEITLHTGLGTFKPIEVEDLSKHKMDAEYYRIDEYAAKLVNEAKLSGHKVCAVGTTSVRAVESSVTSQGLLRPGEGWTNLFIHPPYHFSIPDAMVTNFHLPKTSLIIMVCAFAGYDLIMEAYQVAIKEKYRFYSYGDAMLIL

SEQ ID NO: 65614 - protein, 339 aa, Crenothrix polyspora
  REGION 1..339: note = tr|A0A1R4HBD7|A0A1R4HBD7_9GAMM S-adenosylmethionine:tRNA ribosyltransferase-isomerase; OS = Crenothrix polyspora OX=360316 GN=queA PE=3 SV=1
MKKSDFSYDLPDALIAQTPLIDRTASRLLVMNKKTGHCEDTQFNTFIDLLKTDDLLVFNNTKVIPARLFGKKPTGGHVEILIERVTGSHQALAHIRASKSPKVGTCIDLAEGHSCNVLARHDDLFELQFFGLPLLTLLEKIGHIPLPPYIKRADDAVDLIRYQTVFAQEAGAVAAPTAGLHFDVALLDKIKQKAIQTAYVTLHVGSGTFQPVRVDNLAEHIMHKEYFAVTQATVDAVLQTRARGGRVIAIGTTAVRALESASKSGTLSAGFGDTDLFITPGYQFKAVDALLTNFHLSESTLLMLVSAFADYEPVMCAYRHAIAASYRFFSYGDAMFIAD

SEQ ID NO: 65615 - protein, 339 aa, Crenothrix polyspora
  REGION 1..339: note = tr|A0A1R4HER7|A0A1R4HER7_9GAMM S-adenosylmethionine:tRNA ribosyltransferase-isomerase; OS = Crenothrix polyspora OX=360316 GN=queA PE=3 SV=1
MKKSHFAYQLPDELIAQIPLSDRTASRLLLMNKTTGQLQDKQFADFIDALNENDLLVFNNTKVIPARLFGKKRTGGRVEILIERIIDDNKAIAHVRASKSPKLNTLIDLDTDYYCEVLARHDDLFELQFYGAPLSALLEQIGHIPLPPYIKRADDAADLIRYQTVFAKETGAVAAPTAGLHFDLPTLAKIKHNGIQTAFVTLHVGSGTFQPVRVENLSEHIMHKEYFAVSQEVVDAVFKTRARGGRVVAIGTTAVRALESASRQGTLTAGFGDTDLFITPGYRFKSVDAVLTNFHLPESTLLMLVSAFAGYEPVMHAYQHAIEQSYRFFSYGDAMFIAD

SEQ ID NO: 65616 - protein, 340 aa, Crenothrix sp.
  REGION 1..340: note = tr|A0A1Y2ZTC6|A0A1Y2ZTC6_9GAMM S-adenosylmethionine:tRNA ribosyltransferase-isomerase; OS = Crenothrix sp. D3 OX=1880899 GN=queA PE=3 SV=1
MKKSDFNYDLPEALIAQNPLPNRDASRLLCMNRDTGQIVDRQFTDFIDLINKDDLLVFNDTKVIPARLFGKKRSGGKVEILIERILDDHHAIAHVRASKSPKEGALIDLDKGYCCEVQGRADDLFKLEFKGESSLLSLLEQIGHIPLPPYITRADNVSDLTRYQTVFAKTAGAVAAPTAGLHFDENLLEKINTRGINTVFVTLHVGSGTFQPVRVENLADHLMHKEYFAVSAATVEAVQQTRARGGRVIAIGTTAVRALESASKNGQLTSGCGDTDLFITPSYQFKSVDAMLTNFHLPESTLLMLVSAFAGYQPIMEAYQHAIEQSYRFFSYGDAMFLSR

SEQ ID NO: 65617 - protein, 346 aa, unidentified
  source 1..346: note = Criblamydia sequanensis
  REGION 1..346: note = tr|A0A090D0L1|A0A090D0L1_9BACT S-adenosylmethionine:tRNA ribosyltransferase-isomerase; OS = Criblamydia sequanensis CRIB-18 OX=1437425 GN=queA PE=3; SV = 1
MNPNQILDLDAYDFSLPDDLIAKSPMSPRDHSRLLVIDRKSGQMTERKFFQIKDFFSKGDCLVTNNTKVIPARLIGAKETGSKAECLLLKALSPFSWEALVKPGKKITEGTRLIFSEGFEALVTAVLPSGNRVLEFRCDSMSIPEAIKKYGKIPLPSYINEGEAKEEDRITYQTVYAKEEGSAAAPTAGLHFTQNLLDDINKQGADLLSVTLHVGVGTFRPVKEKDIRNHLMHSESYMISTETASKINESKGNLFAVGTTSLRAIESNASLNGKLTGGSFDTSIFIYPGFQFKRVNHLITNFHLPKSSLLMLVSAFAGYDLIREAYQKAIKDRFRFYSYGDAMLII

SEQ ID NO: 65618 - protein, 361 aa, unidentified
  source 1..361: note = Cribrihabitans marinus
  REGION 1..361: note = tr|A0A1H6VEK3|A0A1H6VEK3_9RHOB S-adenosylmethionine:tRNA ribosyltransferase-isomerase; OS = Cribrihabitans marinus OX=1227549 GN=queA PE=3 SV=1
MKLSDFDFDLPDELIATRPARPRSSARMLVAEGDAIHDARVTDLPGWLRPGDRLVLNDTKVIPARLNGTRTRQSAQGEVRARIEATLLEPRADGCWAALVKPLKKLKPGEEIVFSDQLSAVLDRVEGGQALLRFNRTGEDFDAALAQAGAMPLPPYIAGKRPADARDKDDYQTVWARHAGAVAAPTASLHFDDDLLAALQARGVAFTHVTLHVGAGTFLPVKVEDVTTHRMHAEWGRVSPQAADEIAATRARGGRIIPVGTTALRLIESAARDGGIAPWEGETDIFIYPGFQFRVTDALMTNFHLPKSTLLMLVSALMGQDRMKRVYAHAVEARYRFFSYGDASLLLPGPSHATRAPDRMS

SEQ ID NO: 65619 - protein, 359 aa, unidentified
  source 1..359: note = Cricetibacter osteomyelitidis
  REGION 1..359: note = tr|A0A4R2T1T1|A0A4R2T1T1_9PAST S-adenosylmethionine:tRNA ribosyltransferase-isomerase; OS = Cricetibacter osteomyelitidis OX=1521931 GN=queA PE=3; SV = 1
MLVSDFHFDLPNELIACYPKTERKSSRLLQLNGENGEIFHRTFADVIDLINEGDLLIFNNTRVIPARMFGRKASGGKVEVLVERILSESRFLAHVRSSKAPKAGTALYLGEDKLGDGNGVKAVMIGRQDALFELEIAEKSTALLDVLQQIGHMPLPPYIDRPDEEADQERYQTVYSKVPGAVAAPTAGLHFDDELLAQLKTKGVNFAFVTLHVGAGTFQPVRVEKIEDHHMHAEYVEVSQDVADAVLATKAAGKRVIAVGTTSVRSIESAALASEQNRSGNLLDPYFSDTSIFIYPGKKFRVIDCLITNFHLPESTLIMLVSAFAGYQHTMNAYKSAVEKRYRFFSYGDAMFITKNTAL

SEQ ID NO: 65620 - protein, 340 aa, unidentified
  source 1..340: note = Criibacterium bergeronii
  REGION 1..340: note = tr|A0A552UVK0|A0A552UVK0_9FIRM S-adenosylmethionine:tRNA ribosyltransferase-isomerase; OS = Criibacterium bergeronii OX=1871336 GN=queA PE=3 SV=1
MDTRDFDYYLPEELIAQEPLKDRSASRMMKLDKQTGEIKHESFKNIVNYLDENCVLVLNNTRVLPARLYGIKEETDAHIEILLLKRIDMYNWQILVKPAKRAKIGTVIRFSDRLSGTISKEEDEGIRYIKFDFDGVFEDIIYEIGSMPLPPYIHHKLDDKERYQTVYSKINGSSAAPTAGLHFTDEILGQIKNKGIEIEYVTLHVGLGTFRPVKVDKIEQHHMHSEYYNIDEDVAKRLNEARKNGKKIVAVGTTTVRTLESASNKDGELTKLSDNTNIFIFPPYKFKFVDSIITNFHLPMSTLIMMISAFAGKEKLFHAYEEAVKNKYRFFSFGDCMFID

SEQ ID NO: 65621 - protein, 340 aa, unidentified
  source 1..340: note = Criibacterium bergeronii
  REGION 1..340: note = tr|A0A371IIZ4|A0A371IIZ4_9FIRM S-adenosylmethionine:tRNA ribosyltransferase-isomerase; OS = Criibacterium bergeronii OX=1871336 GN=queA PE=3 SV=1
MDTRDFDYYLPEELIAQEPLKDRSASRMMKLDKQTGEIKHESFKNIVNYLDENCVLVLNNTRVLPARLYGIKEETDAHIEILLLKRIDMYNWQILVKPAKRAKIGTVIRFSDRLSGTISKEEDEGIRYIKFDFDGVFEDIIYEIGSMPLPPYIHHKLDDKERYQTVYSKINGSSAAPTAGLHFTDEILGQIKNKGIEIEYVTLHVGLGTFRPVKVDKIEQHHMHSEYYNIDEDVAKRLNEARKNGKKIVAVGTTTVRTLESASNKDGELTKLSDNTNIFIFPPYKFKFVDSIITNFHLPMSTLIMMISAFAGKDKLFHAYEEAVKNKYRFFSFGDCMFID

SEQ ID NO: 65622 - protein, 374 aa, unidentified
  source 1..374: note = Crinalium epipsammum
  REGION 1..374: note = tr|K9VWL9|K9VWL9_9CYAN S-adenosylmethionine:tRNA ribosyltransferase-isomerase OS=Crinalium epipsammum PCC 9333 OX=1173022 GN=queA PE=3 SV=1
MVQIELDRLLSSYDYELPEELIAQTPAVPRDSSRLLVVNSPQQHTHSIFSNLTDFLLPGDLLVLNNTRVIPARLYGKKSTGAPVEVLLLEEQDKNCWLALVKPGRRLQPGATIVFEANNSVNQDAISNLSDVAGVKIPSILTALVLAKDEATGGRLLQFDLPTEINFAEVLTLFGQLPLPPYITSSESEAEQYQTVYAHRSGAIAAPTAGLHFTTELMQQLKQHQIEQAYVTLHVGVGTFRPVEVEDITTHKMHQEWVEVPPSTVEKIRETKLNGGRIIAVGTTVARSLEAAAISGELQPFCGKTNLFIYPGYQLRVIEGLITNFHLPRSSLMMLVSALIGRRRLLDLYQEAIAQRYRFYSFGDAMLILPEARI

SEQ ID NO: 65623 - protein, 351 aa, Croceibacter atlanticus
  REGION 1..351: note = tr|A3UBA6|A3UBA6_CROAH S-adenosylmethionine:tRNA ribosyltransferase-isomerase OS=Croceibacter atlanticus (strain ATCC BAA-628 / HTCC2559 / KCTC 12090) OX=216432; GN = q ueA PE=3 SV=1
MGMKLSNFGFDLPENLLADRPAENRDEARLMVLNRKEQTIEHKQFKDLIDYFEPDDVLVLNNTKVFPARLYGNKEKTGARIEVFLLRELNPETRLWDVLVDPARKIRIGNKLYFGDDESLVAEVIDNTTSRGRTLRFLYDGSYEEFRKKLKDLGETPLPKYIKREVEPDDAERYQTIFAKEEGAVAAPTAGLHFSKHLLKRLEIKGINFAEVTLHVGLGTFNPVEVEDLSKHKMDSEEAYIAKPATEVVNKAISEKRRICAVGTTVMRTLESAVSSSGTLNEFGGWTNKFIFPPYDFSIANCMVTNFHTPKSTLLMMTAAFAGHEFTQRAYAEAVKEKYNFYTYGDAMLII

SEQ ID NO: 65624 - protein, 359 aa, Croceicoccus marinus
  REGION 1..359: note = tr|A0A1Z1FAT5|A0A1Z1FAT5_9SPHN S-adenosylmethionine:tRNA ribosyltransferase-isomerase; OS = Croceicoccus marinus OX=450378 GN=queA PE=3 SV=1
MRVDAFDFDLPAERIALRPARPRDAARMLLVEGAEGRLIDRQVRDLPSLLSPGDVLVFNDTRVIPARLEGVRPPRQGENGEGARIGATLHKRIDLRRWQAFVRNGKRLRAGDTICFPADVAAKAEQRLADGSWTLAFQGEEPVELLLERAGQMPLPPYIAGKRETDEQDRSDYQTMFARQDGAVAAPTAALHFTPELIAALDKRGIARETLTLHVGAGTFLPVKAEDTEDHQMHAEWGTIDAATAERLNEVRKAGGRVIAVGTTVLRLLESAADENDVIQPFAGDTSIFITPGYRFRAIDGLMTNFHLPKSTLFMLVSALMGLDVMQSAYAHAIERGYRFYSYGDSSLLLPNRAMSAAS

SEQ ID NO: 65625 - protein, 344 aa, unidentified
  source 1..344: note = Croceicoccus naphthovorans
  REGION 1..344: note = tr|A0A0G3XGM6|A0A0G3XGM6_9SPHN S-adenosylmethionine:tRNA ribosyltransferase-isomerase; OS = Croceicoccus naphthovorans OX=1348774 GN=queA PE=3 SV=1
MKVDLFDFELPPERIALRPARPRDSARMLVAAGDAPFADLTMRDLPQVLRAGDVLVFNDTRVIPAQLEGLRGEARIGATLHKRIDLRRWQAFIRNAKRLKEGDRIAFPADVSAIAEQRHADGSFTLAFEGEEPVEVLLERAGRMPLPPYIAGKRPTDEADRSDYQTMFAEKDGAVAAPTAALHFTPDLIAALDAAGIGRETLTLHVGAGTFLPVKADDTDDHAMHSEWGRMDKATADRLNAARAAGGRVISVGTTSLRVLESAADEDGVIHPFEGDTAIFITPGYRFRAIDGLMTNFHLPKSTLFMLVSALMGLDCMRSAYAHAIANEYRFYSYGDGSLLLPNG

SEQ ID NO: 65626 - protein, 347 aa, unidentified
  source 1..347: note = Croceicoccus ponticola
  REGION 1..347: note = tr|A0A437H0R2|A0A437H0R2_9SPHN S-adenosylmethionine:tRNA ribosyltransferase-isomerase; OS = Croceicoccus ponticola OX=2217664 GN=queA PE=3 SV=1
MRVDLFDFELPPERIALRPARPRDAARLLVVDGDAPFNDRVMRELPQVLRAGDVLVFNDTRVIPAQLEGTRGGHDGQGARIGATLHKRIDLRRWQAFIRNAKRLREGDRIDFPAQVTAIAEMRHADGSFTLAFEGDEPVEVLLERAGRMPLPPYIAGKRETDAADREDYQTMFAQHDGAVAAPTAALHFTPDLIAALDAAGVMRETLTLHVGAGTFLPVKAEDTADHAMHSEWGRMDAATAARLNAARARGNRVIAVGTTSLRVLESAADEYGTIQPFEGDTAIFITPGYRFRAIDGLMTNFHLPKSTLFMLVSALMGLDRMQATYAHAIEQGYRFYSYGDGSLLLP

SEQ ID NO: 65627 - protein, 355 aa, Croceicoccus sp.
  REGION 1..355: note = tr|A0A2D8D4I1|A0A2D8D4I1_9SPHN S-adenosylmethionine:tRNA ribosyltransferase-isomerase; OS = Croceicoccus sp. OX=1927144 GN=queA PE=3 SV=1
MRVDAFDFDLPNERIALRPARPRDAARMLVVEGSDARLTDRQVRDLPALLSPGDVLVFNDTRVIPAQLEGVRPPRGGEAGDGASIGATLHKRIDLRRWQAFVRNGKRLREGDRIQFPADVMAIAEGRLPDGSWTLHFGGEEPVEVLLERAGRMPLPPYIAGKRGTDEQDRTDYQTMFAERDGAVAAPTAALHFTPELIAALDQRGIARETLTLHVGAGTFLPVKADDTDDHAMHAEWGRIDAATADRLNEARKAGGRIVAVGTTVLRLLESAADENGVIQPFEGDTSIFITPGYRFRAIDALMTNFHLPKSTLFMLVSALMGLDVMQSAYAHAIAGEYRFYSYGDSSLLLPERGA

SEQ ID NO: 65628 - protein, 349 aa, Croceitalea dokdonensis
  REGION 1..349: note = tr|A0A0P7AG49|A0A0P7AG49_9FLAO S-adenosylmethionine:tRNA ribosyltransferase-isomerase; OS = Croceitalea dokdonensis DOKDO 023 OX=1300341 GN=queA; PE = 3 SV=1
MKLSNFNFELPKELLAEYPAENRDESKLMVIHRETGKIEHKMFKDLINYFDEGDVMVLNNTKVFPARLFGNKEKTGARIEVFLLRELNEEQRLWDVLVDPARKIRIGNKLYFGDDEDLVAEVIDNTTSRGRTLRFLYDGSYTDFRRKLRQLGETPLPKYIKREVMPEDEERYQTIYAKHEGAVAAPTAGLHFSKHLLKRLEIKGIDFAEVTLHIGLGTFNPVEVEDLSKHKMDSEELTIEEKATEIVNNAKKNKKRICAVGTTVMRGLESAVSSDHQLNTFEGWTNKFIFPPYDFSIANCMVTNFHLPKSTLLMMISAFMGHDLMKKAYKQAILEQYRFYSYGDAMLIL

SEQ ID NO: 65629 - protein, 349 aa, unidentified
  source 1..349: note = Croceivirga radicis
  REGION 1..349: note = tr|A0A1V6LUQ1|A0A1V6LUQ1_9FLAO S-adenosylmethionine:tRNA ribosyltransferase-isomerase; OS = Croceivirga radicis OX=1929488 GN=queA PE=3 SV=1
MKLSNFNFDLPKELLAEYPAENRDESKLMVIHRDTGKIEHRMFKDMIEYFDEGDVMVLNNTKVFPARLFGNKEKTGARIEVFLLRELNEEQRLWDVLVDPARKIRIGNKLYFGDDESLVAEVIDNTTSRGRTLRFLYDGSYTDFRRKLRELGETPLPKYIKREVTPEDEDRYQTIYAKHEGAVAAPTAGLHFSKHLLKRLEIKGVDFAEVTLHVGLGTFNPVEVEDLSKHKMDSEELVIDEKATEIVNNAKANKKKVCAVGTTVMRGLESAVSSERTLNTFEGWTNKFIFPPYDFSIADCMITNFHLPKSTLLMMISAFMGHDLMKKSYKQAILENYRFYSYGDAMLII

SEQ ID NO: 65630 - protein, 349 aa, unidentified
  source 1..349: note = Crocinitomicaceae bacterium
  REGION 1..349: note = tr|A0A2E0FJ40|A0A2E0FJ40_9FLAO S-adenosylmethionine:tRNA ribosyltransferase-isomerase; OS = Crocinitomicaceae bacterium OX=2026728 GN=queA PE=3 SV=1
MKLSQFKYDLPEELIAQYPVENRDESRLLVVNRKEGKFEHKMFHEVIDYFDDGDAMVFNNTRVFPARMYGNKEKTGARIEVFLLRELNRESLLWDVLVDPARKIRIGNKLYFGEDESLVAEVIDNTTSRGRTLRFLYDGPYEDFKEAITALGETPIPKYIDRPVEPIDEERFQTIFAKEEGAVAAPTAGLHFSRELLKRLELKGLNFAELTLHVGLGTFRPVEVEDLTKHKMDSEQLRIPETAAFTVNHTKDAKKKVCAIGTTVMRSIETSVSTEGRLKPFDGWTNKFIFPPYDFRIADAMITNFHMPMSTLLMQVCAFGGYDLVIEAYQEAIKEKYRFYSYGDAMLIL

SEQ ID NO: 65631 - protein, 409 aa, unidentified
  source 1..409: note = Crocinitomicaceae bacterium
  REGION 1..409: note = tr|A0A2D7DG15|A0A2D7DG15_9FLAO S-adenosylmethionine:tRNA ribosyltransferase-isomerase; OS = Crocinitomicaceae bacterium OX=2026728 GN=CL828_04400; PE = 3 SV=1
MQTADYAYDLPESAIAIHPVTPRSGARLLTWRQGEVATHQRFTDLPVVLPQGTQLWVNNTRVIRARLLLQKPTGGRLEVFLLEPHERSMEQALASTQAVVWKCMVRGGKRWTAGEAGLQVEDTAGKWEIAAKRVGMDEGVRFIELRWTHRSAATGDVRKASFAELLEAMGKMPLPPYMHRPAQEQDAEDYQTVYAEVPGSVAAPTAGLHFDALLMADLSTSTSLHHVTLHVGAGTFKPLGEGDVTDHVMHGEHCSVSFDAIQALAAEGVHRVSTGTTSLRTLESLYWLAIKWKETGEQPVELYQWEWRHELGDAAEHLGWTMETAMQWCVNALDGADWHFRTSVMMVPPYRIRSVQGLITNFHLPNSTLLCLVASAIGDDWRSIYDRALAEGFRFLSYGDGSYLEWDPR

SEQ ID NO: 65632 - protein, 351 aa, Crocinitomix sp.
  REGION 1..351: note = tr|A0A2W1NAS4|A0A2W1NAS4_9FLAO S-adenosylmethionine:tRNA ribosyltransferase-isomerase; OS = Crocinitomix sp. SM1701 OX=2219161 GN=queA PE=3 SV=1
MKLSAFDFDLPDNLIAEHPVPNRDESRLMVLNREKQTIEHKVFKDVIDYFDDGDVMIMNNTKVFPARMYGNKEKTGARIEVFLLRELNRESLLWDVLVDPARKIRIGNKLYFTEDDSLVAEVIDNTTSRGRTIRFLFDGSYDEFKKKITELGETPIPPYIKGLRDVVPEDEERYQTIYAKEEGAVAAPTAGLHFSRELLKRLEIKGVQTADVTLHIGLGTFRNVEVEDLTKHKMDSEQCIILPEACDIVNNAKKKKKRICAVGTTAMRAIESSVSTSGMLNPYNGWTNKFIFPPYDFSIADSLITNFHTPQSTLLMMVSAFADYDFVKKAYAEAVKEKYRFFSYGDAMLII

SEQ ID NO: 65633 - protein, 360 aa, unidentified
  source 1..360: note = Crocosphaera chwakensis
  REGION 1..360: note = tr|A3IRC7|A3IRC7_9CHRO S-adenosylmethionine:tRNA ribosyltransferase-isomerase OS=Crocosphaera chwakensis CCY0110 OX=391612 GN=queA PE=3 SV=1
MSSDYLLSSYDYYLPPELIAQNPMTPRDESRLLVINSLRTHTHSIFRDLPEWLSPGDLLVFNNTRVIPARLYGKKATGAPVEILLLEEKEPLCWLALVKPGKRFKIGSEIYFYLDNNDCSQDNFLVATVVDRDEETGGRLLKFKVNSLDVFWKKIEELGQIPFPPYVTESKAAPSQYQTIYAQKPGAVAAPTAGLHFTDKLLENLQQKGINQAYITLHVGLGTFRPVDIENIKEHKMHQEWIELPEITVEKIKETKANGGRVIAVGTTVVRTLEGAAKAAEMEGKQGLIPYRDKTDIFIYPGYSWRVIDGLITNFHLPKSSLLMLVSALIGRERLLELYQIAIEEKYRFYSFGDGMLILL

SEQ ID NO: 65634 - protein, 361 aa, unidentified
  source 1..361: note = Crocosphaera subtropica
  REGION 1..361: note = tr|B1WNE7|B1WNE7_CROS5 S-adenosylmethionine:tRNA ribosyltransferase-isomerase OS=Crocosphaera subtropica (strain ATCC 51142 / BH68) OX=43989 GN=queA PE=3 SV=1
MSSDHLLSSYDYDLPPELIAQNPMIPRDHSRLLVINSPTTHIHSVFRDLPKWLLPGDLLVFNNTRVIPARLYGKKTTGAPVEILLLEEKEPFCWLALVKPGKRFKIGSEIHFPLDHNDDKEDMFLAATVLDRDEETGGRLLKFNVDSLDLFWKKIEEIGQIPFPPYVTESEADSSQYQTIYAQKPGAVAAPTAGLHFTDELLDNLQHKRINQAYITLHVGLGTFRPVDMENIKEHKMHQEWIEVPDVTVEKIKETKANGGRVIAVGTTVVRALEGAAKAAEMEGKKDLKAFRGKTDIFIYPGYSWRVIDGMITNFHLPKSSLLMLVSALIGRERLLDLYQIAIKEKYRFYSFGDGMLILLS

SEQ ID NO: 65635 - protein, 361 aa, unidentified
  source 1..361: note = Crocosphaera watsonii
  REGION 1..361: note = tr|T2IAE2|T2IAE2_CROWT S-adenosylmethionine:tRNA ribosyltransferase-isomerase OS=Crocosphaera watsonii WH 8502 OX=423474 GN=queA PE=3 SV=1
MSSEHLLSSYDYYLPQELIAQNPVIPRDNSRLLVINSPENHIHSVFRDLPQWLLPGDLLVFNNTRVIPARLYGAKSTGAPVEILLLEEKEPFCWLALVKPGKRFKIGSEIYFRLDDDEDNFLVATVVDRDEETGGRLLKFQVDSLDLFWQKIEEIGQIPFPPYVTESDAKPSQYQTIYAQKPGAVAAPTAGLHFTEELLENLQQKGINQAYITLHVGLGTFRPVDIDNIKEHKMHQEWIEVPEIIVEKIKETKANGGRVIAVGTTVVRALEGTAKATEMAGKQELMEFRGKTDIFIYPGYSWCVIDGLITNFHLPKSSLLMLVSALIGRERLLELYQIAIEEKYRFYSFGDGMLILLESKN

SEQ ID NO: 65636 - protein, 361 aa, unidentified; identical to SEQ ID NO: 65635
  source 1..361: note = Crocosphaera watsonii
  REGION 1..361: note = tr|T2ILP4|T2ILP4_CROWT S-adenosylmethionine:tRNA ribosyltransferase-isomerase OS=Crocosphaera watsonii WH 0005 OX=423472 GN=queA PE=3 SV=1

SEQ ID NO: 65637 - protein, 356 aa, Cronobacter condimenti
  REGION 1..356: note = tr|K8AJ82|K8AJ82_9ENTR S-adenosylmethionine:tRNA ribosyltransferase-isomerase OS=Cronobacter condimenti 1330 OX=1073999 GN=queA PE=3 SV=1
MRLTDFSFELPESLIAHYPQAQRSACRLLSLDGPTGNLTHGTFTDLLDKLNPGDLLVFNNTRVIPARLFGRKASGGKIEVLVERMLDDHRVLAHIRASKAPKPGAELLLGDDESVNATMTARHDALFEVQFNDERPVLDILNSIGHMPLPPYIERPDEESDRELYQTVYSQKPGAVAAPTAGLHFDEPLLERLRAKGIEMAFVTLHVGAGTFQPVRAESIEDHVMHSEYAEVPQEVVDAVSAAKARGNKVVAVGTTSVRSLESAAQAAKDALIAPFFGDTQIFIYPGYQYKVIDALVTNFHLPESTLIMLVSAFAGYKHTMNAYREAVKAEYRFFSYGDAMYITYNPQAIHERPGA

SEQ ID NO: 65638 - protein, 356 aa, Cronobacter dublinensis
  REGION 1..356: note = tr|K8AL13|K8AL13_9ENTR S-adenosylmethionine:tRNA ribosyltransferase-isomerase OS=Cronobacter dublinensis 1210 OX=1208656 GN=queA PE=3 SV=1
MRLTDFSFELPESLIAHYPQAQRSACRLLSLDGPTGDLTHGTFTDLLDKLNPGDLLVFNNTRVIPARLFGRKASGGKIEVLVERMLDDHRVLAHIRASKAPKPGAELLLGDDESVNATMTARHDALFEVQFNDERPVLDILNSIGHMPLPPYIERPDEASDRELYQTVYSEKPGAVAAPTAGLHFDEPLLARLREKGVEMAFVTLHVGAGTFQPVRVESIEDHVMHSEYAEVPQDVVDAVLAAKARGNKVVAVGTTSVRSLESAAQAATDAPIAPFFGDTQIFIYPGYQYQVIDALVTNFHLPESTLIMLVSAFAGYQHTMNAYREAVKAEYRFFSYGDAMYITYNPQAIFERPGE

SEQ ID NO: 65639 - protein, 356 aa, Cronobacter dublinensis; identical to SEQ ID NO: 65638
  REGION 1..356: note = tr|A0A0K2NZD4|A0A0K2NZD4_9ENTR S-adenosylmethionine:tRNA ribosyltransferase-isomerase; OS = Cronobacter dublinensis subsp. dublinensis LMG 23823; OX = 1159554 GN=queA PE=3SV=1

SEQ ID NO: 65640 - protein, 356 aa, Cronobacter malonaticus
  REGION 1..356: note = tr|V5U223|V5U223_9ENTR S-adenosylmethionine:tRNA ribosyltransferase-isomerase OS=Cronobacter malonaticus; OX = 413503 GN=queA PE=3 SV=1
MRLTDFSFELPESLIAHYPQAQRSACRLLSLDGPTGDLTHGTFTDLLDKLNPGDLLVFNNTRVIPARLFGRKASGGKIEVLVERMLDDHRVLAHIRASKAPKPGAELLLGDDESVNATMTARHDALFEVQFNDERPVLDILNSIGHMPLPPYIERPDEEADRELYQTVYSQKPGAVAAPTAGLHFDEPLLERLRAKGIEMAFVTLHVGAGTFQPVRVESIEDHVMHSEYAEVPQEVVDAVLAAKARGNKVVAVGTTSVRSLESAAQAVQDALIAPFFGDTQIFIYPGYQYKVIDALVTNFHLPESTLIMLVSAFAGYKHTMNAYREAVKAEYRFFSYGDAMYITYNPQAINERPGE

SEQ ID NO: 65641 - protein, 356 aa, Cronobacter malonaticus
  REGION 1..356: note = tr|A0A423Y4A6|A0A423Y4A6_9ENTR S-adenosylmethionine:tRNA ribosyltransferase-isomerase; OS = Cronobacter malonaticus OX=413503 GN=queA PE=3 SV=1
MRLTDFSFELPESLIAHYPQAQRSACRLLSLDGPTGDLTHGTFTDLLDKLNPGDLLVFNNTRVIPARLFGRKASGGKIEVLVERMLDDHRVLAHIRASKAPKPGAELLLGDDESVNATMTARHDALFEVQFNDERPVLDILNSIGHMPLPPYIERPDEEADRELYQTVYSQKPGAVAAPTAGLHFDEPLLERLRAKGIEMAFVTLHVGAGTFQPVRVESIEDHVMHSEYAEVPQEVVDAVLAAKARGNKVVAVGTTSVRSLESAAQAAQDALIAPFFGDTQIFIYPGYQYKVIDALVTNFHLPESTLIMLVSAFAGYKHTMNAYREAVKAEYRFFSYGDAMYITYNPQAINERPGE

SEQ ID NO: 65642 - protein, 356 aa, Cronobacter muytjensii
  REGION 1..356: note = tr|A0A2T7AQG7|A0A2T7AQG7_9ENTR S-adenosylmethionine:tRNA ribosyltransferase-isomerase; OS = Cronobacter muytjensii OX=413501 GN=queA PE=3 SV=1
MRLTDFSFELPESLIAHYPQAQRSACRLLSLDGPTGDLTHGTFTDLLDKLNPGDLLVFNNTRVIPARLFGRKASGGKIEVLVERMLDDHRVLAHIRASKAPKPGAELLLGDDESVNATMTARHDALFEVQFNDERPVLDILNSIGHMPLPPYIERPDEESDRELYQTVYSEKPGAVAAPTAGLHFDEPLLARLREKGIEMAFVTLHVGAGTFQPVRVESIEDHVMHSEYAEVPQDVVDAVLAAKARGNKVVAVGTTSVRSLESAAQAAQDALIAPFFGDTQIFIYPGYQYKVIDALVTNFHLPESTLIMLVSAFAGYQHTMNAYREAVKAEYRFFSYGDAMYITYNPQAIFERPGE

SEQ ID NO: 65643 - protein, 356 aa, Cronobacter sakazakii
  REGION 1..356: note = sp|A7MEL5|QUEA_CROS8 S-adenosylmethionine:tRNA ribosyltransferase-isomerase OS=Cronobacter sakazakii (strain ATCC BAA-894) OX=290339 GN=queA PE=3 SV=1
MRLTDFSFELPESLIAHYPQAQRSACRLLSLDGPTGDLTHGTFTDLLDKLNPGDLLVFNNTRVIPARLFGRKASGGKIEVLVERMLDDHRVLAHIRASKAPKPGAELLLGDDESVNATMTARHDALFEVQFNDARPVLDILNSIGHMPLPPYIERPDEEADRELYQTVYSQKPGAVAAPTAGLHFDEPLLERLRAKGIEMAFVTLHVGAGTFQPVRVESIEDHVMHSEYAEVPQEVVDAVLAAKARGNKVVAVGTTSVRSLESAAQAAQDALIAPFFGDTQIFIYPGYQYKVIDALVTNFHLPESTLIMLVSAFAGYKHTMNAYREAVKAEYRFFSYGDAMYITYNPQAINERPGE

SEQ ID NO: 65644 - protein, 356 aa, Cronobacter sakazakii
  REGION 1..356: note = tr|A0A3Q9CHZ9|A0A3Q9CHZ9_CROSK S-adenosylmethionine:tRNA ribosyltransferase-isomerase; OS = Cronobacter sakazakii OX=28141 GN=queA PE=3 SV=1
MRLTDFSFELPESLIAHYPQAQRSACRLLSLDGPTGDLTHGTFTDLLDKLNPGDLLVFNNTRVIPARLFGRKASGGKVEVLVERMLDDHRVLAHIRASKAPKPGAELLLGDDESVNATMIARHDALFEVQFNDERPVLDILNSIGHMPLPPYIERPDEEADRELYQTVYSQKPGAVAAPTAGLHFDEPLLERLRAKGIEMAFVTLHVGAGTFQPVRVESIEDHVMHSEYAEVPQEVVDAVLAAKARGNKVVAVGTTSVRSLESAAQAAQDALIAPFFGDTQIFIYPGYQYKVIDALVTNFHLPESTLIMLVSAFAGYKHTMNAYREAVKAEYRFFSYGDAMYITYNPQAINERPGE

SEQ ID NO: 65645 - protein, 356 aa, Cronobacter turicensis
  REGION 1..356: note = tr|C9XX68|C9XX68_CROTZ S-adenosylmethionine:tRNA ribosyltransferase-isomerase OS=Cronobacter turicensis (strain DSM 18703 / LMG 23827 / z3032) OX=693216 GN=queA; PE = 3SV=1
MRLTDFSFDLPESLIAHYPQAQRSACRLLSLDGPTGDLTHGTFTDLLDKLNPGDLLVFNNTRVIPARLFGRKASGGKIEVLVERMLDDHRVLAHIRASKAPKPGAELLLGDDESVNATMTARHDALFEVQFNDERPVLDILNSIGHMPLPPYIERPDEEADRELYQTVYSQKPGAVAAPTAGLHFDEPLLERLRAKGIEMAFVTLHVGAGTFQPVRVESIEDHVMHSEYAEVPQEVVDAVLAAKARGNKVVAVGTTSVRSLESAAQAAQDALIAPFFGDTQIFIYPGYQYQVIDALVTNFHLPESTLIMLVSAFAGYKHTMNAYREAVKAEYRFFSYGDAMYITYNPQAINERPGE

SEQ ID NO: 65646 - protein, 356 aa, Cronobacter turicensis
  REGION 1..356: note = tr|A0A2T7B991|A0A2T7B991_9ENTR S-adenosylmethionine:tRNA ribosyltransferase-isomerase; OS = Cronobacter turicensis OX=413502 GN=queA PE=3 SV=1
MRLTDFSFELPESLIAHYPQAQRSACRLLSLDGPTGDLTHGTFTDLLDKLNPGDLLVFNNTRVIPARLFGRKASGGKIEVLVERMLDDHRVLAHIRASKAPKPGAELLLGDDESVNATMTARHDALFEVQFNDERPVLDILNSIGHMPLPPYIERPDEEADRELYQTVYSQKPGAVAAPTAGLHFDEPLLERLRAKGIEMAFVTLHVGAGTFQPVRVESIEEHVMHSEYAEVPQEVVDAVLAAKARGNKVVAVGTTSVRSLESAAQAAQDALIAPFFGDTQIFIYPGYQYQVIDALVTNFHLPESTLIMLVSAFAGYKHTMNAYREAVKAEYRFFSYGDAMYITYNPQAINERPGE

SEQ ID NO: 65647 - protein, 356 aa, Cronobacter universalis
  REGION 1..356: note = tr|A0A376E3D1|A0A376E3D1_9ENTR S-adenosylmethionine:tRNA ribosyltransferase-isomerase; OS = Cronobacter universalis NCTC 9529 OX=1074000 GN=queA; PE = 3 SV=1
MRLTDFSFELPESLIAHYPQAQRSACRLLSLDGPTGDLTHGTFTDLLDKLNPGDLLVFNNTRVIPARLFGRKASGGKVEVLVERMLDDHRVLAHIRASKAPKPGAELLLGDDESVNATMTARHDALFEVQFNDARPVLDILNSIGHMPLPPYIERPDEEADRELYQTVYSQKPGAVAAPTAGLHFDEPLLERLRAKGIEMAFVTLHVGAGTFQPVRVESIEDHVMHSEYAEVPQEVVDAVLAAKARGNKVVAVGTTSVRSLESAAQAAQDALIAPFFGDTQIFIYPGYQYKVIDALVTNFHLPESTLIMLVSAFAGYKHTMNAYREAVKAEYRFFSYGDAMYITYNPQAINERPGE

SEQ ID NO: 65648 - protein, 349 aa, unidentified
  source 1..349: note = Cruoricaptor ignavus
  REGION 1..349: note = tr|A0A1M6EAX4|A0A1M6EAX4_9FLAO S-adenosylmethionine:tRNA ribosyltransferase-isomerase; OS = Cruoricaptor ignavus OX=1118202 GN=queA PE=3 SV=1
MKTSDFNFNLPDELLAEHPSEHRDEARLMVLDRKTETIEHKLFKDVIDYFDEGDLFIFNNTKVFPARLYGHKEKTGAKIEVFLLRELDSETRVWDVLVDPARKIRIGNKLFFTEDESLVAEVVDNTTSRGRTLRFLYDGSYEEFRQKLKDLGETPLPKYIKRPVEPEDAERYQTIYAKNEGAVAAPTAGLHFSKHLMKRMEIKGINFAEITLHVGLGTFNPIEVEDLSKHKMESEEVIITEEQAKIINNAVDENRRICAVGTTTMRALETSVSSNRKIGPYQGWTNKFIFPPHDFGVATSMITNFHTPKSTLIMMIAAFAGKDFVMHAYEEAIKEKYKFYSYGDAMLIL

SEQ ID NO: 65649 - protein, 83 aa, unidentified
  source 1..83: note = Cryomorphaceae bacterium
  REGION 1..83: note = tr|A0A353FE32|A0A353FE32_9FLAO S-adenosylmethionine:tRNA ribosyltransferase-isomerase (Fragment) OS=Cryomorphaceae bacterium OX=1898111; GN = DDW81_11770 PE=3 SV=1
MKLSHFNYKLPKELIAERPTTHRDESRLMILNRKEGTIEHKMFKDVVDIFEDGDTLVLNNTKVFPARMYGNKEKTGARIEVFL

SEQ ID NO: 65650 - protein, 351 aa, unidentified
  source 1..351: note = Cryomorphaceae bacterium
  REGION 1..351: note = tr|A0A0R2V3I6|A0A0R2V3I6_9FLAO S-adenosylmethionine:tRNA ribosyltransferase-isomerase; OS = Cryomorphaceae bacterium BACL18 MAG-120507-bin74; OX = 1655627 GN=queA PE=3 SV= 1
MKMKLSHFGYELPEAHIAQHPVDFRDDARLMVVNRESGSIEHHYFRDLANFFDPRDLLVINNTKVFPARMWGNKEKTGALIEVFLLRELNAESRLWDVLVDPARKIRIGNKLYFGDDDSLVAEVIDNTTSRGRTLRFLFDGSYEEFRLMLKEMGETPLPKYITRPLEDADAERYQSIFAKVEGAVAAPVASLHFSKNLMKKLEIKGIDTVEMTMHVGLGTFRQVEVEDLSKHKMESEQYWIYPNTAERVNQAKAERRKVCAVGTSVIRSLESASITDHRIKSGNGWTSKFIFPPHEFKVVNSLITNFHAPQSTMLMLTAAFAGYELTMDIYNTAVKENYRFLSYGDALMFV

SEQ ID NO: 65651 - protein, 358 aa, Cryptobacterium curtum
  REGION 1..358: note = tr|C7MKZ8|C7MKZ8_CRYCD S-adenosylmethionine:tRNA ribosyltransferase-isomerase OS=Cryptobacterium curtum (strain ATCC 700683 / DSM 15641 / 12-3) OX=469378 GN=queA; PE = 3 SV=1
MKTSDFDYDLPEERIAQEPAPIRDKCKMLVMDRITGALEDKIFCDIIDYINPGDVLVANETRVLPARLLGAKRTTGGAAEVFLLRPLPHGQQNNTQSDWEVLVRPGKRLKPGAIIDFPSTNGSTALTAEIVGFVESGKGERIARLSTEAYSTLDEALHAVGHTPLPPYIKQYVGDEEMYQTVYSNRETSAAAPTAGLHFTPELIEAIKAKGARWETVELQVGIDTFRIVDEDDPRNHAMHTETYTVPQRVVDACNEAHQRGGRVIAVGTTSTRSLESAWDVETHQLVARDQAQTALFLLPGSNFHVIDALITNFHVPRSTLMMLVSAFSSRDAIMAAYRHAIDNKYRMLSFGDAMFIH

SEQ ID NO: 65652 - protein, 655 aa, Cryptobacterium sp.
  REGION 1..655: note = tr|R7CJI7|R7CJI7_9ACTN Multifunctional fusion protein OS=Cryptobacterium sp. CAG:338 OX=1262868 GN=queA; PE = 3 SV=1
MKLLLHACCGPCSLEPVRLLKEEGHDIAIAYMNSNIAPASEYQHRLSTLLDWAKAQDIPVIEGPYEPTRWQEAIRNAWHPHSSNSDSTQTSAHTKQTSAHTNHEASAPRASFPLEASSAFVTSSELDASPASEANSQTITPSFNTGIDPEFDPARNPKFAHLYHDRENRCRACYRIRLEELARFAHEHGFEGIGTTLTVSPYQYTAIIQEELQRVAKPYQGLSVVFRDYRPYYPEATKRSRDLGMYRQNYCGCAYSDKEAAAEREARKAARKKKKAEERRAKLQALTTDDFDYELPEELIAQEPAPIRDECRLLVMKRDTGTLEDKIFRDIIDYLQPGDLLVANETRVMPARLIGHKRETGGTAEVFLLREAKQDANRSNQSATWEALVRPGKRLKPGAIVDFVASSEEDNESSNENSNEEVVLSAEVIDWVEGAQKGERLVRLTTCLPSLDEALHAVGHTPLPPYIKNYAGDEELYQTVYSHEERSAAAPTAGLHFTPELIECIKEKGIGWETVHLEVGLDTFRIVEEDNPRDHQIHTERYTVPQQTVDAIKRTKEQGGRVIAVGTTSVRSLESAWDAERGLIARDREATSLYILPGYEFKVVDALITNFHVPRSTLMMLVSAFSTRDNIMKAYHHAIKRKYRMLSFGDAMFIR

SEQ ID NO: 65653 - protein, 343 aa, Cryptosporangium arvum
  REGION 1..343: note = tr|A0A010ZNL9|A0A010ZNL9_9ACTN S-adenosylmethionine:tRNA ribosyltransferase-isomerase; OS = Cryptosporangium arvum DSM 44712 OX=927661; GN = CryarDRAFT_1325 PE=3 SV=1
MKPSTVFTLPADADAHEPPEARGSARDEVRLLVASPSGLTSTRFGRLPAYLEPGDLVVVNTSATLPAAVDGHRPDGTPVVIHFSAPRGAGWVVEVRVPDGSGPVLDGVSGERIAVPGGAGLTLREPADERAHGVRLWTADVALEGPVEAWLNRHGRPITYSYLHGRWPLSDYQPVFAREPGSAEMASAGRPFTDRLVTDLVTRGVAVAPVLLHTGVSSPEAGEGPQTEWFRVPAATARLVRSTRDAGGRVVAVGTTVTRALESAVDETGRVRAAEGWTDLVIGPDHPPRVVNGLVTGWHTPEASHLLLLEAVAGPGLVQAAYRAAVAERYRWHEFGDSCLLLP

SEQ ID NO: 65654 - protein, 345 aa, Cryptosporangium aurantiacum
  REGION 1..345: note = tr|A0A1M7QBD0|A0A1M7QBD0_9ACTN S-adenosylmethionine:tRNA ribosyltransferase-isomerase; OS = Cryptosporangium aurantiacum OX=134849; GN = SAMN05443668_104398 PE=3 SV=1
MKPRTVFTLPTDAEATVPPEARGLSRDGVRLLVATPSGLTSTRFAALPEFLRPGDLVVVNTSGTLPAAVDGRRPDGTPVVVHFSAPRATGGGWIVELRVPDGSGPVLDARPGERITVPDDARLTLRAPADAHPAGVRLWAADVVLEGPVEAWLNRHGRPITYGYLHGRWPLAEYQPVFAREPGSAEMASAGRPFTDRMVTDLVTRGIGVAPVLLHTGVSSQEFGEGPQTERFRVPPATARQVESVRQAGGRVVAVGTTVTRALESAVDEGGRVVATEGWTDLVIGPDHPARVVNGLVTGWHTPEASHLLLLEAVAGPALVQAAYRAAVAEGYRWHEFGDSCLLLP

SEQ ID NO: 65655 - protein, 408 aa, unidentified
  source 1..408: note = Culturomica sp.
  REGION 1..408: note = tr|A0A356DHX9|A0A356DHX9_9BACT S-adenosylmethionine:tRNA ribosyltransferase-isomerase; OS = Culturomica sp. OX=1926652 GN=queA PE=3 SV=1
MNTIELTALKNIKIEDYTYDLPEEKIAKFPLADREASRLLIYDRGVVSETFFSQVPALLKSGQTLIFNNTKVIYARLFFQKETGAHIEIFCLEPLVPADYARNFESNYYCEWSCMVGNLKKWRDGAIFCRFKRGQDEVVLKAEKLGQTGGEVHVRFSWNKELSFSEVLEYCGKIPIPPYLNRESEDSDKIRYQTVYSREEGSVAAPTAGLHFTRNILSVLEKQGVHIDELTLHVGAGTFRPVKAERIGGHDMHTEHIVISRKLVDDLSRKQGEVIAVGTTSVRTLESLYWMGVKRLMGEEEFYSLSQWEAYTLPVGYSLQEAMAALVDWFDRSGEELLKARTTIIIVPGYRFQVIDAMFTNFHQPQSTLLLLVGAAVGEDWRKIYAYALSHHFRFLSYGDSSFLKVRK

SEQ ID NO: 65656 - protein, 349 aa, unidentified
  source 1..349: note = Culturomica sp.
  REGION 1..349: note = tr|A0A356DJH7|A0A356DJH7_9BACT S-adenosylmethionine:tRNA ribosyltransferase-isomerase; OS = Culturomica sp. OX=1926652 GN=queA PE=3 SV=1
MKLSKFKYRLPQELIALHPAQNRDECRLMVLNKKTGEIEHKVFKDLIDYFDEKDVFVFNDTKVFPARLYGNKEKTGAEIEVFLLRELNRDLRIWDVLVDPARKIRIGNKLYFGEDDSLVAEVIDNTTSRGRTLRFLFDGEYEEFKKLLYGLGETPLPKFIDRKVEPEDAENYQTIFASHEGAVAAPTAGLHFSRELMKRMEIKGINFAYITLHVGLGNFREVDVEDLTKHKMDSEQIIVNPETVSIVNEAKDEKHKICAVGTTVVRTLESCVTTKGRLTEFEGWTNKFIFPPYDFSVPDAFISNFHLPYSTLLMMVAAFGGYEHVMNAYEVAVKEKYKFGTYGDAMLII

SEQ ID NO: 65657 - protein, 342 aa, unidentified
  source 1..342: note = Cuneatibacter caecimuris
  REGION 1..342: note = tr|A0A4Q7PPB9|A0A4Q7PPB9_9FIRM S-adenosylmethionine:tRNA ribosyltransferase-isomerase; OS = Cuneatibacter caecimuris OX=1796618 GN=queA PE=3 SV=1
MDVKDFDYELPQELIAQDPIEKRDASRLLVLDKKTGGTSHHIFHEIVDMLEPGDCLVINDTKVIPARLFGVKEDTGAHVEVLLLKRKEDHVWETLVRPGKKLRPGARLSFGDGKLKAEVMEVVEEGNRLVRFEYEGIFEEILDELGQMPLPPYITHELKDKNRYQTVYAKHEGSAAAPTAGLHFTEALLDEIVKKGVKIARVCLHVGLGTFRPVKAEHVQDHHMHSEFYRIEEDAAEIINETKASGGRVIAVGTTSCRTLEAAADPATGLLKACSGWTEIFIYPGYRFKCIDALITNFHLPQSTLLMLVSALAGREHILEAYREAVEERYRFFSFGDAMLIV

SEQ ID NO: 65658 - protein, 356 aa, unidentified
  source 1..356: note = Cupriavidus alkaliphilus
  REGION 1..356: note = tr|A0A2W7NZG0|A0A2W7NZG0_9BURK S-adenosylmethionine:tRNA ribosyltransferase-isomerase; OS = Cupriavidus alkaliphilus OX=942866 GN=queA PE=3 SV=1
MLTLSDFDFPLPPELIAQSALPDRSASRLLVVERLAPGDTADAVRMADRAFSDIVDYLRPDDLLVFNDTRVIKARFFGHKPSGGKVEVLVERVLDTHTVLAQVRASKTPAEGSALHLADDAFAVTVGPRVDQFFTLRFPEPALDLIERYGRLPLPPYITHDPDAYDETRYQTVYARSPGAVAAPTAGLHFDDALFARLDAAGVRRAFLTLHVGAGTFQPVRTENLAEHKMHSEWYAISEDLAQAVRDARARGGRVIAVGTTSLRALESAAQPDGTLAAGSSDTDIFITPGYRFRLVDALITNFHLPKSTLLMLVSALAGVQAIRAAYRHAVEQRYRFFSYGDAMLLTRQPDAAAAA

SEQ ID NO: 65659 - protein, 356 aa, unidentified
  source 1..356: note = Cupriavidus alkaliphilus
  REGION 1..356: note = tr|A0A329AW63|A0A329AW63_9BURK S-adenosylmethionine:tRNA ribosyltransferase-isomerase; OS = Cupriavidus alkaliphilus OX=942866 GN=queA PE=3 SV=1
MLTLSDFDFPLPPELIAQSALPDRSASRLLVVERLAPGDTAEAVRMVDRAFSDIVDYLRPDDLLVFNDTRVIKARFFGHKPSGGKVEVLVERVVDAHTVLAQVRASKTPAEGSALHLADGAFAVTVGPRVDQFFTLRFPEPALDLIERYGRLPLPPYITHDPDAYDETRYQTVYARSPGAVAAPTAGLHFDDALFARLDAAGVRRAFLTLHVGAGTFQPVRTENLAEHKMHSEWYAISEDLAQAVRDTRARGGRVIAVGTTSLRALESAAQPDGTLAAGSGDTDIFITPGYRFRLVDALITNFHLPKSTLLMLVSALAGVQAIRAAYRHAVEQRYRFFSYGDAMLLTRQPDAAAKA

SEQ ID NO: 65660 - protein, 351 aa, Cupriavidus basilensis
  REGION 1..351: note = tr|A0A0C4Y658|A0A0C4Y658_9BURK S-adenosylmethionine:tRNA ribosyltransferase-isomerase; OS = Cupriavidus basilensis OX=68895 GN=queA PE=3 SV=1
MMLTLSDFDFTLPPELIAQTALPERGASRLLVVDTDAPGGTTRLADRAFTDIVDYLRPNDLLVFNDTRVIKARFFGQKGSGGKVEVLVERVLDSHTVLAQVRASKTPPVGSLLRLADAFDVTVGPRVDQFFTLTFPEPALDLIERHGRLPLPPYITHDPDAFDETRYQTVYARAPGAVAAPTAGLHFDEALFARLDALGVRRGFLTLHVGAGTFQPVRTENLAEHKMHAEWYEVSDALAQAVRETRAAGGRVIAVGTTSLRALESAGATDGTLAAGRGDTEIFITPGYRFRVVDALITNFHLPKSTLLMLVSALAGVEPIRAAYRHAVAERYRFFSYGDAMLLTRQPQPQP

SEQ ID NO: 65661 - protein, 348 aa, Cupriavidus basilensis
  REGION 1..348: note = tr|H1S2E6|H1S2E6_9BURK S-adenosylmethionine:tRNA ribosyltransferase-isomerase OS=Cupriavidus basilensis OR16 OX=1127483 GN=queA PE=3 SV=1
MLTLSDFDFALPPELIAQTALPERGASRLLVVDADAREGTTRLTDRAFTDIVDYLRPNDLLVFNDTRVIKARFFGQKGSGGKVEVLVERVLDSHTVLAQVRASKTPPVGSLLRLADAFDVTVGPRVDQFFTLTFPEPALDLIERHGRLPLPPYITHDPDAFDETRYQTVYARAPGAVAAPTAGLHFDEALFARLDAMGVRRGFLTLHVGAGTFQPVRTENLAEHKMHAEWYEVSDALAQAVRDTRAAGGRVIAVGTTSLRALESAGAADGTLAAGRGDTEIFITPGYRFRVVDALITNFHLPKSTLLMLVSALAGVEPIRAAYRHAVAERYRFFSYGDAMLLTRQPQP

SEQ ID NO: 65662 - protein, 350 aa, Cupriavidus campinensis
  REGION 1..350: note = tr|A0A556UIA6|A0A556UIA6_9BURK S-adenosylmethionine:tRNA ribosyltransferase-isomerase; OS = Cupriavidus campinensis OX=151783 GN=queA PE=3 SV=1
MLTLSDFDFPLPPELIAQSALPDRSASRLLVVERTAPEDRADAVRLVDRAFCDILDYLGPNDLLVFNDTRVIKARFFGQKPSGGRVEVLVERVVDSHTVLAQVRASKTPAEGSRLHLADDAFAVTVGPRVDQFFTLRFPEPALDLIEQYGRLPLPPYITHDPDAYDETRYQTVYARNPGAVAAPTAGLHFDDALFARLDAKGVRRAFLTLHVGAGTFQPVRTENLAEHKMHAEWYAISPELADAVRETRARGGRVIAVGTTSLRALESAAAADGTLAAHSGDTDIFITPGYRFRLVDALITNFHLPKSTLLMLVSALAGVEAIRATYRHAVEQRYRFFSYGDAMLLTRLD

SEQ ID NO: 65663 - protein, 345 aa, Cupriavidus gilardii
  REGION 1..345: note = tr|A0A0M4KVR4|A0A0M4KVR4_9BURK S-adenosylmethionine:tRNA ribosyltransferase-isomerase; OS = Cupriavidus gilardii CR3 OX=1267562 GN=queA PE=3 SV=1
MLTLSDFDFPLPPELIAQTALPDRSASRLLVVRTGADGATELDDRAFADLTDYLRPNDLLVFNDTRVIKARFFGQKASGGKVEVLVERVLDQDTVLAQVRASKTPAEGSTLRLADAFDVTVGPRVDQFFTLRFPEPALDLIERFGRLPLPPYITHDPDAYDETRYQTVYARHPGAVAAPTAGLHFDDALFARLDAHGVRRAFLTLHVGAGTFQPVRTENLAEHKMHSEWYAISEELAQAVRDTRAAGGRVIAVGTTSLRALESAATPEGELVAGSGDTDIFITPGYRFRLVDALITNFHLPKSTLLMLVSALAGIEPIRIAYRHAVEQRYRFFSYGDAMLLQRQR

SEQ ID NO: 65664 - protein, 345 aa, Cupriavidus gilardii
  REGION 1..345: note = tr|A0A5A8EVQ1|A0A5A8EVQ1_9BURK S-adenosylmethionine:tRNA ribosyltransferase-isomerase; OS = Cupriavidus gilardii OX=82541 GN=queA PE=3 SV=1
MLTLSDFDFPLPPELIAQTALPDRSASRLLVVRTGADGATELDDRAFADLTDYLRPNDLLVFNDTRVIKARFFGQKASGGKVEVLVERVLDADTVLAQVRASKTPAEGSTLRLADAFDVTVGPRVDQFFTLRFPEPALDLIERFGRLPLPPYITHDPDAYDESRYQTVYARHPGAVAAPTAGLHFDDALFARLDAHGVQRAFLTLHVGAGTFQPVRTENLAEHKMHSEWYAISEELAQAVRDTRAAGGRVIAVGTTSLRALESAATPEGELRAGSGDTDIFITPGYRFRLVDALITNFHLPKSTLLMLVSALAGIEPIRIAYRHAVEQRYRFFSYGDAMLLQRQP

SEQ ID NO: 65665 - protein, 353 aa, Cupriavidus metallidurans
  REGION 1..353: note = sp|Q1LJ60|QUEA_CUPMC S-adenosylmethionine:tRNA ribosyltransferase-isomerase OS=Cupriavidus metallidurans (strain ATCC 43123 / DSM 2839 / NBRC 102507 / CH34); OX = 26626 4 GN=queA PE=3 SV=1
MLTLSDFDFPLPPELIAQSALPDRSASRLLVVERTAPEDTSEAVRLVDRAFSDILEYLNPDDLLVFNDTRVIKARFFGHKPSGGRIEVLVERVVDTHTVLAQVRASKTPVEGSLLHLADDAFAVTVGPRVDQFFTLRFPEPALDLIERYGRLPLPPYITHDPDAYDETRYQTVYARNPGAVAAPTAGLHFDDALFARLDAAGIRRAFLTLHVGAGTFQPVRTENLSEHKMHSEWYAISPELADAVRETRARGGRVIAVGTTSLRALESAAAEDGTLEAGSGDTDIFITPGYAFRIVDALITNFHLPKSTLLMLVSALAGVEAIRDAYRHAVDARYRFFSYGDAMLLTRRDRRA

SEQ ID NO: 65666 - protein, 353 aa, Cupriavidus metallidurans
  REGION 1..353: note = tr|A0A2L0XA25|A0A2L0XA25_9BURK S-adenosylmethionine:tRNA ribosyltransferase-isomerase; OS = Cupriavidus metallidurans OX=119219 GN=queA PE=3 SV=1
MLTLSDFDFPLPPELIAQSALPDRSASRLLVVERTAPEDTSEAVRLVDRAFSDILEYLNPDDLLVFNDTRVIKARFFGHKPSGGRIEVLVERVVDTHTVLAQVRASKTPAEGSLLHLADDAFAVTVGPRVDQFFTLRFPEPALDLIERYGRLPLPPYITHDPDAYDETRYQTVYARNPGAVAAPTAGLHFDDALFARLDAAGIRRAFLTLHVGAGTFQPVRTENLSEHKMHSEWYAISPELADAVRETRARGGRVIAVGTTSLRALESAAAEDGTLEAGSGDTDIFITPGYAFRIVDALITNFHLPKSTLLMLVSALAGVEAIRDAYRHAVDARYRFFSYGDAMLLTRRDRRD

SEQ ID NO: 65667 - protein, 358 aa, unidentified
  source 1..358: note = Cupriavidus nantongensis
  REGION 1..358: note = tr|A0A142JQN0|A0A142JQN0_9BURK S-adenosylmethionine:tRNA ribosyltransferase-isomerase; OS = Cupriavidus nantongensis OX=1796606 GN=queA PE=3 SV=1
MLTLSDFDFPLPPELIAQSALPDRSASRLLVVERLAPEDTADAVRMADRAFSDIVDYLRPEDLLVFNDTRVIKARFFGHKPSGGKVEVLVERVIDTHTVLAQVRASKTPAEGSALHLADDAFAVTVGPRVDQFFTLRFPEPALDLIERYGRPPLPPYITHDPDAYDETRYQTVYARSPGAVAAPTAGLHFDDALFARLDAAGVRRAFLTLHVGAGTFQPVRTENLAEHKMHSEWYAISEELAQAVRDTRARGGRVIAVGTTSLRALESAAQPDGTLAAGSGDTDIFITPGYRFRLVDALITNFHLPKSTLLMLVSALAGVQAIRAAYRHAVEQRYRFFSYGDAMLLTRQPDAAAAAAA

SEQ ID NO: 65668 - protein, 356 aa, Cupriavidus necator
  REGION 1..356: note = tr|A0A1U9UTC8|A0A1U9UTC8_CUPNE S-adenosylmethionine:tRNA ribosyltransferase-isomerase; OS = Cupriavidus necator OX=106590 GN=queA PE=3 SV=1
MLTLSDFDFPLPPELIAQSALPDRSASRLLVVERLAPADTVDAVRMVDRAFSDIVDYLRPDDLLVFNDTRVIKARFFGHKPSGGKIEVLVERVVDTHTVLAQVRASKTPAEGSTLHLADGAFAVTVGPRVDQFFTLRFPEPALDLIERYGRLPLPPYITHDPDAYDETRYQTVYARSPGAVAAPTAGLHFDDALFARLDAAGVRRAFLTLHVGAGTFQPVRTENLAEHKMHSEWYAVSEELAQAVRDTRARGGRVVAVGTTSLRALESAAQADGTLAAGSGDTDIFITPGYRFRLIDALITNFHLPKSTLLMLVSALAGVEAIRAAYRHAVDQRYRFFSYGDAMLLTRQPAADTKA

SEQ ID NO: 65669 - protein, 352 aa, Cupriavidus necator
  REGION 1..352: note = sp|Q0K734|QUEA_CUPNH S-adenosylmethionine:tRNA ribosyltransferase-isomerase OS=Cupriavidus necator (strain ATCC 17699 / H16 / DSM 428 / Stanier 337); OX = 381666 GN=que A PE=3 SV=1
MLTLSDFDFPLPPELIAQSALPDRSASRLLVVERLAPADTADAVRMVDRAFSDIVDYLRPDDLLVFNDTRVIKARFFGHKPSGGKIEVLVERVVDSHTVLAQVRASKTPTEGSILHLADGAFAVTVGPRVDQFFTLRFPEPALDLIERYGRLPLPPYIRHDPDAYDETRYQTVYARSPGAVAAPTAGLHFDDALFARLNAAGVRRAFLTLHVGAGTFQPVRTENLAEHKMHSEWYAVSADLAQAVRDTRARGGRVIAVGTTSLRALESAAQADGTLAAGSGDTDIFITPGYRFRLVDALITNFHLPKSTLLMLVSALAGVEAIRAAYRHAVEQRYRFFSYGDAMLLTRQPGA

SEQ ID NO: 65670 - protein, 362 aa, Cupriavidus oxalaticus
  REGION 1..362: note = tr|A0A4P7LEW7|A0A4P7LEW7_9BURK S-adenosylmethionine:tRNA ribosyltransferase-isomerase; OS = Cupriavidus oxalaticus OX=96344 GN=queA PE=3 SV=1
MLTLSDFDFPLPPELIAQSALPDRSASRLLVVERLAPADTADAVRLVDRAFSDIVDYLRREDLLVFNDTRVIKARFFGHKPSGGKVEVLVERVLDSHTVLAQVRASKTPGEGSALHLAQDAFTVTVGPRVDQFFTLRFPEPALDLIERYGRLPLPPYITHDPDAYDETRYQTVYARNPGAVAAPTAGLHFDDALFARLDAAGVRRAFLTLHVGAGTFQPVRTENLAEHKMHSEWYAVSEELAQAVRETRARGGRVIAVGTTSLRALESAAQPDGTLTAGSGDTDIFITPGYRFRLVDALITNFHLPKSTLLMLVSALAGVEAIRATYRHAVEQRYRFFSYGDAMLLTRRNDADTAEPAETAA

SEQ ID NO: 65671 - protein, 362 aa, Cupriavidus oxalaticus
  REGION 1..362: note = tr|A0A375G7U4|A0A375G7U4_9BURK S-adenosylmethionine:tRNA ribosyltransferase-isomerase; OS = Cupriavidus oxalaticus OX=96344 GN=queA PE=3 SV=1
MLTLSDFDFPLPPELIAQSALPDRSASRLLVVERVAPADTADAVRLVDRAFSDIVDYLRPEDLLVFNDTRVIKARFFGHKPSGGKVEVLVERVLDSHTVLAQVRASKTPAEGSALHLAEDAFAVTVGPRVDQFFTLRFPEPALDLIERYGRLPLPPYITHDPDAYDETRYQTVYARNPGAVAAPTAGLHFDDALFARLDAAGVRRAFLTLHVGAGTFQPVRTENLAEHKMHSEWYAVSEELAQAVRETRARGGRVIAVGTTSLRALESAAQPDGTLAAGSGDTDIFITPGYRFRLVDALITNFHLPRSTLLMLVSALAGVEAIRATYRHAVEQRYRFFSYGDAMLLTRRNGADTADTADTAA

SEQ ID NO: 65672 - protein, 350 aa, Cupriavidus pauculus
  REGION 1..350: note = tr|A0A3G8H1U9|A0A3G8H1U9_9BURK S-adenosylmethionine:tRNA ribosyltransferase-isomerase; OS = Cupriavidus pauculus OX=82633 GN=queA PE=3 SV=1
MLTLSDFDFPLPPELIAQSALPDRSASRLLVVERTAPADTADAVRLVDRAFSDILDYLRPEDLLVFNDTRVIKARFFGQKPSGGRVEVLVERVVDTHTVLAQVRASKTPAEGSQLLLADDAFAVTVGPRVDQFFTLHFPEPALDLIERYGRLPLPPYITHDPDAYDETRYQTVYARNPGAVAAPTAGLHFDDALFARLDAAGIRRAFLTLHVGAGTFQPVRTENLAEHKMHSEWYRITPELADAVRETRARGGRVIAVGTTSLRALESAAAPDGTLHAGHGDTDIFITPGYRFRAVDALITNFHLPKSTLLMLVSALAGVEAIRAAYRHAVAQRYRFFSYGDAMLLTRRD

SEQ ID NO: 65673 - protein, 350 aa, Cupriavidus pauculus
  REGION 1..350: note = tr|A0A2N5CGM4|A0A2N5CGM4_9BURK S-adenosylmethionine:tRNA ribosyltransferase-isomerase; OS = Cupriavidus pauculus OX=82633 GN=queA PE=3 SV=1
MLTLSDFDFPLPPDLIAQSALPDRSASRLLVVERTAPEDTADAVRLVDRAFSDILEYLSSNDLLVFNDTRVIKARFFGQKPSGGRIEVLVERVVDSHTVLAQVRASKTPAEGSPLHLADGAFTVTVGPRVDQFFTLRFPEPALDLIERYGRLPLPPYITHDPDAYDETRYQTVYARNPGAVAAPTAGLHFDDALFARLDATGIRRAFLTLHVGAGTFQPVRTEDLSDHKMHSEWYAVTPELADAVRDTRARGGRVIAVGTTSLRALESAADADGTLRAGTGDTDIFITPGYRFRAVDALITNFHLPKSTLLMLVSALAGVEAIRAAYRHAVAQRYRFFSYGDAMLLTRRD

SEQ ID NO: 65674 - protein, 349 aa, Cupriavidus pinatubonensis
  REGION 1..349: note = sp|Q46XG5|QUEA_CUPPJ S-adenosylmethionine:tRNA ribosyltransferase-isomerase OS=Cupriavidus pinatubonensis (strain JMP 134 / LMG 1197) OX=264198 GN=queA PE=3 SV=1
MLTLSDFDFPLPPELIAQSALPDRSASRLLVVERLAPGEQPDAIRLVDRAFSDIIGYLKPEDLLVFNDTRVIKARFFGQKPSGGKVEVLVERVLDTHTVLAQVRASKTPAEGSLLHLAEDAFAVTVGPRVDQFFTLRFPAPALDLIEQYGRLPLPPYITHDPDAYDETRYQTVYARNPGAVAAPTAGLHFDDALFARLDAAGVRRAFLTLHVGAGTFQPVRTENIAEHKMHSEWYAISPELADAVRETRKRGGRVIAVGTTSLRALESAAKPDGTLEAGNGDTDIFITPGYQFRLVDALITNFHLPKSTLLMLVSALAGVEAIRAAYRHAVEARYRFFSYGDAMLLTRQ

SEQ ID NO: 65675 - protein, 353 aa, unidentified
  source 1..353: note = Cupriavidus plantarum
  REGION 1..353: note = tr|A0A316EWT1|A0A316EWT1_9BURK S-adenosylmethionine:tRNA ribosyltransferase-isomerase; OS = Cupriavidus plantarum OX=942865 GN=queA PE=3 SV=1
MPTSLTLSDFDFPLPPELIAQSALPDRSASRLLVVDRTAPEDTAEAVRMLDRAFSDIVEYLRPDDLLVFNDTRVIKARFFGQKPSGGKVEVLVERVVDTDTVLAQVRASKTPAEGSTLELADGAFTVTVGPRVDQFFTLRFPAPALDLIEQYGRLPLPPYITHDPDAYDESRYQTVYARNPGAVAAPTAGLHFDDALFARLDAHGVRRAFLTLHVGAGTFQPVRTENLAEHKMHAEWYAISEELAQAVRETRARGGRVIAVGTTSLRALEAATAEDGTLAAGSGDTDIFITPGYRFRMIDALITNFHLPKSTLLMLVSALAGVEAIRAAYRHAVDARYRFFSYGDAMLLTRRP

SEQ ID NO: 65676 - protein, 356 aa, Cupriavidus sp.
  REGION 1..356: note = tr|A0A370P3C6|A0A370P3C6_9BURK S-adenosylmethionine:tRNA ribosyltransferase-isomerase; OS = Cupriavidus sp. S23 OX=2219262 GN=queA PE=3 SV=1
MLTLSDFDFPLPPELIAQSALPDRSASRLLVVERLAPADTADAVRMVDRAFSDIVDYLRPDDLLVFNDTRVIKARFFGHKPSGGKIEVLVERVVDTHTVLAQVRASKTPAEGSTLHLADDAFAVTVGPRVDQFFTLRFPEPALDLIERYGRLPLPPYITHDPDAYDETRYQTVYARSPGAVAAPTAGLHFDDALFARLDAAGVRRAFLTLHVGAGTFQPVRTENLAEHKMHSEWYAVSEELAQAVRDTRARGGRVIAVGTTSLRALESAAQADGTLAAGSGDTDIFITPGYRFRLIDALITNFHLPKSTLLMLVSALAGVEAIRAAYRHAVDQRYRFFSYGDAMLLTRQPAADTKA

SEQ ID NO: 65677 - protein, 345 aa, Cupriavidus sp.
  REGION 1..345: note = tr|V2J0E0|V2J0E0_9BURK S-adenosylmethionine:tRNA ribosyltransferase-isomerase OS=Cupriavidus sp. HPC(L); OX = 1217418 GN=queA PE=3 SV=1
MLTLSDFDFPLPPELIAQTALPDRSASRLLVVRTGADGATELDDRAFADLTDYLRPNDLLVFNDTRVIKARFFGQKASGGKVEVLVERVLDNDTVLAQVRASKTPAEGSTLRLADAFDVTVGPRVDQFFTLRFPEPALDLIERFGRLPLPPYITHDPDAYDETRYQTVYARHPGAVAAPTAGLHFDDALFARLDAHGVRRAFLTLHVGAGTFQPVRTENLAEHKMHSEWYAISEELAQAVRDTRAAGGRVIAVGTTSLRALESAATPEGELVAGSGDTDIFITPGYRFRLVDALITNFHLPKSTLLMLVSALAGIEPIRVAYRHAVEQRYRFFSYGDAMLLQRQR

SEQ ID NO: 65678 - protein, 355 aa, Cupriavidus taiwanensis
  REGION 1..355: note = sp|B3R6J3|QUEA_CUPTR S-adenosylmethionine:tRNA ribosyltransferase-isomerase OS=Cupriavidus taiwanensis (strain DSM 17343 / BCRC 17206 / CIP 107171 / LMG 19424 / R1)OX=977880 GN=queA PE=3 SV=1
MLTLSDFDFPLPPELIAQSALPDRSASRLLVVERLAPGDTADAVHMADRAFSDIVDYLRPDDLLVFNDTRVIKARFFGHKPSGGKVEVLVERVLDTHTVLAQVRASKTPVEGSALHLADDAFAVTVGPRVDQFFTLRFPEPALDLIERYGRLPLPPYITHDPDAYDETRYQTVYARSPGAVAAPTAGLHFDDALFARLDAAGVRRAFLTLHVGAGTFQPVRTENLAEHKMHSEWYAISEDLAQAVRETRARGGRVIAVGTTSLRALESAAQPDGTLAAGSGDTDIFITPGYRFRLVDALITNFHLPKSTLLMLVSALAGVQAIRAAYRHAVEQRYRFFSYGDAMLLTRQPDAAAA

SEQ ID NO: 65679 - protein, 356 aa, Cupriavidus taiwanensis; identical to SEQ ID NO: 65658
  REGION 1..356: note = tr|A0A375BZK3|A0A375BZK3_9BURK S-adenosylmethionine:tRNA ribosyltransferase-isomerase; OS = Cupriavidus taiwanensis OX=164546 GN=queA PE=3 SV=1

SEQ ID NO: 65680 - protein, 358 aa, unidentified
  source 1..358: note = Curvibacter putative
  REGION 1..358: note = tr|C9YEZ1|C9YEZ1_9BURK S-adenosylmethionine:tRNA ribosyltransferase-isomerase OS=Curvibacter putative symbiont of Hydra magnipapillata OX=667019 GN=queA PE=3; SV = 1
MPSPDAQRVFTLSDFDFELPEALIAQHPAAERSASRLLDGTGEVSVDRIFKDLPGLLRAGDLLVFNDTKVINARLFGEKTTGGKVELLIERVLGGNQVAAHMRVSKKPEVGATIKMTCAPGHEDGLCATLLGRWPNVDGPIYRFVLSNDRGDDPYTLMERHGHVPLPPYITHSDSPEDVQRYQTVFAKNPGAVAAPTAALHFDEAVFAQLDAIGVQRAHVTLHVGAGTFQPVKTENIAEHQMHSEWYNVPLETQEAIAACKARGGRIVAVGTTSVRTLESWAKTGIASGDTNIFITPGFDFKLVDVLVTNFHLPKSSLMMLVSAFTGYGHVMGLYRDAIARGYRFFSYGDSMLLTRRT

SEQ ID NO: 65681 - protein, 350 aa, Curvibacter sp.
  REGION 1..350: note = tr|A0A1F8VI00|A0A1F8VI00_9BURK S-adenosylmethionine:tRNA ribosyltransferase-isomerase; OS = Curvibacter sp. GWA2_64_110 OX=1797747 GN=queA PE=3 SV=1
MHHVSPDATRVHTLSDFDFELPPELIAQHPASERSASRLLDGRSAQPVDRIFRELPGLLQPGDLLVFNDTKVVKARLFGEKPTGGKLELLIERVLPGFEVVAHMKVSKKPPVGMVLQMVGGYTAELLGRWPDEEGQLFRLRFSEEPHLMMEQHGHVPLPPYIEHGDSAEDVARYQTVFAAKPGAAAAPTAALHFDEGVLAALEARGIRRANVTLHVGAGTFSPVKTENLAEHRMHREWYEVPAATQAAIAETKAKGGRIVAVGTTTIRTLESWAKTGQASGDTEIFITPGFQFQVADLLVTNFHLPKSTLMMLVSAFAGYEHVMGLYRHAIAQRYRFFSYGDAMLLERCQ

SEQ ID NO: 65682 - protein, 113 aa, Curvibacter sp.
  REGION 1..113: note = tr|A0A433BQQ5|A0A433BQQ5_9BURK S-adenosylmethionine:tRNA ribosyltransferase-isomerase (Fragment) OS=Curvibacter sp. OX=1888168 GN=EKK45_12180; PE = 3 SV=1
MTLHPASRPFTLADFDFELPPELIAQHPAAERSASRLLDGTGPSAIDRIFKDLPNLLRAGDLLVFNDTQVIKARLFGEKSTGGKVELLVERVLQDHEVVAHMKVSKKPPVGST

SEQ ID NO: 65683 - protein, 364 aa, unidentified
  source 1..364: note = Cuspidothrix issatschenkoi
  REGION 1..364: note = tr|A0A2S6CQY4|A0A2S6CQY4_9CYAN S-adenosylmethionine:tRNA ribosyltransferase-isomerase; OS = Cuspidothrix issatschenkoi CHARLIE-1 OX=2052836 GN=queA; PE = 3 SV=1
MDLDRSLSGYDYELPPGLIAQNPAVPRDSSRLLVVNSPETGTSVSPLHRIFRDLPELLQPGDLLVMNNTKVIPARLYGSKSTGADVEVLLLEERRHNCWLALVKPGKRFKIGTEIIFTSSGQNSQKILKATVMESDPETGGRLLQFDLPEDVPLVQVLAEFGQIPLPPYITASSAADEQYQTVYAQEQGAIAAPTAGLHFTPELLEKLRHCGINQAFITLHVGVGTFRPVEVEDVTTHAMHEEWIEVPSDTVEQIRATQVAGGRIIAVGTTVVRALEGAAQLGNLQPFVGKTNLFIYPGYKWRVVEGLITNFHLPRSSLLMLVSALIGRIRLLDIYQEAIASKYRFYSFGDAMVILPEGKSIKL

SEQ ID NO: 65684 - protein, 351 aa, unidentified
  source 1..351: note = Cyanobacteria bacterium
  REGION 1..351: note = tr|A0A1Q7UPF6|A0A1Q7UPF6_9CYAN S-adenosylmethionine:tRNA ribosyltransferase-isomerase; OS = Cyanobacteria bacterium 13_1_40CM_2_61_4 OX=1805101; GN = AUI36_43175 PE=3 SV=1
MTAPFTFTLPPELSAKEPPERRGIRRDQVRLLVIDRAAGHIEHTRFDKIGDYLRAGDLLVFNSSRTLPAALRGCECSAAHGPCMEVRLAERLPDDSWLALLLCEQGDPFGCGLREGTQIEFAEGLAATVLEHDANIPRLWKLHFSVSGTQLVDLIYRLGKPIRYEYISAPWDLDYYQTVYAKEPGSAEMPSAGRAFTWKLLLDLKRRGIETAYIILHTGLSSYMDDELDRAYPASEEEYFVSQITAEKVNSARENGGRVIAVGTTVVRALESVADSDGCVNEKQGYTRLTINSQHRLKAVDGLLTGLHEPEASHLDLLSAFLSAEKIRAAYEEAIARKYLWHEFGDLNLIL

SEQ ID NO: 65685 - protein, 376 aa, unidentified
  source 1..376: note = Cyanobacteria bacterium
  REGION 1..376: note = tr|A0A353QUB1|A0A353QUB1_9CYAN S-adenosylmethionine:tRNA ribosyltransferase-isomerase; OS = Cyanobacteria bacterium UBA9971 OX=2055776 GN=queA PE=3; SV = 1
MLSSEFDYNLPEELIAQFPCEKRDGSSLMVLDKQTKAVSHKKFFDIVDFIDENDVLVLNNTRVIPARLFGKKSTGARIEIFLLSHCEQGTHQPLINEWIAFPTSLRSSGQALQAPRNDKIWEVLIKPSKRVKSGTIIEFTEELKAKILERLPNDKWLVEFIYEGVFNEILEKVGNIPLPPYIERKLSDETIKKLDFERYQTVYAQNPGSVAAPTAGLHFTEEILDKLKQKGVEVCYVTLNVGLGTFRPVKAENILDHQMDREFYEIPEITAEIINKAKLQGKNIVAVGTTTVRTLESAFEANNKISATSAWSQMFIYPGYKFSVIDKLITNFHLPKSTLLMLVSALAGKDFVFEAYREAIEKKYRFYSYGDCMLIK

SEQ ID NO: 65686 - protein, 348 aa, unidentified
  source 1..348: note = Cyanobacterium aponinum
  REGION 1..348: note = tr|K9Z0V9|K9Z0V9_CYAAP S-adenosylmethionine:tRNA ribosyltransferase-isomerase OS=Cyanobacterium aponinum (strain PCC 10605) OX=755178 GN=queA PE=3 SV=1
MSPDQQLSSYDYYLPSELIAQNPVTPRDSSRLLVIEGENSPKHQIFADLPQFLSAGDLLVVNNTRVIPARLYGEKSTGAQVEVLLVEETRDNCWLALVKPGKRFSVGSEIYFGDGLLKATVVDKDEATGGRYLEFSWQEGESFWHLLEKVGNIPFPPYVTESSANPSQYQTVYAQKQGAIAAPTAGLHFTDRLFEQLKAEGINKTEVTLHVGIGTFRPVEVEDIVNHDMHQEWIEIDEATVNLIRATKARGNKVIAVGTTVVRTLEGVCKECGDLQAFEGKTNLFIYPGYEFKVIDGLITNFHLPKSSLLMLVSALIGRERLMMVYEEAIREKYRFYSFGDAMLIKDC

SEQ ID NO: 65687 - protein, 348 aa, unidentified
  source 1..348: note = Cyanobacterium aponinum
  REGION 1..348: note = tr|A0A2G3PDT1|A0A2G3PDT1_9CHRO S-adenosylmethionine:tRNA ribosyltransferase-isomerase; OS = Cyanobacterium aponinum IPPAS B-1201 OX=2047986 GN=queA; PE = 3 SV=1
MSPDQQLSSYDYYLPSELIAQNPVTPRDSSRLLVIEGENSPKHQIFADLPQFLSAGDLLVVNNTRVIPARLYGEKSTGAQVEVLLVEETRDNCWLALVKPGKRFSVGSEIYFGDGLLKATVVDKDEATGGRYLEFSWQEGESFWHLLEKVGNIPFPPYVTESSANPSQYQTVYAQKQGAIAAPTAGLHFTDRLFEQLKAEGINKAEVTLHVGIGTFRPVEVEDIVNHDMHQEWIEIDEATVNLIRATKARGNKVIAVGTTVVRTLEGVCKECGDLQAFEGKTNLFIYPGYEFKVIDGLITNFHLPKSSLLMLVSALIGRERLMMVYQEAIREKYRFYSFGDAMLIKDC

SEQ ID NO: 65688 - protein, 368 aa, unidentified
  source 1..368: note = Unknown
  REGION 1..368: note = tr|A0A0R2U2X5|A0A0R2U2X5_9CYAN S-adenosylmethionine:tRNA ribosyltransferase-isomerase; OS = cyanobacterium BACL30 MAG-120619-bin27 OX=1655601; GN = queA PE=3 SV=1
MGGAPEQLDLRLSSYDFHLPEERIAQRPVEPRHAARLLVVELQARHLSVWDLQHELRPGDLLVVNNTRVLRARLEARRPSGGAVELLVLEPWHGGPGQWLCLAKPAKKLKSGDWLEVVAEGQPPLPLQVLGSDPATGGRILQFPPGCAEAAALEPLLVQYGAIPLPPYIHEHDASDNERYQTRYAAKPGAVAAPTAGLHLSDELLAAIRARGVELATTTLHVGLGTFRPVETEDLSQLQLHSEWVEVTPELVAAVAACRARGGRVIAIGTTSVRSLEAVAQLHGGELRPHTGPVNLVIQPGYRFAVVQGLLTNFHLPKSSLLLLVSALLGREHLLALYSEAIEHQYRFFSYGDAMWIAPEVVLSSARP

SEQ ID NO: 65689 - protein, 375 aa, Rhopalodia gibberula
  REGION 1..375: note = tr|A0A2Z5T3X5|A0A2Z5T3X5_9CYAN S-adenosylmethionine:tRNA ribosyltransferase-isomerase; OS = cyanobacterium endosymbiont of Rhopalodia gibberula; OX = 1763363 GN=queA PE=3SV=1
MGETTQFLQIFVFPMTDDCLLSSYDYQLPPELIAQKPVTPRDSSRLLVVNCLTTQVHSVFRELPQWLLPGDLLVLNDTRVIRARLYGHKQTGAPVEILLLEEKAPLCWLALVKPGKRFKVGSEIWFPDSPEGKIKSPVYLKAKVLKVDSATGGRLLQFEKSSPDLFWQAIKHLGKIPLPPYITGFEDNCALYQTVYAQKPGAVAAPTAGLHFTPELLQRLTDKGIAQAYVTLHVGIGTFRPVEAEDITQHDMHSEWVEVPQTTVEMIAQTKKNGGRVIAVGTTVVRSLEGAVQIAKTQGKRGLVPFQGKTNLFIYPGYSWQVVDGMITNFHLPRSSLLMLVSALIGRERLMNLYQEAIEQRYRFYSFGDGMLIII

SEQ ID NO: 65690 - protein, 394 aa, Epithemia turgida
  REGION 1..394: note = tr|A0A077JG18|A0A077JG18_9CYAN S-adenosylmethionine:tRNA ribosyltransferase-isomerase; OS = cyanobacterium endosymbiont of Epithemia turgida isolate EtSB Lake Yunoko OX =1228987 GN=queA PE=3 SV=1
MTIIQPIFIGDSPPILDVLQWGESPHLQIFVFPMTDDYLLSSYDYQLPPELIAQKPVTPRDSSRLLVVNCLTTQVHSVFRELPQWLLPGDLLVLNDTRVIRARLYGHKPTGAPVEILLLEEKAPFCWLALVKPGKCFKVGSEIWFPDSPERNTKSPVYLKAKVLKVDSATGGRLLQFERSSPDLFWQVIEHLGTIPLPPYITRFEDNFDLYQTVYAQKLGAVAAPTAGLHFTPELLQRLTDKGIAQAYVTLHVGVGTFRPVEVEDISQHNMHSEWVEVPQITVDMIAKTKKNGGRVIAVGTTVVRSLEGAVQIAKTQGKQELVAFQGKTNLFIYPGYSWQVIDGMITNFHLPRSSLLMLVSALIGRERLMNLYQEAIEQRYRFYSFGDGILIII

SEQ ID NO: 65691 - protein, 353 aa, unidentified
  source 1..353: note = Cyanobacterium sp.
  REGION 1..353: note = tr|A0A2K8WMA8|A0A2K8WMA8_9CHRO S-adenosylmethionine:tRNA ribosyltransferase-isomerase; OS = Cyanobacterium sp. HL-69 OX=2054282 GN=queA PE=3 SV=1
MDPNLKLSSYDYFLPQELIAQNPVIPRDSSRLLVVKPEEGIDHKIFSSLPDLLLPGDLLVLNNTRVIPARLYGKKSTGAMVEVLLVEEKSPLCWLALVKPGKRFSMGAEIVFEDEATGAYLKATVVDKDEATGGRILEFTVGNGASFWDVLDKLGNIPFPPYVTDSEALPSQYQTIYAQKQGAIAAPTAGLHFTEDVFNNLAQKQVAIAHITLHVGIGTFRPVETEDILNHDMHQEWIEVNEETIHKIKETKSRGGRVISVGTTVVRALEGTFAHHNALMPYRGKTNLFIYPGYEFKVIDGLITNFHLPKSSLLMLVGALIGRERLLSIYQRAIEEKYRFYSFGDAMFIAPKR

SEQ ID NO: 65692 - protein, 353 aa, unidentified
  source 1..353: note = Cyanobacterium sp.
  REGION 1..353: note = tr|A0A1E5QYE7|A0A1E5QYE7_9CHRO S-adenosylmethionine:tRNA ribosyltransferase-isomerase; OS = Cyanobacterium sp. IPPAS B-1200 OX=1562720 GN=queA PE=3; SV = 1
MDPNLKLSSYDYFLPQELIAQNPVIPRDSSRLLVVKPEEGIDHKIFSSLPDLLLPGDLLVLNNTRVIPARLYGKKSTGAMVEVLLVEEKYPLCWLALVKPGKRFSMGAEIVFEDEATGAYLKATVVDKDEATGGRIVEFTVGNRVSFWDVLDKLGNIPFPPYVTQSEALPSQYQTIYAQKQGAIAAPTAGLHFTEDVFNRLAEKQVAIAHITLHVGIGTFRPVEVEDILNHEMHQEWIEVNQETIDKIKETKSRGGRVISVGTTVVRALEGTFAHHNALMPYRGKTNLFIYPGYEFKVIDGLITNFHLPKSSLLMLVGALIGRERLLSIYQRAIEEKYRFYSFGDAMFIAPKR

SEQ ID NO: 65693 - protein, 357 aa, unidentified
  source 1..357: note = Cyanobacterium stanieri
  REGION 1..357: note = tr|K9YPA7|K9YPA7_CYASC S-adenosylmethionine:tRNA ribosyltransferase-isomerase OS=Cyanobacterium stanieri (strain ATCC 29140 / PCC 7202) OX=292563 GN=queA PE=3 SV=1
MDPNLKLSSYDYFLPPELIAQNPVTPRDSSRLLVVKPEGVVDHQIFANLPDLLSPGDLLVLNNTRVIPARLYGKKSTGAMVEVLLVEEKSPLCWLALVKPGKRFGLGAQIIFEDEVTGDYLTATVIDKDEATGGRILQFSAPKGLSFWDLLERLGNIPFPPYVTESEALPSQYQTIYAEKQGAIAAPTAGLHFTEDVFNSLAQKQVAIAHITLHVGIGTFRPVEVEDILNHEMHQEWIEVDKVTIDKIKETKSRGGRVISVGTTVVRALEGTFAHHNGLMPYRGKTDLFIYPGYDFKVIDGLITNFHLPKSSLLMLVGALIGRERLLSIYQGAIEEKYRFYSFGDAMFIEPKRGLNN

SEQ ID NO: 65694 - protein, 373 aa, Ornithocercus magnificus
  REGION 1..373: note = tr|A0A4Y3FUD5|A0A4Y3FUD5_9CYAN S-adenosylmethionine:tRNA ribosyltransferase-isomerase; OS = cyanobiont of Ornithocercus magnificus OX=2496102; GN = queA PE=3 SV=1
MTDPRDLLLSSYDYDLPPEQIAQAPVNPRHDAKLLTVPAFGSNLQSGLARVWDWPQWLHPNDLVVLNNTRVLKARLHVRHSSGSSVELLVLEPRGEGRWLCLGRPAKKLRPGDKLWLEAIGQPPLLVDVLWIDVTKGGRVIQFPTNYHDTASIEELLDRYGEMPLPPYIQQSGFSTAGDYQTCYASRPGAVAAPTAGLHLSNELLATLNRRGIEIAYVTLHVGLGTFRPLESEDLRELRLHSEWVEVDANVVDAVNACHARGGRVIAVGTTSVRALEGAAAISGQLRPLRGPVDLVIKPGYRFSVIQGLLTNFHLPRSSLLLLVSALISRERLLDLYCQAVRYGLRFYSYGDAMWVLPEAVLPSARPRAGLIG

SEQ ID NO: 65695 - protein, 380 aa, unidentified
  source 1..380: note = Cyanobium gracile
  REGION 1..380: note = tr|K9P7C6|K9P7C6_CYAGP S-adenosylmethionine:tRNA ribosyltransferase-isomerase OS=Cyanobium gracile (strain ATCC 27147 / PCC 6307) OX=292564 GN=queA PE=3 SV=1
MTDPADLRLSSYDFALPQERIAQRPVEPRHAARLLVVDPAGAGPAPHARHLSAWDLQHELRSGDLLVVNDTRVLRARLEARRPGGGAVELLVLEPWLGGPGQRLGGAGQWLCLARPAKKLRPGDRLEVVAKGQPPLTVAVVGSDPSTGGRIVQFPPDCADAAALEPLLLQYGAIPLPPYIHEHDASDNERYQTRYAARPGAVAAPTAGLHLSDELLAAIREREVGVATTTLHVGLGTFRPIETEDLSALELHSEWVEVSPALVEAVAACRAAGGRVIAIGTTSVRSLEAVAQLHGGELRPHTGPVNLVIQPGYRFAVVQGLLTNFHLPRSSLLLLVSALIGRERLLALYGEAIERHYRFFSYGDAMWIAPEAVLAGARPA

SEQ ID NO: 65696 - protein, 383 aa, unidentified
  source 1..383: note = Cyanobium sp.
  REGION 1..383: note = tr|A0A081GNZ7|A0A081GNZ7_9CYAN S-adenosylmethionine:tRNA ribosyltransferase-isomerase; OS = Cyanobium sp. CACIAM 14 OX=1496688 GN=queA PE=3 SV=1
MPPTPDPADGLLSSYAFELPDDLIAQEPAEPRHAARLLVLDAPAADPAAAAARHRRVWDLQEELRPGDLLVVNDTRVLRARLAARRASGGAVELLLLEPRGEGLWLCLARPAKRLRSGEILTVEAEGEPDLPVVVEAADPASGGRLVRFPKGCADAVAIEPLLERYGSMPLPPYIEAREGRDDSRYQTRYAARPGAVAAPTAGLHLSDELLEALAARGVHLATVTLHVGLGTFRPVETEDLSRLALHSEWVEVSPVLAEAVEDCRARGGRVIAVGTTSVRSLEGVAALNGGRLAPHAGPVNLVIQPGFRFAVVEGLLTNFHLPRSSLLLLVSALVGRRRLLALYAEAIAHRYRFFSYGDAMWIPPEAVLDAARADDAAPGGMA

SEQ ID NO: 65697 - protein, 414 aa, unidentified
  source 1..414: note = Cyanobium sp.
  REGION 1..414: note = tr|A0A182AS61|A0A182AS61_9CYAN S-adenosylmethionine:tRNA ribosyltransferase-isomerase; OS = Cyanobium sp. NIES-981 OX=1851505 GN=queA PE=3 SV=1
MSSACDQVPAAVQGVDPDDLRLSSYDFLLPQERIAQRPVEPRHAARLLAVGAEPGTEAGPPGLRHLRVWDLQHQLRPGDLLVVNDTRVLRARLEARRASGGRVELLVLEPWQPSAAALTASLPVPAPAAGPGRWLCLAKPAKRLHPDDTLEVVAPGQEPLAVTICGRDPQTGGCIVQFPAACTDAASLEPLLVQYGAIPLPPYIHEHDASDNDRYQTRYAARPGAVAAPTAGLHLSDGLLAAIRARGVAIATTTLHVGLGTFRPVETEDLRGLELHSEWVEVSEALVAAVQACRARGGRVIAIGTTSVRSLEGVAALHGGVLRPHTGPVNLVIQPGFRFAVVQGLLTNFHLPKSSLLLLVSALIGRRRLLELYAEAIAQHYRFFSYGDAMWIAPEAVLPQALASGAPGHPGAAA

SEQ ID NO: 65698 - protein, 372 aa, unidentified
  source 1..372: note = Cyanobium usitatum
  REGION 1..372: note = tr|A0A2P7MYE5|A0A2P7MYE5_9CYAN S-adenosylmethionine:tRNA ribosyltransferase-isomerase; OS = Cyanobium usitatum str. Tous OX=2116684 GN=queA PE=3; SV = 1
MSDSADLRLSSYDFHLPEERIAQRPVEPRHAARLLAVEAAGVGPAPHARHLSVWDLQQELRQGDLLVVNNTRVLRARLEARRPSGGSVELLVLEPWHGGLGQWLCLAKPAKKLKPGDWIEVVAEGQTPLPLQVLGSDPDTGGRIVQFPLECADAAALEPLLVQYGAIPLPPYIHEHDESDNERYQTRYAAKPGAVAAPTAGLHLSDELLAAIRARGVELATTTLHVGLGTFRPVETEDLSQLQLHSEWVEVTPELVAAVAACRARGGRVIAIGTTSVRSLEAVAQLHGGELRPHTGPVNLVIQPGYRFAVVQGLLTNFHLPKSSLLLLVSALLGRERLLALYAEAIERQYRFFSYGDAMWIAPEVVLSSARP

SEQ ID NO: 65699 - protein, 434 aa, unidentified; identical to SEQ ID NO: 65236
  source 1..434: note = Cyanosarcina cf.
  REGION 1..434: note = tr|A0A2T1FEP5|A0A2T1FEP5_9CHRO S-adenosylmethionine:tRNA ribosyltransferase-isomerase; OS = Cyanosarcina cf. burmensis CCALA 770 OX=2107697 GN=queA; PE = 3 SV=1

SEQ ID NO: 65700 - protein, 381 aa, unidentified
  source 1..381: note = Cyanothece sp.
  REGION 1..381: note = tr|B8HRF4|B8HRF4_CYAP4 S-adenosylmethionine:tRNA ribosyltransferase-isomerase OS=Cyanothece sp. (strain PCC 7425 / ATCC 29141) OX=395961 GN=queA PE=3 SV=1
MESKDKPEITNNVQPPAPNPTDPDQWLSSYDYLLPDALIAQAPVVPRDCSRLLVVQQEDHCHRLFQDLPQLLRSGDLLVMNNTRVIPARLIGSKLGGQSPLEVEALLLEEKDDRHWLALVKPGRRLKPGSQIQFGDLQATVLEIDPATRGRILAFDLAEGERLEQRLADLGKIPLPPYIKDSPAAPEQYQTVYNDRPGAVAAPTAGLHFTPELLDKLATQGIDHCFLTLHVGVGTFRPVEADHIQDHTMHQEWLEIPPETVEKIQQTQAAGGRIIAVGTTVVRALEGAAQEGSLKPFRGKTNLFIYPGYQWRVVEGLITNFHLPKSSLMMLVSALIGRQRLLDLYQAAIAAQYRFYSFGDAMLILPEARMGRGEPWLSPVD

SEQ ID NO: 65701 - protein, 366 aa, unidentified
  source 1..366: note = Cyanothece sp.
  REGION 1..366: note = tr|A0A3B8Y2Z4|A0A3B8Y2Z4_9CYAN S-adenosylmethionine:tRNA ribosyltransferase-isomerase; OS = Cyanothece sp. UBA12306 OX=2055757 GN=queA PE=3 SV=1
MTDDFLLASYDYQLPPELIAQNPVIPRHNSRLLVINSLTTEIDSIFRELPQWLLPGDLLVLNNTRVIPARLYGSKTTGAPVEILLLEEKTPLCWLALVKPGKRVKQGSQICFGNASDRTIPSSINLKATVVGVDQETGGRLLQFEVSSSDSFWSAIEQLGNIPLPPYVTSSEAQPDQYQTIYAKKPGAVAAPTAGLHFTEELLQSLTNKGIAQADVTLHVGVGTFRPVEVGDITQHSMHSEWVEVPPTTVEMINQTKAQGGRIIAVGTTVVRSLEGAAQQAKIEGKSQLMPFRGKTDLFIYPGYSWQVIDGMITNFHLPRSSLLMLVSALIGRKRLMSLYQEAIEKRYRFYSFGDGMLILPDAVIN

SEQ ID NO: 65702 - protein, 407 aa, unidentified
  source 1..407: note = Cyclobacteriaceae bacterium
  REGION 1..407: note = tr|A0A3N4H2F1|A0A3N4H2F1_9BACT S-adenosylmethionine:tRNA ribosyltransferase-isomerase; OS = Cyclobacteriaceae bacterium YHN15 OX=2487897 GN=queA; PE = 3 SV=1
MQKLSSIEEIRLSDYEYTLPEERIAKFPLEKRDESKLIQFKNNQISHHRFFELPDLIPSGSMMVFNNTKVIPARLIFQRESGAKIEIFLLKPISPSSVINEVMLNTTSVVWETMIGNLKKWKEGEILQGTLFFQEQEYILSAKLTDRERKTVEFKWPGEKIPFVSIVEASGEVPLPPYLNRKATAEDKPRYQTVYSKKEGAVAAPTAGLHFTDETFKNLKENKIKHVFLTLHVSAGTFQPIKNENVMDHDMHSEQVVIDLETIQQLTEQEGKIIAVGTTSMRTLESVYWFGVKLLSSEDTQFLIPKLYPYGFKEGLPSKKESLNAVKKFMVESQLHEITGSTEIFIMPGYDFRVCDGLVTNFHQPSSTLILLVSAFTKGEWRKIYNEALQNGYRFLSYGDSNLLWKP

SEQ ID NO: 65703 - protein, 182 aa, unidentified
  source 1..182: note = Cyclobacteriaceae bacterium
  REGION 1..182: note = tr|A0A5C7Z431|A0A5C7Z431_9BACT S-adenosylmethionine:tRNA ribosyltransferase-isomerase (Fragment) OS=Cyclobacteriaceae bacterium OX=2099675; GN = E6Q41_04170 PE=3 SV=1
DKDRFQTIFAKNKGAVSAPTAGLHFTKQLVKRLQIKGVDMSFITLHIGLGTFRQVDVEDLTKHKMDSENFIVGPEVVEKVNKALDNKNRVCAIGTTSMRALESSVSAGNRLKVKEGWTDKFIFPPYVLKICNAMSPNFHMPESTLLMMAAAFGGFDFVMEAYKVAKKEKYKFLTYGDAMLIL

SEQ ID NO: 65704 - protein, 349 aa, Cyclobacterium amurskyense
  REGION 1..349: note = tr|A0A0H4PNT7|A0A0H4PNT7_9BACT S-adenosylmethionine:tRNA ribosyltransferase-isomerase; OS = Cyclobacterium amurskyense OX=320787 GN=queA PE=3 SV=1
MKLSDFKFEIPKKLIALHPPENRDESRLMVIHKDTGKIEHKVFKDVIDYFDTGDVFVTNNTKVFPARLYGNKEKTGAKIEVFLLRELNQELRLWDVLVDPARKIRVGNKLYFGDSDLVAEVIDNTTSRGRTIRFLFDGTDEEFYKTIDTLGETPILKDFIERDVVDADRERYQTIFAQHVGAVAAPTAGLHFTPHLMKRLEIKGVEVSPITLHIGLGTFRQVDVEDLTKHKMDSENYDIPQETVDLVNTALDQKKRVVSVGTTSLKTIESSVTANGRLKSSSGWTDKFIIPPYEFKIANGLITNFHLPESTLLMTASAFGGYDLIMKAYQEGIKENYKFFSYGDAMLII

SEQ ID NO: 65705 - protein, 407 aa, Cyclobacterium amurskyense
  REGION 1..407: note = tr|A0A0H4PLY8|A0A0H4PLY8_9BACT S-adenosylmethionine:tRNA ribosyltransferase-isomerase; OS = Cyclobacterium amurskyense OX=320787 GN=queA PE=3 SV=1
MCIKSAPKLQDYFYELPDEFIAKYPLEHRDSSKLLHYENGSILHKQFTNIAELIPESSHLVFNNTKVIPARLHFRKPTGAKIEIFLLNPLLPSTLIQQSMESKGPLTWKCMIGNLKRWKENEQLSCEIDLNETTYSIQAKLINRENREVELSWSPDDISFAELVEASGEVPLPPYLNREAEEDDKLRYQTVYSDKEGAVAAPTAGLHFTDKTFEELKSNGISVEYLTLHTGAGTFQPIKHNNVIEHPMHSEQMVFSKQNILNLISAKGNIIAVGTTSMRSLESLYWFGVYLINGYSDTFRIEKLAPYQEYAKLPGKVESLEAVLQWMEKNNMGQLIGTTEIFIFPGYQFKLCNGLITNFHQPGSTLILLVAAFTHGNWKEIYKEAVNNKYRFLSYGDSSLLWNNKLT

SEQ ID NO: 65706 - protein, 349 aa, unidentified
  source 1..349: note = Cyclobacterium halophilum
  REGION 1..349: note = tr|A0A1H7A2S5|A0A1H7A2S5_9BACT S-adenosylmethionine:tRNA ribosyltransferase-isomerase; OS = Cyclobacterium halophilum OX=1416801 GN=queA PE=3 SV=1
MKLSDFKFEIPKKLISLYPPENRDESRLMVIHRDTGKIEHRVFKDIIEYFGEGDVFVTNNTKVFPARLYGNKEKTGAKIEVFLLRELNQELRLWDVLVDPARKIRVGNKLYFGDSDLVAEVIDNTTSRGRTIRFLFDGTDEEFYKTIDTLGETPILKEFIERDVVDSDRERYQTIFAKHVGAVAAPTAGLHFTPHLLKRLEIKGVEVSPITLHIGLGTFRQVDVEDLTKHKMDSENYDIPQETVNLVNKALDAKKRVVAVGTTSLKTIESSVTANGRLKSSSGWTDKFIIPPYEFKIANALITNFHLPESTLLMTASAFGGYDLIMKAYQEGIKENYKFFSYGDAMLIL

SEQ ID NO: 65707 - protein, 406 aa, unidentified
  source 1..406: note = Cyclobacterium halophilum
  REGION 1..406: note = tr|A0A1H7BVP4|A0A1H7BVP4_9BACT S-adenosylmethionine:tRNA ribosyltransferase-isomerase; OS = Cyclobacterium halophilum OX=1416801 GN=queA PE=3 SV=1
MENTPQLNEYHYELPEDSIAKFPLEKRDASKLLHFENGAVEHFKFSDLPKLLPQNSHLVFNDTRVIPARMHFRKATGAAIELFLLNPVAPSTLIQQSMQSQGPVTWKCMIGNLKRWKAGEELENEIHLEGVHYRLRARLLSRETKEVAFSWDPAEVSFAALVEAAGEVPLPPYLNRKAEEADKLRYQTVYSKINGAVAAPTAGLHFTEQTLEEIREKGIPLHYLTLHVGAGTFLPIKHDTITEHPMHREQMVFSKEAVSKLCQATGNIVAVGTTSMRSLESLYWYGVKLLSNPNAEFFVEKLEPYAASKTTFTWEQSFEAVKNLMERTNTQYLVGATEIFIFPGYRFRVCNGLITNFHQPASTLILLIAAFTNQQWRKIYEEALAKRYRFLSYGDSSLLWNQKIIG

SEQ ID NO: 65708 - protein, 349 aa, Cyclobacterium lianum
  REGION 1..349: note = tr|A0A1M7PX18|A0A1M7PX18_9BACT S-adenosylmethionine:tRNA ribosyltransferase-isomerase; OS = Cyclobacterium lianum OX=388280 GN=queA PE=3 SV=1
MKLSDFKFEIPKKLVSLYPPENRDESRLMVVHRDTGKIEHRVFKDIIEYFGEGDVFVTNNTKVFPARLYGNKEKTGAKIEVFLLRELNQDLRLWDVLVDPARKIRVGNKLYFGDSDLVAEVIDNTTSRGRTIRFLFDGTDEEFYKTIDTLGETPLLKEFIERDVVDADRERYQTIFAQHVGAVAAPTAGLHFTQHLLKRLEIKGVEVCPITLHIGLGTFRQVDVEDLTKHKMDSENYDIPQSTVELVNKALDNKKKVVSVGTTSLKTIESSVTANGRLKASSGWTDKFIIPPYEFKIANALITNFHLPESTLLMTASAFGGYDLIMKAYQEGIKENYKFFSYGDAMLIL

SEQ ID NO: 65709 - protein, 411 aa, Cyclobacterium lianum
  REGION 1..411: note = tr|A0A1M7MNN9|A0A1M7MNN9_9BACT S-adenosylmethionine:tRNA ribosyltransferase-isomerase; OS = Cyclobacterium lianum OX=388280 GN=queA PE=3 SV=1
MPLDHSPKLQDYFYDLPEEFIAKFPLEKRDASRLLHFEENSLSHHQFSALPSLLPPNSHLFFNDTKVIPARIFFKKATGALIELFLLDPVRPSIQIQQCMESTGPVLWHCLIGNLKKWKQDEVLITEISVGNQDYRLEAILADRDKKYVQLSWSPGGLPFASLVEACGEVPLPPYLKRRALPSDKTRYQTIYSRMDGAVAAPTAGLHFTDKTIGEIREKGILINYLTLHVGAGTFQPVKHGNVLDHPMHREQMIFTRENIENLLSASGNIVAVGTTSMRSLESLYWFGVKLLKNESAEFFIDKLYPYQQQTHLPDRHQSVEAVLKYLDKSGMNQLSGATEIFIFPGYDFKICNGLITNFHQPGSTLMLLVAAFTKNRWRQIYQEAINEKYRFLSYGDSSLLWYDKINNPSL

SEQ ID NO: 65710 - protein, 349 aa, Cyclobacterium marinum
  REGION 1..349: note = tr|G0IWS8|G0IWS8_CYCMS S-adenosylmethionine:tRNA ribosyltransferase-isomerase OS=Cyclobacterium marinum (strain ATCC 25205 / DSM 745) OX=880070 GN=queA PE=3 SV=1
MKLSDFKFEIPKKLIALHPPENRDESRLMVIHKDTGKIEHKVFKDVIDYFDTGDVFVTNNTKVFPARLYGNKEKTGAKIEVFLLRELNQELRLWDVLVDPARKIRVGNKLYFGDSDLVAEVIDNTTSRGRTIRFLFDGTDEEFYKTIDTLGETPILKDFIERDVVDADRERYQTIFAQHVGAVAAPTAGLHFTPHLMKRLEIKGVEVSPITLHIGLGTFRQVDVEDLTKHKMDSENYDIPQGTVDLVNTALDEKKRVVSVGTTSLKTIESSVTANGRLKASSGWTDKFIIPPYEFKIANALITNFHLPESTLLMTASAFGGYDLIMKAYQEGIKEGYKFFSYGDAMLII

SEQ ID NO: 65711 - protein, 407 aa, Cyclobacterium marinum
  REGION 1..407: note = tr|A0A5D9BB90|A0A5D9BB90_9BACT S-adenosylmethionine:tRNA ribosyltransferase-isomerase; OS = Cyclobacterium marinum OX=104 GN=FY028_06160 PE=3 SV=1
MPIESVPKLKDYFYDLPDQFIAKHPLEFRDKSKLLHFENGKIKHEKFSNISGLIPANSHLVFNNTKVIPARLHFQKPTGAKIEIFLLNPILPATVIQLSMESTGPVTWKCMIGNLKRWKENEELSSQIVIDSVCYSLKAKLVNRENREVELSWSPDDKSFASIVEASGEVPLPPYLNRAAEDADKVRYQTVYSDKEGAVAAPTAGLHFTDQTLFDLKAKGISIEYLTLHTGAGTFQPIKHDSIIEHPMHSEQMVFTIENIVNLIAAKGNIIAVGTTSMRSLESLYWFGVNLLLGKSNEFHIEKLTPYQEYARLPNKEESLEAILQWMQANQLKQLMGSTEIFIFPGYEFKLCNGLVTNFHQPGSTLILLVAAFTHGKWREIYREALENNYRFLSYGDSSLLWNNKLD

SEQ ID NO: 65712 - protein, 407 aa, unidentified
  source 1..407: note = Cyclobacterium qasimii
  REGION 1..407: note = tr|A0A512C866|A0A512C866_9BACT S-adenosylmethionine:tRNA ribosyltransferase-isomerase; OS = Cyclobacterium qasimii OX=1350429 GN=queA_1 PE=3 SV=1
MRIESAPKLQDYYYELPEEFIAKYPLEQRDKSKLLYYENGTIRHEKFSGIAGLIPENSQLVFNNTKVIPARLHFQKATGARIEIFLLNPILPSSLIQQSMESTGPVTWKCMIGNLKRWKENELLTSQIEIDSITYNLEAKLIDRENRAVELNWNPKDKSFASIVEASGEVPLPPYLNRAAEEGDKLRYQTVYSDKEGAVAAPTAGLHFTDKTLTVLTSKGISLEYLTLHTGAGTFQPIKHDNVIEHPMHSEQMVFSKQNIQNLIAAKGNIIAVGTTSMRSLESLYWFGVNLLLGKSDKFHIEKLDPYHEYSSLPDKNESLKAILDWMEKNELVQLIGTTEIFIFPGYQFKLCNGLVTNFHQPGSTLILLVAAFTHGNWKEIYQEAITNKYRFLSYGDSSLLWNNKLK

SEQ ID NO: 65713 - protein, 407 aa, unidentified; identical to SEQ ID NO: 65712
  source 1..407: note = Cyclobacterium qasimii
  REGION 1..407: note = tr|S7VE50|S7VE50_9BACT S-adenosylmethionine:tRNA ribosyltransferase-isomerase OS=Cyclobacterium qasimii M12-11B OX=641524 GN=queA PE=3 SV=1

SEQ ID NO: 65714 - protein, 342 aa, Cycloclasticus sp.
  REGION 1..342: note = tr|A0A1M6JM17|A0A1M6JM17_9GAMM S-adenosylmethionine:tRNA ribosyltransferase-isomerase; OS = Cycloclasticus sp. DSM 27168 OX=1884353 GN=queA PE=3; SV = 1
MKKSDFNYDLPNELIARYPLEKRVDSRLLVVGENDFSDKVFADLPTLLREGDLLVFNNTRVIAARLFGHKETGGKLEILIERVMGDKTALAHVRCSKSPKAGTHIILNDGYKCLVDGREGDLFQLTFDDSIDTVLKAIGHMPLPPYIDRDDETLDIERYQTVFGRKPGAVAAPTAGLHFDERLLDDIKSLGVNFAYVTLHVGSGTFQPVREENLADHIMHKEWLTVDEQTVQQIEATKKNGGRVIAVGTTAMRSLESAAKEGAIKPFTGDTDLFITPGYHFNVVDAMVTNFHLPESTLLMLVSAFSGYQRMKLAYQHAIAQRYRFFSYGDAMFLTKMSDTTE

SEQ ID NO: 65715 - protein, 341 aa, Cycloclasticus sp.
  REGION 1..341: note = tr|A0A2G2QFL9|A0A2G2QFL9_9GAMM S-adenosylmethionine:tRNA ribosyltransferase-isomerase; OS = Cycloclasticus sp. OX=2024830 GN=queA PE=3 SV=1
MKKSDFNYQLPDELIASYPLDKRTDSQLLVVGEEQLLDKIFSDLPSLLKAGDLLVFNNTRVIAARMFGHKTTGGKLEILLERVLDETLALAHIRCSKSPKYGAKILLDDGYECSVEGRDGDLFKLKFMDPIDTVLDSIGHIPLPPYIDREDESLDVERYQTVFSQTPGAVAAPTAGLHFDQTLLDEMSVLGVDFTYVTLHVGSGTFQPVREENLDDHIMHKEWLTVDDSVVRKIKATKQAGGRVIAVGTTAMRSLESAAKAGKLKPYTGDTDLFIRPGYQFNVVDAMVTNFHLPESTLLMLVSAFSGCQRIKDVYQHAIKQEYRFFSYGDAMFLSRMDDRE

SEQ ID NO: 65716 - protein, 342 aa, unidentified
  source 1..342: note = Cycloclasticus zancles
  REGION 1..342: note = tr|S5T7E0|S5T7E0_9GAMM S-adenosylmethionine:tRNA ribosyltransferase-isomerase OS=Cycloclasticus zancles 78-ME OX=1198232 GN=queA PE=3 SV=1
MKKSDFNYDLPNELIARYPLEKRVDSRLLVVGENDFSDKVFADLPMLLREGDLLVFNNTRVIAARLFGHKETGGKLEILIERVMGDKTALAHVRCSKSPKAGTHIILNDGYKCLVDGREGDLFQLTFDDSIDTVLKAIGHMPLPPYIDRDDETLDIERYQTVFGRKPGAVAAPTAGLHFDERLLDDIKSLGVNFAYVTLHVGSGTFQPVREENLADHIMHKEWLTVDEQTVQQIEATKKNGGRVIAVGTTAMRSLESAAKEGAIKPFTGDTDLFITPGYHFNVVDAMVTNFHLPESTLLMLVSAFSGYQRMKLAYQHAIAQRYRFFSYGDAMFLTKMSDTTE

SEQ ID NO: 65717 - protein, 370 aa, Cylindrospermopsis raciborskii
  REGION 1..370: note = tr|A0A1S1ZWT4|A0A1S1ZWT4_9CYAN S-adenosylmethionine:tRNA ribosyltransferase-isomerase; OS = Cylindrospermopsis raciborskii MVCC14 OX=940191 GN=queA; PE = 3 SV=1
MQNSDLDISLSGYDYELPPELIAQNPVVPRDSSRLMVINSPAGTLTPPLDHIFRDLPELLKPGDLLVMNNTRVIPARLYGRKSTGARVEVLLLEEKQHNCWLALVKPGKYFNIGTEIIFDDQGLSSVDKLIPQLTATVIERDENTGGRLLRFDLPINVSLLHFLHKLGEIPLPPYINNSHALEEQYQTVYAKHDGAVAAPTAGLHFTPELLVKLRESGIQQEFLTLHVGVGTFRPVEVEDVTTHQMHEEWIEVSGDLVEKIYATKNAGGRIIAVGTTVVRALEGAAQSGSLQPYTGKVNLFIYPGYQWRVVEGLITNFHLPRSSLLMLVSSLIGRERLLDVYNQAIASRYRFYSFGDAMLILPEARICCS

SEQ ID NO: 65718 - protein, 370 aa, Cylindrospermopsis raciborskii; identical to SEQ ID NO: 65717
  REGION 1..370: note = tr|A0A1X4G2R5|A0A1X4G2R5_9CYAN S-adenosylmethionine:tRNA ribosyltransferase-isomerase; OS = Cylindrospermopsis raciborskii CENA303 OX=1170769; GN = queA PE=3 SV=1

SEQ ID NO: 65719 - protein, 371 aa, Cylindrospermopsis sp.
  REGION 1..371: note = tr|A0A0R0M440|A0A0R0M440_9CYAN S-adenosylmethionine:tRNA ribosyltransferase-isomerase; OS = Cylindrospermopsis sp. CR12 OX=1747196 GN=queA PE=3 SV=1
MQNSDLDISLSGYDYELPPELIAQNPVVPRDSSRLMVINSPNTGTSTPPLDHIFRDLPELLKPGDLLVMNNTRVIPARLYGRKSTGARVEVLLLEEKQHNCWLALVKPGKYFNVGTEIIFDDQGLSSADKLIPQFTARVIERDENTGGRLLQFDLPINVSLLHLLHKLGEVPLPPYINNSHALEEQYQTVYAKYDGAVAAPTAGLHFTPELLVKLRERGIEQEFLTLHVGVGTFRPVEVEDVTTHQMHEEWIEVSGDLVEKIYSTKNAGGRIIAVGTTVVRALEGSAQTGSLQPYTGKVNLFIYPGYQWRVVEGLITNFHLPRSSLLMLVSSLIGRERLLGIYKQAIASRYRFYSFGDAMLILPEARICCS

SEQ ID NO: 65720 - protein, 440 aa, Cylindrospermum sp.
  REGION 1..440: note = tr|A0A1Z4QRI0|A0A1Z4QRI0_9NOST S-adenosylmethionine:tRNA ribosyltransferase-isomerase; OS = Cylindrospermum sp. NIES-4074 OX=2005457 GN=queA PE=3; SV = 1
MTDSLRQAHLNEISSSEAEDFQLDCSLAGYDYELPPELIAQNPAVPRDSSRLLVVNSPSTGQETLPLHHIFRDLPDLLQSGDLLVMNNTRVMPARLYGHKSTGAEIEVLLLEERQHNCWLALVKPGKRFKLGTKIVFDAKRVGEYGGDGGDGGDGGDGGNGGKEEFISSALSTQHSALSTPHSALSTQHSTLSTQHSALHTQLTATVLETDAATGGRLLQFDLPPGTSLVHLLDQFGEVPLPPYITASAADDEQYQTVYAKQLGAIAAPTAGLHFTPELLQKLRDRQINQAFVTLHVGVGTFRPVEVEDVTTHQMHKEWIEVPAATVEQIRATKAAGGRIIAVGTTAVRALEGAAHLGDLQPFVGKTDLFIYPGYQWRVVDGLITNFHLPRSSLLMLVSALIGRKRLLKIYQEAIASRYRFYSFGDAMLILPEATLRQEF

SEQ ID NO: 65721 - protein, 392 aa, Cylindrospermum stagnale
  REGION 1..392: note = tr|K9WZT8|K9WZT8_9NOST S-adenosylmethionine:tRNA ribosyltransferase-isomerase OS=Cylindrospermum stagnale PCC 7417 OX=56107 GN=queA PE=3 SV=1
MEQQITQANLNETSGSMAEDVKLNYSLAGYDYELPPELIAQNPAFPRDSSRLLVVNSPGTGQDLPPLHHIFRDLPQLLQPGDLLVMNNTKVIPARLYGHKSTGAEIEVLLLEERQHNCWLALVKPGKRFKLGAKIVFAPRGDGGELTTQLTATVLATDAATLGRLLQFDLPAGMSVVQMLDRFGEVPLPPYITASTAEDEQYQTVYAKTPGAIAAPTAGLHFTPELLQQLSDRGINQAFVTLHVGVGTFRPVEVADVTTHQMHEEWIEVPAATVEQIRATKAAGGRIIAVGTTAVRALEGAAKSGDLQPYVGKTDLFIYPGYQWRVVDGLITNFHLPRSSLLMLVSAFIGRQRLLNLYQEAIANLYRFYSFGDAMLVLPEATKSAEAEKFEF

SEQ ID NO: 65722 - protein, 361 aa, Cystobacter ferrugineus
  REGION 1..361: note = tr|A0A1L9AUZ4|A0A1L9AUZ4_9DELT S-adenosylmethionine:tRNA ribosyltransferase-isomerase; OS = Cystobacter ferrugineus OX=83449 GN=queA PE=3 SV=1
MSSLLSDYDFALPEAQIAQAPLAARDASRLMVVSRASGAWSHRRFVELPELLREGDLLVVNDARVIPARLLGSKVGTGGRVELLVVRPAAATLTSQALGAAPEALEWICLGQASKGLKPGARVSFTGGLEAEVLEALGGGEYRVRFHAAPGASLARLLDAAGRLPLPPYITRPPEDADAERYQTVYARASGAVAAPTAGLHFTEATFAALAARGVQRVEVTLDVGPGTFLPVREENLEKHHMHPERYTVPEATARAVNAARAEGRRVVAVGTTVVRTLESAWDSASGGLRAGPGETSIFIRPGFTFRAVDVLLTNFHLPRSTLVVLVSALLGRERTLAAYREAVAAGYRFFSYGDAMLVTE

SEQ ID NO: 65723 - protein, 361 aa, Cystobacter fuscus
  REGION 1..361: note = tr|A0A250JBX2|A0A250JBX2_9DELT S-adenosylmethionine:tRNA ribosyltransferase-isomerase; OS = Cystobacter fuscus OX=43 GN=queA PE=3 SV=1
MSSQLSDYDFALPEAQIAQAPLATRDASRLMVVSRATGAWSHRHFAELPELLREGDLLVVNDARVIPARLLGSKVGTGGRVELLVVRPAAATLTSQALGGAPEALEWICLGQASKGLKPGARVSFAGGLEAEVLEALGGGEYRVRFHAAPGTSLARLLDTAGRLPLPPYITRPPEDADAERYQTVYARASGAVAAPTAGLHFTQATFEALAARGIQRVEVTLDVGPGTFLPVREENLEKHHMHPERYTVPEATARAVNAAKAEGRRVVAVGTTVVRTLESAWEPESGGLRAGPGETSIFIRPGFTFRAVDVLVTNFHLPRSTLVVLVSALLGRERTLAAYREAVAAGYRFFSYGDAMLVTE

SEQ ID NO: 65724 - protein, 361 aa, Cystobacter fuscus
  REGION 1..361: note = tr|S9PN79|S9PN79_9DELT S-adenosylmethionine:tRNA ribosyltransferase-isomerase OS=Cystobacter fuscus DSM 2262 OX=1242864 GN=queA PE=3 SV=1
MSSLLSDYDFALPEAQIAQAPLAARDASRLMVVSRASGAWSHRHFAELPELLREGDLLVVNDARVIPARLLGSKVGTGGRVELLVVRPAAATLTSQALGGAPEALEWICLGQASKGLKPGARVSFTGGLEAEVLEALGGGEYRVRFHAARGASLARLLDTAGRLPLPPYITRPPEDADAERYQTVYARASGAVAAPTAGLHFTEATFAALAARGIQRVEVTLDVGPGTFLPVREENLEKHHMHPERYTVPEATARAVNAAKAEGRRVVAVGTTVVRTLESAWDAASASLRVGPGETSIFIRPGFTFRAVDVLVTNFHLPRSTLVVLVSALLGRERTLAAYREAVAAGYRFFSYGDAMLVTE

SEQ ID NO: 65725 - protein, 413 aa, Cytophaga hutchinsonii
  REGION 1..413: note = tr|Q11QR4|Q11QR4_CYTH3 S-adenosylmethionine:tRNA ribosyltransferase-isomerase OS=Cytophaga hutchinsonii (strain ATCC 33406 / NCIMB 9469) OX=269798 GN=queA PE=3; SV = 1
MKIDTDNIETYNYDLPVERIAEYPLAERDQSKLLVYKDDHISDKTFSSIVDELPRNTLLVFNNTRVVQARFLFQTPTGATVEIFSLEPAEGHGGPAESMSARGKVIWKCFVGNAKRWKQPELIREVQLENGSMLSFHARQIEQKADYYLIGFSWNLEDITFSEIFSLLGDLPLPPYMKRKTEASDKERYQTVYAKHEGSVAAPTAGLHFTDAIMQRLAEKGIQKQEVTLHVGAGTFKPVKTDSIKEHTMHSEYIHVNRATVELLKNADNLQVTPVGTTSMRTLESLYWLGCKLCSKAALTGKLLELTQWDAYELPALSLREAMEELLKYINTSSDKNALSAKTALLIKPGYEFKVCDAIITNFHQPKSTLLCLVSAFIGIESMNKVYHFALENDYRFLSYGDSSLLFKHPHCS

SEQ ID NO: 65726 - protein, 348 aa, Cytophaga hutchinsonii
  REGION 1..348: note = sp|Q11QL8|QUEA_CYTH3 S-adenosylmethionine:tRNA ribosyltransferase-isomerase OS=Cytophaga hutchinsonii (strain ATCC 33406 / NCIMB 9469) OX=269798 GN=queA PE=3; SV = 1
MKLSEFKFALPAELVAQHPAANRDEAKMMVINRATGTIEHKIFKDIINYFDEGDIMVMNNTKVFPARLYGNKEKTGAKIEVFLLRELNAELHLWDVLVDPARKIRVGNKLYFGESDLVAEVVDNTTSRGRTIRFLFDGNSEDFSKIIETIGETPLPRYIKRPIEEADKDRYQTIFAENKGAVAAPTAGLHFTKQVMKRMEIKGVNFAPLTLHVGLGSFRTVDVEDLTKHKMDSENFIIESTTADVVNKALDNKKRVCAIGTTSMRALESSVSANNRLKQNAGWTDRFIFPPYDFKIANCMLTNFHMPESTLYMMACAFGGYELMTKAYKTAIKEKYNFLSYGDVMLII

SEQ ID NO: 65727 - protein, 349 aa, Cytophaga sp.
  REGION 1..349: note = tr|A0A4R4KD75|A0A4R4KD75_9BACT S-adenosylmethionine:tRNA ribosyltransferase-isomerase; OS = Cytophaga sp. DMA-K-7a OX=2070510 GN=queA PE=3 SV=1
MKLSEFKFDLPQSLIALHPADRGEARLMVVHRKTGEIEHKTFGDIVNYFDDGDVMVINNTKVFPARLFGQKEKTGAKIEVFLLRELNREMRLWDVLVDPARKIRVGNKLYFGDSDLVAEVIDNTTSRGRTIRFLYDGSHDEFMKLVDQLGETPLPTEIISRRKVENADRERFQTIFAEHVGAVAAPTAGTHFTKSIMKRLEIKGIGFAPVTLHVGLGTFRSVDVEDLTKHKTDSENYQILQESVDIVNQALDNGKRVCAVGTTSLKAIESSVSANGHLKSVEGWTDKFIFPPYEFKIGNAMITNFQLPESILLMSACAFGGYDLITKAYQIAIKEKYKFFTYGDVMLII

SEQ ID NO: 65728 - protein, 413 aa, Cytophaga sp.
  REGION 1..413: note = tr|A0A4R4KQA3|A0A4R4KQA3_9BACT S-adenosylmethionine:tRNA ribosyltransferase-isomerase; OS = Cytophaga sp. DMA-K-7a OX=2070510 GN=queA PE=3 SV=1
MQENWQSQADALLLSEFTYDLPDERIARYPVSPRHDSRLLIYEQSNIEHTHFHQLTNYLPAQSLLVFNDTRVIPARVYFQKSTGATIEVLLLNPEAPTTNINEAMLAKQASVWTCMIGNKKRWKLADTLSKILTINNQSVLLRAAYANYEQNQVELSWDTDATFLEIVQALGEIPLPPYLNRNTEERDLDTYQTVYARQEGAVAAPTAGLHFTETVLNQLEAKGIKRSFLTLHVGAGTFQPIKVENVINHSMHSEQIVFTRAFIEQLLVQNGPIVAVGTTSMRSLESLYWFGVKLYRKESTTFWIEKLYPYSISESDAPSLTQSLEAILEQMMLENKDEVTGQTEIFIFPGYSFKVCDGLITNYHQPGSTLILLVAAFVGQNWKQIYEAAYLHGYRFLSYGDSSLLWRNQRSV

SEQ ID NO: 65729 - protein, 349 aa, Cytophaga xylanolytica
  REGION 1..349: note = tr|A0A2W7P7W6|A0A2W7P7W6_9BACT S-adenosylmethionine:tRNA ribosyltransferase-isomerase; OS = Cytophaga xylanolytica OX=990 GN=queA PE=3 SV=1
MKLSKFKYKLPEELIALHPVDNRDESRMMVVDREKKTIEHKIFKDLIDYFDDQDVMVFNNTKVFPARLYGNKEKTGAEIEVFLLRELNSEMRLWDVLVDPARKIRIGNKLYFGEDDSLVAEVIDNTTSRGRTLRFLFDGSHEEFKKTLYGLGETPLPKFIKRDVVPEDRERYQTIFAKHEGAVAAPTAGMHFSRELLKRLEIKGLHFAEVTLHVGLGNFRAVDVEDLTKHKMDSEQIMITQEATEIINKGKDDRRKVCAVGTTVMRTLESSVSTFGHVKPFEGWTNKFIFPPYDFNVANCMITNFHLPLSTLMMMTSAFAGYDLLMDAYKEAVKEKYRFGTYGDAMLIL

SEQ ID NO: 65730 - protein, 401 aa, Cytophaga xylanolytica
  REGION 1..401: note = tr|A0A2W7N877|A0A2W7N877_9BACT S-adenosylmethionine:tRNA ribosyltransferase-isomerase; OS = Cytophaga xylanolytica OX=990 GN=LX69_02420 PE=3 SV=1
MIPSLSIDSFNYHLPDDKIAKYPLAERDNSKLLVYRNNTIHESCFKSITDHLPPHTQMVFNNTKVIRARMEFTKQTGARVEIFCLEPTAHTEMQTVFAATQKTQWNCIVGNLKKWKTGALHKELVINGQPITLTANKLQSLADSHVIEFSWNGDVTFSEVLDAAGNTPIPPYLNRQSESIDTQRYQTVYSEHQGSVAAPTAGLHFTPMIIQQMHDKGISTRFVTLHVGAGTFKPVKSPTIDGHEMHVELFTVDRGTLAGLTQHQGPRIAVGTTSVRTLESLYWIGVKLSQGDHSLVVNQWDAYQLKAHLSYSEAIQQIVDHLDARQANHLTAHTGIMIAPGYQFKSIDGMVTNFHQPQSTLLLLLSAFVGDAWRDIYNYALTHDFRFLSYGDSSLLLKPGH

SEQ ID NO: 65731 - protein, 411 aa, unidentified
  source 1..411: note = Cytophagaceae bacterium
  REGION 1..411: note = tr|A0A4Q5RHV8|A0A4Q5RHV8_9BACT S-adenosylmethionine:tRNA ribosyltransferase-isomerase; OS = Cytophagaceae bacterium OX=2026729 GN=queA PE=3 SV=1
MSPSTASPHQLRIQDFHYELPAARIAPEPLPDRAASRLLVSQAGVITDKVFRDLPGELPPGALLIFNDTQVVRARLLAHRPTGGAVELFCLEPVAPHRALELALQQTGAATWRCLVGNGRRWKSGPVTLDFSFAGQPATLWAERQAAEAGESLIDFRWEPSSLPFAEVLRAAGHLPLPPYLHRPDTAVDAVRYQTVYAAHEGAVAAPTAGLHFTPELLAELTQRGVATGRVTLHVGAGTFQPVKATTMADHPMHAEPIIVQASLLRQLLAHRPRPVIAVGTTSLRTLESLYWLGAALVRQPAPAALTVAQWQPYEETEPIIGPEMALEALLAHLDASGTDTLEASTRLLIAPGYRFRLVQGLITNFHQPESTLLLLVAALLGPSWRAVYDHALAHGYRFLSYGDSSLLLPD

SEQ ID NO: 65732 - protein, 349 aa, unidentified
  source 1..349: note = Cytophagaceae bacterium
  REGION 1..349: note = tr|A0A1E4A8I3|A0A1E4A8I3_9BACT S-adenosylmethionine:tRNA ribosyltransferase-isomerase; OS = Cytophagaceae bacterium SCN 52-12 OX=1660162 GN=queA; PE = 3 SV=1
MKLSEFKFDLPQSLIALHPKERGEARMMVVHRKSGAIEHKSFSDIIDYFEDGDVMVVNDTKVFPARLYGQKEKTGAKIEVFLLRELNREMRLWDVLVDPARKIRVGNKLYFGDSELVAEVIDNTTSRGRTIRFLYDGTYDDFMNMVNELGETPLPPEIISRRAVTAEDRELFQTIFADKLGAVAAPMAGMHFTKVISKRLELKGVNFAPLTLHVGLGTFRNVDVEDLTKHKTDSENFAITEKTAKIINAGLDAGKKVCAVGTTSLKAIESSVSASGHVKPVEGWTDRFIFPPYDFKIGSALLTNFHLPESILLMNACAFGGYDLIMKAYETALKEKYRFFTYGDVMLIL

SEQ ID NO: 65733 - protein, 400 aa, unidentified
  source 1..400: note = Cytophagales bacterium
  REGION 1..400: note = tr|A0A286INC7|A0A286INC7_9BACT S-adenosylmethionine:tRNA ribosyltransferase-isomerase; OS = Cytophagales bacterium TFI 002 OX=1945892 GN=queA PE=3; SV = 1
MKTQAIAISDYDYHLPEERIAKFPLEKRDDSKLLVLKGNEITDRSFNEISDILPAKSLLVFNNTKVIPARLFFRRASGALIQVFLLNPTSHDGIITKVMEEENSCQWDCMIGNKKKWKGEELLASINIENKDITLRARLVDASTNEVNFSWDGAVSFAELVKAFGEIPLPPYLNRNTEENDKETYQTVYSKNDGAVAAPTAGLHFTDAVLEGLNQKGFKQSFLTLHVGAGTFQPVKVENAMEHHMHSEQIVVSKNFIIDIISHEDKIIPVGTTSMRSLESLYWYGVMLSLDHNAVFKVEKLFPYNYTGPDISRKAAFENILHFLEKEEKETLIGSTEIFIFPGYKMRVCDGIITNFHQPKSTLLLLISALVGEKWREVYAHAMSNNYRFLSYGDSSLLLG

SEQ ID NO: 65734 - protein, 348 aa, unidentified
  source 1..348: note = Cytophagales bacterium
  REGION 1..348: note = tr|A0A2M6GMD6|A0A2M6GMD6_9BACT S-adenosylmethionine:tRNA ribosyltransferase-isomerase; OS = Cytophagales bacterium CG18_big_fil_WC_8_21_14_2_50_42_9 OX=1973956 GN=queAPE=3; SV = 1
MKLSEFRFDLPANLMATHPAKNRDEARMMVIHRNTGKIEHRIFKDILEYFDDGDVMVLNDTKVFPARLYGNKEKTGAKIEVFLLRELNKEHHLWDVLVDPARKIRVGNKLYFGDSDLVAEVIDNTTSRGRTIKFLFDGSDDDFYKTINDLGETPLPKYLKREAEPDDRERYQTVYAKHVGAVAAPTAGLHFTREVLKRLELNGVDIVPLTLHVGLGTFRPVDVEDLTKHKMDSEHFIVPEETAQTVNKALDIKKRVCAVGTTTMRGLESSVSANSRLKPTEGWTDKFIFPPHDFRIPNALITNFHMPESTLLMMTCAFGGYDLIMDAYKVAVKEKYNFFSYGDVMLIL

SEQ ID NO: 65735 - protein, 348 aa, unidentified
  source 1..348: note = Cytophagia bacterium
  REGION 1..348: note = tr|A0A2E9WIV9|A0A2E9WIV9_9BACT S-adenosylmethionine:tRNA ribosyltransferase-isomerase; OS = Cytophagia bacterium OX=2026730 GN=queA PE=3 SV=1
MKLSQFDFKLASTRTAIHPSENRDESKLMVVHKKTGKIEHKQFKDIIKYFNEDDVLVLNDTKVFPARLYGQKEKTGAKIEVFLLRELNPELNLWDVLVDPARKIRVGNKLYFGDGELVAEVIDNTTSRGRTIRFIPEDSEKNFYDIIHEFGETPLPKEIKRKVDKKDEERFQTVYAKKIGAVAAPAAGLHFTEILLKKLELKGVKIVNITSHTGLGTFKDIDVEDLTKHKMDSENYSVPIETEIAVNNALKNNNRIFAVGTSSMKTLETAVNANDTLKANSGWTDKFIFPPYEFKICSGMITNFHSPKSTLLMMATAYGGFDTIMKAYKVAIKEKYMFHTYGDALLIV

SEQ ID NO: 65736 - protein, 391 aa, unidentified
  source 1..391: note = Cytophagia bacterium
  REGION 1..391: note = tr|A0A2E5GTN8|A0A2E5GTN8_9BACT S-adenosylmethionine:tRNA ribosyltransferase-isomerase; OS = Cytophagia bacterium OX=2026730 GN=CL871_00350 PE=3 SV=1
MNLDDYNYSYDKSIIASYPLKRRDESKLLVYNKDKIIDSKFYNITNYLPSDTILFFNDTKVIKGRIKIKKDTGAKIELLLINRINDTYSLKFKKIYKNNIAFESLIGNSKKWKLNSEIILKKKNKIRLIKVESNKVLFSWNENILWSDIINNIGEMPIPPYLNRNSQKIDNKVYQTIYSKKEGAIASPTAGLHFTKKTFKEINKKNINIDYLTLHVGMGTFKPIISKNIHEHNMHTEEVFFTKKNLKNILNHNSITAVGTTSIRILESIYWFGVKLLKKRNIEEFCVKSFEPYEKHKFLPTKNESICKVIDYMNKKNINTIRGKTSIFIFPGYKFMICNQLITNFHLPKSTLILLIAAFIGDDWKKVYKFAIKNNYRFFSYGDSSLLYKKD

SEQ ID NO: 65737 - protein, 360 aa, unidentified
  source 1..360: note = Dactylococcopsis salina
  REGION 1..360: note = tr|K9YSS6|K9YSS6_DACSA S-adenosylmethionine:tRNA ribosyltransferase-isomerase OS=Dactylococcopsis salina PCC 8305 OX=13035 GN=queA PE=3 SV=1
MEMKPDSSPFDRKLSSYDYDLPESYIAQTPVTPRDHSRLLVVDSPTHHQHQHFYDLPQWLQAGDLLVVNNTKVIPARMYGYKTTGATVEVLLLEEKSPNCWLALVKPGKRLQIGAKIQFYPRQDEQLPILEATVMAKDTATGGRLLAFDLGETSLVSVLDAYGEIPFPPYVTEKKAQPEQYQTVYAEELGAVAAPTAGLHFTDRLLRELQEKGVNQTEVTLHVGVGTFRPVETETITDHQMHEEWINVPSEAVKRVQETKAQGGRVVAVGTTVVRALEGAVAAEGHLKAYCGKTDLFIYPGYELQVVAGLITNFHLPRSSLLMLVSAFIGRERLLSLYQSAIEHQYRFYSFGDAMLIINN

SEQ ID NO: 65738 - protein, 380 aa, unidentified
  source 1..380: note = Dankookia rubra
  REGION 1..380: note = tr|A0A4R5QAK9|A0A4R5QAK9_9PROT S-adenosylmethionine:tRNA ribosyltransferase-isomerase; OS = Dankookia rubra OX=1442381 GN=queA PE=3 SV=1
MPDTPARSSPLGPPALRTEDFDFALPARLVAQAPARPRDAARLLVVDPAGLRDQGMRDLPGLLGPGDVMVVNDTRVIPARLRGRRGEAAIEIMLNRADPDGSWEALVRNARRLRPGDSIVIEGAPGLPCRVLARDGGTARLDFGPDPAALAAALDRAGEIPLPPYIARPEGPRPEDREDYQTLFAARPGAVAAPTASLHFTPDLVAALEARGVRRATVTLHVGAGTFLPMRAEDPRAHRLHAEWGEVTEDAAALINAARPAGGRIVAIGTTALRLLETAALGGGDDLRPVRPFRGLTDIFLLPGHRFRAADLLLTNFHLPKSTLFMLVSAFAGTARMRAAYQHAIAQGYRFYSYGDGSLLHRAEEALADPRVGEGKGQAA

SEQ ID NO: 65739 - protein, 352 aa, unidentified
  source 1..352: note = Dechloromonas aromatica
  REGION 1..352: note = sp|Q47AX4|QUEA_DECAR S-adenosylmethionine:tRNA ribosyltransferase-isomerase OS=Dechloromonas aromatica (strain RCB) OX=159087 GN=queA PE=3 SV=1
MSLTVDDFDFPLPPELIAQHPAAERRGSRLLHVCGEQLVDRRFADLPTLLKAGDLLVFNDTRVIKARFFGQKDTGGQVEIMLERIVDATHAICQVRASKAPKAGSTMRLADAFTVKMTGRAGADGDFFALELAEPGDFWELSERYGKLPLPPYIEHPAEGTDETRYQTVYAREPGAVAAPTAGLHFDEDMLATLQAQGINTAFLTLHVGAGTYRPMRVEKIADHRMHSERFEIPPATADAITTTRAAGGQVIAVGTTSLRALESAGNEDGTVQVGGAETSIFITPGYRFQVVDRLITNFHLPKSTLLMLVSAFAGYDHIRAAYAHAVAERYRFFSYGDAMLLERTGQPSDAI

SEQ ID NO: 65740 - protein, 348 aa, Dechloromonas denitrificans
  REGION 1..348: note = tr|A0A133XHK9|A0A133XHK9_9RHOO S-adenosylmethionine:tRNA ribosyltransferase-isomerase; OS = Dechloromonas denitrificans OX=281362 GN=queA PE=3 SV=1
MSLTVDDFDFPLPPELIAQHPAPERRGSRLLHVCGQQRFDRKFDDLPSLLRTGDLLVFNDTRVIKARFFGVKDSGGRVEIMLERIVDARHAVCQIRASKAPKPGCNLRLADAFTVRMTGRTGADDDFFALELVDEGDFWDLSERYGKLPLPPYIEHPAEDADETRYQTVYARAPGAVAAPTAGLHFDEAMLATLQAQGINTAFVTLHVGAGTYRPVRVEKITDHRMHSERYAVPQATADAIAATRAAGGRVIAIGTTSLRTLESAARDDGTVRVGEGETDIFITPGYRFKVVDRLFTNFHLPKSTLLMLVSAFAGYDNIRAAYAHAVADRYRFFSYGDAMLLEKSDAV

SEQ ID NO: 65741 - protein, 348 aa, Dechloromonas sp.
  REGION 1..348: note = tr|A0A3B7A6W9|A0A3B7A6W9_9RHOO S-adenosylmethionine:tRNA ribosyltransferase-isomerase; OS = Dechloromonas sp. HYN0024 OX=2231055 GN=queA PE=3 SV=1
MSLTVDDFDFPLPPELIAQHPAAERRGSRLLHVCAGQTVDRKFADLPGLLKAGDLLVFNDTRVIKARFFGQKDTGGQVEIMLERIVDATHAICQIRASKAPKTGCKMRLADAFDVCMTGRAGTDGDFFALELVDAGDFWELAEQYGKLPLPPYIEHPAEGADETRYQTVYARQPGAVAAPTAGLHFDEAMLEALRAQGVKTAFLTLHVGAGTYRPMRVEKIADHRMHSERFEIPAATAAAIAATHAAGGRVIAVGTTSLRALESAGNDDGTVRSGGAETSIFITPGYRFKVVDRLITNFHLPKSTLLMLVSAFAGYDHIRAAYAHAVADRYRFFSYGDAMLLEKTDAI

SEQ ID NO: 65742 - protein, 341 aa, Deferribacter autotrophicus
  REGION 1..341: note = tr|A0A5A8F8D4|A0A5A8F8D4_9BACT S-adenosylmethionine:tRNA ribosyltransferase-isomerase; OS = Deferribacter autotrophicus OX=500465 GN=queA PE=3 SV=1
MGKTSIERYNFNLDESLIAQFPADKRGESRLLVVNRASATFNDMKFKDIVSLIDSDSFLVVNNTKVLKARLFGKKKSGGRIEVLLLEQLDNKKFRAMIGGKWKREDEIYIDEFKIAATGRDAEGLVIVDFLENDPFMVMEQKGHIPLPPYIKRSDTEIDQERYNTVYSKNYGSVAAPTAGLHFTNEILKALKEKGVEILEITLNVGLGTFRPIKTEFIEDHQMHSENFTIDSDVATRINKLKNEGKKLIAVGTTVVRALESAASDDGVVREAKNQSTNLFIKEGYRFKIVDKLITNFHLPKSTLFILVTAFGGYDLIMNAYKHAMKNRYRFFSYGDAMFVE

SEQ ID NO: 65743 - protein, 341 aa, Deferribacter desulfuricans
  REGION 1..341: note = tr|D3PAI0|D3PAI0_DEFDS S-adenosylmethionine:tRNA ribosyltransferase-isomerase OS=Deferribacter desulfuricans (strain DSM 14783 / JCM 11476 / NBRC 101012 / SSM1) OX=6 39282 GN=queA PE=3 SV=1
MSKTSINRYDFEFDENLIAQYPEKKRDESRLLVVNRQTNKLLDKRFKDIVDFFDDNMFLVLNNTKVLNARLFAKKESGGEVEIFLLEQLDGKRFKALLGGKWKSEGYLYINEYKLFVSKRDDEGIVTVDFIDANPFEIMDKYGHVPLPPYIKREDNELDRERYNTVFSKKIGSVAAPTAGLHFTEEIFDKLKEKGVEIFEITLNVGLGTFRPVKTEFIEDHKMHKESFSIEKSVADKINKLKKDGKKLVAVGTTVVRALESAASQFGEITPCENAYTDLFIREGYQFKVVDKMITNFHLPKSTLFILVCAFGGYDLMKKAYAHAVKDRYRFFSYGDAMFII

SEQ ID NO: 65744 - protein, 332 aa, unidentified
  source 1..332: note = Deferribacteraceae bacterium
  REGION 1..332: note = tr|A0A3C1BUD4|A0A3C1BUD4_9BACT S-adenosylmethionine:tRNA ribosyltransferase-isomerase; OS = Deferribacteraceae bacterium OX=2053543 GN=queA PE=3; SV = 1
  VARIANT 111: note = Xaa can be any naturally occurring amino acid
MKTPAELFDFPLPEELIAQYPSETRGGSRLLLADRKGLIKDLMFSGITELIDDEYFLVINNTRVMNARLEGFKSTGGQVEVFLLNKLSSDSFTALTGGKVKEGTEVTVGDXFLDDGLRMVRFLTHTPEEVMERWGHVPLPPYIRRDDSAEDKIRYQTVYAKEAKSVAAPTAGLHFTEDTLGALKSKGVEVLEVSLDVGIGTFRPMKSEHLEDHHMHSEQYNVSGETADKINSLKKDGRKLICVGTTAMRTMESATDEKGITRSGSGSTDIFIRPGYEFRAADALITNFHLPKSTLFVLVCAFAGREFMLETYAHAVREKYRFFSYGDAMFIR

SEQ ID NO: 65745 - protein, 84 aa, unidentified
  source 1..84: note = Defluviimonas alba
  REGION 1..84: note = tr|A0A159Z4C7|A0A159Z4C7_9RHOB S-adenosylmethionine:tRNA ribosyltransferase-isomerase; OS = Defluviimonas alba OX=1335048 GN=AKL17_2799 PE=3 SV=1
MKLSDFDFYLPEALIATRPARPRSSARLLLATGNGIADRSVADLPDILRPGDRLVLNNTRVIPARLSGTRTRAVSQAAGAQGEG

SEQ ID NO: 65746 - protein, 276 aa, unidentified
  source 1..276: note = Defluviimonas alba
  REGION 1..276: note = tr|A0A159Z4G3|A0A159Z4G3_9RHOB S-adenosylmethionine:tRNA ribosyltransferase-isomerase; OS = Defluviimonas alba OX=1335048 GN=AKL17_2798 PE=3 SV=1
MLEPLPGGAWSALARPLRKLKPGEVIRFSDALSAEVTGIADGRLTLAFDSAGPAFDAALAEAGQMPLPPYIAALRAPDAQDDDDYQPVFARHSGAVAAPTASLHFDAPLLEALRARGVEFTEVTLHVGAGTFLPVKVDDVATHKMHAEWGEVTPEAAAAINATRAAGGRIIPVGTTALRLIESAADAKGVLHPWQGSTDIFIYPGYRFRVTDALMTNFHLPKSTLLMLVSALMGQERIRRIYEHATNSGYRFFSYGDASLLIPEAPQGIRDSVDGT

SEQ ID NO: 65747 - protein, 362 aa, unidentified
  source 1..362: note = Defluviimonas aquaemixtae
  REGION 1..362: note = tr|A0A2R8B541|A0A2R8B541_9RHOB S-adenosylmethionine:tRNA ribosyltransferase-isomerase; OS = Defluviimonas aquaemixtae OX=1542388 GN=queA PE=3 SV=1
MKLSDFDFDLPEGLIATRPARPRSAARLLVAEGDAIHDLHVRDLPDLLGPGDRLVLNDTKVIPARLSGTRRRETGQGEVVARIEVTLLEPRPEGRWAALVKPLKKLKEGETIRFSERLSADVVRIAEGQAELFFNLTGTEFDEALAEAGDMPLPPYIAALRPPDSRDREDYQTVFARRSGAVAAPTASLHFDDALLQRLADRGVAFTHVTLHVGAGTFLPVKVEDVTTHRMHPEWGEVTDEAAAEINATRDAGGRVIPVGTTALRLLESAVDSAGRMRAWRGATDIFIYPGYEFRATDGLMTNFHLPKSTLLMLVSAFMGVVRMRRVYAHAVAESYRFFSYGDASLLLPKGRNPAAPSRRRD

SEQ ID NO: 65748 - protein, 362 aa, unidentified
  source 1..362: note = Defluviimonas denitrificans
  REGION 1..362: note = tr|A0A2S8SA32|A0A2S8SA32_9RHOB S-adenosylmethionine:tRNA ribosyltransferase-isomerase; OS = Defluviimonas denitrificans OX=404881 GN=queA PE=3 SV=1
MKLSDFDFDLPEGLIATRPARPRSAARLLLAEGDGMRDLHVRDLVDLLGPGDRLVLNNTRVIPARLQGLRRRMTPQGEAVAKIEVTLTEPRAQGGWAALVKPLRKLKEGEEIAFAGGLSARVAGIADGQAALVFNLEGAAFDAALAKAGDMPLPPYIAALRAPDAQDRDDYQTVFARHAGAVAAPTASLHFDDDLLAALRDKGVAFTEVTLHVGAGTFLPVKVEDVTTHRMHAEWGEVTESAAAEINATRAAGGRVIPVGTTALRLIESAAGEDGQMRPWRGATDIFIYPGYRFRVTDGLMTNFHLPKSTLLMLVSALMGVGRMRRVYAHAVASGYRFFSYGDASLLLPSRRDEGTESRREA

SEQ ID NO: 65749 - protein, 350 aa, unidentified
  source 1..350: note = Defluviimonas sp.
  REGION 1..350: note = tr|A0A059IID2|A0A059IID2_9RHOB S-adenosylmethionine:tRNA ribosyltransferase-isomerase; OS = Defluviimonas sp. 20V17 OX=1417296 GN=queA PE=3 SV=1
MKLSDFDFDLPEALIATRPARPRSSARLLVAEGGAIRDLHVRDLPDLLGPGDRLVLNNTKVIPARLSGTRAREAAAPGEGVAQIEATLLEPRPGGAWLALAKPARKLRPGDEIRFSEVLSARVESRAGGEVVLAFNLTGEDFDAALAEAGAMPLPPYIAARRAADEQDRDDYQTVFARHAGAVAAPTASLHFDAPLLQALRDRGVAFTEVTLHVGAGTFLPVKVEDVTTHRMHSEWGEVTEAAAAQINATRAAGGRVIPVGTTALRLIESAADPEGRMQPWRGSTDIFIYPGYRFRVTDALMTNFPLPKSTLMMLVSALIGKPEIDRIYAHAVAQRYRFFSYGDASLLIP

SEQ ID NO: 65750 - protein, 342 aa, Defluviitoga tunisiensis
  REGION 1..342: note = tr|A0A0C7NSP8|A0A0C7NSP8_DEFTU S-adenosylmethionine:tRNA ribosyltransferase-isomerase; OS = Defluviitoga tunisiensis OX=1006576 GN=queA PE=3 SV=1
MSENIFNLEKYDYQLPEELIAQEPVEPRDMCRLMVLDRAKRSIDHKIFKDIKNYLQPGDLLVINNTKVIPARLLGKKETGANVEVLLLERNGSQNIWKALVKPGSKIKKGNILLFPDNIVCEVLEHLEDGTRILEFKDSNFYSKIYKIGQIPLPPYIKKHLDDPNQYQTEYAKYEGAVAAPTAGLHFTQDLLEELQGKNGVNIAEITLHVGLGTFRPVKENDIRQYNIHEEYYSVSKDVLEKIARTKAKGKKVIAVGTTVVRTLESIALEPDKLVGKTKLYIYPPFEFRIVDSLITNFHLPKSSLLFLVSAFAGYDYIMNAYKVAIEKRYRFFSFGDAMFII

SEQ ID NO: 65751 - protein, 346 aa, Dehalobacter sp.
  REGION 1..346: note = tr|A0A1C2XYJ5|A0A1C2XYJ5_9FIRM S-adenosylmethionine:tRNA ribosyltransferase-isomerase; OS = Dehalobacter sp. TeCB1 OX=1843715 GN=queA PE=3 SV=1
MRLEDFDYDLPERLIAQTPAEPRDSSRLMLVDKAKGEIFHYLFQDIVQFFNAGDVLVLNKTRVIPARLIGQKEGTGAKIEVLLLKRIDRDRWEVLVKPGKRLKQGQTVVFGGGLLRGELIGILDDGNRIIHFTYSGLFEEVLDSLGEMPLPPYITAKLNDKERYQTVYAKENGSAAAPTAGLHFTEELLQRIRDNGVEVLEVLLHVGLGTFRPVKTEEITEHQMHTEYFSIDSETAAKISLAKKEGRRVIAVGTTVVRTLESAAGLCQDASGNVLSETEGWTDIFIYPGYQFKIVDALITNFHFPRSTLLMLVSAFAGREMILEAYQTAVREKYRFFSFGDAMFLV

SEQ ID NO: 65752 - protein, 346 aa, Dehalobacter sp.
  REGION 1..346: note = tr|A0A4R4CY80|A0A4R4CY80_9FIRM S-adenosylmethionine:tRNA ribosyltransferase-isomerase; OS = Dehalobacter sp. 12DCB1 OX=2070364 GN=queA PE=3 SV=1
MRLEDFEYDLPERLIAQTPAEPRDSSRLMLVDKAKGEIFHYLFQDIVQFFNAGDVLVLNKTRVIPARLIGEKEGTGAKIEVLLLKRIDRDRWEVLVRPGKRLKPGQNVIFGGGLLYGELIEILDDGNRIIRFTYSGLFEEVLDSLGEMPLPPYITAKLNDKERYQTVYAKENGSAAAPTAGLHFTEELLHRIRDNGVEVLEVLLHVGLGTFRPVKTEEITEHQMHTEYFSIDSETAARISLAKKEGRRVIAVGTTVVRTLESAAGLCQDASRNVLSETEGWTDIFIYPGYQFKIVDALITNFHFPRSTLLMLVSAFAGRELILKAYQTAVREEYRFFSFGDAMFLV

SEQ ID NO: 65753 - protein, 346 aa, unidentified
  source 1..346: note = Dehalococcoidales bacterium
  REGION 1..346: note = tr|A0A2D6LGR9|A0A2D6LGR9_9CHLR S-adenosylmethionine:tRNA ribosyltransferase-isomerase; OS = Dehalococcoidales bacterium OX=2026733 GN=queA PE=3 SV=1
MKTSNFDYSLPPELIAQTPVEPRDQSRLMVLDRGDGTITHRRFFELIDYLRDGDVLVFNDSRVIPARLDGRKADGGGRVEILLLRRLETNVWEALGRPARQLRAGAKVILTSDSVEDNRPEVTGEVIQTGRGGLKTVRFSEERRLAELGQIPLPPYIHAPLTHPERYQTVYARVAGSVAATTAGLHFTPELIKRIAQKGVRCLFVTLHIGLDTFSPVREDDPQEHPIHSEYGVMSPTTADRLSQAKREGRRIICVGTTTVRIVEQVTRMSRPLQLQPFEDWVNLFILPGYQFRLVDALITNFHLPRSTLLMLVTAFAGKEHISQAYQEAIASGYRFYSFGDAMLVL

SEQ ID NO: 65754 - protein, 348 aa, unidentified
  source 1..348: note = Dehalococcoidales bacterium
  REGION 1..348: note = tr|A0A2E9M6G6|A0A2E9M6G6_9CHLR S-adenosylmethionine:tRNA ribosyltransferase-isomerase; OS = Dehalococcoidales bacterium OX=2026733 GN=queA PE=3 SV=1
MKTSDFDYILPPEFIAQTPIEPRDHSRLMVLDRNNGSLKHHRFFEIIDYLRAGDILVLNNSRVIPARLSARKVDGGSHLEVLLLRRLCPNIWETLVRPANRVRIGTKIEIANDSMTDDKPGLPVTAKVIGSNECGKRVLSFSDETRLLELGQIPLPPYIQIPLPNPERYQTVYAQVAGSIAAPTAGLHFTPELMTKTEKKKVRCLSVTLHIGLDTFRPVRVENPMEHPIHQEYGIISQEVAEELAQAKAEGRRIICVGTTTVRLVEAAAQASNPARVAPFADWVSLLIVPGHRFHIVDAMITNFHLPRSTTLMMATAFAGRDLIHQAYQEAITQQYRFYSFGDAMLIF

SEQ ID NO: 65755 - protein, 343 aa, unidentified
  source 1..343: note = Dehalococcoides mccartyi
  REGION 1..343: note = sp|Q3Z8C1|QUEA_DEHM1 S-adenosylmethionine:tRNA ribosyltransferase-isomerase OS=Dehalococcoides mccartyi (strain ATCC BAA-2266 / KCTC 15142 / 195) OX=243164; GN = queA P E=3 SV=1
MKTSDFDYNLPQEYIAQKPAEPRDSSRLLVLNRQSGELKSCIFRDITGYFQPGDVLVMNNSRVLPARIKGIKQDTSAKIEILLLKSDGNGCWEALLKPGKRTKPGTIIDIRKQDGQIHIQAEVLADKEDGIKLLRFSDETLLMKLGEVPLPPYIHTPVSDPERYQTVYALTNGSVAAPTAGLHFTPELLERLGDMGVICTYVTLHIGLDTFRPVKEEDPSDHIIHREYGILSAETAAAICQAKANGKRVFCVGTSATRLVEQASSLSQNGIIELYSGWADLFILPGYKFKVADCFITNFHLPRSTPLMLTAAFAGWPLLQKAYEKAINEHYRFYSFGDAMLVL

SEQ ID NO: 65756 - protein, 343 aa, unidentified
  source 1..343: note = Dehalococcoides mccartyi
  REGION 1..343: note = sp|Q3ZXG6|QUEA_DEHMC S-adenosylmethionine:tRNA ribosyltransferase-isomerase OS=Dehalococcoides mccartyi (strain CBDB1) OX=255470 GN=queA PE=3 SV=1
MKTSDFDYNLPQEYIAQKPVEPRDSSRLLVLNRQSGELTNRIFGEITDYFKPGDVLVMNDSRVLPARIKGIKQDTSAKIEILLLKRDGEGCWEALLKPGKRTKPGTIIDIHQKGGVVSIQAEVLADKEDGIKLLRFSDETHLMKLGEVPLPPYIHTPVADPERYQTVYALTNGSVAAPTAGLHFTPELLKRLTEMGVICTYVTLHIGLDTFRPVKEEDPKDHKIHREYGILSKETASAICCAKETGKRVFCVGTSATRLVEQASHLSQTSLITSYSGWADLFILPGYKFRVADCFITNFHLPRSTPLMLTSAFAGWPFLRKAYEKAISEHYRFYSFGDAMLIL

SEQ ID NO: 65757 - protein, 343 aa, unidentified
  source 1..343: note = Dehalococcoides sp.
  REGION 1..343: note = tr|A0A0C6EP21|A0A0C6EP21_9CHLR S-adenosylmethionine:tRNA ribosyltransferase-isomerase; OS = Dehalococcoides sp. UCH007 OX=1522671 GN=queA PE=3 SV=1
MKTSDFDYNLPQEYIAQKPAEPRDSSRLLVLNRQRGELTSRIFGEITEYFKPGDVLVMNNSRVLPARIKGIKRDTAAKIEILLLKRDGDNCWEALLKPGKRTKPGTIIDIHQHGEETSTQAEVLADKDDGIKLLRFSDETHLMKLGEVPLPPYIHTPVSDPERYQTVYALTNGSVAAPTAGLHFTTDLLKCLSEIGVICTYVTLHIGLDTFRPVKEEDPNDHIIHREYGILSAETAATICQAKANGKRVFCVGTSATRLVEQASSLSQNGIIEPYSGWADLFILPGYKFRVVDCFITNFHLPRSTPLMLTAAFAGWPFLKKAYEKAIHEHYRFYSFGDAMLVL

SEQ ID NO: 65758 - protein, 188 aa, unidentified
  source 1..188: note = Dehalococcoidia bacterium
  REGION 1..188: note = tr|A0A0S8C9G3|A0A0S8C9G3_9CHLR S-adenosylmethionine:tRNA ribosyltransferase-isomerase (Fragment) OS=Dehalococcoidia bacterium SG8_51_3; OX = 1703394 GN=AMJ70_08905 PE=3SV=1
MKTSDFDYILPQELIAQSPIEPRDNSRLMVVNRIDGSIAHRCFRDIADYLRDGDVLVFNESLVISARLYGRKADGGGWVEILLLRRLEEGTWEALVRRGKRLRAGSSVVITNGMKKDTPSDITAEVIGQGEGGIKVLRFSDETLLAEMGHVPLPPYINAPLSRPERYQTVYARVAGSVAAPTAGLHFT

SEQ ID NO: 65759 - protein, 337 aa, unidentified
  source 1..337: note = Dehalococcoidia bacterium
  REGION 1..337: note = tr|A0A2E5LYA9|A0A2E5LYA9_9CHLR S-adenosylmethionine:tRNA ribosyltransferase-isomerase; OS = Dehalococcoidia bacterium OX=2026734 GN=queA PE=3 SV=1
MRTSDFDYDLPPSLIAQQPVEPRDAARLLVVSRGSGLLAHHHVRDLPDLLNRGDLLVLNDTRVMAGRLRGFRADTGGQVEFLLLFEHDNGSWSALVRPARGAIPGRQYRLEGSDGPLTGTVLHREDEIATVAFDRPIDPASVGTVPLPPYIRDFVGDPERYQTVYAREARSAAAPTAGLHFSEELFSRLTTVGVDHTFLTLEVGAGTFRPVRAEDPAEHVLGPERFSLPSGAAKAIRSARADGRRVIAIGTTVVRTLEHAFADQDAVLEGETDLFIRPGYTFSTVDALLTNFHLPRSTLLMLVSAFGGYDLIRSAYAEAIRESYRFYSFGDAMLLLP

SEQ ID NO: 65760 - protein, 348 aa, unidentified
  source 1..348: note = Dehalogenimonas alkenigignens
  REGION 1..348: note = tr|A0A0W0GJJ5|A0A0W0GJJ5_9CHLR S-adenosylmethionine:tRNA ribosyltransferase-isomerase; OS = Dehalogenimonas alkenigignens OX=1217799 GN=queA PE=3; SV = 1
MTALRTSDFDYHLPSESIAQTPAEPRDSSRLLVLDRLSGAIQHRRFMDIIDYLQPGDALVFNDSRVIPARLFGRKKDTGARVEALLLLRRAPGEWQALIKPARRLGIGAVVELYDRSGIAAGATLELLDKAEDGTATVRISDETRLDELGILALPPYIRHQLSGSEAERYQTVYSRVAGSVAAPTAGLHFTPSLLAAIEAKGVKLLFVTLHIGLDTFRPVKEEDPSKHPIHREYAVLPPETAAAITEVKASGGRVFGVGTSAVRTLEWAAGQNGLPLKPFEGWVELFILPGFEFRVVDRLVTNFHLPRGTPLMLAAAFTGWDSLKAAYDTAVAGKYRFYSFGDGMLII

SEQ ID NO: 65761 - protein, 345 aa, unidentified
  source 1..345: note = Dehalogenimonas formicexedens
  REGION 1..345: note = tr|A0A1P8F7J7|A0A1P8F7J7_9CHLR S-adenosylmethionine:tRNA ribosyltransferase-isomerase; OS = Dehalogenimonas formicexedens OX=1839801 GN=queA PE=3; SV = 1
MKTSDFDYELPPELIAQTPAEPRDASRLLVLDRKGGKIEHRRFFDIIGYLHPGDALVFNDSRVIPARLFGLKKSTGARVEALLLLRRGFGEWQALLKPAQRLGVGAIVDLYDRSGSPSGQTLEVLSKSEDGTAVVRLSDENRLTELGILALPPYIHHQLSESEAERYQTVYSRIAGSVAAPTAGLHFTPELLKAIESKGVRLLFVTLNIGLDTFRPVKEEDPALHPIHREYAVLSAETAEAINQVKASGGRVFGVGTSAVRTLEWAAKNQGLPLKPFEGWVELFILPGFKFQVIDNLITNFHLPRGTPLMLAAAFAGWETLKQGYRNAVDERYRFYSFGDSMLIL

SEQ ID NO: 65762 - protein, 343 aa, Dehalogenimonas lykanthroporepellens
  REGION 1..343: note = tr|D8K000|D8K000_DEHLB S-adenosylmethionine:tRNA ribosyltransferase-isomerase OS=Dehalogenimonas lykanthroporepellens (strain ATCC BAA-1523 / JCM 15061 / BL-DC-9) OX =552811 GN=queA PE=3 SV=1
MKTADFNYHLPENLIAQTPAEPRDSSRLLVLNRDTGSIEHRRFRDIIDYLEPGDALVFNDSRVIPARLYGHKFGTGAKIEALLLTRKAGNEWQALLKPSKKLSPGTKVELHDQSGQDSGVTFEVLSKSEDGIADIRISDENRLQDLGILALPPYIHHRLDEPERYQTVYSRINGSVAAPTAGLHFTPELLKTIESKGIKLLFVTLHIGLDTFRPVKEENPANHPIHREFAILTKETAEAINEVKAKGGRVYGVGTSAVRTLEWAAKNYGLPLQPFEGWVELFILPGFEYRVIDRLITNFHLPCGTPLMLTAAFAGWDNVKRAYEAAVVEEYRFFSFGDSMVVV

SEQ ID NO: 65763 - protein, 345 aa, Dehalogenimonas sp.
  REGION 1..345: note = tr|A0A0F7GDQ6|A0A0F7GDQ6_9CHLR S-adenosylmethionine:tRNA ribosyltransferase-isomerase; OS = Dehalogenimonas sp. WBC-2 OX=943347 GN=queA PE=3 SV=1
MKTADFDYNLPEELIAQTPAKPRDSSRLLVLNRGTGTIEHCRFVDIIKYLQPGDALVFNDSRVIPARLFGRKLNTGAHVEVLLLLRRQRNEWQALIKPAKRLSAGTIVELFDKHGVNSGVTLQVMQKDEDGTASILISNEDRLAQLGILALPPYIHHQLSETEEERYQTVYSRVSGSVAAPTAGLHFTPELLKKIENKGIKLLFVTLHIGLDTFRPVKEEDPALHLIHKEYAVLSAETAASINEVKVSGGRVFGVGTSAVRTLEWAALTKGMPLKPFMGWVELFILPGFKYQVIDRLITNFHLPRGTPLMLTAAFAGWDGLKVAYDQAIDEGYRFYSFGDAMLIN

SEQ ID NO: 65764 - protein, 345 aa, Dehalogenimonas sp.
  REGION 1..345: note = tr|A0A2P5P965|A0A2P5P965_9CHLR S-adenosylmethionine:tRNA ribosyltransferase-isomerase; OS = Dehalogenimonas sp. GP OX=1536648 GN=queA PE=3 SV=1
MKTSDFDYNLPLELIAQTPVDPRDSSKLLVLDRFRRGIEHRCFSDIIDYLRPGDALVFNDSRVIPARLFGIKKGTGAHVEALLLLRRAYGEWQALIKPAKRLNIGTVVNLCDRSGNPTSSTFEIISKSDDGTALIRLTDEEHLTDLGILALPPYIHHQLTESEAERYQTVYSRVAGSVAAPTAGLHFTPELLKAIEKKGVKLLFVTLHIGLDTFRPVKEEDPAFHPIHREYAILPSETAQAINDVKASSGRVFGVGTSTVRTLEWAAMTQGLPLKEFEGWVELFILPGFHFQVIDHLITNFHLPRGTPLMLASAFVGRETLKQAYQEAVDEQYRFYSFGDSMLIH

SEQ ID NO: 65765 - protein, 372 aa, unidentified
  source 1..372: note = Deinococcus actinosclerus
  REGION 1..372: note = tr|A0A0U4B8B6|A0A0U4B8B6_9DEIO S-adenosylmethionine:tRNA ribosyltransferase-isomerase; OS = Deinococcus actinosclerus OX=1768108 GN=queA PE=3 SV=1
MTDATPHAGADAVLHRLNFHLPEDRVAQTGAEPRDASRLMIVGEALEHRVFRDLPEFLRAGDLLVFNQSKVIPARVMARKPVDAHGHGGGSVEVMLLRTEERPELGRHVWSAYLKPARRAGFELWLGGLEHEGGHRAQVVGELEDGARLLRFDHDILPHLDDIGRLPLPPYIDAGDSDETWRDRYQTVYAREPGSVAAPTAGLHFTPDLLARLAAMGVQTAHVTLHVGAGTFRPISGSVADHVMHAERWHVTPETAQAINAARAEGRRVIAVGTTTVRTLESAWDGTQVQPGEGDTQIFITPGRPVNVPDLLITNLHLPGSTLLLLVAAFAGEDRIRAAYDAALDGEYRFYSLGDAMLLTNVRGARSGVSGE

SEQ ID NO: 65766 - protein, 373 aa, unidentified
  source 1..373: note = Deinococcus actinosclerus
  REGION 1..373: note = tr|A0A2Z3Z079|A0A2Z3Z079_9DEIO S-adenosylmethionine:tRNA ribosyltransferase-isomerase; OS = Deinococcus actinosclerus OX=1768108 GN=queA PE=3 SV=1
MTDATPHAGADAVLHRLNFDLPEDRVAQTGAEPRDASRLMIVGEAIEHRVFRDLPEFLRAGDLLVFNQSKVIPARVMARKPVDAHGHGGGSVEVMLLRAEERPELGRHVWSAYLKPARRAGNELWLGGLAHEGGHRAQVVGELEDGARLLRFDHDILPHLDDIGRLPLPPYIDAGDSDETWRDRYQTVYAREPGSVAAPTAGLHFTPELLARLAEMGVQTAHVTLHVGAGTFRPISGSVADHVMHAERWHVTPETAQAINAARAEGRRVIAVGTTTVRTLESAWDGTQVQPGEGDTQIFITPGIPVNVPNLLITNLHLPGSTLLLLVAAFAGEDRIRAAYDAALAGDYRFYSLGDAMLLTNVRGQPEAGSSLE

SEQ ID NO: 65767 - protein, 362 aa, Deinococcus aerius
  REGION 1..362: note = tr|A0A2I9CUD0|A0A2I9CUD0_9DEIO S-adenosylmethionine:tRNA ribosyltransferase-isomerase; OS = Deinococcus aerius OX=200253 GN=queA PE=3 SV=1
MSDVAETVRPDADAVLARLAFDLPPERIAQTGAEPRDSSRLMVVGERIEHRIFRELPDLLRPGDVLIFNESRVIPARVMARKPVVNGQGGGQVEVLLLREEEANVWSAYLKPAKRAGKELWLGQPGGTQHRAEVVGALPDGARLLRFDHDIRPHLDEIGRLPLPPYIHAGDSDETWRERYQTVYAREPGSVAAPTAGLHFTPELLARLDEAGVERHAITLHVGAGTFRPITGSVAEHVMHAERYAISEGTAGAINQAKAEGRRVVAVGTTTVRALESSANEDGTVRPGEGDTRIFITPGTPVRVPDLLITNLHLPGSTLMLLVAAFAGEARIRAAYDAALAGGYRFYSLGDAMLLERAVGSG

SEQ ID NO: 65768 - protein, 344 aa, Deinococcus cellulosilyticus
  REGION 1..344: note = tr|A0A511N156|A0A511N156_9DEIO S-adenosylmethionine:tRNA ribosyltransferase-isomerase; OS = Deinococcus cellulosilyticus NBRC 106333 = KACC 11606; OX = 1223518 GN=queA PE= 3 SV=1
MNMLDFELPEDLIAQTGVEPRDHSRLMVTRPDGTLEHRIFRDLLEYLKPGDVMVFNESRVIPARLFAKKATGGTIEVLLLREREHKVWSAYLKPARKATGTLFFGTGDIQAEVTGVLEDGARLLTFNEDIKPRLTELGTLPLPPYIQKSTIGERYQTVYAKTEGSVAAPTAGLHFTPELLAQIDALGVERHHLTLHVGAGTFKPISGSITEHVMHEEQFSISEETASAINRAKQEGRRVIAVGTTTVRALESAAQNGQVQAGEGETRIFIHPPYAFQVPDLLITNFHLPHSTLLLLVGAFAGEETIAHAYQTAIQERYRFYSLGDAMLLYRQQQDQHRGAEGAV

SEQ ID NO: 65769 - protein, 353 aa, Deinococcus deserti
  REGION 1..353: note = tr|C1CW83|C1CW83_DEIDV S-adenosylmethionine:tRNA ribosyltransferase-isomerase OS=Deinococcus deserti (strain VCD115 / DSM 17065 / LMG 22923) OX=546414 GN=queA; PE = 3 S V=1
MTPDSADAALARLNFDLPDNRIAQTGAEPRDSSRLMVVGETLAHRVFHELPELLQPGDLLVFNESRVIPARVMARKPLVNGLGGGQVEVLLLREEETLDLGPHVWSAYLKPARRAGNELWLGEHRAEVVGQLEDGARLLRFGYDIKPHLDEIGRLPLPPYIDAGSSDEVWRERYQTVYAREPGSVAAPTAGLHFTPELLSRLDARGVERVSVTLHVGAGTFKPITGSVADHVMHAERYMVSDQAADAINRARREGRRVVAVGTTTVRTLESAWDGNAVRAGEGETRIFITPGRPVNVPDLLITNLHLPGSTLLLLVAAFAGEERIRAAYDAALSEGYRFYSLGDAMLLENLRG

SEQ ID NO: 65770 - protein, 350 aa, Deinococcus ficus
  REGION 1..350: note = tr|A0A221SXL7|A0A221SXL7_9DEIO S-adenosylmethionine:tRNA ribosyltransferase-isomerase; OS = Deinococcus ficus OX=317577 GN=queA PE=3 SV=1
MNPDPRTADEILAALHFHLPEHRIAQTGAEPRDTSRLMHVGKQITHHTFRDLPALLRPGDLLVFNESRVIPARVMARKPVINGYGGGQVEVLLLREEEHNTWSAYLKPARRAGHELWLGEHRAEIIGQLDDGARLLRFDHDIKPHLDDIGRLPLPPYINAGDDDHHWRQRYQTVYARTPGSVAAPTAGLHFTPELLEQLDAIGVERTHVTLHVGAGTFKPITGSVNDHVMHAERYAVSEQAAHAINTARAQHRRIIAVGTTTVRTLESAWNGSQVQPGEGDTRIFITPGTPVHVPDLLITNLHLPGSTLLLLVAAFAGVDRIQAAYQAALDEDYRFYSLGDAMLLENTRE

SEQ ID NO: 65771 - protein, 366 aa, Deinococcus geothermalis
  REGION 1..366: note = tr|Q1IZT7|Q1IZT7_DEIGD S-adenosylmethionine:tRNA ribosyltransferase-isomerase OS=Deinococcus geothermalis (strain DSM 11300) OX=319795 GN=queA PE=3 SV=1
MTHEETAAAVPLEPRPDPDAVLARLAFDLPPERIAQTGAEPRDASRLMVVGREHIAHRIFRELPELLRAGDVLVFNESRVIPARVLARKPVTEGGFGGGQIEVLLLREEEQNVWSAYLKPAKRAGKELWLGQHRAEVTGVLPDGARLLRFDHDIKPHLDEIGRLPLPPYIQAGDSDERWRERYQTVYAREPGSVAAPTAGLHFTPELLARLDALGVERHALTLHVGAGTFRPITGSVADHVMHAERYAISETVAAAINRAKVEGRRVIAVGTTTVRALESSANADGTVNPGEGETRIFILPGVPVRVPDLLITNLHLPGSTLLLLVAAFAGEERIRAAYDAALVGDYRFYSLGDAMLLERAGGPGL

SEQ ID NO: 65772 - protein, 317 aa, Deinococcus gobiensis
  REGION 1..317: note = tr|H8GXB7|H8GXB7_DEIGI S-adenosylmethionine:tRNA ribosyltransferase-isomerase OS=Deinococcus gobiensis (strain DSM 21396 / JCM 16679 / CGMCC 1.7299 / I-0); OX = 745776GN=DGo_CA1919 PE=3 SV=1
MVVGAEITHRVFRELPDLLRPGDLLVFNESRVIPARVMARKPVDAGGFGGGQVEVLLLREEEANVWSAYLKPARRAGNVLLLGPQGEHRAEVVGVLDDGARLLRFDHDLKPHLDEIGRLPLPPYIEAGDDEAHWRERYQTVYAQTPGSVAAPTAGLHFTPELLARLDARGIERASVTLHVGAGTFKPISGPVAEHVMHAERYAVSEATAGAIGRARAEGRRVVAVGTTTVRTLESAWDGEAVRAGEGDTRIFITPGTPVNVPDLLITNLHLPGSTLLLLVSAFAGEERIRAAYAAALAQDYRFYSLGDAMLLENVRD

SEQ ID NO: 65773 - protein, 368 aa, Deinococcus grandis
  REGION 1..368: note = tr|A0A117DQK1|A0A117DQK1_9DEIO S-adenosylmethionine:tRNA ribosyltransferase-isomerase; OS = Deinococcus grandis OX=57498 GN=queA PE=3 SV=1
MTDATPHAGADAVLHRLNFHLPEDRVAQTGAEPRDASRLMIVGEAIEHRVFRDLPDELRAGDLLVFNQSKVIPARVMARKPVDAHGHGGGSVEVMLLRAEERPELGRHVWSAYLKPARRAGFELWLGGLEHEGGHRAQIVGELEDGARLLRFDHDILPHLDDIGRLPLPPYIDAGDSDETWRDRYQTVYAREPGSVAAPTAGLHFTPDLLARLAGLGVQTAHVTLHVGAGTFRPISGSVADHVMHAERWHVTPDTAQAINAARAEGRRIIAVGTTTVRTLESAWDGTQVQPGEGDTQIFITPGRPVNVPDLLITNLHLPGSTLLLLVAAFAGEDRIRAAYDAALNGDYRFYSLGDAMLLTNQAVGRGL

SEQ ID NO: 65774 - protein, 365 aa, Deinococcus hopiensis
  REGION 1..365: note = tr|A0A1W1VKR0|A0A1W1VKR0_9DEIO S-adenosylmethionine:tRNA ribosyltransferase-isomerase; OS = Deinococcus hopiensis KR-140 OX=695939 GN=queA PE=3 SV=1
MPDPRTEADAVLARLAFELPPERIAQTGAEPRDASRLMVVGREGLEHRIFHDLPELLRAGDVLVFNESRVIPARVMARKPVENGFGGGQVEVLLLREEAVPELGCSVWSAYLKPARRAGKELWLGEGEARHRAEVVGTLPGGARLLRFERDIKPHLDEIGRLPLPPYIDAGDSDETWRERYQTVYAREPGSVAAPTAGLHFTPELLAHLGALGVERRAITLHVGAGTFRPISGSVSEHVMHAERYAISASTASAINRAKAEGRRVVAVGTTTVRALESSANEDGTVREGEGDTAIFIVPGVPVRVPDLLITNLHLPGSTLMLLVAAFAGEDRIRGAYDAALAEGYRFYSLGDAMLLERESLSGQR

SEQ ID NO: 65775 - protein, 376 aa, Deinococcus indicus
  REGION 1..376: note = tr|A0A246BS22|A0A246BS22_9DEIO S-adenosylmethionine:tRNA ribosyltransferase-isomerase; OS = Deinococcus indicus OX=223556 GN=queA PE=3 SV=1
MSPVTTLSAEQAAHADATLARLNFDLPPERIAQTGAEPRDTSRLMLVGQTVTHHIFRDLPGLLRPGDLLVFNESRVIPARVMARKPVDAAGHGGGQVEVLLLREEDLPDLSAHHGPHLWSAYLKPARRAGNELWLGDGEHRQRARVVGQLEDGARILAFDHDIKPHLDDIGRLPLPPYIDPGSSDDTWRERYQTVYARAPGSVAAPTAGLHFTPDLLAALDAAGVERTTVTLHVGAGTFKPVTGPVAEHTMHAERYSVTPEAAQAINHARAAGRRVIAVGTTTVRTLESAWDGTQVRAGEGDTRIFITPGTPVNVPDLLITNLHLPGSTLLLLVTAFAGEDRIQAAYDAALHGDYRFYSLGDAMLLTNARAASPAD

SEQ ID NO: 65776 - protein, 352 aa, unidentified
  source 1..352: note = Deinococcus irradiatisoli
  REGION 1..352: note = tr|A0A2Z3JN48|A0A2Z3JN48_9DEIO S-adenosylmethionine:tRNA ribosyltransferase-isomerase; OS = Deinococcus irradiatisoli OX=2202254 GN=queA PE=3 SV=1
MTPHDADAVLARLNFELPADRIAQVGAEPRDSSQLMVVGEPVEHRIFSELPELLRSGDLLVFNESRVIPARVMARKPLVDGRGGGTIEVLLLREEETNLWSAYLKPARRAGKELWLGTQRAEVVGQLDDGARLLRFDSDLKPHLEEIGRLPLPPYIEAGDDDRVWRERYQTVYARENGSVAAPTAGLHFTPELLGRLEESGVERCAVTLHVGAGTFKPIQGSVAEHTMHAERYRVSPETAGAINRARREGRRVVAVGTTTVRTLESAWNGSEVRAGEGETRIFITPGTPVQVPDLLITNLHLPGSTLMLLVAAFAGEARIRAAYDAALAGNYRFYSLGDAMLLKNRRASRPA

SEQ ID NO: 65777 - protein, 365 aa, unidentified
  source 1..365: note = Deinococcus koreensis
  REGION 1..365: note = tr|A0A2K3V070|A0A2K3V070_9DEIO S-adenosylmethionine:tRNA ribosyltransferase-isomerase; OS = Deinococcus koreensis OX=2054903 GN=queA PE=3 SV=1
MSPPPELDAVNVPGTDPDAVLARLNFELPAGRIAQTGAEPRDASRLMVVGESVDHRIFRDLPELLRRGDLLVFNESRVIPARVLARKPRTPDGHGGGQVEVMLLREEEPNLWSAYLKPAKRAGKELLLGGPGEHEHRAEVVGVQADGARLLRFDHDIGPHLDDIGRLPLPPYIDAGDSDETWRERYQTVYARTPGSVAAPTAGLHFTPGLLARLDELAVERAHVTLHVGAGTFKPISGPVSEHVMHAERYSVSPQTAAAINRARAEGRRVVAVGTTTVRTLESAWDGAEVQPGEGDTSIFITPGKPVNVPDVLITNLHLPGSTLMLLVAAFAGVERIRAAYDAALSEGYRFYSLGDAMWLENASR

SEQ ID NO: 65778 - protein, 354 aa, Deinococcus maricopensis
  REGION 1..354: note = tr|E8U9H5|E8U9H5_DEIML S-adenosylmethionine:tRNA ribosyltransferase-isomerase OS=Deinococcus maricopensis (strain DSM 21211 / LMG 22137 / NRRL B-23946 / LB-34); OX = 70 9986 GN=queA PE=3 SV=1
MSDTPHPITEHANPGADEALARLNFDLPPERIAQTGAEPRDTSRLMVVGESGIDHRIFRDLPDLLRTGDLLVFNESRVIPARIIARKPTGGAVETLLLREEEANVWSAYLKGAKRAGRDLLFGSVHAEVIGTLEDGARLLRFSEDIKPHLDALGRLPLPPYIDAGEDDAVWQDRYQTVYARTAGSVAAPTAGLHFTPELLARLQAMGVGTAFVTLHVGAGTFKPISGSVAEHTMHAERYTVTSDTADAINAARREGRRVIAVGTTTVRALESAADVNGTVHPGDGDTRIFITPGHAWRVPDLLITNLHLPNSTLLLLVAAFAGEDRIRAAYQAALDHPYRFYSLGDAMLLQRAP

SEQ ID NO: 65779 - protein, 359 aa, Deinococcus marmoris
  REGION 1..359: note = tr|A0A1U7NVR8|A0A1U7NVR8_9DEIO S-adenosylmethionine:tRNA ribosyltransferase-isomerase; OS = Deinococcus marmoris OX=249408 GN=queA PE=3 SV=1
MPDSNLYDADAVLARLNFDLPPERIAQTGAEPRDSSRLMVVGQGEISHRVFSDLPTLLRPSDLLVSNQSRVIPARVMARKPVTPEGHGGGVVEVMLLREEENNVWSAYLKPAKRAGKELWLGQADGEQHRAEVVGILEDGARLLRFEHDLKPHLDEIGRLPLPPYIDAGDDDEVWRERYQTVYARDPGSVAAPTAGLHFTPELLARLDSRGVERCAVTLHVGAGTFRPIQGSVADHTMHAERYSVSEATAQAINRARAEGRRVVAVGTTTVRTLESAWDGQMVQAGEGDTRIFITPGTPVHVPDLLITNLHLPGSTLLLLVSAFAGEERIQAAYDAALAGDYRFYSLGDAMLLENRREG

SEQ ID NO: 65780 - protein, 347 aa, unidentified
  source 1..347: note = Deinococcus metallilatus
  REGION 1..347: note = tr|A0A4Q0W742|A0A4Q0W742_9DEIO S-adenosylmethionine:tRNA ribosyltransferase-isomerase; OS = Deinococcus metallilatus OX=1211322 GN=queA PE=3 SV=1
MNPDAVLARLAFDLPPERIAQTGAEPRDSSRLMVVGEAGLAHRVFRDLPELLRAGDVLVFNESRVIPARVMARKPVTPGGFGGGQVEVLLLREEEQHVWSAYLKPAKRAGKELWLGQHRAEVVGVLPDGARLLRFERDIKPHLDEIGRLPLPPYIDAGDSDETWRERYQTVYARTPGSVAAPTAGLHFTPELLARLDALGVERHALTLHVGAGTFRPITGSVADHVMHAERYAISEGAARAINRAKAEGRRVVAVGTTTVRALESSANEDGTVNPGEGDTSIFITPGTPVRVPDLLVTNLHLPGSTLLLLVAAFAGEARIKAAYDAALAEGYRFYSLGDAMLLERGL

SEQ ID NO: 65781 - protein, 358 aa, unidentified
  source 1..358: note = Deinococcus metallilatus
  REGION 1..358: note = tr|A0A4Q0W0F0|A0A4Q0W0F0_9DEIO S-adenosylmethionine:tRNA ribosyltransferase-isomerase; OS = Deinococcus metallilatus OX=1211322 GN=ERJ73_19355 PE=3; SV = 1
MTAAMNGPLEFTLPAHLEAHEPPEARGLPRDGVRLLVSRVADDVVQHATFRDLPAFLREGDALVINTSGTLPAALPARRADGTALELHLSTHLPADLWTVELRRPAGTATLPERHAHAGETLRLPDGGQVTLLTPYSTDRNREEQREGVRLWVAALHLPQPVLVYLAAHGKPIRYGYVPRDWPLQTYQTVFATEPGSAEMPSAGRPFTPELLTRLMAQGVRVAPLVLHTGVASLEDHEPPYEEAYRVPAATAHAVNEARAAGGRVIAVGTTVVRALETVTDERGITHPGSGWTREVITPERGTRAVHGLITGWHEPRASHLLMLEAIAGRRHLEVAYAAALAAGYLWHEFGDLHLILP

SEQ ID NO: 65782 - protein, 338 aa, Deinococcus peraridilitoris
  REGION 1..338: note = tr|L0A4F1|L0A4F1_DEIPD S-adenosylmethionine:tRNA ribosyltransferase-isomerase OS=Deinococcus peraridilitoris (strain DSM 19664 / LMG 22246 / CIP 109416 / KR-200) OX= 937777 GN=queA PE=3 SV=1
MSTLLDFELPGELIAQRGAEPRDASRLMIVGETLQHRIFRELPDFLREGDVLVFNESKVIPARLEARKPTGGRIEVLLLREESPLTWSAMLRGARRAGSQLLFGDLQAEVVGQLPDGARLLRFSQDVKPHLDRLGRLPLPPYIHGDVGERYQTVYARAPGSVAAPTAGLHFTPELLSRIDAMGVERVQITLHVGAGTFRPISGAIEEHVMHAESYEVPPATAEAVNRARREGRRVVAVGTTTVRALESAWCDGALQAGTAETRIFIRPGDKLNVPDLLITNFHLPNSTLLLLVAAFAGAPLIEAAYREAISQRYRFYSLGDAMLLYRMSPGSEHAPLR

SEQ ID NO: 65783 - protein, 366 aa, unidentified
  source 1..366: note = Deinococcus phoenicis
  REGION 1..366: note = tr|A0A016QQJ7|A0A016QQJ7_9DEIO S-adenosylmethionine:tRNA ribosyltransferase-isomerase; OS = Deinococcus phoenicis OX=1476583 GN=queA PE=3 SV=1
MSTEEPRIQDADAVLARLAFDLPQARIAQTGAEPRDSARLMVVTQGGLTHRVFRDLPELLRAGDVLVFNESRVIPARVLARKPVTGDGLGGGQVEVLLLREEEQNVWSAYLKPAKRAGKELWLGQTGGVQHRAEVVGVLEDGARLLRFDHDIKPHLDEIGRLPLPPYIDAGASDETWRERYQTVYARDPGSVAAPTAGLHFTPELLARLDALGVERHAVTLHVGAGTFRPITGSVADHVMHAERYAISAGAAGAINRAKAEGRRVVAVGTTTVRALESSADEDGTVKPGEGDTRIFITPGTPVRVPDLLITNLHLPGSTLLLLVAAFAGEGRIRAAYDAALAGGYRFYSLGDAMLLERQGASAARP

SEQ ID NO: 65784 - protein, 358 aa, Deinococcus proteolyticus
  REGION 1..358: note = tr|F0RN92|F0RN92_DEIPM S-adenosylmethionine:tRNA ribosyltransferase-isomerase OS=Deinococcus proteolyticus (strain ATCC 35074 / DSM 20540 / JCM 6276 / NBRC 101906 /NCIMB 13154 / VKM Ac-1939 / CCM 2703 / MRP) OX=6
MTLSPDAALAALHFELPPGRIAQTGAEPRDSSRLMRVPRAGEVQHHIFRELPELLRAGDVLVFNQSRVIPARVMARKPKVGGQGGGQIEVMLLREEENNVWSAYLKPARRAGNELWLGDPAGVQHRAEVVGVQEDGARLLRFDHDIKPHLDDIGRLPLPPYIEAGEDDTVWCERYQTVYARENGSVAAPTAGLHFTPELLERLRALGVEQHAVTLHVGAGTFKPVQGAVSEHVMHAEQYHIPPATADAINRARAEGRRVVAVGTTTVRALESSVDGGGEVRAGKGDTRIFITPGQAVQVPDLLITNLHLPDSTLMLLVAAFAGVERIQTAYAEALRHDYRFYSLGDAMLLDNTSRDRP

SEQ ID NO: 65785 - protein, 360 aa, unidentified
  source 1..360: note = Deinococcus puniceus
  REGION 1..360: note = tr|A0A172T9P0|A0A172T9P0_9DEIO S-adenosylmethionine:tRNA ribosyltransferase-isomerase; OS = Deinococcus puniceus OX=1182568 GN=queA PE=3 SV=1
MPDSHLNPDAVLAQLAFMLPPERIAQLGAEPRDSSRLMVVGNEIAHLTFRDLPSLLRPGDLLVFNESRVIPARVMARKPVQNGFGGGQVEVMLLREEYGTDLGAHLWSAYLKPAKRAGPELLLGPPDAPHRAEIVGQLDDGARLLRFEYDIKPHLDTIGRLPLPPYIDAGDNDERWRERYQTVYACEPGSVAAPTAGLHFTPELLAELEAMGVQRTAITLHVGAGTFRPISGSVADHVMHAERYSISAATAEAINTARAEGRRIVAVGTTTVRALESAVDRAGQVQAGEGDTQIFITPGTPVRVPDLLITNLHLPGSTLLLLVAAFAGVDRIQAAYAAALEGDYRFYSLGDAMILERGEL

SEQ ID NO: 65786 - protein, 362 aa, Deinococcus radiodurans
  REGION 1..362: note = sp|Q9RU19|QUEA_DEIRA S-adenosylmethionine:tRNA ribosyltransferase-isomerase OS=Deinococcus radiodurans (strain ATCC 13939 / DSM 20539 / JCM 16871 / LMG 4051 / NBRC 1 5346 / NCIMB 9279 / R1 / VKM B-1422) OX=243230 G
MPDSTADPSTADEVLARLHFDLPEDRIAQTGAEPRDTSRLMVVGEQIKHRMFRDLPDLLRPSDLLVFNESRVIPARVLARKPVVNGFGGGQVEVLLLREEFDVGANVWSAYLKPAKRAGHELWLGENEATGHRAEVVGVLDDGARLLRFDHDIKPHLDEIGRLPLPPYINAGDSDETWRERYQTVYAKTPGSVAAPTAGLHFTPELLARLDEMGVERASVTLHVGAGTFKPIQGPVADHVMHAERYEVSETNAAAITRAKAEGRRVVAVGTTTVRTLESAWDGAAVRAGAGETRIFITPGTRVEVPDLLITNLHLPGSTLLLLVAAFAGEDRIRAAYDAALSQDYRFYSLGDAMLLERLTSA

SEQ ID NO: 65787 - protein, 362 aa, Deinococcus radiodurans; identical to SEQ ID NO: 65786
  REGION 1..362: note = tr|A0A5C1MK90|A0A5C1MK90_DEIRD S-adenosylmethionine:tRNA ribosyltransferase-isomerase; OS = Deinococcus radiodurans OX=1299 GN=queA PE=3 SV=1

SEQ ID NO: 65788 - protein, 359 aa, Deinococcus radiophilus
  REGION 1..359: note = tr|A0A431W5F9|A0A431W5F9_9DEIO S-adenosylmethionine:tRNA ribosyltransferase-isomerase; OS = Deinococcus radiophilus OX=32062 GN=queA PE=3 SV=1
MIDASLNVPDPDDILAALHFELPPERIAQSGAEPRDSARLLVAGEQPEHRIFRELPDLLRRGDLLVFNQSRVIPARVMARKPKVGDMGGGQVEVLLLREEEANVWSAYLKPARRAGNELWLGGPEGEGHRAEVVGVQEDGARLLRFAYDIKPHLEDIGRLPLPPYIDAGDSDERWRERYQTVYAREDGSVAAPTAGLHFTPELLARLDDLGVERCAVTLHVGAGTFRPIQGRVADHVMHAERYHISPETAAAINQAKAEGRRVVAVGTTTVRALESSVDAAGQVVSGEGDTQIFITPGQSVYVPDLLITNLHLPGSTLLLLVAAFAGTETIRAAYAEALREDYRFYSLGDAMLLHNIRP

SEQ ID NO: 65789 - protein, 357 aa, Deinococcus radiopugnans
  REGION 1..357: note = tr|A0A5C4Y741|A0A5C4Y741_9DEIO S-adenosylmethionine:tRNA ribosyltransferase-isomerase; OS = Deinococcus radiopugnans ATCC 19172 OX=585398 GN=queA; PE = 3 SV=1
MPDPNLHDADAVLARLNFTLPPERIAQTGAEPRDSSRLMVVGPHEISPHVFSDLPTLLRPGDLLVFNQSRVIPARVMARKPVTPEGHGGGAVEVMLLREEENNVWSAYLKPARRAGKELWLGEHRAEVVGILEDGARLLRFEHDLKPHLDEIGRLPLPPYIDAGDDDEVWRERYQTVYARDPGSVAAPTAGLHFTPNLLSTLDAMGVERCAVTLHVGAGTFRPITGSVADHTMHAERYVVSEATAKAINRARAQGRRVVAVGTTTVRTLESAWDGTAVQAGEGDTRIFITPGTQVRVPDLLLTNLHLPGSTLLLLVAAFAGEDRIRAAYDAALAGDYRFYSLGDAMLLENRRGDTSG

SEQ ID NO: 65790 - protein, 351 aa, Deinococcus reticulitermitis
  REGION 1..351: note = tr|A0A1H6V8L8|A0A1H6V8L8_9DEIO S-adenosylmethionine:tRNA ribosyltransferase-isomerase; OS = Deinococcus reticulitermitis OX=856736 GN=queA PE=3 SV=1
MTTDDLLAQLHFDLPESRIAQTGAEPRDASRLMVVGEEIRHQRFHELPALLRPGDLLVFNESRVIPARVMARKPVTPGGFGGGQVEVLLLREEEPRVWSAYLKPARRAGKELWLGPPGGVQHRAEVIGVLEDGARLLRFGHDLLPHLDEIGRLPLPPYIDAGDSDERWRERYQTVYARAPGSVAAPTAGLHFTPELLARLDARGVERVSVTLHVGAGTFKPITGPVAEHVMHAERYEVSAAAAAAINRAKAEGRRVVAVGTTTVRTLESAWDGAAVRAGAGETRIFITPGTPVRVPDLLITNLHLPGSTLLLLVAAFAGVERIQAAYAAALAGDYRFYSLGDAMLLEKASS

SEQ ID NO: 65791 - protein, 373 aa, unidentified
  source 1..373: note = Deinococcus soli
  REGION 1..373: note = tr|A0A0F7JJJ8|A0A0F7JJJ8_9DEIO S-adenosylmethionine:tRNA ribosyltransferase-isomerase; OS = Deinococcus soli Cha et al. 2016 OX=1309411 GN=queA; PE = 3 SV=1
MTDATPHAGADAVLHRLNFHLPEDRVAQTGAEPRDASRLMIVGEAIEHRVFRDLPAFLRAGDLLVFNQSKVIPARVMARKPVDAHGHGGGSVEVMLLRAEERPELGRHVWSAYLKPARRAGNELWLGGLAHEGGHRAQVVGELEDGARLLRFDHDILPHLDDIGRLPLPPYIDAGDSDETWRERYQTVYAREPGSVAAPTAGLHFTPELLVRLAELGVQTAHVTLHVGAGTFRPISGSVADHVMHAERWHVTPDTAQAINAARAEGRRVIAVGTTTVRTLESAWDGTQVQPGEDDTQIFITPGRPVNVPDLLITNLHLPGSTLLLLVAAFAGEDRIRAAYDAALNGEYRFYSLGDAMLLTNVRGEPEAGSSPE

SEQ ID NO: 65792 - protein, 372 aa, Deinococcus sp.
  REGION 1..372: note = tr|A0A418QDS6|A0A418QDS6_9DEIO S-adenosylmethionine:tRNA ribosyltransferase-isomerase; OS = Deinococcus sp. RM OX=2316359 GN=queA PE=3 SV=1
MTDATPHAGADAVLHRLNFHLPEDRIAQTGAEPRDASRLMIVGEAIQHRVFRDLPEFLRAGDLLVFNQSRVIPARVMARKPVDAHGHGGGSVEVMLLRAEERPELGRHVWSAYLKPARRAGNELWLGGLEHEGGHRAQMVGELEDGARLLRFDHDILPHLDDIGRLPLPPYIDAGDSDETWRDRYQTVYAREPGSVAAPTAGLHFTPDLLARLAEMGVQTAHVTLHVGAGTFRPISGSVADHVMHAERWHVTPETAQAINAARAEGRRIIAVGTTTVRTLESAWDGTQVQPGEGDTQIFITPGRPVNVPDLLITNLHLPGSTLLLLVAAFAGEDRIRAAYDAALDGDYRFYSLGDAMLLTNVRGARSEVSEE

SEQ ID NO: 65793 - protein, 349 aa, Deinococcus sp.
  REGION 1..349: note = tr|A0A553UWQ6|A0A553UWQ6_9DEIO S-adenosylmethionine:tRNA ribosyltransferase-isomerase; OS = Deinococcus sp. H1 OX=2592048 GN=queA PE=3 SV=1
MVSTLRDADAVLARLNFDLPPERIAQTGAEPRDSSKLMVVGAEIQHCIFSELPDLLRSGDVLVFNQSRVIPARVMARKPVVNGQGGGQIEVLLLREEETNLWSAYLKPARRAGNELYLGEHRAEVVGVLDDGARLLRFESDLKPHLDEIGRLPLPPYIHAGEDDSVWRERYQTVYARVNGSVAAPTAGLHFTPELLARLDERGIERAYVTLHVGAGTFKPIQGSVADHTMHAERYSVSTETAQIINRAKAGGQRVVAVGTTTVRTLESAWDGQQVQPGEGDTRIFITPGTPVNVPDLLITNLHLPGSTLLLLVSAFAGEQRIKAAYDAALAGDYRFYSLGDAMLLENQR

SEQ ID NO: 65794 - protein, 357 aa, unidentified
  source 1..357: note = Deinococcus swuensis
  REGION 1..357: note = tr|A0A0A7KEQ9|A0A0A7KEQ9_9DEIO S-adenosylmethionine:tRNA ribosyltransferase-isomerase; OS = Deinococcus swuensis OX=1182571 GN=queA PE=3 SV=1
MPDPNLHDADAVLARLNFTLPPERIAQTGAEPRDSSRLMVVGPHEISPHVFSDLPTLLRPGDLLVFNQSRVIPARVMARKPVTPEGHGGGTVEVMLLREEENNVWSAYLKPARRAGKELWLGEHRAEVVGILEDGARLLRFEHDLKPHLDEIGRLPLPPYIDAGDDDEVWRERYQTVYARDPGSVAAPTAGLHFTPDLLSTLDAMGVERCAVTLHVGAGTFRPITGSVADHTMHAERYVVSEATAQAINHARAQGRRVVAVGTTTVRTLESAWDGTAVQAGEGDTRIFITPGTQVRVPDLLLTNLHLPGSTLLLLVAAFAGEDRIRAAYDAALAGDYRFYSLGDAMLLENRRGDTSG

SEQ ID NO: 65795 - protein, 350 aa, Deinococcus wulumuqiensis
  REGION 1..350: note = tr|A0A345IF52|A0A345IF52_9DEIO S-adenosylmethionine:tRNA ribosyltransferase-isomerase; OS = Deinococcus wulumuqiensis OX=980427 GN=queA PE=3 SV=1
MAAPATADEVLARLHFELPGSRIAQTGAEPRDTSRLMVVGEKVQHRVFRELPDLLRPGDLLVFNESRVIPARVLARKPVVNGFGGGTVEVLLLREEFDQGANVWSAYLRPARRAGNELFLGDHRAEVVGVLDDGARLLRFDHDIKPHLDEIGRLPLPPYIDAGESDETWRERYQTVYARTPGSVAAPTAGLHFTPELLARLSEMGVERATVTLHVGAGTFKPIQGSVADHVMHAERYEVSAETAAAITRARAEGRRVVAVGTTTVRTLESAWDGEQVRAGAGETRIFITPGTPVQVPDLLITNLHLPGSTLLLLVAAFAGEHRIRAAYDEALARGYRFYSLGDAMLLEKE

SEQ ID NO: 65796 - protein, 363 aa, Deinococcus yavapaiensis
  REGION 1..363: note = tr|A0A318RZK3|A0A318RZK3_9DEIO S-adenosylmethionine:tRNA ribosyltransferase-isomerase; OS = Deinococcus yavapaiensis KR-236 OX=694435; GN = DES52_12414 PE=3 SV=1
MTHILPTATLDFTLPPDLEAHEPPEARGLARDDVRLLVSRVRDDTVTHAHFRDLPNFLTSDDLLVLNTSGTLPAALRADRADGTPLVVHLSTHLPADLWTVEVRLPTDIATAPFRHAHAGETLTLPGGGGVTLLAPYSLDRAAPPSRDGTRLWIAALHLPCAPHTYLATYLAAHGRPIRYGYVPRDWPLEAYQTVYATESGSAEMPSAGRAFTPDLLTRLVAKGVRVAPLVLHTGVASLEDHEPPYEEFYRVPDSTARAVNETRANGGRVLAVGTTVVRALETVTDARGTAHPGEGWTREVITPQRGVRAVNGLLTGWHEPRASHLLMLAALAGERHLRAAYEAALQGRYLWHEFGDLHLIVP

SEQ ID NO: 65797 - protein, 350 aa, Deinococcus yavapaiensis
  REGION 1..350: note = tr|A0A318S8M4|A0A318S8M4_9DEIO S-adenosylmethionine:tRNA ribosyltransferase-isomerase; OS = Deinococcus yavapaiensis KR-236 OX=694435 GN=queA PE=3; SV = 1
MTAFESARLASGDDVLAYLDFHLPEDRIAQTGAEPRDASRLMIVGEEIRHRIFRDLLEYLEAGDVLVFNESKVIPARLEARKPTGGKIEVLLLREERPNTWSAMLKPAKRAGDVLHFDDLRAEIVGQTLDGARLLKFDTDVKPHLDRLGSLPLPPYIHENVGDRYQTVYARVPGSVAAPTAGLHFTPELLAALEAKGVRRAHLNLHVGAGTFKPVAGSVEQHVMHEETFEVPRATADLVNEAKRSGRRVVAVGTTVVRALESVWDGREVRASAGETGIFIKPGHTFGAPDMLVTNFHLPKSTLLLLVAAFAGVERIKAAYEAGLRDGYRFYSLGDAMLLERQNVKRSAGG

SEQ ID NO: 65798 - protein, 336 aa, unidentified
  source 1..336: note = Unknown
  REGION 1..336: note = tr|A0A3M2F0V6|A0A3M2F0V6_9DEIN S-adenosylmethionine:tRNA ribosyltransferase-isomerase; OS = Deinococcus-Thermus bacterium OX=1913990 GN=queA PE=3; SV = 1
MNLEDFDYPLPPELIAQKGAEPRDASRLMVVHRQSGRLEHRVFRDLPHYLRPGDVLVLNESKVIPARIFGKNPHGTSIEVLLVREKPDRPGCWEALLKPARRVKVGQTLSFPDGLSATLEGLEPDGSRVLRFHGNVREHLERIGQPPLPPYIRAPVAPERYQTVYARTPGSVAAPTAGLHFTPELLEQIQKMGVEVNYVTLHVGPGTFKPVQGPLEQHTLHQEPYEVPIKTAWAINQAKAEGRRVVAVGTTVVRTLETAWREGELQPGRGETQLFIRPGFHYRVVDALITNFHLPRSTLLMLVSAFMGHELMKRAYQVAVEERYRFYSLGDAMLIL

SEQ ID NO: 65799 - protein, 366 aa, Delftia acidovorans
  REGION 1..366: note = tr|A0A2W5IN67|A0A2W5IN67_DELAC S-adenosylmethionine:tRNA ribosyltransferase-isomerase; OS = Delftia acidovorans OX=80866 GN=queA PE=3 SV=1
MSSLSRVFSLSDFDFELPEKLIAQHPAAQRSASRLLDGRDDANPPADRIFHELPDLLQPGDLLVFNDTRVIKARIFGEKASGGRLELLVERVLEGNDVVAHMRVSKKPLPGSRIHLCGGKNGGGFDAVLRGRWPDENGPLFHLSFEGPRGETPHELMERFGHLPLPPYIERHQETGNDPDAAEDSERYQTVFAARPGAVAAPTAALHFDDAVLARLAERGIERASVTLHVGAGTFQPVKTENLADHQMHSEWYEIPLATLAALERCRQRGGRIIAVGTTTVRTLESWAQTGNFSGDTRIFITPGFEYQVVDLLITNFHLPKSTLMMLVSAFAGYEQVMALYRHAIAQEYRFFSYGDSMLLKKKSTP

SEQ ID NO: 65800 - protein, 366 aa, Delftia acidovorans
  REGION 1..366: note = tr|A0A2M9PJA6|A0A2M9PJA6_DELAC S-adenosylmethionine:tRNA ribosyltransferase-isomerase; OS = Delftia acidovorans OX=80866 GN=queA PE=3 SV=1
MSSLSRVFSLSDFDFELPENLIAQHPAAQRSASRLLDGRDNATPPTDRIFHELPDLLQPGDLLVFNDTRVLKARIFGEKASGGRLELLVERVLEGNDVVAHMRVSKKPLPGSRIHLCGGKNRGGFDAVLRGRWPDENGPLFHLSFEGPRGETPHELMERFGHLPLPPYIERHQDTGNDPDAAEDSERYQTVFAARPGAVAAPTAALHFDDAVLARLAERGIERASVTLHVGAGTFQPVKTENLADHQMHSEWYEIPLATLAALERCRQRGGRVVAVGTTTVRTLESWAQTGQFSGDTRIFITPGFEYQVVDLLITNFHLPKSTLMMLVSAFAGYEQVMALYRHAIAQEYRFFSYGDSMLLKKKSTP

SEQ ID NO: 65801 - protein, 366 aa, Delftia lacustris
  REGION 1..366: note = tr|A0A1H3EY16|A0A1H3EY16_9BURK S-adenosylmethionine:tRNA ribosyltransferase-isomerase; OS = Delftia lacustris OX=558537 GN=queA PE=3 SV=1
MSSLSRVFSLSDFDFELPEKLIAQHPAAQRSASRLLDGRDDANPPADRIFHELPDLLQPGDLLVFNDTRVIKARIFGEKASGGRLELLVERVLEGNDVVAHMRVSKKPLPGSRIHLCGGKNGGGFDAVLRGRWPDENGSLFHLSFEGPRGETPHELMERFGHLPLPPYIERHQETGNDPDAAEDSERYQTVFAARPGAVAAPTAALHFDDAVLARLAERGIERASVTLHVGAGTFQPVKTENLADHQMHSEWYEIPLATLAALERCRQRGGRIIAVGTTTVRTLESWAQTGNFSGDTRIFITPGFEYQVVDLLITNFHLPKSTLMMLVSAFAGYEQVMALYRHAIAQEYRFFSYGDSMLLKKKSTP

SEQ ID NO: 65802 - protein, 366 aa, Delftia sp.
  REGION 1..366: note = tr|A0A543BGS0|A0A543BGS0_9BURK S-adenosylmethionine:tRNA ribosyltransferase-isomerase; OS = Delftia sp. HK171 OX=1920191 GN=queA PE=3 SV=1
MSSLSRVFSLSDFDFELPENLIAQHPAAQRSASRLLDGRDDATPPTDRIFHELPDLLQPGDLLVFNDTRVLKARIFGEKASGGRLELLVERVLEGNDVVAHMRVSKKPLPGSRIHLCGGKNRGGFDAVLRGRWPDENGPLFHLSFEGPRGETPHELMERFGHLPLPPYIERHQDTGNDPDAAEDSERYQTVFAARPGAVAAPTAALHFDDAVLARLAERGIERASVTLHVGAGTFQPVKTENLADHQMHSEWYEIPLATLAALERCRQRGGRVVAVGTTTVRTLESWAQTGQFSGDTRIFITPGFEYQVVDLLITNFHLPKSTLMMLVSAFAGYEQVMALYRHAIAQEYRFFSYGDSMLLKKKSTP

SEQ ID NO: 65803 - protein, 366 aa, Delftia sp.; identical to SEQ ID NO: 65802
  REGION 1..366: note = tr|A0A1C7LEU2|A0A1C7LEU2_9BURK S-adenosylmethionine:tRNA ribosyltransferase-isomerase; OS = Delftia sp. JD2 OX=469553 GN=queA PE=3 SV=1

SEQ ID NO: 65804 - protein, 366 aa, Delftia tsuruhatensis; identical to SEQ ID NO: 65799
  REGION 1..366: note = tr|A0A1D8J3U9|A0A1D8J3U9_9BURK S-adenosylmethionine:tRNA ribosyltransferase-isomerase; OS = Delftia tsuruhatensis OX=180282 GN=queA PE=3 SV=1

SEQ ID NO: 65805 - protein, 366 aa, Delftia tsuruhatensis
  REGION 1..366: note = tr|A0A4R5GMZ9|A0A4R5GMZ9_9BURK S-adenosylmethionine:tRNA ribosyltransferase-isomerase; OS = Delftia tsuruhatensis OX=180282 GN=queA PE=3 SV=1
MSSLSRVFSLSDFDFELPEKLIAQHPAAQRSASRLLDGRDDANPPTDRIFHELPDLLQPGDLLVFNDTRVIKARIFGEKASGGRLELLVERVLEGNDVVAHMRVSKKPLPGSRIHLCGGKNGGGFDAVLRGRWPDENGPLFHLSFEGPRGETPHELMERFGHLPLPPYIERHQETGNDPDAAEDSERYQTVFAARPGAVAAPTAALHFDDAVLARLAERGIERASVTLHVGAGTFQPVKTENLADHQMHSEWYEIPLATLAALERCRQRGGRIIAVGTTTVRTLESWAQTGNFSGDTRIFITPGFEYQVVDLLITNFHLPKSTLMMLVSAFAGYEQVMALYRHAIAQEYRFFSYGDSMLLKKKSTP

SEQ ID NO: 65806 - protein, 342 aa, unidentified
  source 1..342: note = Unknown
  REGION 1..342: note = tr|A0A1V4MNW2|A0A1V4MNW2_9DELT S-adenosylmethionine:tRNA ribosyltransferase-isomerase; OS = delta proteobacterium MLS_D OX=1775673 GN=queA PE=3 SV=1
MKTRDFTYDLPEDRIAQEPAASRDQSRMMVVDRRSGSMESLRFSELPGFIRDGDVMVVNDSRVIPARLKGEKATGGRIDILLLERLEQSNRWLVMLRPAKRVKQGTRIFFGVDGFADVMERYDEKKWLLEFTLNDSFESFLAARGTAPLPPYIKRRPGDDRTDRDMERYQTVYAAVPGSIAAPTAGLHFSENILKKLRERGVPVVPVTLHVGLGTFVPIETENVEEHPMEKERYIISSEAARMINGAGRVVAVGTTSVRTMESAARNNGSVQSGAGETNLFIYPGFEFKVTGSLLTNFHLPASSLFLLVCAFAGTDLMKKAYRKAIDEGFRFYSYGDCMLIL

SEQ ID NO: 65807 - protein, 370 aa, unidentified
  source 1..370: note = Unknown
  REGION 1..370: note = tr|Q1NLG1|Q1NLG1_9DELT S-adenosylmethionine:tRNA ribosyltransferase-isomerase OS=delta proteobacterium MLMS-1 OX=262489 GN=queA PE=3 SV=1
MVVSGDFPYSLSDYDYHLPPELIAQQPAARRDASRLLVCDCRDGGLADRHFPELLDLLSPGDLLVFNDTRVFPARLLGHKSSGGRGELLLLEYPVAQAAADVGSAEGGESSFHAWALCKTSKGVKEGLKLLFGDDLQAEVVELGEGGRARVRLQVAAGQTLDGCLARHGRMPLPPYIRRSETETPEDRQRYQTVYAAVTGAVAAPTAGLHFTPELLAAIAAKGVRQARVTLHVGYGTFSPVRVRDIREHAIHGEYYAITPENAALVEQTRAAGGRIWAVGTTAVRALETAADAAGRLTPGSGICELYIYPGYRFKVVDNLLTNFHLPRSSLLFLVSALAGRRRILAAYNHAVARGYRFFSYGDAMAIINK

SEQ ID NO: 65808 - protein, 341 aa, unidentified
  source 1..341: note = Deltaproteobacteria bacterium
  REGION 1..341: note = tr|A0A3M1X3D9|A0A3M1X3D9_9DELT S-adenosylmethionine:tRNA ribosyltransferase-isomerase; OS = Deltaproteobacteria bacterium OX=2026735 GN=queA PE=3; SV = 1
MDTKILDYHLPEELIAQYPSPRRDESRLLVFERKTGEIRHRLFRDIVDELTENDLLVLNDTRVIRARVLFRKPTGGRVEVFFLHQVEGTLWECLVRPAGRMREGAEYKVSDKLRVRFVRRTGPGSWLVDAETAGDIFDVLDEIGLVPLPPYIRREAEEVDGERYQTVFAEKRGSVAAPTAGLHFTEELLGALNRKGVEIVRVTLNVGYGTFAPIKTERVEDHDIHPEKYAVSEESAASLIEAKEKGKRIVAVGTTVVRVLETVFRGTEVVNSLEGETRLFIYPGYRFGFVDALITNFHLPRSSLLALVMAFAGVDETMRCYETAIRERYRFFSYGDAMFIR

SEQ ID NO: 65809 - protein, 77 aa, unidentified
  source 1..77: note = Deltaproteobacteria bacterium
  REGION 1..77: note = tr|A0A2N2HG25|A0A2N2HG25_9DELT S-adenosylmethionine:tRNA ribosyltransferase-isomerase (Fragment) OS=Deltaproteobacteria bacterium HGW-Deltaproteobacteria-20 OX=20137 48 GN=CVU63_22895 PE=3; SV = 1
MRIDAFDFDLPPERIAQHPVEPRDASKLLVLDPPTDSLFDRHAYDLPDLLPSGAVVIVNDTRVIRARLIGRKAETGG

SEQ ID NO: 65810 - protein, 339 aa, Dendrosporobacter quercicolus
  REGION 1..339: note = tr|A0A1G9KPG3|A0A1G9KPG3_9FIRM S-adenosylmethionine:tRNA ribosyltransferase-isomerase; OS = Dendrosporobacter quercicolus OX=146817 GN=queA PE=3; SV = 1
MLLADFDYELPEELIAQRPHEPRDGSRLIVLNKETGKLAHRHFYDVPGFLESGDTLIFNDTKVLPARLIGIKRETGAKIEVFLLNRKNGDDWEVLVKPGKRVRPGAVIRFSDELSCEIIAATDFGGRIARFSYQGIFEELLDRLGDTPLPPYIKEKLADKDRYQTVYARFSGSAAAPTAGLHFTPELMQEIADKGVHLGYVTLHVGLGTFRPVNVEQITEHVMHSEYYSVPEATAQLINRTRERGKRVIAVGTTAIRTLETAGAGGKVAAGSGWTNIFIYPGYQFNMIDGLITNFHLPKSTLLMLVSAFAGRDAVMDAYREAIERRYRFFSFGDAMLII

SEQ ID NO: 65811 - protein, 356 aa, Denitratisoma sp.
  REGION 1..356: note = tr|A0A518UD87|A0A518UD87_9PROT S-adenosylmethionine:tRNA ribosyltransferase-isomerase; OS = Denitratisoma sp. DHT3 OX=1981880 GN=queA PE=3 SV=1
MPTLDDFDYPLPPERIAQAPLAERAASRLLVMEGRRLRDRAIRDLPDLLLPGDLLVMNDTRVIHARLLGRKIGAVPEGNPAEVNLGGAVEVLLERPLADATEVLAQVRASKSPKPGSRLLLEDALTVEVLGREGEFYRLRFPGDALALAERHGRLPLPPYIERAAGDADESRYQTVFARERGSVAAPTAGLHFDQTLLESLRARGVETAHVTLHVGAGTFQPVRVQQLSEHRMHRERWQLPQATVDAIAACRARGGRVVAVGTTSLRTLESAALAGELKAGGGETDLFVTPGFRFRVVDLLLTNFHLPRSTLLMLVSAFGGMDHIRAAYRHAIEHEYRFFSYGDAMLIHRNPDDAI

SEQ ID NO: 65812 - protein, 358 aa, Denitrobacterium detoxificans
  REGION 1..358: note = tr|A0A172RW83|A0A172RW83_9ACTN S-adenosylmethionine:tRNA ribosyltransferase-isomerase; OS = Denitrobacterium detoxificans OX=79604 GN=queA PE=3 SV=1
MKTSDFDYELPEECIAQAPWPVRDECRMLVMDRKTGELQDRIFRDIYEYAQPGDVFVANETRVMPARLLGAKRGTGGAAEVFLLRPHAGKIATNVSSAWEALVRPGKRLKPGAIVDFTDAEGKVILSAEVIDFKEDGKGERIVNLTTEAFPTLDEAVHAVGHTPLPPYIKGYEGDEEMYQTVYSRRESSAAAPTAGLHFTPELIERLKQKGVRWETVELQVGIDTFRIVEEEDPTTHAMHTETYTVPQHVVDACNEAHANGHRVIAVGTTSVRSLESAWDAEAGELKARDAAHTSLFLLPGSTFHVVDAMVTNFHVPRSTLMMLVSAFSSRDYIMNAYKHAIDSEYRMLSFGDAMFIQ

SEQ ID NO: 65813 - protein, 343 aa, unidentified
  source 1..343: note = Denitromonas halophilus
  REGION 1..343: note = tr|A0A557QX25|A0A557QX25_9RHOO S-adenosylmethionine:tRNA ribosyltransferase-isomerase; OS = Denitromonas halophilus OX=1629404 GN=queA PE=3 SV=1
MTLTLDDFDYALPDALIAQAPLAERSASRLLVVGDDALSDRGITDLPELLGADDLLVFNDTRVIHARLFGQKATGGQVEVLIERPVGEHEAIAQVRASKSPKAGSTLRLADAFDVEVLGRVGDFFHLRFPADATVIDYTERYGALPLPPYITRAAGEADEARYQTVFARHPGSVAAPTAGLHFDDALLARIRDKGVRTAAVTLHVGAGTYQPVRVQNLAEHQMHREQYIVPAETVAAIEATRARGGRVVAVGTTSLRALESAAQSGLLVAGSGETELFIMPGYRFHVVDALVTNFHLPKSTLLMLVSALAGMGRIRAAYAHAVAQRYRFFSYGDAMFLSRRAS

SEQ ID NO: 65814 - protein, 343 aa, unidentified
  source 1..343: note = Denitromonas halophilus
  REGION 1..343: note = tr|A0A558CG44|A0A558CG44_9RHOO S-adenosylmethionine:tRNA ribosyltransferase-isomerase; OS = Denitromonas halophilus OX=1629404 GN=queA PE=3 SV=1
MTLTLDDFDYALPDALIAQAPLAERSASRLLVVGSDALSDHGITDLPELLGADDLLVFNDTRVIHARLFGQKATGGQVEVLIERPVGEHEAIAQVRASKSPKAGSTLRLADAFDVEVLGRVGDFFHLRFPADATVIDYTERYGALPLPPYITRAAGEADEARYQTVFARHPGSVAAPTAGLHFDEALLARIRERGVRTAAVTLHVGAGTYQPVRVQNLAEHQMHREQYIVPAETVAAIEATRARGGRVVAVGTTSLRALESAAQSGLLVAGSGETELFIMPGYRFHVVDALVTNFHLPKSTLLMLVSALAGMDSIRAAYAHAVAQQYRFFSYGDAMFLSRRAS

SEQ ID NO: 65815 - protein, 341 aa, Denitrovibrio acetiphilus
  REGION 1..341: note = tr|D4H486|D4H486_DENA2 S-adenosylmethionine:tRNA ribosyltransferase-isomerase OS=Denitrovibrio acetiphilus (strain DSM 12809 / N2460) OX=522772 GN=queA PE=3 SV=1
MSEKRTPISDYDFDLPEELIAQYPAEKRGTSKLLVVNGEALYDKIFTDIVDLIDENSFLVINTTKVMKARLYGTKPTGGQVEILVLEKTSERICTAITKGKVKEGTVVNIPPFRAVITEILDDGSRVIEFDTDVSDVMDKCGHMPLPPYITREDTKKDTDRYQTIYSKDEGSVAAPTAGLHFTPEIMNALKAKGIEVLEVTLNIGIGTFRPVKADYLEDHDMHTEKYYISEETSDRINSLLKEGKKLVAVGTTAVRALESAAENGEVQAGYGETKLFIKPGYDFKVISSLITNFHLPKSTLFVLVSQLAGRRNMLNAYEHAKANGYKFFSYGDAMFISTKL

SEQ ID NO: 65816 - protein, 346 aa, Denitrovibrio sp.
  REGION 1..346: note = tr|A0A2N6D784|A0A2N6D784_9BACT S-adenosylmethionine:tRNA ribosyltransferase-isomerase; OS = Denitrovibrio sp. OX=2053308 GN=queA PE=3 SV=1
MSDIKTSIHDYDFELADEHIAQYPAEKRGASRLLVIDSCHPEQSERPVFDDKSFDDIVDMIDSDSFLVVNSTKVMKARMYGKKPSGGKVEILVLEKIDDNTCMAITKGKVKQGTKVEVGGHRALVTEILDDGSRIIVFDDNLNEVMDECGHMPLPPYIDREDTETDAERYQTIYSKEEGSVAAPTAGLHFTPEMFEALKTKGVEILEVTLSIGIGTFRPVKADYLEDHDMHTEKYFISKETSDEINRLKSIGKKLIAVGTTAVRTLESATVDGLVQAGYGETNLFIKPGYSFRVIDSLITNFHLPKSTLFVLVSQLAGRQKMLDAYEHAKENGYKFFSYGDATYIK

SEQ ID NO: 65817 - protein, 339 aa, Denitrovibrio sp.
  REGION 1..339: note = tr|A0A2N6DHX0|A0A2N6DHX0_9BACT S-adenosylmethionine:tRNA ribosyltransferase-isomerase; OS = Denitrovibrio sp. OX=2053308 GN=queA PE=3 SV=1
MSEIKTPISDYDFHMPEELIAQFPAKKRGESKLLVTRPDGTLEDKEFSDINYIVAKNSFMVINTTKVMKARILGSKDTGGQVEILVLEKLTDNTCVAITKGKVKLGTVVNVGKHHAVVKEILEDSSRVVEFDITVSEAMELYGHMPLPPYIRRGDAESDAERYQTVYSKDDGSVAAPTAGLHFTPKILDKLKKKGIPILEISLSIGIGTFRPVKVDFLEDHEMHTEKYFISEEVAAEINKFKSEGKKLVAVGTTAVRALESATEDNGVKAGYGETNLFIKPGYKFKMVDELVTNFHLPKSTLFVLVSELAGRERMIEAYNHAKKNKYRFFSYGDAMYIK

SEQ ID NO: 65818 - protein, 372 aa, unidentified
  source 1..372: note = Dermacoccaceae bacterium
  REGION 1..372: note = tr|A0A563DWA5|A0A563DWA5_9MICO S-adenosylmethionine:tRNA ribosyltransferase-isomerase; OS = Dermacoccaceae bacterium C5-26 OX=1660198; GN = FGL98_16870 PE=3 SV=1
MKTLSSTPTTHFPQPDLSIAPAPAEQRGLARDEVRLLVATPAGITHARFRDLPDQLVPGDLVVVNNSATVAGEIDARMDAGGRAGTKIVLHVAGQLDDGGWVVELRTWPDASAAILGAEPDVHLEIGDLTLTLLAPYPGEGSTPTGHGNRLWRATVDGNLRRALDEGGRPIAYGYLDRRYPLSAYQSVFATVPGSAEMPSAGRPFSQAVITRLVAAGVSIAPVTLHTGVSSQEAGEAPQTEWFEVPSWSAALLNATRAAGGRVIAVGTTVTRALESAVGADGSVHEARGWTDRVVSPQDPARVVDGLITGWHDPQASHLLLVESVAGSELTQAAYDAAVAQGYLWHEFGDSALLLRGASQSTLSGCDLGHRA

SEQ ID NO: 65819 - protein, 343 aa, Desemzia incerta
  REGION 1..343: note = tr|A0A1I5W142|A0A1I5W142_9LACT S-adenosylmethionine:tRNA ribosyltransferase-isomerase; OS = Desemzia incerta OX=82801 GN=queA PE=3 SV=1
MLTTEDFDFDLPEELIAQTPLADRSSSKLLVLDKETGKMKDTHFTSIIDELNPGDALVMNDTRVLPARLYGVKPDTGGHLEVLLLKNIEGDQWETLIKSAKKAKKGTIIHFGDGRLKAEVKEELEHGGRIVEFSYEGIFLEVLESLGEMPLPPYIKEKLEDKERYQTVYAKENGSAAAPTAGLHFTPELLEQIKAKGVELVFLTLHVGLGTFRPVSVDNIEEHKMHAEFYRLTQEAADKLNQVRANGGRIVAVGTTSIRTLETIGTKFDGEIKADSGWTDIFIAPGYQFKVVEAFSTNFHLPKSTLVMLVSAFAGRDHVLSAYEHAVNEKYRFFSFGDAMFVK

SEQ ID NO: 65820 - protein, 387 aa, unidentified
  source 1..387: note = Desertifilum sp.
  REGION 1..387: note = tr|A0A1E5QFS4|A0A1E5QFS4_9CYAN S-adenosylmethionine:tRNA ribosyltransferase-isomerase; OS = Desertifilum sp. IPPAS B-1220 OX=1781255 GN=queA PE=3; SV = 1
MCPVDFDSAPSFSTDPNSGEIDRNLNAYDYELPLERIAQNPVNPRDRSRLLVVDSPTQHQHRLFCDLPELLQPGDLLVLNNTRVLPARLYGCKSTGAPVEVLLLERQQNRTWLALVKPGRRVKIGAQLIFHPLDSDGGDPLCAKVIARDDATGGRLLEFDIPEGESLEARLDRYGRVPLPPYITESEALPEQYQTVYAQQPGSAAAPTAGLHFTPELLQRLQERQIETAYVTLHVGVGTFRPVEVEDITQHTMHSEWLEVSPEVVEKIQQTQAKGGRVIAVGTTAVRALEGTAAVAQQQGESTPLVAHEGKTNLFIYPGYQWQVVDGLITNFHLPRSSLLMLVSALIGRQRLLDLYAEAIAQEYRFYSFGDAMLILPDARQYWGKTD

SEQ ID NO: 65821 - protein, 343 aa, Desmospora activa
  REGION 1..343: note = tr|A0A2T4Z8U9|A0A2T4Z8U9_9BACL S-adenosylmethionine:tRNA ribosyltransferase-isomerase; OS = Desmospora activa DSM 45169 OX=1121389 GN=queA PE=3 SV=1
MDVSQFDYHLPEELIAQTPAEERSGSRLMVLHRKDGRIEHRRFPDWLDYVQAGDVWVVNDTRVRPARLIGVKEDTGAQIELLLLKPMGEGRWEALVKPAKRVKEGTVISFGDGLLRAEAQEKAEIAGGRVFKLLHGEEELEPLFERLGEMPLPPYIRERLDQPERYQTVYAREVGSAAAPTAGLHFTPALLEEAKKRGVHIVPITLHVGLGTFRPVTVERVEEHRMHAEYFEVSEESAHMIREAKQKGKRICAVGTTSVRTLESVVQKYGEIQAAQGWTDIFIHPGYSFQVVDGLLTNFHLPRSTLMMLISAFAGRENVLAAYREAVQERYRFFSFGDAMLIV

SEQ ID NO: 65822 - protein, 311 aa, Desmospora sp.
  REGION 1..311: note = tr|F5SAR7|F5SAR7_9BACL S-adenosylmethionine:tRNA ribosyltransferase-isomerase (Fragment) OS=Desmospora sp. 8437 OX=997346 GN=queA PE=3 SV=1
REDQTVEHRRFPDLLEYLHPGDVLVLNDTRVRPARLVGVKEGTGARIELLLLNPLGGDRWEALVKPAKRVKEGTVVRFGDGKLQAVAQEMTEAAGGRVFQLQYQEQDLEILLERLGEMPLPPYIHRRLDEPERYQTVYSRAVGSAAAPTAGLHFTEDLLNRAKEKGVKIVTITLHVGLGTFRPVTAESIEEHQMHAEFYEVSEEAAEQIRVAKAKGNRVVAVGTTSVRTLETVARDHGEIRAARGWTDIFIYPGFPFRVTDALLTNFHLPKSTLLMLVSAFSSRELMLQAYRTAVREKYRFFSFGDAMLIL

SEQ ID NO: 65823 - protein, 351 aa, Desulfacinum hydrothermale
  REGION 1..351: note = tr|A0A1W1X9C5|A0A1W1X9C5_9DELT S-adenosylmethionine:tRNA ribosyltransferase-isomerase; OS = Desulfacinum hydrothermale DSM 13146 OX=1121390 GN=queA; PE = 3 SV=1
MAYNLDDYDYALPQHLVAQHPDASRDACRLLVLHRTTGAVEHRSFSDVKDYLRPGDLLVVNDTQVVPARLLGRKETGGRVELLVLDPYQDPEAGRREGYTCLVKASKPPRKGMRLRLEETLQVTVLSDPVDGRARVLFHCDDLLDALEKWGRVPLPPYIERDNRAQLHEDRHRYQTVYAHRPGAVAAPTAGLHFTEELLRDLEGAGVRTARLTLHVGYGTFAPIRVRDIREHTMHAEYAEISSQAAEAVRSAQLEGRRVVAVGTTVVRTLEWVAARCGEVRAWSGLCRHYIYPGYRFRVVDAMITNFHLPKTSLILLVSAFAGRERILAAYRQAVERRYRFFSYGDAMLIL

SEQ ID NO: 65824 - protein, 351 aa, Desulfacinum infernum
  REGION 1..351: note = tr|A0A1M4VF11|A0A1M4VF11_9DELT S-adenosylmethionine:tRNA ribosyltransferase-isomerase; OS = Desulfacinum infernum DSM 9756 OX=1121391 GN=queA PE=3; SV = 1
MVYNLEDYDYELPQELVAQHPDPNRDACRLLVLNRRTGTVEHRLFSDLKEYLRPGDLLVVNDTRVVPARLLGRKETGGRVELLVLDPYKDPETGMREGYACLVKASKPPRKGMRLLLEDALEATIASDPVDGQAQVLFRCPDLLDALEKWGRIPLPPYIQRENHVQREEDRRDYQTVYARRPGAVAAPTAGLHFTEDLLRDLESRGVLTARLTLHVGYGTFAPIRVRDIRRHTMHAEYAEISPEAAEAVASAKSQGRRVVAVGTTVVRTLEWVAEQCGGIRAWAGLCRHYIYPGYRFRVVDALITNFHLPKTSLILLVSAFAGREKILDAYRQAVERRYRFFSYGDAMLIF

SEQ ID NO: 65825 - protein, 340 aa, unidentified
  source 1..340: note = Desulfallas geothermicus
  REGION 1..340: note = tr|A0A1I6EBJ8|A0A1I6EBJ8_9FIRM S-adenosylmethionine:tRNA ribosyltransferase-isomerase; OS = Desulfallas geothermicus DSM 3669 OX=1121426 GN=queA; PE = 3 SV=1
MQIKDFDYYLPEELIAQEPEPRRDESRLMVLPKNGGAPEHKLFKDIVEYIDARDVLVINNTRVIPARLWGEKEGTGTTIEVLLLTRRGEHTWEVLVRPGRRVPPGTGIIFGEELRGTVEAVADEGCRIIKFQYEGIFEQILDRLGVMPLPPYIKKQPADPNRYQTVYARRPGSAAAPTAGLHFTPELLKTIKDNGTQIVTVLLHVGLGTFRPVKVDDITRHRMHAEYFEITPETARVINETRGRGGRVIAVGTTTTRCLETAGREDGTVQPGSGWTDIFIYPGYTFRVIDGLITNFHLPRSTLLMMVSALAGRERMLEAYAEAVRKRYRFFSFGDAMLII

SEQ ID NO: 65826 - protein, 340 aa, unidentified
  source 1..340: note = Desulfallas gibsoniae
  REGION 1..340: note = tr|R4KDH9|R4KDH9_9FIRM S-adenosylmethionine:tRNA ribosyltransferase-isomerase OS=Desulfallas gibsoniae DSM 7213 OX=767817 GN=queA PE=3 SV=1
MRVADFDYYLPDELIAQEPAPVRDESRLMVLHKNGGEPEHRLFKDIVEYLEPRDLLVVNDTKVIPARLWGKKEGTGTTIEVLLLTRRDEHTWETLVRPGRRVPPGTNIIFGDAMTGTVMAVVDEGCRLIKFHHQGVFEELLDRLGVMPLPPYIKKQPADPGRYQTVYARDPGSAAAPTAGLHFTPELLQKIREKGISIVPVLLHVGLGTFRPVKVDEVTSHQMHAEYYSVPEETARVINETKARGGRVIAVGTTTTRCLETAARDDGNVNSGAGWTEIFIYPGYNFKAIDGLVTNFHLPRSTLLMMVSALVDRERLLDAYARAVRMRYRFFSFGDAMLII

SEQ ID NO: 65827 - protein, 390 aa, unidentified
  source 1..390: note = Desulfamplus magnetovallimortis
  REGION 1..390: note = tr|A0A1W1HA08|A0A1W1HA08_9DELT S-adenosylmethionine:tRNA ribosyltransferase-isomerase; OS = Desulfamplus magnetovallimortis OX=1246637 GN=queA PE=3; SV = 1
MYLLSNYSYSLPEELIAQYPVAQRDSSRMMHLDRKNGRTSHHSFREIELMLRDGDLVVVNNTKVIPARLKGVKQSGGKVEVLLLDYAGGVRMQEEKGIFQCECMIRASKSPKAGTFLFLYSNVENAIGSGDGCIRARVEENLGAVFMVSFFCKGDFTEELAKYGQIPLPPYIRRDGQKRELQERDRLNYQTVYASKEGAVAAPTAGLHFTDGLIGRLKKRGIRFAEITLHVGYGTFSPVRVKDIREHQIHSEFFSISEECARAINSAKKEGRRVIAVGTTSVRTLEYAALQAETLQHSLDDHCYQSDASERKSLLTDAVKSGSGTCDLFIYPGYQFRVVDAMVTNFHLPESTLLMLVSAFCDRKMILGAYQEAVEKKYRFFSYGDAMFIE

SEQ ID NO: 65828 - protein, 365 aa, Desulfarculus baarsii
  REGION 1..365: note = tr|E1QIL5|E1QIL5_DESB2 S-adenosylmethionine:tRNA ribosyltransferase-isomerase OS=Desulfarculus baarsii (strain ATCC 33931 / DSM 2075 / VKM B-1802 / 2st14); OX = 644282GN=queA PE=3 SV=1
MTPLPASPQSPQRLDPLADYDYDLPPELVAQKPAPRRVQARLMALGRDGGPARHLRVAHLCKLLRPGDILVLNDTKVVPARLLVGKESGGRAEVFLLNPALPLERLVDGRERHQALVRAHRPVRPGQRLSLAGADGPWIFVLERGQRGQAVVELPSGALGLAQRFGQAPLPPYIRRPNGPSDDDVRRYQTVYAAKAGAVAAPTAGLHLSHELLAALQRRGVNIARLTLHVGYGTFAEPAPEDLARGRLHAEWVEIDEAACQAVATARAAGGRVIAVGTTSMRALEWLAGPGGAPRPRRGWCDILIQPGHRFRAADGLLTNFHLPRTTLLMLVAALIGRERVLAAYAEAVRQRYRFYSFGDGMLIV

SEQ ID NO: 65829 - protein, 363 aa, Desulfarculus sp.
  REGION 1..363: note = tr|A0A3A6P789|A0A3A6P789_9DELT S-adenosylmethionine:tRNA ribosyltransferase-isomerase; OS = Desulfarculus sp. OX=2093367 GN=queA PE=3 SV=1
MILASPKSEQGCDPLAAYDYHLPPGLIAQGPARRRVQARLMLLGKNGGGAVHEKVARLTRLLRPGDLLVLNQTQVVPARLLAYKPSGGRVEVLLLSPAQPLERLAGGGELHQCLLRSHRPLGPGARLLLRGQPELWLEVRERRARGQAVVEFPGPALAVAQERGQTPLPPYIKRPLGPGPQDRERYQTVYAACPGAVAAPTAGLHLSRELLAALGRRGVEMAALTLHVGYGTFAEPSAADLAAGRLHAEWVETAPALSQAVARTKARGGRVIAVGTTSLRALEWRVGPGGVPQPGQGWCDLLIAPGHEFRVTDGLLTNFHLPRTTLLMLVAALAGRERVLEAYAEAVTRRYRFYSFGDAMLII

SEQ ID NO: 65830 - protein, 359 aa, Desulfatibacillum aliphaticivorans
  REGION 1..359: note = tr|B8FI52|B8FI52_DESAL S-adenosylmethionine:tRNA ribosyltransferase-isomerase OS=Desulfatibacillum aliphaticivorans OX=218208 GN=queA PE=3 SV=1
MTEPTQDFYSLASYDYELPEELIAQAPAEKRDASRLLKLDKNTGQTAHLQFAQAADLLQPGDLMVVNDTKVTPVRLFGKKETGGKVEALIIDYRPVAQAGPGEPFACECLVKASKRPKPGSRLFFDKGLKAKVLKAEDRICLLEFTCPTEPGAVLDDIAAIPLPPYIRRGGDAPPCNDRERYQTTYARHKGAVAAPTAGLHFTPELLDFIQAKGVEFVRITLHVGYGTFMPVRVDDVRKHKMHSEFYEISPEAAQAINHAKDQGRRVVAVGTTSVRTLEYSSREEGRVAAGSGMCDLFIMPGFRFNIVDALITNFHLPQSTLLMLVSALAGRENILAAYQEAVAEKYRFFSYGDAMFIE

SEQ ID NO: 65831 - protein, 359 aa, Desulfatibacillum alkenivorans
  REGION 1..359: note = tr|A0A1M6HVJ8|A0A1M6HVJ8_9DELT S-adenosylmethionine:tRNA ribosyltransferase-isomerase; OS = Desulfatibacillum alkenivorans DSM 16219 OX=1121393; GN = queA PE=3 SV=1
MTEPTQDFYSLASYDYELPEELIAQAPAEKRDASRLLRLDKNTGQTAHLQFAQAADLLQPGDLMVVNDTKVTPVRLFGKKETGGKVEALIIDYRPVAQAGPGEPFACECLVKASKRPKPGSRLFFDKGLKAKVLTAEDRICLLEFTCSTDPDAVLDEIAAIPLPPYIRRDGDAPPCNDRERYQTTYARHKGAVAAPTAGLHFTPELLDSIKAKGVEFVRITLHVGYGTFMPVRVDDVRKHKMHSEFYEISPDAALAINQAKDQGRRVVAVGTTSVRTLEYSSREEGRVVAGSGMCDLFIMPGFRFNIVDALITNFHLPQSTLLMLVSALAGRESILAAYKQAVENKYRFFSYGDAMFIE

SEQ ID NO: 65832 - protein, 337 aa, unidentified
  source 1..337: note = Desulfatitalea sp.
  REGION 1..337: note = tr|A0A0F2R3X1|A0A0F2R3X1_9DELT S-adenosylmethionine:tRNA ribosyltransferase-isomerase; OS = Desulfatitalea sp. BRH_c12 OX=1629708 GN=queA PE=3 SV=1
MPEAAIAQQPAAVRDHSRLLHLERTSGRLAHHRFGDVGGLLRAGDVLVLNNTEVIPGRLLGCKHSGGKVEALILDYAQGAAQKKFTCLVKASKRPRPGARLIFGEALEATVVAVQERTCTLAFECDQDFSQVLQRIGHVPLPPYIRRSDTLEDQHTYQTVYAAHKGAIAAPTAGLHFTRPLLAQLAEQGVQIVYLTLHVGYGTFLPVESDDIRQHRMHSEWFTVPEQTSAVVNAAKANGGRVVAVGTTSVRTLEYCTGADGRLTPQSGQCDLFMYPGYTFKLVDGMVTNFHLPKSTLLMLVSAFAGREKILEAYAEAIRKGYRFYSYGDAMIIINEV

SEQ ID NO: 65833 - protein, 340 aa, Desulfitibacter sp.
  REGION 1..340: note = tr|A0A101V9Q1|A0A101V9Q1_9FIRM S-adenosylmethionine:tRNA ribosyltransferase-isomerase; OS = Desulfitibacter sp. BRH_c19 OX=1734395 GN=queA PE=3 SV=1
MKVSEFDFHLPTHLIAQEPINQRDMSRLIVLHRAGQSIEHKSFHQLPEYIEEGDLLVLNQTKVLPARLLGTKDTGANVELLLLKRLEGDNWDCLVRPGKKLKPGIKIYFGNGDLEGEIIDYTDSGGRIVRFYYQGIFEEVLDRLGEMPLPPYIQKELKDKNRYQTVYAKEQGSAAAPTAGLHFTEDLFKRIEDKGIQTAFLTLHVGLGTFRPLKTENVEEHTMHSEYFSISQETADLINVTKNSGKKVFAVGTTSIRTLETVADSKGQVHGTSGWTDIFIYPGYRFKVVDGIITNFHLPKSSLIMLISAFAGTDFIKEAYQKAIEEQYRFYSFGDAMLII

SEQ ID NO: 65834 - protein, 341 aa, Desulfitobacterium chlororespirans
  REGION 1..341: note = tr|A0A1M7U7N9|A0A1M7U7N9_9FIRM S-adenosylmethionine:tRNA ribosyltransferase-isomerase; OS = Desulfitobacterium chlororespirans DSM 11544 OX=1121395; GN = queA PE=3 SV=1
MKLEDFDFELPEDRIAQHPVEPRDSSRLMVMNPSTGEIEHRVFRELPELLQAGDVLVVNNTRVIPARLIGEKEGTQAKIECLLLTRRDKDVWETLIKPGKRLKAGQTVVFGDGLLRGELLEILPDGNRLVRFDYQGIFEEVLDRLGNMPLPPYITEQLKDKERYQTIYAKESGSAAAPTAGLHFTPELLERLQDKGVEIVEILLHVGLGTFRPVKVDNVEEHTMHSEYYRVAPEAAERINRAKSQGRRVIAVGTTAARTLESVAEENGRIAGKEGWTDIYIYPGYTFKILDGMITNFHFPKSTLVMLVSALAGRDQILKAYQIAIAEGYRFYSFGDAMMIL

SEQ ID NO: 65835 - protein, 341 aa, Desulfitobacterium dehalogenans
  REGION 1..341: note = tr|I4ABK2|I4ABK2_DESDJ S-adenosylmethionine:tRNA ribosyltransferase-isomerase OS=Desulfitobacterium dehalogenans (strain ATCC 51507 / DSM 9161 / JW/IU-DC1); OX = 756499GN=queA PE=3 SV=1
MKLEDFDFDLPVDRIAQHPVEPRDSSRLMVMNRSTGEIEHHVFRELPELLQAGDVLVVNNTRVIPARLIGEKEDTQAKIECLLLTRREKDVWETLIKPGKRLKAGQTVVFGEGLLRGELMEILPDGNRLVRFDYEGVFESVLDQLGNMPLPPYITEQLEEKERYQTVYAKESGSAAAPTAGLHFTPELLERLKDKGVEIVEILLHVGLGTFRPVKVDNVEEHAMHSEYYRVSHEAAERINRAKGQGRRVIAVGTTASRTLESVTKENGRVEGKEGWTDIYIYPGYTFKILDGLITNFHFPKSTLVMLVSAFAGREEILRAYHIAIEGGYRFYSFGDAMMIL

SEQ ID NO: 65836 - protein, 341 aa, unidentified
  source 1..341: note = Desulfitobacterium dichloroeliminans
  REGION 1..341: note = tr|L0FBB3|L0FBB3_DESDL S-adenosylmethionine:tRNA ribosyltransferase-isomerase OS=Desulfitobacterium dichloroeliminans (strain LMG P-21439 / DCA1) OX=871963; GN = queA P E=3 SV=1
MKVDDFDFDLPEELIAQHPLEPRDASRLMRVNRSSGGIDHLVFHDLPDLLRAGDVLVVNNTKVIPARLIGEKEDTQAKIECLLLTRREKDIWETLIKPGKRLKMGQTVVFGNGLLRGKLLEILPDGNRVMQFSYEGVFEAVLDALGNMPLPPYITEQLEDKDRYQTVYAKESGSAAAPTAGLHFTPELIEQLRAKGVEIVEILLHVGLGTFRPVKADVLEEHEMHSEYYRVSGVAAEQINQAKAQGRRVIAVGTTAARTLESVAKENGLITAQEGWTDIFIYPGYTFKVLDGLITNFHFPKSTLIMLVSALAGRERILDAYHLAVQERYRFYSFGDAMLIL

SEQ ID NO: 65837 - protein, 341 aa, Desulfitobacterium hafniense
  REGION 1..341: note = sp|Q24UN9|QUEA_DESHY S-adenosylmethionine:tRNA ribosyltransferase-isomerase OS=Desulfitobacterium hafniense (strain Y51) OX=138119 GN=queA PE=3 SV=1
MKLEDFDFELPEDRIAQHPVEPRDSSRLMVMNRWTGEIEHRVFRELPELLQAGDVLVVNNTRVIPARLIGEKEGTQAKIECLLLTRRDKDVWETLIKPGKRLKAGQTVVFGDGLLRGELLEILPDGNRLVRFNYQGIFEEVLDQLGNMPLPPYITEQLQDKERYQTIYAKESGSAAAPTAGLHFTPELLERLQDKGVEIVEILLHVGLGTFRPVKVENVEEHTMHSEYYRVTPDAAERINRAKSQGRRVIAVGTTASRTLESVAGENGRIEGKEGWTDIYIYPGYTFKILDGLITNFHFPKSTLVMLVSALAGRDQILKAYQIAIAEGYRFYSFGDAMMIL

SEQ ID NO: 65838 - protein, 341 aa, Desulfitobacterium hafniense; identical to SEQ ID NO: 65837
  REGION 1..341: note = sp|B8FQV3|QUEA_DESHD S-adenosylmethionine:tRNA ribosyltransferase-isomerase OS=Desulfitobacterium hafniense (strain DCB-2 / DSM 10664) OX=272564 GN=queA; PE = 3 SV=1

SEQ ID NO: 65839 - protein, 341 aa, Desulfitobacterium metallireducens
  REGION 1..341: note = tr|W0EE44|W0EE44_9FIRM S-adenosylmethionine:tRNA ribosyltransferase-isomerase OS=Desulfitobacterium metallireducens DSM 15288 OX=871968 GN=queA PE=3 SV=1
MELSEFDFYLPQELIAQHPVEPRDSSRLMAVNRTSGEIEHHIFHELPDLLQPGDVLVVNNTRVIPARLIGEKEGTGAHIECLLLKRIERDVWEVLIKPGKRLKEGQKVSFGGGKLIGELLEILPDGNRIIRFSYEGIFEAVLDELGNMPLPPYITEKLENKERYQTVYAKESGSAAAPTAGLHFTRELMDQLRQKGIEIVEILLHVGLGTFRPVKVEKIEEHEMHSEYYRVSPEVAERINRAKQEGRRVIAVGTTASRTLESVGQENGLIRAGEGWTNIFIYPGYSFKVVDALITNFHFPKSTLVMLVSALAGRDLIMKAYELAVQERYRFYSFGDAMLIL

SEQ ID NO: 65840 - protein, 341 aa, Desulfitobacterium sp.; identical to SEQ ID NO: 65837
  REGION 1..341: note = tr|A0A562HP74|A0A562HP74_9FIRM S-adenosylmethionine:tRNA ribosyltransferase-isomerase; OS = Desulfitobacterium sp. LBE OX=884086 GN=queA PE=3 SV=1

SEQ ID NO: 65841 - protein, 353 aa, Desulfobacca acetoxidans
  REGION 1..353: note = tr|F2NDW7|F2NDW7_DESAR S-adenosylmethionine:tRNA ribosyltransferase-isomerase OS=Desulfobacca acetoxidans (strain ATCC 700848 / DSM 11109 / ASRB2) OX=880072; GN = queAPE=3 SV=1
MKMYSINDYDYHLPPQLIAQEPLPQRDQARMLVLERAAGVIRHCRFTQLPEFLSDRDVLVVNNTQVFPARLRGCKASGGRVEVLLLQPPTPEGNGDVPRQARVPAWYRASKPPKVGQMLNFGLELEGEITAVGPAGEITLLLQSQGRDIRQVVAEAGAMPLPPYIRRLAGPEDTLRYQTIFAHRLGAIAAPTAGLHFTPALLHQLEAGGVEVVSLTLHVGPGTFQPVREEDYSRHRLAPEYFLLSAESAAAINRARAGGKHIVAVGTTTVRVLESQYCQGQVFAGEGYCDLFIYPRYRFNVVDRLITNFHLPKSTLLLLVSAFAGREFVLRAYQEAIAARYRFYSYGDCMLII

SEQ ID NO: 65842 - protein, 352 aa, Desulfobacca sp.
  REGION 1..352: note = tr|A0A1V4QL59|A0A1V4QL59_9DELT S-adenosylmethionine:tRNA ribosyltransferase-isomerase; OS = Desulfobacca sp. 4484_104 OX=1940691 GN=queA PE=3 SV=1
MEHSIHSFDYQLPPALVAQYPQSRRDQSRLLVLVRNPGRWHHTRFSDLPAWLDDRDLLVVNDTQVFPARLRGRKNSGGQVELLLLGLPVIQENGSNSQIAQGRGWYRASRRLKVGQRLEFGDDLHAEVIAGNGSREIEVRFWTDKLDILQALSAAGEVPLPPYIRRAPESQDGERYQTIFATRPGAVAAPTAGLHFTPEILAALKRRGVEVVSLTLHVGPGTFQPVQEENYTRHRLAPEYYQLSVESAARINRARASGKRIVAVGTTTVRVLESQGDEGVVRPGEGQCDLFIYPGYRFKVVDRLLTNFHLPRSTLLLLVSALAGRELVLQAYQEAVAQQYRFYSYGDCMLII

SEQ ID NO: 65843 - protein, 363 aa, Desulfobacter hydrogenophilus
  REGION 1..363: note = tr|A0A328FED3|A0A328FED3_9DELT S-adenosylmethionine:tRNA ribosyltransferase-isomerase; OS = Desulfobacter hydrogenophilus OX=2291 GN=queA PE=3 SV=1
MYNLSDYCYNLPDSLIAQAPCEHRSLSRLMYLDRKNHGISHRRFFDIADLLRPGDLLVVNDTRVVPARLLGHKPTGGRVEVLIIDYAAGMKHLAETGSFQCDCLIRASRRPEPGTVLDLGQDIKATVMEHRDRISVVSFGGGHHFLSQLKKTGKMPLPPYIKRNQNPGPGEGIPAHMDEHRDRHDYQTVYANAEGAVAAPTAGLHFTKELLATLSEKGVDVARITLHVGYGTFVPVRVKDIRDHQIHSEYFIIDDQTAETINRARSDGRRVIAVGTTSVRTLEFCTNERGRISAGQGRCDLFIYPGYRFKCVDAMITNFHLPESTLLMLISAFYDRERILDAYKVAVAEKYRFFSYGDAMFIE

SEQ ID NO: 65844 - protein, 363 aa, Desulfobacter postgatei
  REGION 1..363: note = tr|I5B5B3|I5B5B3_9DELT S-adenosylmethionine:tRNA ribosyltransferase-isomerase OS=Desulfobacter postgatei 2ac9 OX=879212 GN=queA PE=3 SV=1
MYNLSDYRYNLPESLIAQTPCEHRSLSRLMHLDRRSHDISHRRFLDIADLLRPGDLLVVNDTRVVPARLLGHKPTGGRVEVLIIDYAAGMKHLADTGRFQCDCLIRASRRPEPGTVLELGQDITATVIEHRDRISVVCFNGGNDFLFRLKKSGKMPLPPYIKRDQNPGQGAGTPAQMDEQKDRQDYQTVYATAEGAVAAPTAGLHFTEDLLAALSAKGVDVVRITLHVGYGTFVPVRVKDIRDHQIHSEYFIVDEQAAEKINRARGAGCRVIAVGTTAVRTLEFCTDACGRISAGQGRCDLFIYPGYRFKCVDAIITNFHLPESTLLMLISAFYDRERILDAYKVAVDEKYRFFSYGDAMFIE

SEQ ID NO: 65845 - protein, 363 aa, Desulfobacter sp.; identical to SEQ ID NO: 65844
  REGION 1..363: note = tr|A0A348UVH6|A0A348UVH6_9DELT S-adenosylmethionine:tRNA ribosyltransferase-isomerase; OS = Desulfobacter sp. OX=2294 GN=queA PE=3 SV=1

SEQ ID NO: 65846 - protein, 363 aa, Desulfobacter sp.
  REGION 1..363: note = tr|A0A357YV10|A0A357YV10_9DELT S-adenosylmethionine:tRNA ribosyltransferase-isomerase; OS = Desulfobacter sp. OX=2294 GN=queA PE=3 SV=1
MYNLSDYRYNLPESLIAQTPCEHRSLSRLMHLDRRSHDISHRRFLDLADLLRPGDLLVVNDTRVVPARLLGHKPTGGRVEVLIIDYAAGMKHLADRGRFQCDCLIRASRRPEPGTVLELGQDITATVIEHRDRISVVCFNGGNDFLFRLKKSGKMPLPPYIKRDQNPGQGAGTPAQMDEQKDRQDYQTVYATAEGAVAAPTAGLHFTEDLLAALSAKGVDVVRITLHVGYGTFVPVRVKDIRDHQIHSEYFIVDEQAAEKINRARGAGCRVIAVGTTAVRTLEFCTDACGRISAGQGRCDLFIYPGYRFKCVDAIITNFHLPESTLLMLISAFYDRERILDAYKVAVDEKYRFFSYGDAMFIE

SEQ ID NO: 65847 - protein, 341 aa, unidentified
  source 1..341: note = Desulfobacteraceae bacterium
  REGION 1..341: note = tr|A0A1W9LG85|A0A1W9LG85_9DELT S-adenosylmethionine:tRNA ribosyltransferase-isomerase (Fragment) OS=Desulfobacteraceae bacterium A6 OX=1934249; GN = BWK74_07465 PE=3 SV =1
MFYLSDYDYELPEESIAQKPAFCRDRSKLLLLDKNTGKTFHHEFFELFDFISSKYLLVINNTRVIPGRLFGNKDTGGKAEVLILDFAGGIRDEADKGAFTCECLVKTSKPPRPGSLIFFDKELKAEVINAKEGIYLLKFSSPADFEDVINEIGDVPLPPYIKRNNGGNESWDDKTSYQTVYAAHKGAVAAPTAGLHFSKELLERIKSKGVRIAEITLHVGYGTFLPVRVSDIREHKIHSERFEISGDAAGAINKTRAEGGRVVAVGTTCVRTLEYASDSKGKVIAGSAQCDLFIYPGYRFKTVDAMITNFHLPKSTLLMLVSAFAGRERVLSAYREAIYKG

SEQ ID NO: 65848 - protein, 205 aa, unidentified
  source 1..205: note = Desulfobacteraceae bacterium
  REGION 1..205: note = tr|A0A3A4ZBS2|A0A3A4ZBS2_9DELT S-adenosylmethionine:tRNA ribosyltransferase-isomerase (Fragment) OS=Desulfobacteraceae bacterium OX=2049433; GN = C4582_05245 PE=3 SV=1
EEMGQVPLPRYIRRDKDDPGRELDRDRYQTVYARVPGAVAAPTAGLHFTGELLGRIKEKGILVCPITLHVGYGTFQPVRVNDIRLHRLATERYRIEKDSAEKITEARKQGRRVVAVGTTVVRALESSALRTGEVTAGEGETDLLIFPGFSFSVVDSLVTNFHLPRSSLLFLVAAFAGFDFIMEAYRYAVRQRFRFFSYGDAMLII

SEQ ID NO: 65849 - protein, 354 aa, unidentified
  source 1..354: note = Desulfobacterales bacterium
  REGION 1..354: note = tr|A0A1E7GI52|A0A1E7GI52_9DELT S-adenosylmethionine:tRNA ribosyltransferase-isomerase; OS = Desulfobacterales bacterium S3730MH5 OX=1869298 GN=queA; PE = 3 SV=1
MHLLNDYNYSLPPEIIAQAPASRRDESRLMVLEKKSRGISHYRFSDIARLLCPGDVLVVNDTSVIPARLIGSKETGGRVEVLLLDNPGQSAGSQDRGHLTCECLVKTSKRPGIGSKFHFNEGLQAVVLGRANGLCKLEFRFKGDFDTLLNKIGLVPLPPYIKRDKTKPSPCDDQACYQTVYAKKRGAVAAPTAGLHFSRELLNDLAEKGVEIVPITLHVGYGTFLPVRVMDIRKHRMHPEVYDLTLSAAKAINKARDEGRRIIAVGTTAVRVLEFASDPGGRVLAGSGECDLFIHSGFRFRVIDALITNFHLPETTLLMLVAAFAGREFILNAYQTAIRRKYRFYSYGDAMLIW

SEQ ID NO: 65850 - protein, 353 aa, unidentified
  source 1..353: note = Desulfobacterales bacterium
  REGION 1..353: note = tr|A0A2M6ZCX3|A0A2M6ZCX3_9DELT S-adenosylmethionine:tRNA ribosyltransferase-isomerase; OS = Desulfobacterales bacterium CG07_land_8_20_14_0_80_52_14 OX=1973982 GN=queAPE=3 SV=1
MYRRKDYQYDLPEERVAQVPTRPRDRSKLLVLERQTGETAHYHFFDLPDLLSSGDLLVINNTEVIPARLFGKKETGGKAEVLILDYPEAGDGIDGGEAMVCRCLVKSAKRPRPGMSIEFDGPLTGKVIEGKDGIYSIRFTFEGEFMDVLGRLGRIPLPPYIRRESGILSPEDARDYQTVYARQKGAIAAPTAGLHFTPALLESLKKRGILITEITLHVGYGTFLPVRCVDIREHRMHAEGYTVSDETAAMVNSARSKGSRIVAVGTTCVRTLEFISDEKGRVTSGIGRCDLFIYPGYPFKIVDAMITNFHLPQSTLLMLVSAFAGRKRILDAYQEAIRLGYRFYSFGDAMLIL

SEQ ID NO: 65851 - protein, 352 aa, Desulfobacterium autotrophicum
  REGION 1..352: note = tr|C0QKY3|C0QKY3_DESAH S-adenosylmethionine:tRNA ribosyltransferase-isomerase OS=Desulfobacterium autotrophicum (strain ATCC 43914 / DSM 3382 / HRM2); OX = 177437 GN=qu eA PE=3 SV=1
MYRLSDYCYNLPQERIAQTPCQQRDGSRLLRLDRKSGDVTHHGFQDLVTLLNPDDLLVINNTRVVPARLMGKKTTGGVIEVMIVDYAAGLNCLAGNGYFQCDCLVRASKSPKIGAVLELGDEITARVQARKGGLFELKFSCAGDVVQAIKRHGQLPLPPYIHRTNGLEPGDETDYQTVYAANEGAVAAPTAGLHFTDTLMETLRAKGIEFCEITLHVGYGTFVPVRVDDIREHQIHRESFEISEAAAAAVNRAKKAGRRVVAVGTTSVRTLEYGADETGLIHPGSGVCDLFIYPGYRFKLIDAMITNFHLPESTLLMLVSAFAGKDPIFRAYGAAIQSNYRFFSYGDAMLID

SEQ ID NO: 65852 - protein, 360 aa, Desulfobacterium sp.
  REGION 1..360: note = tr|A0A1W9U387|A0A1W9U387_9DELT S-adenosylmethionine:tRNA ribosyltransferase-isomerase; OS = Desulfobacterium sp. 4572_20 OX=1971621 GN=queA PE=3; SV = 1
MKRENNTQIYDLENYTYDLPNELIAQKPASQRDGSRLLCIKRATGDISDSYFFDLPSLLREGDLLVVNDARVTPARLYGQKETGGRVEILVLDHPARPPKNGQETRWCLVKASKRPKTGGILLFPDGLIAVVKRLGEHGMVQLRFEGKHSLNYVLKKRGCLPLPPYIKRDNNNTQSDEDRERYQTIFSRFSGAIAAPTAGLHFTHELLKSLQSLGVNIVNVTLLVGHDTFKPVRVRDIRDHRLGKEAYFVGHHSANSIDNAKKEGRRIIAVGTTVVRTLETIFKRKGKIATDSGTTDLLIYPGFKFQVIDALITNFHLPRSSLFFMVAAFAGLDLTKRAYRWAVESRYRFYSYGDAMLIN

SEQ ID NO: 65853 - protein, 353 aa, Desulfobacterium vacuolatum
  REGION 1..353: note = tr|A0A1W2C374|A0A1W2C374_9DELT S-adenosylmethionine:tRNA ribosyltransferase-isomerase; OS = Desulfobacterium vacuolatum DSM 3385 OX=1121400 GN=queA; PE = 3 SV=1
MYLISDYTYHLPQEQIAQQPMDHRGASKLLHLNRSTGEMSHYSFDHLLSILRPDDLLVINDTRVIPARLKGVKETGGKVEVLIIDYNAGMDCLEENGYFQCECMIRASKSPRRGTRLFLGAGITARVEGADAGLFMVRFFCDTDFRTALDAAGEIPLPPYILRNDTTDHDRDRKNYQTVYAAREGAVAAPTAGLHFTRELMEGLEKKGVEFAKITLHVGHGTFAPVRVEDIRDHQIHSEFFSITRETARRINRAKDENRRIIAVGTTSVRTLEFSAKETGQVTPGSGMCDLYIYPGYQFRVVDAMVTNFHLPESTLLMLVSAFAGRETILKAYREAVEQKYRFFSYGDAMLLE

SEQ ID NO: 65854 - protein, 353 aa, Desulfobacula phenolica
  REGION 1..353: note = tr|A0A1H2HHD2|A0A1H2HHD2_9DELT S-adenosylmethionine:tRNA ribosyltransferase-isomerase; OS = Desulfobacula phenolica OX=90732 GN=queA PE=3 SV=1
MFQLSDYAYDLPPQKIAQTPCKNRSNSRLLHLDRNSGIVAHHQFDDILTLLKDDDLLVINNTKVVPARLFGQKETGGKIEVLIIDYAAGMKHLEKTGFFQCDCLVKASKSPKKGARLYLADTVEARVEQVKGNVFEIRFLNGDKFSDFLKKSGKIPLPPYIKREDPSSGQTDPDDYQTVYASNEGAVAAPTAGLHFTNSLMADLKKKGIEFAPITLHVGYGTFVPVRVQDIREHQIHSEYFSLSKDSSDKINRAKHQNRRIVAVGTTSVRTLEFLSDETGFVTAQTGQCDLFIYPGYTFKCVDAMITNFHLPESTLLMLISAFYSREHILDAYQEAINKDYRFFSYGDAMLIE

SEQ ID NO: 65855 - protein, 199 aa, Desulfobacula sp.
  REGION 1..199: note = tr|A0A1F9S005|A0A1F9S005_9DELT S-adenosylmethionine:tRNA ribosyltransferase-isomerase (Fragment) OS=Desulfobacula sp. RIFOXYB2_FULL_45_6; OX = 1797912 GN=A3J80_08845 PE =3 SV=1
IPLPPYIKREEKNERMDDRANYQTVYASSEGAVAAPTAGLHFTGELMARLRDKGIEFAPLTLHVGYGTFVPVKTDDIRQHQIHSEYFSLSKETADQINIARQNSRRIVAVGTTSVRVLEFVSDDQGRVRAETGLCNLFIYPGYRYKCVDAVITNFHLPESTLLMLVSAFYDREKILTAYKDAIKKDYRFFSYGDAMLIE

SEQ ID NO: 65856 - protein, 353 aa, Desulfobacula toluolica
  REGION 1..353: note = tr|K0NBA5|K0NBA5_DESTT S-adenosylmethionine:tRNA ribosyltransferase-isomerase OS=Desulfobacula toluolica (strain DSM 7467 / Tol2) OX=651182 GN=queA PE=3 SV=1
MFQLSDYAYDLPPQKIAQTPCKNRSNSRLLHLDRNSGIVAHHQFDDILTLLKDDDLLVINNTKVVPARLFGQKETGGKIEVLIIDYAAGMKHLEKTGFFQCDCLVKASKSPKKGARLYLADTVEARVEQVKGNVFEIRFLNGDKFSDFLKKSGKIPLPPYIKREDPSSGQTDPDDYQTIYASNEGAVAAPTAGLHFTNSLMADLKKKGIEFAPITLHVGYGTFVPVRVQDIREHQIHSEYFSLSKDSADKINRAKHQNRRIVAVGTTSVRTLEFLSDETGFVTAQTGQCDLFIYPGYTFKCVDAMITNFHLPESTLLMLISAFYSREHILDAYQEAINKDYRFFSYGDAMLIE

SEQ ID NO: 65857 - protein, 352 aa, Desulfobotulus alkaliphilus
  REGION 1..352: note = tr|A0A562S2Q2|A0A562S2Q2_9DELT S-adenosylmethionine:tRNA ribosyltransferase-isomerase; OS = Desulfobotulus alkaliphilus OX=622671 GN=queA PE=3 SV=1
MFSLSDYGYDLPAELIADRPVPERDTSRLLVLDRRKGDVAHRHFKDIKNIFQPGDLLVVNDTRVIPARLHGVKATGGRVEILLLDYVGGCLCLEREGVFQCSCLVKASKRPAVGSELFIGDRIRVRVESLERDGSAILSFHTEDPMPHALLDAGSLPLPPYIERKEENPDDAIHYQTVYASRQGAVAAPTAGLHFTDALLGELRTKGVELRHLTLHVGYGTFAPVRVEDIRSHSMHSERFEISEETAEAIYRAKAEKRRVIAVGTTCVRTLEYAAIQEGGLKPGAGFCDLFIYPGFEFRVVDAMLTNFHLPETTLMMLVSAFGGYDHIRKAYQEAIAERYRFFSYGDAMLML

SEQ ID NO: 65858 - protein, 367 aa, unidentified
  source 1..367: note = Desulfobulbaceae bacterium
  REGION 1..367: note = tr|A0A1Q6DMQ3|A0A1Q6DMQ3_9DELT S-adenosylmethionine:tRNA ribosyltransferase-isomerase; OS = Desulfobulbaceae bacterium DB1 OX=1920419 GN=queA PE=3; SV = 1
MPDKIPLDYDIDSYRYELPPEKIAQHPVSRRDCSKLLALTRPTGAIHDHVFTDIVDFFSPGDLLVVNNTRVFPARLLGNKESGGRVELLVLHYPKEMSLPEDGSGNCRGRAEVVGLLRSSKRCRPAQRIIFADDFSAEVVELLADGKALVELHYSGDLALLLEQYGRLPLPPYIKRKKGEEGRDRERYQTVFAARTGAIAAPTAGLHFTDDLLAAIADKGVERESVTLHVGYGTFAPVRVRDIRDHQVHSEFLTVSQKTADKINEVGLRGNRIWAVGTTTVRALEFAADASGMMHAAEGWCSLYIKPGYRFKLVKNVITNFHLPGSSLLFMVSALVGREQLLSCYRHALEHDYRFFSYGDAMIIQGE

SEQ ID NO: 65859 - protein, 362 aa, unidentified
  source 1..362: note = Desulfobulbaceae bacterium
  REGION 1..362: note = tr|A0A0F2N4Z9|A0A0F2N4Z9_9DELT S-adenosylmethionine:tRNA ribosyltransferase-isomerase; OS = Desulfobulbaceae bacterium BRH_c16a OX=1629713 GN=queA; PE = 3 SV=1
MQEDHLLSAYTYHLPEKLIAQHPADKRDNSRLMVVNTVKNNTLSHHRFSNIADYIGKKDMLVVNNTRVFPARLLGRKETGGKAEVFLLELPVVENAAEGTAVAQALIKSSKRPRPGTKITLAERFSGTIVEDLGGGKIKLKLKFDPATGLTETLRLSGQVPLPPYIARQDGCTPEDVHRYQTVYASRPGAVAAPTAGLHFTEELLRNIAGKGTQLGQVTLHVGYGTFSPVREEDITRHQIHHEYLSISQETVDAIEGTKARGGKIWAVGTTTVRALEYAAKGKDRLQAIDGWCDLYIYPGFQFKIVDNLITNFHLPDSSLMFLVSALCSRKTLLDCYDLAIREGYRFFSYGDAMAVITGQSE

SEQ ID NO: 65860 - protein, 388 aa, unidentified
  source 1..388: note = Desulfobulbus oralis
  REGION 1..388: note = tr|A0A2L1GP23|A0A2L1GP23_9DELT S-adenosylmethionine:tRNA ribosyltransferase-isomerase; OS = Desulfobulbus oralis OX=1986146 GN=queA PE=3 SV=1
MACQNTLKRWLRQAHSSAAMYADFAYSLDDYDYVLPPELIAQEPAPARDGSRLLVLNTCGAGPEHRRFHDLPRLFRAGDVLALNNTRVFPARLLGSKASGGRIELFLLGFPETEEASGQSEHCATARALLKSSKRARIGARLSFGPALQAEVTALHQDGTAGVRLWFPAGKRLEEVLADCGRMPLPPYITRTDESHRQQDSERYQTCYARYTGSVAAPTAGLHFTPELLAELERMGVIMAPLTLHVGYGTFAPVRTADIRAHPIHSEWVSVPAASAEAVNAAKKAGRRVWAVGTTSTRTLEFAAARGCGAEGPVAAFAGLCNLYIYPGFRFQVVDNLVTNFHLPKSSLLFLVAALAGRERTLAAYETAVRLRYRFFSYGDAMAIVTKS

SEQ ID NO: 65861 - protein, 357 aa, Desulfobulbus propionicus
  REGION 1..357: note = tr|A0A2G6M6V5|A0A2G6M6V5_9DELT S-adenosylmethionine:tRNA ribosyltransferase-isomerase; OS = Desulfobulbus propionicus OX=894 GN=queA PE=3 SV=1
MLIDHLLESYKYHLPLGQIAQAPVNERDNSRLMVLEPAPSPFKHLLFHNIVDLLQPGDLLVTNNSKVFPARLFGYKQSGGRVEVLLLNYPEPQKNQEGARALALIKSSKRPKPESIIKIAEDLHIRVEQILEHGQVKIRLLFRGDNPAPFLERHGQMPLPPYINRAAAANDNRRYQTRYAENIGSVAAPTAGLHFSDRLLAAIEERGIQRVNITLHVGYGTFAPVRQEDIRKHKIHREEVEISERTAEIINHTRDTGGRIWAVGTTTVRTLEYVGKETGRLSGFRGRCGLYIYPGYRFSVVDNLITNFHLPQSSLLFLVSALIGRDRILAAYQNAVAKGYRFFSYGDAMAIITRPVT

SEQ ID NO: 65862 - protein, 367 aa, Desulfobulbus sp.
  REGION 1..367: note = tr|A0A0A2HXF3|A0A0A2HXF3_9DELT S-adenosylmethionine:tRNA ribosyltransferase-isomerase; OS = Desulfobulbus sp. Tol-SR OX=1536652 GN=queA PE=3 SV=1
MQQDFILSAYDYHLPAERIAQHPADRRDNSRLLVLDNESKAISHRRFADIVDLMNDGDMLVVNDTRVFPARLQGRKDSGGKIEVFLLEFPARVDGSSAGPARATALLRCSKRPQPGSRLLLDGGPVCTVIELLADGKARLEMQFGEGEDIAQALSACGQVPLPPYILRQEGTTAADRERYQTVYAHRPGAVAAPTAGLHFTEALLQRLKDKGVQLATITLHVGYGTFAPVRTEEIRDHRIHAEYIEVPAATMAMIATTRQNGGRIWAVGTTTVRALEFAARQCHGTPAAVEGWCDLYIYPGFAFKVVDCLITNFHLPNSSLMFLVAALCGRETLLLCYETAVREGYRFYSYGDAMAVVTAKATASAG

SEQ ID NO: 65863 - protein, 64 aa, Desulfobulbus sp.
  REGION 1..64: note = tr|A0A432Q3J9|A0A432Q3J9_9DELT S-adenosylmethionine:tRNA ribosyltransferase-isomerase (Fragment) OS=Desulfobulbus sp. OX=895 GN=DSY50_07775 PE=3; SV = 1
IYPGYRFGVVDNLITNFHLPQSSLLFLVSALAGKQQILESYKEAVQEGYRFFSYGDAMAIITRA

SEQ ID NO: 65864 - protein, 361 aa, Desulfocapsa sp.
  REGION 1..361: note = tr|A0A432QWK5|A0A432QWK5_9DELT S-adenosylmethionine:tRNA ribosyltransferase-isomerase; OS = Desulfocapsa sp. OX=2066021 GN=queA PE=3 SV=1
MDNNQYQLSAYDYVLPEERIAQQPTEQREQSRLLVLDCVNDQLSHRRFTDITELLRPDDLLVVNNTKVFPARLVGQKETGGRVELLLLHFPEIGKHTPPGRAHALCLIKCSKRPQPGSLLYFPGKIRARVKQLRPDGKVEVTLLYPVSADLGVLLDKHGWIPLPPYISRPEGSTRSDVQRYQTRYARHTGSVAAPTAGLHFSDQLIHTLEARGIQQVAVTLHVGYGTFAPVRSKDIRNHEIHEEFVQVSEETARAVNRTKAASGRIWAVGTTTARTLEFAADSNGRVQPLQKLCGLYIYPDYQFKVINNLITNFHLPKSSLLFLVSALAGRKKILRSYNEAIQRSYRFFSYGDAMAILTKK

SEQ ID NO: 65865 - protein, 360 aa, Desulfocapsa sp.
  REGION 1..360: note = tr|A0A432QRT3|A0A432QRT3_9DELT S-adenosylmethionine:tRNA ribosyltransferase-isomerase; OS = Desulfocapsa sp. OX=2066021 GN=queA PE=3 SV=1
MQQDFSLQAYNYTLPPENIAQHPADARENSRLLILNRNTHEQRHGSFRDIVELFQPGDLLVLNNTKVFPARLYGRKESGGKVEVFLLAYPVESLSPDSSTKTAEVTCLIKSSKRPKPGSTLLLGPELKATVSELLADGKVQIKLRYKASQDLAAILSNYGQVPLPPYISRNEGITEEDRKRYQTVYAKEPGAVAAPTAGLHFSKKLLHAIHEKGVQSTEITLHVGHGTFAPVRCADIREHQIHEEYIAVSKESCDKINATRKKGGKIWAVGTTTVRTIEFMADSKGNVQAGNGWCDLYILPGYAFKTVDNLITNFHLPESSLLFLVSAIYGREALMEVYQQAIAAGYRFYSYGDAMVIYV

SEQ ID NO: 65866 - protein, 359 aa, Desulfocapsa sulfexigens
  REGION 1..359: note = tr|M1PQK7|M1PQK7_DESSD S-adenosylmethionine:tRNA ribosyltransferase-isomerase OS=Desulfocapsa sulfexigens (strain DSM 10523 / SB164P1) OX=1167006 GN=queA PE=3 SV=1
MQQEFTLQAYNYTLPPENIAQHPADAREDSRLLILNRHTGKQEHGKFHQIIDLLNPGDLLVVNNTKVFPARLHGHKKSGGKVEVFLLSYPVVSEGHNGKKHAEVTTLIKSSKRPKPGSLLLLGPDLEARVLELLDGGKVTVELSYSSDKELSTILEKYGQVPLPPYISRKEGSTDEDRKRYQTVYAQNPGAVAAPTAGLHFSENLLEAIRNKGVEFTEITLHVGHGTFAPVRCEDIRKHRIHQEYVSVSQASADKINAVRKAGGKIWAVGTTTVRTLEFMTDPDGRVQAGEDWCGLYIMPGYRFKVVDNLITNFHLPESSLLFLVSALCGREHLMDSYREAIKKGYRFYSYGDAMAIHD

SEQ ID NO: 65867 - protein, 364 aa, unidentified
  source 1..364: note = Desulfocarbo indianensis
  REGION 1..364: note = tr|A0A0K9IA45|A0A0K9IA45_9DELT S-adenosylmethionine:tRNA ribosyltransferase-isomerase; OS = Desulfocarbo indianensis OX=1348163 GN=queA PE=3 SV=1
MLPADQQAAGGGSPLAVYDYSLPPDRIASHPAKRRVQARLLVLHGREGMAHEKVANLTRWLKPGDLLVMNDTKVVPARLLGRKPSGGKVEVFLLSPARPRALENGAELHQALVKSHRPLSAGAEILLEAGPGRRETVLQVVSRGERGQALVRVPGSGLELTRRHGQVPLPPYIKRPQGPRAEDQRRYQTVYAAKEGAVAAPTAGLHLSPALLAALEKRGVETASLTLHVGYGTFAEPRPEDLAAGRLHAEWVELPQETSLAVARAKARGGRVIAVGTTSARALEWRAGPGGVPRPGSGWCDFLISEGHAFKALDGLITNFHLPRTTLLMLVSALAGRGRVLAAYAQAVRRGYRFYSYGDAMLIV

SEQ ID NO: 65868 - protein, 360 aa, Desulfococcus multivorans
  REGION 1..360: note = tr|S7VD70|S7VD70_DESML S-adenosylmethionine:tRNA ribosyltransferase-isomerase OS=Desulfococcus multivorans DSM 2059 OX=1121405 GN=queA PE=3 SV=1
MYRLKDYRYDLPQDLIAQSPSARRDASRLLCLNRGDGRIAHRVFADLPALLDPSDLLVINDTEVVPARLYGRKASGGKVEILILDPHDGRAAHAREVTRNCMLKAAKRPKPGTRIFFDQGLTAEVVDSREAVHTLRFSSPEPFESILYRIGRMPLPPYIRRNGDGEPGTAAEGGGTPDDRTHYQTVYAARKGAVAAPTAGLHFTPELLARIRERGVTVAAVTLHVGYGTFVPVRVDDIREHRMHHEAFTIPEKTAEAVNLARSEGRRVVAVGTTSVRTLEYAAGPDGRIAPGSGHCDLFIYPGYRFRAVDAVITNFHLPESTLIMLVSAFAGRENVLSAYREAVARGYRFFSYGDAMLIG

SEQ ID NO: 65869 - protein, 349 aa, unidentified
  source 1..349: note = Desulfococcus oleovorans
  REGION 1..349: note = tr|A8ZRX6|A8ZRX6_DESOH S-adenosylmethionine:tRNA ribosyltransferase-isomerase OS=Desulfococcus oleovorans (strain DSM 6200 / Hxd3) OX=96561 GN=queA PE=3 SV=1
MFLVSDYDYDLPPDRIAQQPVTQRDSSRLLRLDRARGGISHHRFYDLPDLLRPSDLLVVNNTRVVPARLEGIKETGGRAGALILDYPGVRTEKGVICRCMVKASGRLRPGTRFLFEDRLSASVVDAADGLYTLCFSCDGDFDQTLFAVGRTPLPPYITRNRDGAPCDDRTCYQTVYADRDGAVAAPTAGLHFTPNVLDRLAAKGISTAPVTLHVGHGTFLPVRVSDIRDHAMHSERFEVPAATAAAINATRRDGGRVVAVGTTVVRTLEYVARTCGEIRAFSGACDLFIYPGYNFQAIAAMITNFHLPRSTLLMLVSAFTGREKVLAAYEAAIQEKYRFYSYGDAMLIE

SEQ ID NO: 65870 - protein, 341 aa, unidentified
  source 1..341: note = Desulfocucumis palustris
  REGION 1..341: note = tr|A0A2L2XGK3|A0A2L2XGK3_9FIRM S-adenosylmethionine:tRNA ribosyltransferase-isomerase; OS = Desulfocucumis palustris OX=1898651 GN=queA PE=3 SV=1
MKTADFDYFLPEELIAQDPGLKRDESRLLVLRRDGSGMEHRKFNNIVEYLAPGDVLVINDTRVIPARLFARKAPTGAEIEVLLLRQLSPHSWETLVRPGKRVRPGTRLIFSQGLLEADVADVTDAGGRILDFKYQGDFNEVIEKIGRMPLPPYIKNYPADPGRYQTVYAREPGSVAAPTAGLHFTPELLERIKGKGVNIVSVLLHVGLGTFRPVTAENVEEHLMHREYYEITPRAAEIINGARAGAGRVIAVGTTSTRCLESSAEQDGKVRPGTGWTDIFIYPGYKFKVIDGLITNFHLPCSTLLMLVSAFAGRERVLDAYRTAVDRRYRFFSFGDAMLLI

SEQ ID NO: 65871 - protein, 363 aa, unidentified
  source 1..363: note = Desulfocurvibacter africanus
  REGION 1..363: note = tr|F3YX39|F3YX39_DESAF S-adenosylmethionine:tRNA ribosyltransferase-isomerase OS=Desulfocurvibacter africanus subsp. africanus str. Walvis Bay OX=690850; GN = queA PE=3SV=1
MSHIPESCDLQSYCFELPEELIAQQPGQSREASRLMVLERASGHRRIVPFADIGAFLPPGALLVANNSRVLPARMFGHKPTGGRVEFLLLTPLPLLAAKEPDADGFSSAQAEGLLRSAKKPKPGERIEFSDDFHLVVEARGDFGKSQVTLHWRDDLAAHFMRQGHLPLPPYIRRPDTDSDRERYQTVYSRKDKLGSAAAPTAGLHFSTKLKAELAEAGFAWAELTLYVGYGTFSPVRVRDIREHTMHCEYIEISEATAAAIRDAKVQGRPVVAVGTTSARALEGAFAQSGRIAAFTGWTDIFMRPGYEFKVVERLLTNFHLPGSSLIMLVSALAGREAVQDAYRHAVQERMRFFSYGDAMLVL

SEQ ID NO: 65872 - protein, 363 aa, unidentified
  source 1..363: note = Desulfocurvibacter africanus
  REGION 1..363: note = tr|M5PWZ9|M5PWZ9_DESAF S-adenosylmethionine:tRNA ribosyltransferase-isomerase OS=Desulfocurvibacter africanus PCS OX=1262666 GN=queA PE=3 SV=1
MSHIPESCDLQSYCFELPEELIAQQPGQNREASRLMILERATGHRRIAPFADIGAFLPPGALLVVNNSRVLPARMFGHKLTGGRVEFLLLTPLPLLAAKEPDADGFRSAQAEGLLRSAKKSKPGERIEFSDDFQLVVEARGDFGKSQVTLYWRDDLATHFMRQGHLPLPPYIRRPDTDSDRERYQTVYSREDKLGSAAAPTAGLHFSTELKASLAAAGFAWAELTLYVGYGTFSPVRVRDIREHTMHREYIEIPEATAAAIREAKSQGRPVVAVGTTSARALEGAFAQTGRMEAFTGWTDIFMRPGYEFKVVERLLTNFHLPGSSLIMLVSALAGREAVQDAYRHAVRERMRFFSYGDAMLVL

SEQ ID NO: 65873 - protein, 353 aa, Desulfofaba hansenii
  REGION 1..353: note = tr|A0A2M9DPQ1|A0A2M9DPQ1_9DELT S-adenosylmethionine:tRNA ribosyltransferase-isomerase; OS = Desulfofaba hansenii OX=157842 GN=queA PE=3 SV=1
MYQLTDYDYTLPEALISQQPTEERDASRLMALNRSTGEISHHGFAEIEGKLLPGDVLVVNNTQVIPGRLYGRKESGGKVELLILDYLGGRRMLADSGVFVSKCLIRASKRPKNGSILLFDGGLTGEVLDFTDGIYLVRLNFTGELDSLLERIGNMPLPPYIRRNGGQMSCNDKKTYQTVYAAQRGAIAAPTAGLHFTEALLSRLAERGVKVVAITLHVGYGTFLPVRVADIREHAMHTELYTVSAAAADAINGARRGGGRVVAVGTTSVRTLEYASDETGAVVAGSGSCDIFIYPGYRFKCVDAMVTNFHLPQSTLLMLVSAFAGYDNVLAAYRKAVGERYRFFSYGDAMFIA

SEQ ID NO: 65874 - protein, 333 aa, unidentified
  source 1..333: note = Desulfofarcimen acetoxidans
  REGION 1..333: note = tr|C8W4D7|C8W4D7_DESAS S-adenosylmethionine:tRNA ribosyltransferase-isomerase OS=Desulfofarcimen acetoxidans (strain ATCC 49208 / DSM 771 / VKM B-1644 / 5575) OX=485 916 GN=queA PE=3 SV=1
MILKLEDFNYNLPEELIAQEPSANRDESRLMVLFRDNPQIEHRRFNNLVEYLKPGDVLVINDTKVMPARLYGLKDTGATVEVLLLKQLDGNRWETLVKPGRKARIGTTLTFAGGKLTGLVAGDTEAGGRVIDFLYQGSFVEILEQIGIMPLPPYIKKIPADPGRYQTVYANRFGSAAAPTAGLHFTDQLLDKIKDLGVEIVPVLLHVGLDTFRPVKVENIREHRMHSEYYEISAGVADKINAAKARGGRIIAVGTTTTRCLESSAGDDGRLKTGSGWTKIFIYPGYRFKIIDGLITNFHLPCSTLIMLVSALSGRDKILEAYNTAVKKKVQIF

SEQ ID NO: 65875 - protein, 343 aa, unidentified
  source 1..343: note = Desulfofundulus australicus
  REGION 1..343: note = tr|A0A1M5AWA3|A0A1M5AWA3_9FIRM S-adenosylmethionine:tRNA ribosyltransferase-isomerase; OS = Desulfofundulus australicus DSM 11792 OX=1121425; GN = queA PE=3 SV=1
MGLQLSDFDYELPPELIAQDPAPRRDESRLMVLFRQDGRMEHRLFKDIVEYLSPPDVLVINETRVIPARLMGRRAQGGAEVEVLLLRPLEERRWEALVRPGRRLKPGVRLIFGEGLAEGLIEDVTAAGGRIISFSSALPFAEVLARLGRMPLPPYIKKYPDDPERYQTVYARQEGSAAAPTAGLHFTRELLDKIEARGVQLVRVLLHVGLGTFRPVRVEDITRHHMHAEYYEVTEEAARTINAARARGGRVVAVGTTTTRCLETVAGEDGQVRAGAGWTDIFIYPGYRFKAVDALVTNFHLPRSTLLMMVSAFAGREKILHAYRTAVEMRYRFFSFGDAMLII

SEQ ID NO: 65876 - protein, 341 aa, unidentified
  source 1..341: note = Desulfofundulus kuznetsovii
  REGION 1..341: note = tr|A0A101HXY6|A0A101HXY6_9FIRM S-adenosylmethionine:tRNA ribosyltransferase-isomerase; OS = Desulfofundulus kuznetsovii OX=58135 GN=queA PE=3 SV=1
MKTSEFDYDLPESSIAQEPAQRRDASRLMVIYRSKPDVEYRLFKDLPDYLNDRDVLVINETKVIPARLTGKKVSGDANIEILLLKPLDAYRWEVLVRPGKKVKINDQLVFGDELFSGRIIDFTDSGGRIIEFSFEGNFEELIQDAGEMPLPPYIKKYTGDPQRYQTIYARQEGSVAAPTAGLHFTGELLEKVQKKGIAIKKIILHIGLGTFRPVSATDISMHRMHSEYFEVSQDTADSVNMAREKGGRVVAVGTTTVRCLESAARENGSLSATSGWTDLFIYPGYSFKVIDSMVTNFHLPRSTLLMMVSAFAGSGKILSAYRLAVRDKYRFFSFGDAMLIL

SEQ ID NO: 65877 - protein, 341 aa, unidentified
  source 1..341: note = Desulfofundulus salinum
  REGION 1..341: note = tr|A0A494WXA5|A0A494WXA5_9FIRM S-adenosylmethionine:tRNA ribosyltransferase-isomerase; OS = Desulfofundulus salinum OX=2419843 GN=queA PE=3 SV=1
MQLNDFDYYLPPELIAQDPAPRRDESRLMVLFRDDGRIEHRLFRDIVEYLSPQDVLVINDTRVIPARLTGRKAQGGAEVEVLLLRPLDERRWEALVRPGRRLRPGTRLIFGDGLAEGLIEGVTAAGGRVVSFASALPFEEVLSRLGKMPLPPYIKKYPEDPGRYQTVYARQEGSAAAPTAGLHFTTELLDRIEARGVQLVRVLLHVGLGTFRPVRVQDITRHHMHAEYYEVTEEAARAINAARARGGRVVAVGTTTTRCLETVADTDGQIRPGTGWTDIFIYPGYRFKAVDALVTNFHLPKSTLLMMVSAFAGRETILNAYRTAVEMRYRFFSFGDAMLII

SEQ ID NO: 65878 - protein, 348 aa, unidentified
  source 1..348: note = Desulfofundulus thermosubterraneus
  REGION 1..348: note = tr|A0A1M6H7H7|A0A1M6H7H7_9FIRM S-adenosylmethionine:tRNA ribosyltransferase-isomerase; OS = Desulfofundulus thermosubterraneus DSM 16057 OX=1121432; GN = queA PE=3 SV=1
MGDGFLGFQLSDFDYELPPELIAQDPAPRRDESRLMVLFRQDGRMEHRLFRDIVEYLSPPDVLVINDTRVIPARLTGRKAEGAAEVEVLLLRLLDERRWEALVRPGRRLRPGTRLIFGDGLAEGLIEDVTAAGGRVISFTSALPFEEVLSRLGKMPLPPYIKKYPEDPERYQTVYARQEGSAAAPTAGLHFTTELLGRIEARGVQLVRVLLHVGLGTFRPVRVQDITRHHMHAEYYEVTEEATRAINAARARGGRVVAVGTTTTRCLETVAGEDGQVRPGTGWTDIFIYPGYRFKAVDALVTNFHLPRSTLLMMVSAFAGREKILHAYRTAVEMRYRFFSFGDAMLII

SEQ ID NO: 65879 - protein, 361 aa, Desulfofustis glycolicus
  REGION 1..361: note = tr|A0A1M5VB44|A0A1M5VB44_9DELT S-adenosylmethionine:tRNA ribosyltransferase-isomerase; OS = Desulfofustis glycolicus DSM 9705 OX=1121409 GN=queA; PE = 3 SV=1
MQEDLTLAAYDYDLPESHIAHYPANRRDDSRLLVLNRATGVRRHLHFRDIVTFFQPGDLLVVNDTKVFPARLFGTKESGGKAELFLLSYPAPVSGEKTDGAVRFDSEALIRSSRRPAIGSRIIVSDSCSCRVLAHRGGGKWLVRLAISATGGLDQLLGEAGHIPLPPYIKRPAGPTVEDKRRYQTVYANRPGAVAAPTAGLHFTTDLLMALTARGVRQTTITLHVGYGTFAPVQSEDIRDHHIHREFIDISEETAELVAATKQDGARVWAVGTTTVRALEYAALGTGSIEPVCGWCDLYITPGFSFQVTDHLLTNFHLPRSSLLFLVAALCGRDRLLACYREAIDRGYRFYSYGDAMAIIG

SEQ ID NO: 65880 - protein, 368 aa, Desulfofustis sp.
  REGION 1..368: note = tr|A0A353XBD3|A0A353XBD3_9DELT S-adenosylmethionine:tRNA ribosyltransferase-isomerase; OS = Desulfofustis sp. OX=2053546 GN=queA PE=3 SV=1
MKSQEDFSLSSYDYHLPEEAIAQYPVDGRDQSRLLVMDRASGGIEHRLFHQIHTLFKPGDVLVRNDTRVFPARLFGRKESGGKVELFLLHYPVHIKNGGESGNAAYQCEVLVKSSRPPRAGMQLRIADAIIFALDENLGRGRWSGTLFTTTGHDLDSLLAAHGNVPLPPYVKREDGPTAIDVERYQTVYAAEPGAVAAPTAGLHFTGPLLDKISRLGVSIASITLHVGHGTFAPVTHEDIRHHKIHQEYVKIGDETAALINRAKTRGAQVWAVGTTTVRALESAAVSEHEIKPIEQWCDVYITPGYTFQVVDNLITNFHLPRSSLLFLVAALCGRTRLLSAYRAAIEMGYRFYSYGDAMALIKSGKKE

SEQ ID NO: 65881 - protein, 356 aa, Desulfoglaeba alkanexedens
  REGION 1..356: note = tr|A0A4P8KZH9|A0A4P8KZH9_9DELT S-adenosylmethionine:tRNA ribosyltransferase-isomerase; OS = Desulfoglaeba alkanexedens ALDC OX=980445 GN=queA PE=3; SV = 1
MADRPTYRLDDYDYELPGRLIAQSPTPQRDRCRLMVLERASGRLEHRSFRDLPDYLQAGDVLVLNDTRVVPARLLGRKDTGGRVELLVLDPYKDPDVGVREGYRCLLRASKPPRRGSRLFLEQEVMARVMGEVREGRVTVRFETGSPLMEILERAGRVPLPPYIRRNDDAVSFEDGKDYQTIYAAKPGAVAAPTAGLHFTENLLGCLEGKGVETVRLTLHVGYGTFSPIRVEDIREHGIHAEWTEIGEEASQRIREVRRAGRRVVAVGTTVVRALEYTAARFGEVSPFAGFCDHYIYPGFRFRVVDAMVTNFHLPKSSLILLVSAFAGRETILAAYAEAVRKEYRFYSYGDAMLIV

SEQ ID NO: 65882 - protein, 363 aa, Desulfohalobium retbaense
  REGION 1..363: note = tr|C8WZC0|C8WZC0_DESRD S-adenosylmethionine:tRNA ribosyltransferase-isomerase OS=Desulfohalobium retbaense (strain ATCC 49708 / DSM 5692 / JCM 16813 / HR100) OX=4859 15 GN=queA PE=3 SV=1
MNTIPRDYDLDAYQFELPADQIAQHPHPQRDASRLLILDRSSGQRQHATFRDLVDTLPDGALLVANTSRVLPARLKGQKRATGGKVEFLLLTPLPLVTPQPLADGRNEGFVSGLLRSSKPLAVGQKADFPGGIELTVIEREEFGRVQVRLCWSGDMAEVFQAYGHMPLPPYIQREDDATDHGRYQTVYADSAKTGSVAAPTAGLHFTDDVLHALRDKGIQWAEVTLYVGYGTFSPLRCRDIREHHMHPEYIELDAANAETISRAQAEGRPVVAVGTTTVRTLESIAHHCGRIQPFAGWTDIFIYPGFSFRVVDHLLTNFHLPGSSLILMVAAFAGRRLVLEAYEEAVDEGYRFFSYGDAMFIV

SEQ ID NO: 65883 - protein, 350 aa, Desulfoluna butyratoxydans
  REGION 1..350: note = tr|A0A4U8YRR0|A0A4U8YRR0_9DELT S-adenosylmethionine:tRNA ribosyltransferase-isomerase; OS = Desulfoluna butyratoxydans OX=231438 GN=queA PE=3 SV=1
MYQLSDYRFDLPEELIARHPEKNRTDSRLLHLERHTGARHHRHFSDLSGLLNKGDLLVVNNTSVIPARLIGHKETGGKVEVLILDYREGMAAMDRDGAFSCRCLLKASKRVKPDTPIRFGDGFSAVVESFDQGIYRLRFACDGDFDRLLETHGNMPLPPYIKRDADAFDKKTYQTVYAKNRGAVAAPTAGLHFTGDLMETLKAKGVEIAELTLHVGYGTFEPVRVDDIRDHAIHTEWYEVSEATAAAVNNAKAEGRRVIAVGTTSVRTLEFATAKDGTLTPGAGPCDIFIYPGYQFKCVDAMVTNFHTPESTLLMLVSAFAGRDTIFTAYEEAVRLKYRFFSYGDAMFID

SEQ ID NO: 65884 - protein, 350 aa, Desulfoluna spongiiphila
  REGION 1..350: note = tr|A0A1G5GQX2|A0A1G5GQX2_9DELT S-adenosylmethionine:tRNA ribosyltransferase-isomerase; OS = Desulfoluna spongiiphila OX=419481 GN=queA PE=3 SV=1
MYQLSDYRFDLPDELIARHPEKNRTDSRLLHLERTTGARHHRHFSDLSGLLNKGDLLVVNNTSVIPARLIGHKESGGKVEVLILDYREGMAAMDREGTFSCRCLLKASKRVKPDTPIRFGEHFSAVVESFDQGIYRLRFECDGDFDRQLEAHGNMPLPPYIKRDADAFDKKTYQTVYAKNRGAVAAPTAGLHFTDELMETLKAKGVDIAELTLHVGYGTFEPVRVDDIRDHAIHTEWYEVSEETAHAVNTAKAQGRRVVAVGTTSVRTLEFASKEDGTLTSGAGPCDIFIYPGYRFKCVDAMVTNFHTPESTLLMLVSAFAGRDTIFTAYEEAVSQKYRFFSYGDAMFIG

SEQ ID NO: 65885 - protein, 350 aa, Desulfoluna spongiiphila
  REGION 1..350: note = tr|A0A5E7XFI5|A0A5E7XFI5_9DELT S-adenosylmethionine:tRNA ribosyltransferase-isomerase; OS = Desulfoluna spongiiphila OX=419481 GN=queA PE=3 SV=1
MYQLSDYRFDLPDELIARHPEKNRTDSRLLHLERTTGARHHRHFSDLSGLLNKGDLLVVNNTSVIPARLIGHKESGGKVEALILDYREGMAAMDRDGTFSCRCLLKASKRVKPDTPIRFGDNFSAIVESFYQGIYRLRFECDGDFDRQLEAHGNMPLPPYIKRDADAFDKKTYQTVYAKNRGAVAAPTAGLHFTDELMETLKAKGVDIAELTLHVGYGTFEPVRVDDIRDHTIHTEWYEVSEETAHAVNTAKAQGRRVVAVGTTSVRTLEFTSKEDGTLTPGAGPCDIFIYPGYKFKCVDAMVTNFHTPESTLLMLVSAFAGRDTIFTAYEEAVSQKYRFFSYGDAMFIG

SEQ ID NO: 65886 - protein, 360 aa, unidentified
  source 1..360: note = Desulfomicrobiaceae bacterium
  REGION 1..360: note = tr|A0A3D1NEM1|A0A3D1NEM1_9DELT S-adenosylmethionine:tRNA ribosyltransferase-isomerase; OS = Desulfomicrobiaceae bacterium OX=2053547 GN=queA PE=3; SV = 1
MVASPPIPERYCLQSYIYELPEDRIAQTPAQHREASRLLVVPREGTIFSEHAFAELPQLLPPEALLVFNNTKVLPARLLATKPTGGKSEFLLLTPLPRIVPEPDGTGWQAEAEGLVRGLKPGQALDFHGLQVRVLERMDFGRCRVRLSWQGELPDIFLRHGHMPLPPYIARPDSGEDQERYQTVYADPAKLGSVAAPTAGLHFTPQILAALRERGMQTATVCLYVGYGTFSPVRCEDIRDHRMHAEFIEVSEDAAQAIAQAKAQGRPVVAVGTTSARTLESLPVKTGGIHPYQGWTDLYILPGHRFQVVDSLITNFHLPASSLLIMVAALAGLSTIRAAYAQAVHSGFRFFSYGDAMLIR

SEQ ID NO: 65887 - protein, 361 aa, Desulfomicrobium apsheronum
  REGION 1..361: note = tr|A0A1I3XFM9|A0A1I3XFM9_9DELT S-adenosylmethionine:tRNA ribosyltransferase-isomerase; OS = Desulfomicrobium apsheronum OX=52560 GN=queA PE=3 SV=1
MTAIPPEFNLQSYDFDLPEAQIAQDPTEKRGASRLLVLDRNSGEVRDAMFADIPDLLPPGALLVVNNTKVLPARLIGRKESGGKVEFLLLTPLALIEPGANADGTKTATVEGLLKASKGPRQGDRLLFPGIELRVLEKGEFGRAKVAMRWTGDLAEHFLKQGHIPLPPYIHREDKSEDRTRYQTVYSREDKLGSVAAPTAGLHFTPSIMDALAARDIRMAEVTLYVGYGTFSPVRAHDIREHVMHAEYAEVSEETARAIATAKSEGRPVVAVGTTTSRTLESMATALGEIGPFKGWTDIFIRPGYGFKVVDQLITNFHLPRSSLIIMVCTLAGRQQIIDAYNHAVRQGFRFFSYGDAMLIR

SEQ ID NO: 65888 - protein, 361 aa, Desulfomicrobium baculatum
  REGION 1..361: note = tr|C7LTM9|C7LTM9_DESBD S-adenosylmethionine:tRNA ribosyltransferase-isomerase OS=Desulfomicrobium baculatum (strain DSM 4028 / VKM B-1378) OX=525897 GN=queA PE=3 SV= 1
MTAIDPEFNLQSYDFDLPEAQIAQDPTAKRGASRLLVLDRKSGTVRDAMFADIPELLPTGALLVVNNTKVLPARLIGRKESGGKVEFLLLTPLTLIEAKTAADGTKTATAEGLLKASKGPRQGDLLLFPGIELRVLEKGEFGRARVTLRWTGDLAEHFLSQGHIPLPPYIHREDKSEDRTRYQTVYSREDKLGSVAAPTAGLHFTPEIMASLAQQGIQLAEVTLYVGYGTFSPVRCDDIREHVMHAEYAEVPEETARAIAKAKSEGRPVIAVGTTTSRTLESMASALGEIGPFKGWTDIFIHPGYEFKVVDQLITNFHLPRSSLIIMVCTLAGRQQIIDAYNHAIKQGFRFFSYGDAMLIR

SEQ ID NO: 65889 - protein, 361 aa, Desulfomicrobium norvegicum
  REGION 1..361: note = tr|A0A1I4ING0|A0A1I4ING0_DESNO S-adenosylmethionine:tRNA ribosyltransferase-isomerase; OS = Desulfomicrobium norvegicum (strain DSM 1741 / NCIMB 8310) OX=52561 GN=queAPE=3 SV=1
MTAIPPEFNLQSYDFDLPEAQIAQDPTEKRGASRLLVLDRDSGEVRDAMFADIPDLLPPGALLVVNNTKVLPARLIGRKESGGKVEFLLLTPLALIEPGANADGTRTAEVEGLLKASKGPRQGDRLLFPGIELRVLEKGEFGRAKVSMRWAGDLAEHFLKQGHIPLPPYIHRKDKSEDRTRYQTVYSREDKLGSVAAPTAGLHFTPSIMDALAARDIRMAEVTLYVGYGTFSPVRAHDIREHVMHAEYAEVSEETARAIATAKSEGRPVVAVGTTTSRTLESMATALGEIGPYKGWTDIFIRPGYGFKVVDQLITNFHLPRSSLIIMVCTLAGRQQIIDAYNHAVRQGFRFFSYGDAMLIR

SEQ ID NO: 65890 - protein, 361 aa, Desulfomicrobium orale
  REGION 1..361: note = tr|A0A120KNS7|A0A120KNS7_9DELT S-adenosylmethionine:tRNA ribosyltransferase-isomerase; OS = Desulfomicrobium orale DSM 12838 OX=888061 GN=queA PE=3; SV = 1
MTAIPPEFNLQSYDFELPEELIAQTPPAEHGASRLLVLDRATGATHEARFADIVEFLPPGALLVANNTKVLPARLTGRRASGGRVEFLLLTPLPLIAVRDREGGGHEAEAEGLVKMSKSVRIGETLHFPSMDILVLEKGDFGRIRGRLSWQGDLGAHFLSTGRIPLPPYIRRADDGQDRLRYQTVYAREDRLGSVAAPTAGLHFTPEILEALSRRGMVRAEVSLYVGYGTFSPVRVEDIREHAMHAEYVEVPERTARLIRQARDEGRPIVAVGTTTVRALESMAARLDGIGPFAGWTDIFIRPGHRFKIVDQLITNFHLPRSSLIIMVGTFAGRQKIIDAYRHAISRGFRFFSYGDAMFIR

SEQ ID NO: 65891 - protein, 292 aa, Desulfomicrobium sp.
  REGION 1..292: note = tr|A0A3D5BUZ9|A0A3D5BUZ9_9DELT S-adenosylmethionine:tRNA ribosyltransferase-isomerase (Fragment) OS=Desulfomicrobium sp. OX=52017 GN=DGF30_10070; PE = 3 SV=1
VLPARLIGRKESGGRAEFLLLTPLSLIEPQTGPDGGSTAEVEGLLKASKGPRPGEPLHFDGLELLVLEKGEFGRSRVRLNWRGELADHFLKLGHIPLPPYIRREDKGEDRDRYQTVYSRDDKLGSVAAPTAGLHFTPEIMAALEARGIRTAEVTLYVGYGTFSPVRCDDIREHVMHAEYAEVPEETAEAIARARAEGRPVVAVGTTTTRTLESMATHLGGIGPFRGWTDIFIRPGYSFKVVDQLITNFHLPRSSLIIMVSTLAGRRRIIDAYTHAVRHGFRFFSYGDAMLIR

SEQ ID NO: 65892 - protein, 372 aa, Desulfomonile tiedjei
  REGION 1..372: note = tr|I4C9T4|I4C9T4_DESTA S-adenosylmethionine:tRNA ribosyltransferase-isomerase OS=Desulfomonile tiedjei (strain ATCC 49306 / DSM 6799 / DCB-1) OX=706587 GN=queA; PE = 3SV=1
MMDENTALYTDDASMDIPESFRLATYSYELPPDLIAQKPSPERDRSRLLHLNRRTGAVAHHLFAELPGLLRPSDVLVLNETKVIPAFLQGKKTTGGRVELLVTDPGEMFGPGEFHAVRTCITKSSKPIKPGSRILVGNGVELECIHAVGPGRIQVRFPVTESMLLNFLEEHGKPPLPPYIHTAKRDEALDRCRYQTIYGRVAGSVAAPTAGLHFSEKLLKELEGMGILVARIILHVGPGTFLPVRTQDVRLHTMESEYFEISDETARNITRAAREGRRVIAVGSTSTRALETAVSEDCHICPGKGKTSLFILPGYRFKIVKGIITNFHLPESTLLMLVCALGGTDRVLSAYRQAVHQKYRFYSYGDASLIAE

SEQ ID NO: 65893 - protein, 360 aa, Desulfonatronospira thiodismutans
  REGION 1..360: note = tr|D6SUG8|D6SUG8_9DELT S-adenosylmethionine:tRNA ribosyltransferase-isomerase OS=Desulfonatronospira thiodismutans ASO3-1 OX=555779 GN=queA PE=3 SV=1
MSISEDFDLENYDYELDPARIASWPTPDRSESRLLMLDRQGGELQEDRFENIDQHLEPGSLLVVNNSKVLPARLMGHKESSGSVEFLLLTPLPLISPAMENREKKARVECLVRASRRPRPGDWVYFAENVRFRLVQDLDQGRAKGDLFWTGDLGDFFVRYGHVPLPPYIKRQDEPQDVNRYQTVYAHPDKQGSVAAPTAGMHFTPKLCHRLEDLGCMWAEVCLYVGYGTFSPVKSADIRQHVMHPEYIEVGSQAAESIRAARAQGRKVVAVGTTTVRTLESVCRMKGRVEPFTGWSDLYIYPGFKFEAVDQLITNFHLPKSSLLIMVSAFAGRRKILHSYQYAREKGFRFFSYGDAMFIK

SEQ ID NO: 65894 - protein, 360 aa, Desulfonatronovibrio sp.
  REGION 1..360: note = tr|A0A424XXD2|A0A424XXD2_9DELT S-adenosylmethionine:tRNA ribosyltransferase-isomerase; OS = Desulfonatronovibrio sp. MSAO_Bac4 OX=2293858 GN=queA; PE = 3 SV=1
MPEFADYNLSSYEFELEQELIAQHPSQKREDSKLLVLNKKTGSTESSRFELIGQYLSSGSLLVVNNTRVLPARLTGSKKTGGKVEFLLLTPLPLIEPEVYGSLKKADIECLIKSSKRPKPGDELFFPGNVSFKVLENAPMGRTKGELLWTGDLAKYFIDHGRVPLPPYIQREDNKSDQERYQTVYSSEEKAGSVAAPTAGLHFTPELKENLSKLGIGWAEVTLYVGYGTFSPVRVRDIREHKMHPEYIEVKQDAASKIRQARDAGHKIVAVGTTTVRTLESVISLQGRMDSYSGWTDLFVYPGYKFKIVDQLITNFHLPGSSLIMMVSALAGRENILKAYQMARNEKFRFFSYGDAMLIR

SEQ ID NO: 65895 - protein, 372 aa, Desulfonatronum sp.
  REGION 1..372: note = tr|A0A2T5CCE5|A0A2T5CCE5_9DELT S-adenosylmethionine:tRNA ribosyltransferase-isomerase; OS = Desulfonatronum sp. SC1 OX=2109626 GN=queA PE=3 SV=1
MTPLSISRNISPTFSLDAYDYYLPESLIAQNPPQSREASRLLIMGRGDDLPPAVGVFNDVLEHLPRGSLIVVNNSRVVPGRLRTVGEHGGGMELLLLTPLNLLRRDQRTVGARAVATSDVLLRPAKKARVGKVLNFSEIQVTVLEKGEFGQTKVELSWPTYLSLEEFLRSNGEIPLPPYIRRPSDQRDLERYQTVYADEQETGSIAAPTAGLHFTPLLRDKLIQAGHEWAEVTLYVGYGTFSPIRCDDIRDHRMHGEYVKITQGAAEAVRRAKQEGRAIVAVGTTSLRTLEGVAAVRGGVEPFEGWLDTYIYPGFSFQVVDGLITNFHLPKSSLLVLVSAFAGRERILAAYRRAMAEGFRFFSYGDAMFIRP

SEQ ID NO: 65896 - protein, 370 aa, Desulfonatronum thiosulfatophilum
  REGION 1..370: note = tr|A0A1G6B8W6|A0A1G6B8W6_9DELT S-adenosylmethionine:tRNA ribosyltransferase-isomerase; OS = Desulfonatronum thiosulfatophilum OX=617002 GN=queA; PE = 3 SV=1
MKYIESVRDTSKEFFLDDYDYHLPEELIAQSPPLRRGDSKLLVVSRQDSSVQHSAFAELLDHLSKKSLIVVNNSTVVPARIRARTETGSELEMLLLTPLDLLQQNLVKTASSCKVSATALLRPSKKFKEGKKINFGQLTVEVIEKQRFGHCQVILHWNGNSLESILNQAGEMPLPPYIRRKPDAGDSDRYQTIYADSAEKGSIAAPTAGLHFTREMRDKLLDAGHSWAEVTLYVGYGTFSPIREQDIRNHTMHSEYVKIDEHCVEMICKAKKDGNPVIAVGTTSMRTLEGIAAIKGRLEPFKGWLDTYIYPGFEFKIVEGLITNFHLPRSSLLVLVSAFAGRERMLAAYRKAVEARYKFFSYGDAMFIKP

SEQ ID NO: 65897 - protein, 371 aa, Desulfonauticus sp.
  REGION 1..371: note = tr|A0A101DJA8|A0A101DJA8_9DELT S-adenosylmethionine:tRNA ribosyltransferase-isomerase; OS = Desulfonauticus sp. 38_4375 OX=1635258 GN=queA PE=3 SV=1
MDLPKKDNLPDLFNLDTYDFSLPSELIASLPPKNRGTSRLLVLDKKSGDITLASFKELARFLPPKSLLVANNTKVLPARIWGRKKQQNHLGGKVEFLLLTPFPLLKIQDTRENFKECIAEGLLRASKRPKPGQEVVFAPDFSLEVLETGDFGRAKVKLIFQGDLKEKFLQLGHIPLPPYIKRADTDLDRERYQTIYAAEEKIGAVAAPTAGLHFSPELQAELTHLGFDFAYITLYVGYGTFSPIRTQDIRQHQMHGEYFEIPEQTARKIQEAKKNQRPVIAIGTTTVRTLEGAYQKHQKIRALKDVTDIYIFPGYEFKVVDHLITNFHLPKSSLIIMVSAFAGLENIKRAYKLAIEEKFRFFSYGDAMLII

SEQ ID NO: 65898 - protein, 362 aa, Desulfonauticus submarinus
  REGION 1..362: note = tr|A0A1H0BN13|A0A1H0BN13_9DELT S-adenosylmethionine:tRNA ribosyltransferase-isomerase; OS = Desulfonauticus submarinus OX=206665 GN=queA PE=3 SV=1
MKKITSIFNLETYDFKLPEELIAQQPISKRSHSRLLVLNKNTGQIQLASFSELKHFLPSGSLLVGNNTKVLPARILGHKETGGKVEFLLLTPFPLLKPKKISSNQYVVEAEGLLKASKRPKKDQKIIFKEDFYLIVKENKEFGQAKVQIFFQGNLKDKFIAYGHIPLPPYIRREDTQEDKARYQTVYASEDKIGAVAAPTAGLHFTKHLKQELLAIGFDFTYITLYVGYGTFSPVRTKDIRNHQMHAEYFEISKKSAKVISQAKRAKRPIIAIGTTTVRTLEGAFALMGEIRPFSGFTDIFIYPGFKFKVIDHLITNFHLPKSSLIMLVSALAGIENIKKAYQVAIENKMRFFSYGDAMLIL

SEQ ID NO: 65899 - protein, 354 aa, Desulfonema ishimotonii
  REGION 1..354: note = tr|A0A401G3P5|A0A401G3P5_9DELT S-adenosylmethionine:tRNA ribosyltransferase-isomerase; OS = Desulfonema ishimotonii OX=45657 GN=queA PE=3 SV=1
MYLLKDYFYELPEDRIAQKPVGGRDGSRLLQMSRETGALSHRTFADLPECLSGPDVLVINNTKVIPGRLTGKKETGGRAELLILNYGSGSRTVPETGDLICECLVKASKRPRTGTRFFFDHGLTAEILESGGMIHTVRFSCPGNFEEIMYRIGEMPLPPYIKRNGNGGAPCDDEATYQTVYAAQKGAIAAPTAGLHFTDALLARIRARGVQIVTVTLHVGYGTFVPVRVPDIREHQMHSEWYSVPPETAAAINAAKENGGRVVAVGTTSVRTLEYVAAKYGEMRADTGNCDLFIYPGYAFRVVDAMITNFHLPESTLLMLVSAFAGREEMLNAYKTAVEEKYRFYSYGDAMLIA

SEQ ID NO: 65900 - protein, 341 aa, Desulfonispora thiosulfatigenes
  REGION 1..341: note = tr|A0A1W1VS57|A0A1W1VS57_DESTI S-adenosylmethionine:tRNA ribosyltransferase-isomerase; OS = Desulfonispora thiosulfatigenes DSM 11270 OX=656914; GN = queA PE=3 SV=1
MKLSDFDYFLPEELIAQHPLEQRDSSRMLVLDKKSGNIEHKSFSDLIDYLSPNDVVVINNTKVIPARLYGVKENTGAKIEVVLLRQSEEVDCWEALVKPGKKLKAGTNIIFGEGKLIGEVLKTTDIGGRIIKFKYQGIFNEILNELGQMPLPPYITERLEEQGRYQTVYAEHSGSAAAPTAGLHFTPEVLEKLKNKNIEVVEILLHVGLGTFRPVKVENIEEHNMHPEYFKVSEEAADKLNRAMKQNKRIIAVGTTSTRTLEAVGKTGEVIPGEGWTDIFIYPGYSFKIVSGLVTNFHLPKSTLIMLVSTLAGRENVLKAYHEAVEKKYRFFSFGDAMLII

SEQ ID NO: 65901 - protein, 356 aa, Desulfopila aestuarii
  REGION 1..356: note = tr|A0A1M7XZF1|A0A1M7XZF1_9DELT S-adenosylmethionine:tRNA ribosyltransferase-isomerase; OS = Desulfopila aestuarii DSM 18488 OX=1121416 GN=queA PE=3; SV = 1
MEKDFTLEAYNYHLPVENIAQKPADRRDKSRLLVLDTADCSRNHRTFADILDYIGDDDMLVVNDTRVFPARLYGKKDSGGRAEVFLLGYPMPVDAPGSAEVEALIKSSKRPKPGSTITISPDLTCTVLELLDGGKARLALNFTGDLDSILAACGQVPLPPYISRNDGTTPEDVTRYQTVYANQPGAVAAPTAGLHFTEELLAQLTSRGVLLGTITLHVGYGTFAPVRAEKILEHRIHEEYVVVPKETVEKIEAAKKRGGRIWAVGTTTVRALEFAARDGQLRPIEDWCDLYIYPGFTFRVIDNLITNFHLPGSSLMFLVSALCGRETLLDCYQEAIREGYRFYSYGDAMAVIRHRP

SEQ ID NO: 65902 - protein, 362 aa, Desulfopila sp.
  REGION 1..362: note = tr|A0A4U0ZYQ4|A0A4U0ZYQ4_9DELT S-adenosylmethionine:tRNA ribosyltransferase-isomerase; OS = Desulfopila sp. IMCC35005 OX=2569541 GN=queA PE=3 SV=1
MHKDFTLEAYNFNLPQENIAQKPADKRDHSRLLVMDNLNKELVHKTFSEITDYIRDEDMLVVNNTRVFPARLFGKKETGGKVEVFLLGFPEISPDTRGSAQVDALIKSSKRPKPHSTITISDKLSCTVVELLDGGKARLALQFPQSADLAEILSACGQVPLPPYIARENGTTDEDVARYQTVYADQPGAVAAPTAGLHFTDSLLAELDSRGVNFGTITLHVGYGTFAPVRAQKIKEHSIHGEYIVVPEETVRKIEATKKRGGRIWAVGTTTVRALEFAAKEGTLKPVEGVCDLYIYPGFEFKVIDNLITNFHLPESSLMFLVSALCTRKALLNCYDEAIKAGYRFYSYGDAMAVINTPRHGQ

SEQ ID NO: 65903 - protein, 362 aa, Desulfopila sp.
  REGION 1..362: note = tr|A0A4U1AI80|A0A4U1AI80_9DELT S-adenosylmethionine:tRNA ribosyltransferase-isomerase; OS = Desulfopila sp. IMCC35006 OX=2569542 GN=queA PE=3 SV=1
MQDDLSLHAYNYHLPEHLIAQHPAEKRDDSRLMVVNAAPREPEHCRFSDIARFIGKEDMLVVNNTRVFPARLLGAKETGGKAEVFLLEFPTIDPQNHTTALANGLIKSSKRPKKGSMITMNERLSCTVEEDLEGGKLRLRLHFDPSLGLAETLQRSGQVPLPPYISRKNGCTAEDVTRYQTVYASRPGAVAAPTAGLHFTDSLLAKISKQGTSIGQITLHVGYGTFAPVRETDITRHQIHREYLTIPQETVDTITATKKRGGRIWAVGTTTVRALEFGAIRTGRLQAIEDWCDLYIYPGFQFKVIDNLITNFHLPDSSLMFLVSALCGRKTLLDCYGIAVKEQYRFFSYGDAMAVITKPSAI

SEQ ID NO: 65904 - protein, 368 aa, unidentified
  source 1..368: note = Desulfoplanes formicivorans
  REGION 1..368: note = tr|A0A194AGB7|A0A194AGB7_9DELT S-adenosylmethionine:tRNA ribosyltransferase-isomerase; OS = Desulfoplanes formicivorans OX=1592317 GN=queA PE=3 SV=1
MHDPSPSPTIPADFDLASYEYHLDESRIAQTPAPNREDSRLLVLDRSRPGQTATVFSSIADYLPENALLVANNTKVLPARLMGHKESGGKTEFLLLTPLVLIKEIPGRSGWSTARVQGLLRASKAPKPGSKVIFNHRLFLTVVQRGQFGQATVMLSWQGNLTDHFLTDGHIPLPPYIHRQDRPEDRERYQTIFAREDKLGSVAAPTAGLHFTPKVKESLARKSITWEEITLYVGYGTFSPLRCQDIRNHSMHAEYIEISAPTAAAIKQAKDEGRPIVALGTTTVRTLESMYAKTGGIHPFAGWTDLFIMPGYRFRVIDHLITNFHLPGSSLIVLVSALAGRDRIKEAYAFALDHDFRFFSYGDAMLIL

SEQ ID NO: 65905 - protein, 364 aa, Desulforhopalus singaporensis
  REGION 1..364: note = tr|A0A1H0TGC5|A0A1H0TGC5_9DELT S-adenosylmethionine:tRNA ribosyltransferase-isomerase; OS = Desulforhopalus singaporensis OX=91360 GN=queA PE=3 SV=1
MIPQEDLTLEAYRYHLPKNCIAQHPADRRDTSRLMVLDSGSDSLSHRHFNNLDEYIGPCDMLVVNNTKVFPARLEGVKETGGKAEVFLLELPSEDDCDIGTATATALIKSSKRPKPGSVITIGDNLHCVVSELLEDGKAALELHYNRSHTLAACLLECGQVPLPPYIVRKNGSTKEDAARYQTVYAAQPGAVAAPTAGLHFTDSLLSRITDKGTLLGEVTLHVGYGTFAPVRDNDITQHKIHREFLSIPEETVAKVEKTRERGGKIWAVGTTSVRALEYGALKTGRLQATEEWCDLYIYPGFKFQVTDNLITNFHLPDSSLMFLVSALCGRKTLLNCYKKAIEKGYRFFSYGDAMAIIGDHPRV

SEQ ID NO: 65906 - protein, 358 aa, Desulforhopalus sp.
  REGION 1..358: note = tr|A0A4U0ZMP1|A0A4U0ZMP1_9DELT S-adenosylmethionine:tRNA ribosyltransferase-isomerase; OS = Desulforhopalus sp. IMCC35007 OX=2569543 GN=queA PE=3; SV = 1
MQEDLKLAAYHYDLPQESIAQRPADKRDNSKLMVLNRADNSRQHCHFSDVHEFIQKGDVLVVNNTKVFPARLFGQKATGGKIEVFLLEFPKLLESSTHSGRAHGLLKSSKRPVIGSTITINEELRCQVVDYLEGGKALLEIHFNEDLGLMRCLELAGNVPLPPYINRKEGSTKEDSQRYQTVYADQPGAVAAPTAGLHFTQELLEKLRNKGVTIAEVTLHVGYGTFAPVRESDITRHQIHREYLSIGRDVVKKVNDTKKQGGKIWAVGTTSVRALEFGARETGTLQAMEDWCDLYIYPGFTFKVVDNLITNFHLPDSSLMFLVSALCGRETLLNCYESAIKKGYRFFSYGDAMAIIGS

SEQ ID NO: 65907 - protein, 339 aa, unidentified
  source 1..339: note = Desulforudis audaxviator
  REGION 1..339: note = tr|B1I2I4|B1I2I4_DESAP S-adenosylmethionine:tRNA ribosyltransferase-isomerase OS=Desulforudis audaxviator (strain MP104C) OX=477974 GN=queA PE=3 SV=1
MSESNLRTELFNYHLPWELIAQQPATPRDSSRLLVMDRGSREVSETVFSAVVNWLEPGDVLVINDTKVMKARLFGKKPTGGKLEIFLLHPLGDSRWEALLKPYPKGGVLLLGDSVRVQVLEKTARSTFVLQFPTPEAAVEAMGKWGETPLPPYIKEPLADQDRYQTVLAKVHGSSAAPTAALHFTPELLQRVRDKGVQVVNFTLHMGVGSFRPIKTEYVADHNLPLEFYHLPEETVVAVQQAKRQGSRVVACGTDAVRALESAALKEFRPGSGWTDLFITPGYRFQVVDRIITNLHLPCSSHLVLVSAFASREFALQAYAYAVREKFRFLSFGDATLII

SEQ ID NO: 65908 - protein, 351 aa, Desulfosoma caldarium
  REGION 1..351: note = tr|A0A3N1ULX4|A0A3N1ULX4_9DELT S-adenosylmethionine:tRNA ribosyltransferase-isomerase; OS = Desulfosoma caldarium OX=610254 GN=queA PE=3 SV=1
MSYRLEDYDYDLPEHLVAQKPSPQRDRCALMVLHRITGMIEHRRFVDLPSYFRPGDVLVMNDTRVVPARLLGVKETGGRVELLVLDPHKPPEEGRAKGYRCLVKSSKPAKEGLRLLVEGHVTAQVVQRFENGQVLVSFDHDNLLEFLEAKGRVPLPPYIRRAGTEEREEDRTDYQTVYAQEPGAVAAPTAGLHFTEELLEALKTFGVELVCITLHVGFGTFAPVRTEDIRDHGMHSEVVHVSEEAAARIQTAKQQGRRVLAVGTTVVRTLEWTACRYGAVTPVSGSCDHYIYPGYSFRVVDGMITNFHLPKTSLLILVSAFAGREKILAAYKEAIRRQYRFFSYGDAMLIV

SEQ ID NO: 65909 - protein, 340 aa, unidentified
  source 1..340: note = Desulfosporosinus acididurans
  REGION 1..340: note = tr|A0A0J1FSL8|A0A0J1FSL8_9FIRM S-adenosylmethionine:tRNA ribosyltransferase-isomerase; OS = Desulfosporosinus acididurans OX=476652 GN=queA PE=3; SV = 1
MNVSEFDFDLPEELIAQHPVEPRDASRLMVVDRKTGSIEHHTFRDLVSLLDSGDVLVLNNTRVIPARLIGEKVDSQAKIEVLLLKRLELDVWEALVKPGKRLKVGQKVSFGHGLLVGELQEILENGNRKIRFTYAGVFETILDQLGEMPLPPYITAQLEDQERYQTVYAKERGSVAAPTAGLHFTPKLLADLQAKGVEIVEILLHVGLGTFRPVKVEDVQEHVMHSEYYRVETEAAERINRAKQDGRRVIAVGTTVARTLESVGHEGKVVPGEGWTDIFIYPGYEFKIVDALLTNFHFPKSTLVMLVSALAGRDLILHAYKMAVDQQYRFYSFGDAMFIR

SEQ ID NO: 65910 - protein, 340 aa, Desulfosporosinus acidiphilus
  REGION 1..340: note = tr|I4D999|I4D999_DESAJ S-adenosylmethionine:tRNA ribosyltransferase-isomerase OS=Desulfosporosinus acidiphilus (strain DSM 22704 / JCM 16185 / SJ4) OX=646529; GN = queAPE=3 SV=1
MNVSEFDFDLPEELIAQHPVEPRDASRLMVVDRQSGSLEHHSFRDLLALLDAGDVLVLNNTRVIPARLIGEKEGSQAKMEVLLLKRLELDVWEALVKPGKRLKVGQNVTFGNGLLSCELLEILENGNRKIRFIYTGVFETILDQLGEMPLPPYITVQLEDQERYQTVYAKERGSVAAPTAGLHFTPELISDLQAKGVEIVEILLHVGLGTFRPVKVENVQEHVMHSEYYRVEAEAAERINRAKQEGRRVIAVGTTAARTLESVGRQGRVIPGEGWTDIFIYPGYAFQIVDALLTNFHFPKSTLVMLVSALAGRELILRAYKVAVEQNYRFYSFGDAMFIR

SEQ ID NO: 65911 - protein, 341 aa, unidentified
  source 1..341: note = Desulfosporosinus fructosivorans
  REGION 1..341: note = tr|A0A4Z0R461|A0A4Z0R461_9FIRM S-adenosylmethionine:tRNA ribosyltransferase-isomerase; OS = Desulfosporosinus fructosivorans OX=2018669 GN=queA; PE = 3 SV=1
MNVSEFDFYLPETLIAQHPVEPRDSSRLMVLSRESGGIEHHTFRDLVSLLKTGDVLVLNNTRVIPARLIGEKEGTEGKIEVLLLKMLEFNVWEALVKPGKKLKVGQKVRFGGGILTGELLDILENGNRKIRFTYTGVFETVLDTLGQMPLPPYITAQLEDQGRYQTVYAKERGSVAAPTAGLHFTPELLGELEKKGVEIVEILLHVGLGTFRPVKVENIQDHPMHSEYYRVDLEAAEKINRAKQEGRRVIAVGTTAARTLESVGDDQGRVVPGEGWTDIFIYPGYSFKVVDVLLTNFHFPKSTLVMLVSALAGRELTIKAYELAVLERYRFYSFGDAMLIL

SEQ ID NO: 65912 - protein, 340 aa, Desulfosporosinus hippei
  REGION 1..340: note = tr|A0A1G8GHU6|A0A1G8GHU6_9FIRM S-adenosylmethionine:tRNA ribosyltransferase-isomerase; OS = Desulfosporosinus hippei DSM 8344 OX=1121419 GN=queA; PE = 3 SV=1
MNVSDFDFELPEDLIAQHPVEPRDTSRLMVVNRGSGEIAHHTFRDLKSLLIKGDVLVLNNTRVIPARLIGEKEGTEVKIEVLLLKRLELDVWEALVKPGKRLKIGQKVSFGNGILVGELQEILANGNRRIHFSYSGMFETILDDLGQMPLPPYITAQLEDRERYQTVYAKERGSVAAPTAGLHFTPELLEELRMKGIEIVEILLHVGLGTFRPVKVEDISEHAMHSEYYRVEVEAAERINRAKLEGRRVIAVGTTAARTLESVAQKGQVIPGEGWTDIFIYPGYLFQIVDVLLTNFHFPKSTLVMLVSALAGRELILKAYENAVQERYRFYSFGDSMLIL

SEQ ID NO: 65913 - protein, 340 aa, Desulfosporosinus lacus
  REGION 1..340: note = tr|A0A1M5Z218|A0A1M5Z218_9FIRM S-adenosylmethionine:tRNA ribosyltransferase-isomerase; OS = Desulfosporosinus lacus DSM 15449 OX=1121420 GN=queA; PE = 3 SV=1
MNVSDFDFELPEDLIAQHPVEPRDTSRLMVVNRQSGKIAHHTFRDLSSLLKKGDVLVLNNTRVIPARLIGEKEGTEVKIEILLLKRLKLDVWEALVKPGKRLKVGQKVSFGQGILVGELQEILANGNRKIHFSYSGMFETILDQLGEMPLPPYITAQLEDQERYQTVYAKERGSVAAPTAGLHFTPDLLDELQKTGIEIVEILLHVGLGTFRPVKVEDIRDHAMHSEYYRVDAEAAERINRAKLEGRRVIAVGTTAARTLESVGHEGKVVPGEGWTDIFIYPGYLFQVVDVLLTNFHFPKSTLVMLVSALAGRELILKAYETAVQERYRFYSFGDSMLIL

SEQ ID NO: 65914 - protein, 340 aa, Desulfosporosinus meridiei
  REGION 1..340: note = tr|J7IMC7|J7IMC7_DESMD S-adenosylmethionine:tRNA ribosyltransferase-isomerase OS=Desulfosporosinus meridiei (strain ATCC BAA-275 / DSM 13257 / NCIMB 13706 / S10) OX= 768704 GN=queA PE=3 SV=1
MNVSDFDFELPEDLIAQHPVEPRDTSRLMVVNRESGEIAHHTFRDLKSLLIKGDVLVLNNTRVIPARLIGEKEGTEVKIEVLLLKRLELDVWEALVKPGKRLKIGQKVSFGNGILVGELQEILANGNRRIHFSYSGMFETILDELGQMPLPPYITAQLEDRERYQTVYAKERGSVAAPTAGLHFTPELLDELRMKGVEIVEILLHVGLGTFRPVKVEDISEHAMHSEYYRVEVEAAEQINRAKLEGRRVIAVGTTAARTLESVGHKGKVTPGEGWTDIFIYPGYLFQIVDVLLTNFHFPKSTLVMLVSALAGRELILKAYENAVQERYRFYSFGDSMLIL

SEQ ID NO: 65915 - protein, 340 aa, Desulfosporosinus orientis
  REGION 1..340: note = tr|G7WCR3|G7WCR3_DESOD S-adenosylmethionine:tRNA ribosyltransferase-isomerase OS=Desulfosporosinus orientis (strain ATCC 19365 / DSM 765 / NCIMB 8382 / VKM B-1628) O; X = 768706 GN=queA PE=3 SV=1
MNVSDFDFELPEELIAQHPAEPRDTSRLMVVDRKSGDITHHTFRDLSSLLHKGDILVLNNTRVIPARLIGEKEGTQVKIEVLLLKRLELDLWEALVKPGKRLKVGQKVSFGNGLLMGELREILDNGNRKIYFQFSGVFETILDQLGEMPLPPYITAQLEDRERYQTVYAKEQGSVAAPTAGLHFTPELLEELREKGIEIVEILLHVGLGTFRPVKVEDIREHTMHSEYYRVDPEAAQRINQGKQEGRRIIAVGTTAARTLESACNQGKVIPGEGWTDIFIYPGYSFQVIDALITNFHFPKSTLVMLVSALAGRELILKAYGIAVKEKYRFYSFGDSMLIL

SEQ ID NO: 65916 - protein, 340 aa, Desulfosporosinus sp.
  REGION 1..340: note = tr|A0A1C3F8K6|A0A1C3F8K6_9FIRM S-adenosylmethionine:tRNA ribosyltransferase-isomerase; OS = Desulfosporosinus sp. BG OX=1633135 GN=queA PE=3 SV=1
MNLSEFDFDLPETLIAQHPVEPRDASRLMVVKRDSGGIEHHTFRDLVSFLKTGDVLVLNNTRVIPARLIGEKEGTEAKIEVLLLRRLELDVWEALVKPGKRLKVGQKVSFGQGILTGVLQDILENGNRRIHFSYSGLFETILDQLGQMPLPPYITAQLEDQERYQTVYAKERGSVAAPTAGLHFTPELLSELQKMGVQIVEILLHVGLGTFRPVKVDDIREHAMHSEYYRVDLEAAERINQAKQEGRRVIAVGTTAARTLESAVDHGRVVPGDGWTDIFIYPGYSFKIVDALLTNFHFPKSTLVMLVSALAGRKLILQAYEVAVRERYRFYSFGDAMLII

SEQ ID NO: 65917 - protein, 341 aa, Desulfosporosinus sp.
  REGION 1..341: note = tr|A0A101WJ48|A0A101WJ48_9FIRM S-adenosylmethionine:tRNA ribosyltransferase-isomerase; OS = Desulfosporosinus sp. BRH_c37 OX=1734396 GN=queA PE=3; SV = 1
MNVSEFDFYLPETLIAQYPVEPRDASRLMVLNRDSERIEHHTFRDLGSLLRKGDVLVLNNTRVIPARLIGEKEGTEGKIEVLLLKRLELDVWEALVKPGKRLKVGQKVRFGSGILTGELLDILENGNRRIYFTYSGVFETILDALGQMPLPPYITAQLEDQERYQTVYAKERGSVAAPTAGLHFTPELLGSLQKKGVEIVEILLHVGLGTFRPVKVENIQDHLMHSEYYSVDQEAAEQINRAKQEERRVIAVGTTAARTLESVGNDQGRVIPGVGWTDIFIYPGYSFKVVDVLLTNFHFPKSTLVMLVSALAGRELTIKAYELAVLERYRFYSFGDAMLIL

SEQ ID NO: 65918 - protein, 340 aa, Desulfosporosinus youngiae
  REGION 1..340: note = tr|H5Y1W2|H5Y1W2_9FIRM S-adenosylmethionine:tRNA ribosyltransferase-isomerase OS=Desulfosporosinus youngiae DSM 17734 OX=768710 GN=queA PE=3 SV=1
MNVSEFDFELPEDLIAQHPVEPRDTSRLMVVNRENGGIAHHRFRDLTSLLNGGDVLVLNNTRVIPARLIGEKEGTEVKIEILLLKRLELDVWEALVKPGKRLKVGQRVSFGHGILVGELQEIMENGNRIIRFMYSGVFESILDQLGEMPLPPYITAQLEDRDRYQTVYAKERGSVAAPTAGLHFTPELLDELRKNGVEIVEILLHVGLGTFRPVKVDDIREHAMHSEYYRVGIEAAEQINRAKQEGRRVIAVGTTAARTLESAGHNGKVAPGEGWTDIFIYPGYSFQVVDVLLTNFHFPKSTLVMLVSALAGRELILKAYETAVQERYRFYSFGDAMLIL

SEQ ID NO: 65919 - protein, 358 aa, Desulfotalea psychrophila
  REGION 1..358: note = sp|Q6AJA8|QUEA_DESPS S-adenosylmethionine:tRNA ribosyltransferase-isomerase OS=Desulfotalea psychrophila (strain LSv54 / DSM 12343) OX=177439 GN=queA PE=3 SV=1
MEKDLSREAYYYHLPEENIAQKPADKRDHSKLMVLNTSTGKVEHKIFNNVLEYINPGDMLIVNNTKVFPARLTGHKESGGKVEVFLLELPTYIRPGVSESIALIKSSRKPKVGSTLTINEALSCRVTEQLAGGKARLQLHYDKDVDVTEILAGIGEIPLPPYIKREEGTTPEDVTRYQTVYANVPGAVAAPTAGLHFTEELLQSLRENGIQFGEVTLHVGYGTFAPVRAENIVEHNIHEEFVSVGQETVDKIIATRKAGGKIWAVGTTTVRSLEFAAAQHGGQIAATEGWCALYIYPGFKFQVIDNLITNFHLPDSSLMFLVSALCRREKLLECYQMAIKEDYRFFSYGDAMAVISGE

SEQ ID NO: 65920 - protein, 360 aa, Desulfotalea sp.
  REGION 1..360: note = tr|A0A2G2E0C4|A0A2G2E0C4_9DELT S-adenosylmethionine:tRNA ribosyltransferase-isomerase; OS = Desulfotalea sp. OX=2030813 GN=queA PE=3 SV=1
MQEDLSLDAYHYDLPQGSIAQHPADKRDNSKLMVLQTQDNSLQHRKFSNLHEYLQEGDLLVVNNTKVFPARLFGKKETGGKIEVFLLEFPKLVEGTTNTARTNCLLKSSKRPQLGSTLSISDELHCQVVDYLEDGKALLQLHFNEDLGLMRCLELAGDVPLPPYITRKTGATKEDTKRYQTVYADQPGAVAAPTAGLHFTKELLTKLKDKGVTIGEVTLHVGYGTFAPVRETDITRHQIHREYLSIGQDVVDKVQATKQRGGKVWAVGTTSVRALEFGAKKTGTLQPMEDWCDLYIYPGFTFKVIDNLITNFHLPDSSLMFLVSALCGRETLLNCYDAAIKEDYRFFSYGDAMTIIGDRS

SEQ ID NO: 65921 - protein, 354 aa, Desulfotignum phosphitoxidans
  REGION 1..354: note = tr|S0FUB4|S0FUB4_9DELT S-adenosylmethionine:tRNA ribosyltransferase-isomerase OS=Desulfotignum phosphitoxidans DSM 13687 OX=1286635 GN=queA PE=3 SV=1
MFDLSDYTYDLPEDLIAQTPCDIRSDSRLLHIHRNTHAVSHRRFSDLPGLLHPGDLLVVNDTRVIPARLFGKKATGGRVEVLIIDYAQGMQHLEKTGSFQCNCLVRASKMPKTGSVLYFTEQMTGQVMSVRDGICEILFAGGKQFVAYLKSAGTLPLPPYIRRDPETRPVPEDRENYQTVYAKNDGAVAAPTAGLHFTKPLMAALARKKIDMVHLTLHVGYGTFVPVRVKDIREHQIHSEYYSLSAGAAQKINAAKDQGRRVVAVGTTSVRTLEFTADDQGRVASGTGMCDLYIYPGYRFKCVDAMITNFHLPKSTLLMLVSAFYDRQRMLDAYAAAVAEKYRFFSYGDAMLIE

SEQ ID NO: 65922 - protein, 341 aa, Desulfotomaculum aeronauticum
  REGION 1..341: note = tr|A0A1M6NMQ5|A0A1M6NMQ5_9FIRM S-adenosylmethionine:tRNA ribosyltransferase-isomerase; OS = Desulfotomaculum aeronauticum DSM 10349 OX=1121421; GN = queA PE=3 SV=1
MQLSDFDYHLPEELIAQEPIVRRDQSRLMVVNKNNDQIRHQIFQDILDYLKPGDVLVMNDSKVLPARIFGIKTTTGAKIEVLLLRQIAPNRWETLVKPGKKAKVGERLDFGQGLMTGTIIDHTEVGGRIIEFSHQEPFLQVLERIGTMPLPPYIKKPLDDQKRYQTVYARQEGSAAAPTAGLHFTLELLETIRNQGIQTETVLLHVGLGTFRPVQVENVLEHKMHEEYFEISPQAAETINQAKKRGGRVIAVGTTSVRCLESSSTEEGIVQPGSGLTNIFIYPGYQFKIIDGLITNFHLPKSTLLMLVSALAGREKMLAAYQQAVQERYRFFSFGDAMLII

SEQ ID NO: 65923 - protein, 211 aa, unidentified
  source 1..211: note = Desulfotomaculum aquiferis
  REGION 1..211: note = tr|A0A4Q2WPD3|A0A4Q2WPD3_9FIRM S-adenosylmethionine:tRNA ribosyltransferase-isomerase; OS = Desulfotomaculum aquiferis OX=1397668 GN=N752_04420; PE = 3 SV=1
MNFVTGNLFCKCWSVLEQCRCHLTLKTAGGSKALPDGLCPARGVSSGSYRRASFTPELLGEIKLKGVKLANVLLHVGLGTFRPVQVEDITNHQMHEEFFEMTPESAGIINDARQKGGRVIAVGTTSVRCLETSSNNEGIVIPGSGMTDIFIYPGYKYKLVEGLITNFHLPKSTLLMLVSAFAGRERMLEAYRLAVAERYRFFSFGDAMFII

SEQ ID NO: 65924 - protein, 54 aa, unidentified
  source 1..54: note = Desulfotomaculum aquiferis
  REGION 1..54: note = tr|A0A4V1S4F7|A0A4V1S4F7_9FIRM S-adenosylmethionine:tRNA ribosyltransferase-isomerase; OS = Desulfotomaculum aquiferis OX=1397668 GN=N752_04415; PE = 3 SV=1
MVHKDRDSFEHRQFKDLIGYLKSGDVLVMNDTKVLPARIFGTRISTGAKLKYYC

SEQ ID NO: 65925 - protein, 339 aa, Desulfotomaculum arcticum
  REGION 1..339: note = tr|A0A1I2SJV8|A0A1I2SJV8_9FIRM S-adenosylmethionine:tRNA ribosyltransferase-isomerase; OS = Desulfotomaculum arcticum DSM 17038 OX=1121424 GN=queA; PE = 3 SV=1
MKITDFDYYLPEELIAQDPAPRRDESRLMVLRKSGGAPEHRTFKDIVEYIDPRDVLVINNTKVIPARLWGKKEGTGTVIEVLLLTRINDHTWETLVRPGRRVRPGTKIIFGDELKGTAQEVLAGGCRKISFDYQGQFEPILDKLGSMPLPPYIKKEPADPQRYQTVYARYPGSAAAPTAGLHFTPDLLEQIKNRGTAVTSVILHVGLGTFRPVKVEDITEHKMHSEYYEIPVDTETIINNKQTGGRTIAVGTTTTRCLETSGLPGGQVRSGTGRTDIFIYPGYDFKVVDGLITNFHLPRSTLLMMVSALVGRERLLSAYEEAVRMRYRFFSFGDAMLII

SEQ ID NO: 65926 - protein, 341 aa, unidentified
  source 1..341: note = Desulfotomaculum copahuensis
  REGION 1..341: note = tr|A0A1B7LHL1|A0A1B7LHL1_9FIRM S-adenosylmethionine:tRNA ribosyltransferase-isomerase; OS = Desulfotomaculum copahuensis OX=1838280 GN=queA PE=3; SV = 1
MNLSDFDYHLPPELIAQDPAPQRDQSRLMVLHRENGVVEHRLFRDLVEYLQPGDVLVLNETRVIPARLIGHKTDTGAQIEVLLLRRLDQGRWETLVRPGRRAGPGTRLVFGAGELTGLVMDRTDAGGRVVAFNSARPFDEVLTALGRMPLPPYIKKYPDDPQRYQTIYARQEGSAAAPTAGLHFTAELLRRIEAKGVCIVRVLLHVGLGTFRPVQVADITKHHMHAEYYEITPAAAQAVNAARKQGGRVFAVGTTTTRCLETAAKETGEIVPGAGWTEIFIYPGYCFQAIDGLVTNFHLPRSTLLMMISAFAGREKVLAAYRTAVEAGYRFFSFGDAMLIL

SEQ ID NO: 65927 - protein, 341 aa, unidentified
  source 1..341: note = Desulfotomaculum ferrireducens
  REGION 1..341: note = tr|A0A1S6IW60|A0A1S6IW60_9FIRM S-adenosylmethionine:tRNA ribosyltransferase-isomerase; OS = Desulfotomaculum ferrireducens OX=1833852 GN=queA PE=3; SV = 1
MQVSDFDFYLPEELIAQEPIEKRDQSRLMVISKKDGHIKHKIFSDILEYFQPGDVLVMNDSKVLPARIFGRKSSTGAKIEVLLLRQIAPGQWETLVKPGKKAKIGESLVFGEGLMTGKIIDHTEVGGRIIKFSCQQPFLQVLEQIGTMPLPPYIKKPLADQRRYQTVYARQEGSAAAPTAGLHFTVELLEKIRELGVITETVLLHVGLGTFRPVQVENIAEHRMHEEYYEITPQAAENINRAKQRGGRIIAVGTTSVRCLESSSTVDGVVQPGSGFTNIFIYPGYQFKVIDGLITNFHLPKSTLLMLVSALVGRERILAAYQEAVREKYRFFSFGDAMLII

SEQ ID NO: 65928 - protein, 341 aa, Desulfotomaculum hydrothermale
  REGION 1..341: note = tr|K8EEM4|K8EEM4_9FIRM S-adenosylmethionine:tRNA ribosyltransferase-isomerase OS=Desulfotomaculum hydrothermale Lam5 = DSM 18033 OX=1121428 GN=queA PE=3 SV=1
MKLIDFDYHLPEQLIAQEPLEKRDQSRLMVVHRDNRPLEHKVFRDLVEYLRPGDVLVMNESKVLPARIYGTKTSTGAKIEVLLLRQIAERRWEALVKPGKKARVGDMLDFGEGSMTGSILDHTEAGGRIIEFSHREPFLQVLERLGTMPLPPYIKKPLADRQRYQTVYARQEGSAAAPTAGLHFTHELLDEIRSMGVKTVTVLLHVGLGTFRPVQTEDIEQHVMHSEYYEIAPQAAEEINKAKEQGGRVIAVGTTSVRTLETAGNAKGLVLPGSGMTDIFIYPGYKFKIIDGLITNFHLPKSTLLMLVSALAGREKILAAYRTAVQEKYRFFSFGDAMLII

SEQ ID NO: 65929 - protein, 341 aa, Desulfotomaculum nigrificans
  REGION 1..341: note = tr|F6B449|F6B449_DESCC S-adenosylmethionine:tRNA ribosyltransferase-isomerase OS=Desulfotomaculum nigrificans (strain DSM 14880 / VKM B-2319 / CO-1-SRB); OX = 868595 GN =queA PE=3 SV=1
MRLSDYDYQLPEELIAQEPLVNRDQSRLMVVHKDNHNFEHKHFKDIINYLQPGDVLVLNDTKVIPARIFGTRIATGAKIEVLLLRQLTNNRWETLVKPGKKARVGDILDFGQGQMQGKILDHTDVGGRIIEFSFREPFVQVLERIGTMPLPPYIKKPLADQQRYQTVYARQEGSAAAPTAGLHFTPELLAEIRSRGVITVNVLLHVGLGTFRPVQVEDITQHHMHEEYYEVTPEAAEKINTARERGGRIIAVGTTSVRCLETSANQAGQVLAGSGLTDIFIYPGYRFKVVEGLITNFHLPKSTLLMLVSALAGREKILAAYQEAVRQRYRFFSFGDAMLII

SEQ ID NO: 65930 - protein, 341 aa, Desulfotomaculum putei
  REGION 1..341: note = tr|A0A1M4SQB8|A0A1M4SQB8_9FIRM S-adenosylmethionine:tRNA ribosyltransferase-isomerase; OS = Desulfotomaculum putei DSM 12395 OX=1121429 GN=queA; PE = 3 SV=1
MKLSDFDFHLPEELIAQEPIEKRDQSRLMVVHRDSQAIEHKTFRDLIEYLRPGDVLVMNESKVLPARIFGTRISTGAKIEVLLLRQTSGSRWEALVKPGKKARIGDVLDFGNGLLTGIIVDHTDVGGRIIEFSYREPFLQVLERIGTMPLPPYIKKPLEDQQRYQTVYARQEGSAAAPTAGLHFTHELLEEIRAKGVKTVTVLLHVGLGTFRPVQVEDIELHTMHKEYFEITPQAAEEINRVKGRGGRVIAVGTTSVRTLETSGNETGQVLPGSGMTDIFIYPGYKFKVIDGLITNFHLPKSTLLMLVSALAGREKILAAYRTAVQEKYRFFSFGDAMLII

SEQ ID NO: 65931 - protein, 341 aa, unidentified
  source 1..341: note = Desulfotomaculum reducens
  REGION 1..341: note = sp|A4J540|QUEA_DESRM S-adenosylmethionine:tRNA ribosyltransferase-isomerase OS=Desulfotomaculum reducens (strain MI-1) OX=349161 GN=queA PE=3 SV=1
MQLSDFDFELPEELIAQEPIKQRDQSRLMIVHRDIDRTEHKTFKDLLQYLQPGDVLVMNDSKVLPARIYGEKVSTGAKIEVLLLRQISANQWETLVKPGKRAKIGEILDFGSGKMKGKIVDHTDVGGRVIEFSCQEPFLQVLEQIGSMPLPPYIKKPLTDKQRYQTVYARQEGSAAAPTAGLHFTRELLEEIRNRGVSIVTVLLHVGLGTFRPVQVEDVTSHRMHEEYYEITPQAAEEINQAKLRGGRVIAVGTTSVRCLETSSNEAGQVLPGSGFTDIFIYPGYQFKVIEGLVTNFHLPKSSLLMLISALAGREKILKAYQQAVTEQYRFFSFGDAMLII

SEQ ID NO: 65932 - protein, 341 aa, Desulfotomaculum ruminis
  REGION 1..341: note = tr|F6DN34|F6DN34_DESRL S-adenosylmethionine:tRNA ribosyltransferase-isomerase OS=Desulfotomaculum ruminis (strain ATCC 23193 / DSM 2154 / NCIMB 8452 / DL); OX = 696281GN=queA PE=3 SV=1
MQLTDFDYELPDELIAQEPAAKRDQSRLMVVHKKDKNIEHQQFTDLLKYLRSGDVLVMNDTKVIPARIYGIKISTGAKIEVLLLRQVAENCWEVLVKPGKKARVGERLDFGAGQMQGKILDYTDAGGRVIEFSCREPFLQVLERIGAMPLPPYIKKPLVDQQRYQTVYARQEGSAAAPTAGLHFTPELLAEVKSLGVKIAYVLLHVGLGTFRPVQVEDVTRHTMHQEYYEITDRSAEEINRAKASGGRVIAVGTTSVRCLETSSNEQGQVLAGSGMTEIFIYPGYSFKVIDGLITNFHLPKSTLLMLVSALAGREKVLEAYHRAVEEKYRFFSFGDAMLII

SEQ ID NO: 65933 - protein, 134 aa, Desulfotomaculum sp.
  REGION 1..134: note = tr|A0A3B9SSZ0|A0A3B9SSZ0_9FIRM S-adenosylmethionine:tRNA ribosyltransferase-isomerase; OS = Desulfotomaculum sp. OX=41211 GN=DCK87_02845 PE=3 SV=1
MDILDINEFNYYLPPELIAQEPLPQRDKSRLMVLDRLLSRWEHKYFSDLVNYLTPGDVLVFNETKVIPARLYGRKVNGGARVEVLLLQEKQDGLRWEALVRPARRIKVGNLLTFGEGLLTGKVVEETTAGGRGI

SEQ ID NO: 65934 - protein, 341 aa, Desulfotomaculum sp.
  REGION 1..341: note = tr|A0A117LKC5|A0A117LKC5_9FIRM S-adenosylmethionine:tRNA ribosyltransferase-isomerase; OS = Desulfotomaculum sp. 46_296 OX=1635262 GN=queA PE=3 SV=1
MKTSEFDYDLPESSIAQEPAQQRDASRLMVINRGKPDVEHRFFKDLSEYLNDGDILVINDTKVIPARLNGKKVPGGANIEILLLKPLDERRWEVLVRPGKKVRINDQLVFGDGLFSGIITGHTDSGGRVIEFIFEGNFEDLLQDAGKMPLPPYIKKYTGAPQRYQTIYARQKGSVAAPTAGLHFTEELLEKVQKKGVVLKTVMLHIGLGTFRPVSAEDITMHHMHSEYFEVSADTAHSVNLTREKGGRVVAVGTTTVRCLETAAHEDGRLSATSGWTDLFIYPGYSFKVVDAMITNFHLPRSTLLMMVSAFTGREKILSAYRLAVREKYRFFSFGDVMLIL

SEQ ID NO: 65935 - protein, 380 aa, Desulfovibrio alaskensis
  REGION 1..380: note = sp|Q317N3|QUEA_DESAG S-adenosylmethionine:tRNA ribosyltransferase-isomerase OS=Desulfovibrio alaskensis (strain G20) OX=207559 GN=queA PE=3 SV=1
MHSKHPTDTARRCETGTDSSDTAADDYSLAGYRFELPEEQIAQHPPEHRGASRLFVMDRKSGVNTQASFKDIGSFLPEGALLVANNSRVLPARMLGRRPTGGKVEFLLLTPLPLVQPQTGTDGRSCAEAEGLLRASKRVRPGDVMHFDGLDVEVLHTADFGRCAVRMHWKGDLAGLFLRQGHLPLPPYIRRPDGEDDHSRYQTVYSRQDRLGSVAAPTAGLHFTPELTASLQEQGFGWAEVTLYVGYGTFSPVRAEDIRTHTMHREYMEITEQAAQAINDAKRQGRPVVTVGTTSTRVLEGAWAACGEIRPFTGWTDIFIYPGYRFNVADHIITNFHLPESSLLMMISAFAGREKTLQAYSQAVAAGYRFFSYGDAMLIL

SEQ ID NO: 65936 - protein, 373 aa, Desulfovibrio alkalitolerans
  REGION 1..373: note = tr|S7UQ99|S7UQ99_9DELT S-adenosylmethionine:tRNA ribosyltransferase-isomerase OS=Desulfovibrio alkalitolerans DSM 16529 OX=1121439 GN=queA PE=3 SV=1
MKPDLIATTDEADLLLESYDFELPQEQIAQHPAERRDASRLMILDRSRDKVVSARFADLPDILAERLPDGALLVANDSRVAPARVMGARETGGRVEMLLLTPPPLLRPSPGGASDWTTARAEALLRASKTLRPGETVHFGEDLAARIVAKGEFGRHEIELSWRGELSVVLERCGAIPLPPYIRRDPGVEDATRYQTIYADPQKTGSVAAPTAGLHFTPVIRERLAQRGFEFAFVTLYVGYGTFSPVRAKDLREHRMHAEYIEIPEQTAGMIRTAKMEGRPVLAVGTTSARTLEGAFQASGEIQAFAGSTDIFITPGYRFRVVDHMLTNFHLPLSSLIIMISGFAGRARVLSAYDQAVREGYRFFSYGDAMLIL

SEQ ID NO: 65937 - protein, 364 aa, Desulfovibrio bizertensis
  REGION 1..364: note = tr|A0A1T4X3A7|A0A1T4X3A7_9DELT S-adenosylmethionine:tRNA ribosyltransferase-isomerase; OS = Desulfovibrio bizertensis DSM 18034 OX=1121442 GN=queA; PE = 3 SV=1
MKEIPADFRLSSYSFELPEDQIAQQPAEQRDASRLLVLNREDDSITLTNFSEIVDYLPDNAVVVANNSKVLPARIYGHKPSGGKVEFLLLTPLPLVMENKQSSEDGWHSADVVGLLRASKAPKPGLRVEFTDEFFLEVLERRDFGHSSVRLSWKGDLGTLFKDLGHYPLPPYIRRPDTPEDAKRYQTVYAEDEKLGSVAAPTAGLHFTPEVREKLKAKGIEWKEVTLYVGYGTFSPVRSEDIREHKMHGEYIEVPEDTAEAIRRAKAEGRPVFGIGTTSVRSLEGAFAATGKICAYSGWTDIFIYPGYTFNVVDKMLTNFHLPESSLIIMISALANRDTILKAYATALENKFRFFSYGDAMLIL

SEQ ID NO: 65938 - protein, 370 aa, Desulfovibrio carbinolicus
  REGION 1..370: note = tr|A0A4P6HNZ0|A0A4P6HNZ0_9DELT S-adenosylmethionine:tRNA ribosyltransferase-isomerase; OS = Desulfovibrio carbinolicus OX=296842 GN=queA PE=3 SV=1
MTDAKAPHAPPVPEDLLSSYHFELPDALIAERPCEVRDACRLMVLDRAAGSLDHRVFADLPDLLPEGALLVVNNTKVAPVRLLGKRPTGGAAEFLLLTPVALLTPQTDPATGWTSAPASGLLRVSRPPRPGDRIDFAPDLAVTAVSRGAFGHTEVTLSWRGALPAILTRIGHVPLPPYIRRADDAADRETYQTVYARDDKLGSAAAPTAGLHFTEALLARLAGRGFGLTAVTCHVGLGTFSPVRVEDLRDHAMHKEWIEVSPEAAQAVSQAKAQGRPVIAVGTTAARTLEGTAREAGAFGPFAGFTDIFIRPGHRFAVVDGMVTNFHLPGSSLVIMLAALAGRESILAAYGQAVASGYRFFSYGDAMLVL

SEQ ID NO: 65939 - protein, 368 aa, Desulfovibrio carbinoliphilus
  REGION 1..368: note = tr|G7Q965|G7Q965_9DELT S-adenosylmethionine:tRNA ribosyltransferase-isomerase OS=Desulfovibrio carbinoliphilus subsp. oakridgensis OX=694327 GN=queA PE=3; SV = 1
MPNPLDSAPAPDDLLAAYHFDLPEDRIANRPCARRDACRLMTVNRATGAVGDAVFADLPDLLPEGALLVANNTKVAPVRLLGRKPTGGAAEFLLVTPIALLRATTDPATGWTSAPAAGLLRVSRPPRPGDRIDFAPDLCITATRRGAFGHTEVVLSWQGSLPAVMDRIGHVPLPPYIRRADDAADRETYQTVYASDDKLGSAAAPTAGLHFTEDLLERLRARGFGFATVTCHVGIGTFSPVRVADIREHAMHREWIEVPQEAATAVLAAKAAGRPVVAVGTTAARTLEGVVREAGEVRPFAGETDIFIRPGHAFQVVDGMVTNFHLPGSSLVIMLAALVGRENLLAAYARAIASGYRFFSYGDAMLAL

SEQ ID NO: 65940 - protein, 365 aa, Desulfovibrio desulfuricans
  REGION 1..365: note = tr|B8J2H1|B8J2H1_DESDA S-adenosylmethionine:tRNA ribosyltransferase-isomerase OS=Desulfovibrio desulfuricans (strain ATCC 27774 / DSM 6949) OX=525146; GN = queA PE=3 SV =1
MHIEEADFLLQSYRFDLPQEQVAQFPPEERGGSRLLVMPRNGELTLRHENFCDLPDCLPEGALLIANNSRVLQARLLGTRSTGGKVEFLLLTPLPLVIERARADKNGGLYAEAEGLVRSGGSIREGESFGFGAGIGVTVLESGPFGQRRVRLSWTGDLAAAFAATGHIPLPPYIKRPDAEDDLSRYQTVYSRQDKTGSVAAPTAGLHFTPPLRERLAAKGFEWAEVTLYVGYGTFSPVRSSDIRSHRMHREYIEVPEATALAIARAREEKRPVIAVGTTSLRTLEGVAELCGRVQPYTGWTDIFLYPGRPFRVADGLVTNFHLPESSLLMLVSAFAGRKRVLDAYAEAIANNYRFFSYGDAMLIR

SEQ ID NO: 65941 - protein, 360 aa, Desulfovibrio desulfuricans
  REGION 1..360: note = tr|F0JIP6|F0JIP6_DESDE S-adenosylmethionine:tRNA ribosyltransferase-isomerase OS=Desulfovibrio desulfuricans ND132 OX=641491 GN=queA PE=3 SV=1
MEIPEDYRLSSYDYPLPEDRIAQEPAARRDGSRLLVLDRAARSLTPARFTDLLDYLPDDCLLVANNSRVIPARVFGRKPTGGQVEFLLLTPLPLLTPEERDGWLTVRAEGLLRASKGPKPGATVTFADDFSLTALEAGEFGRWQVELRWKGDLTALFNSLGHLPLPPYIKRPDVEADRERYQTTYADRSKTGSVAAPTAGLHFTPELRERIRAKGIQWAEVTLYVGYGTFSPVRCPDIRDHRMHAEYIEVSEETAEAVRGAKAEGRPVIAVGTTSARTLEGMVREAGSIRQFRGETDIFISPGYTFKVIDGILTNFHLPESSLIIMISALAGRKTILDAYAFALENDFRFFSYGDAMLIR

SEQ ID NO: 65942 - protein, 376 aa, unidentified
  source 1..376: note = Desulfovibrio fairfieldensis
  REGION 1..376: note = tr|A0A0X8JN46|A0A0X8JN46_9DELT S-adenosylmethionine:tRNA ribosyltransferase-isomerase; OS = Desulfovibrio fairfieldensis OX=44742 GN=queA PE=3 SV=1
MIPDEADFSLSSYRFDLPSEQIAQFPPEERGASRLLVLPRKGASDPRPELRHGMFGDLPDCLPENALIIANNSRVLQARLLGSRGTGGKVEFLLLTPLPLVMERARPDKRLGGTGGAEAFSAEAEGLVRCGGSVREGETFAFGAGISVTVLESGPFGQRRVRLAWQGDLAKGFAATGHIPLPPYIKRADGEEDLSRYQTVYARSDKTGSVAAPTAGLHFTPAMREKLADRGFEWAEVTLYVGYGTFSPVRCEDIRSHRMHREYVEVPEATAAAIARAKAQGRPVVAVGTTSVRTLEGVAELCGRVQPYTGWTDIFLYPGRNFRVVDAVLTNFHLPESSLLMLVSAFAGRERMLAAYAEAVTRGYRFFSYGDAMLIK

SEQ ID NO: 65943 - protein, 361 aa, Desulfovibrio ferrireducens
  REGION 1..361: note = tr|A0A1G9C395|A0A1G9C395_9DELT S-adenosylmethionine:tRNA ribosyltransferase-isomerase; OS = Desulfovibrio ferrireducens OX=246191 GN=queA PE=3 SV=1
MKTIPKDLNLESYNFELPEERIAQCPAEKRHGSKLMVLDRITGETEIKSFTDVPDLLPEGALLVANNSKVIPARIFGKKPSGGRVEFLLLSPIPLIVPTATPQGYKAVVKGLLRSSKPTKIGSEVKFDCAMKLTVLGKGQFGLSDVELEWQGSLKEIFETCGKIPLPPYIRRVADETDNERYQTLYACDDKAGSVAAPTAGLHFSKEIEERLREKNIERVEVTLYVGYGTFSPVRTTDIRDHEMHSEYIEIPEETARAIKKAKDEGRPVIAVGTTSARTLEGAFQQTGKICAFKGETNIFIYPGYEFKVVDRMLTNFHLPESSLVIMISALAGRNNVLNGYQKAIENEFRFFSYGDSMYIR

SEQ ID NO: 65944 - protein, 364 aa, unidentified
  source 1..364: note = Desulfovibrio ferrophilus
  REGION 1..364: note = tr|A0A2Z6B1S5|A0A2Z6B1S5_9DELT S-adenosylmethionine:tRNA ribosyltransferase-isomerase; OS = Desulfovibrio ferrophilus OX=241368 GN=queA PE=3 SV=1
MVTVNEQDYLLKSYRYELPEESIAQSPAQKRDLSKLLVVNRESGELEISTFAKLADLIPDNALLVANNSKVLPARIYGSKETGGKVEFLLLTPLPLLMETAETQGDWSSAEVEGLLRASKPPKTGQNIVFSDQFRLEVITRGDFGKSRVRLYWQGELAGLFCELGHYPLPPYIKRPDTAEDAKRYQTIYAEDDKLGSVAAPTAGLHFTPEVRQSLAERGIEWAEVTLYVGYGTFSPVREADIRNHSMHKEYIEISADTALAVANAKAQGRPVLAVGTTSVRTLEGAYAAVGDIAPYAGWTEIYITPGYEFKVADKLLTNFHLPESSLLIMVSALIGREATLSAYKTALENDFRFFSYGDAMLIL

SEQ ID NO: 65945 - protein, 375 aa, Desulfovibrio fructosivorans
  REGION 1..375: note = tr|E1K2C7|E1K2C7_DESFR S-adenosylmethionine:tRNA ribosyltransferase-isomerase OS=Desulfovibrio fructosivorans JJ OX=596151 GN=queA PE=3 SV=1
MSHDIPTTHAVFTVPAAPDDLLASYHFDLPPERIASRPCEKRDACKLMTVSRATGAVADAVFSDLPDLLPAGALLVVNNTKVAPVRLFGHKPSGGAAELLLTTPVALLAPTVDPDTGWAVAPASGLLRVSRPPKPGDRVDFAPDLRLTTTRRGQFGRTDFILHWQGSLPDILSRIGHVPLPPYIRRADDADDRKTYQTVYARDDKLGSAAAPTAGLHFTEGLLTRLRERGFGLAAVTCHVGIGTFSPVRVDDIRDHAMHKEWIEVPGEAAEAVRRAKAEGRPVVAVGTTAARTLEGVVREAGEMTAFAGETDIFIRPGHAFKMVDGMVTNFHLPGSSLVIMLAALVGRQPLLAAYARAVASGYRFFSYGDAMLVL

SEQ ID NO: 65946 - protein, 380 aa, Desulfovibrio gigas
  REGION 1..380: note = tr|T2G9G3|T2G9G3_DESGG S-adenosylmethionine:tRNA ribosyltransferase-isomerase OS=Desulfovibrio gigas (strain ATCC 19364 / DSM 1382 / NCIMB 9332 / VKM B-1759); OX = 1121 448 GN=queA PE=3 SV=1
MRSTVELFPTHAATAATEAHRLETYDFTLPESAIARRPAQQREQARLLVCHRNAGRLEHRTVADLPALLPADAVLVVNNSRVAPARLFGHKETGGRVECLLLTPLPLLERAAQPASRATPGNWQEAPASALLRAAKRPRPGQRILFAEDLHAVMQQEQDFGMADIVLRWQGDLHGILNRIGQLPLPPYLEREPEAEDAERYQTIYARADKTGSVAAPTAGLHLTPAIRAACLARGMDWVEATLHVGYGTFSPVRTANILEHVMHSEYVELSEDAATTIATAKQAGRPVVAIGTTSCRILEGVHRACGRVQAHAGWTDIFLYPGESLHVVDHLVTNFHLPKSTLFMLVCAVAGTTFMHHAYGQALQEGYRFYSYGDAMCIL

SEQ ID NO: 65947 - protein, 366 aa, unidentified
  source 1..366: note = Desulfovibrio gilichinskyi
  REGION 1..366: note = tr|A0A1X7DZZ0|A0A1X7DZZ0_9DELT S-adenosylmethionine:tRNA ribosyltransferase-isomerase; OS = Desulfovibrio gilichinskyi OX=1519643 GN=queA PE=3 SV=1
MKTEKMKTIPKDLNLKSYDFELPEDRIAQCPTEKRHGSKLMVLDKVTGGTELKSFTDVPDILPEGALLVANNSKVIPARIFGKKPSGGRVEFLLLTPVPLIEPTVTPEGNKAIVKGLLRSSKPTKTGSEVIFDCEMNLTVLGKGQFGLSEVELKWKGNLKEIFETYGKIPLPPYIRRAADENDTTRYQTLYACDDKAGSVAAPTAGLHFSKEIEDRLREKNIEKAEVTLYVGYGTFSPVRTTDIREHEMHNEYIEIPETTARAIQKAKDEGRPVIAVGTTSARTLEGAFQQTGKICEFKGETNIFIYPGYEFKVVDRMITNFHLPESSLVIMISALAGRDNVLNAYQKAIENKFRFFSYGDSMYIK

SEQ ID NO: 65948 - protein, 359 aa, Desulfovibrio gracilis
  REGION 1..359: note = tr|A0A1T4XNC1|A0A1T4XNC1_9DELT S-adenosylmethionine:tRNA ribosyltransferase-isomerase; OS = Desulfovibrio gracilis DSM 16080 OX=1121449 GN=queA; PE = 3 SV=1
MHPDHALASYTYELPEENIAQTPAQRRQDSKLMTVNRESGATGIHGFSALPELLPKGALLVANNSKVIPARLFGTKPTGGRVEFLLLTPLPLLEPIQDADGLHMAEAWGLLRASKAPKPGQIITFGPEFFVRVLERGAFGRSRVSLFWRGNLKERMESLGSMPLPPYIRREADQSDMARYQTVYAKDDKAGSVAAPTAGLHFTPAVRTALQERGCEWAEVTLYVGYGTFSPVREPDIRDHVMHEEYIEVPRETAEAVQRAKDQGRPVVAVGTTSARSLEGMHRALGHIGPYKGMTDIFIKPGYTFQVVDNLLTNFHLPESSLLIMVSALVGREAILNAYSEALRNDFRFFSYGDAMLIS

SEQ ID NO: 65949 - protein, 361 aa, Desulfovibrio hydrothermalis
  REGION 1..361: note = tr|L0RBU5|L0RBU5_9DELT S-adenosylmethionine:tRNA ribosyltransferase-isomerase OS=Desulfovibrio hydrothermalis AM13 = DSM 14728 OX=1121451 GN=queA PE=3; SV = 1
MKIKPEDFLLENYNFELPENQIAQCPAEMRHGSKLMVLDQKSGETEIKSFTDLPDLLPEGALLVANNSKVIPARIFGQKPTGGRVEFLLLTPLPLIKPTVTPKGFKAVVRGLLRASKSPKPGGVVTFECGMKLTVLGKGKFGLSDVELEWQGDLKSIFETCGNIPLPPYIRRAADETDNERYQTLYACDEKAGSVAAPTAGLHFSEEINKKLKAKGIERAEVTLYVGYGTFSPVRAENIHDHEMHHEYIEIPEETAKSVIKAKEEGRPVIAVGTTSARTLEGAFRETGKVCKFKGETDIFIYPGFKFQVVDRMITNFHLPESSLVIMISALAGRENVLSAYRKAVENEFRFFSYGDSMYIK

SEQ ID NO: 65950 - protein, 365 aa, unidentified
  source 1..365: note = Desulfovibrio legallii
  REGION 1..365: note = tr|A0A1G7R0K2|A0A1G7R0K2_9DELT S-adenosylmethionine:tRNA ribosyltransferase-isomerase; OS = Desulfovibrio legallii OX=571438 GN=queA PE=3 SV=1
MPIEEADFWLESYNFDLPQERIAQFPPEERGNSRLMALPRTGPLELTHAQFADLPDLLPPGALLVANNSRVLQARLLGTRATGGKVEFLLLTPLPLVLERARPDKLGGLAAEADGLVRSGGSIRDGESFDFGAGIKVTVLESGPFGQRRVRLHWTGDLARAFAATGHIPLPPYIKRPDGEEDKSRYQTVYAREDKTGSVAAPTAGLHFTEDLRARLAARGFQWAEVTLYVGYGTFSPVRSQNIRAHRMHREYIEVPEATALAVARAKAEKRPVVAVGTTSVRALEGVAELCGRVQPFAGWTDIFLYPGQRFRVTDALVTNFHLPESSLLMLVSAFAGRKRVLAAYAEAVARGYRFFSYGDAMLIR

SEQ ID NO: 65951 - protein, 386 aa, Desulfovibrio litoralis
  REGION 1..386: note = tr|A0A1M7TD12|A0A1M7TD12_9DELT S-adenosylmethionine:tRNA ribosyltransferase-isomerase; OS = Desulfovibrio litoralis DSM 11393 OX=1121455 GN=queA; PE = 3 SV=1
MAIDFRNERLKKIALDNSCVHTDGLEIDAEDFQLSSYDFNLPESLVAQTPDEKRDNSKLLVLDRKNNELIVSSFNELASFLPSESLIVTNNVKVAPLRLKGVTKSGGRLEFLLLTPLPLIDNSHATQGKFNARVEGLMRNIKKFKVGETYQFNEKLKFTILEKQEFGRCIVNLEWEAPLTERLNEQGSLPLPPYIKRELTKSDTERYQTIFAKDEKIGSAAAPTAGLHFTPALKAELLAKGHSWTELTLYVGYGTFSPVRSEDIREHLMHSEYFEINEKSAELINNQRANKKPVVAIGTTSTRTLEGVFAKRGKIEACTDTTNIFVYPGKKIEVVDHLITNFHLPKSSLLMLVSAFVGRKRLLSAYEKAIEERLRFFSYGDAMLIL

SEQ ID NO: 65952 - protein, 370 aa, Desulfovibrio magneticus
  REGION 1..370: note = tr|K6GQ45|K6GQ45_9DELT S-adenosylmethionine:tRNA ribosyltransferase-isomerase OS=Desulfovibrio magneticus str. Maddingley MBC34 OX=1206767 GN=queA PE=3 SV=1
MTDAKAPPAPPALEDLLASYHFELPEALIAERPCEVRDACRLMVLDRAAGSVAHRVFADLPDLLPEGALLVVNNTKVAPVRLLGKRPTGGAAEFLLLTPVALLRPQTDPATGWTHAPASGLLRVSRPPRPGDRIDFAPDLAVTAVSRGAFGHTEVTLSWRGELPAILTRIGHVPLPPYIRRADDAADRETYQTVYARDDKLGSAAAPTAGLHFTEELLARLAGRGFGLAAVTCHVGLGTFSPVRVEDLRDHVMHKEWIEVSPEAASAVSRAKAEGRPVIAVGTTAARTLEGASREAGAFGPFAGFTDIFIHPGHRFAVVDGMVTNFHLPGSSLVIMLAALAGRESILAAYGQAVASGYRFFSYGDAMLVL

SEQ ID NO: 65953 - protein, 370 aa, Desulfovibrio magneticus
  REGION 1..370: note = tr|C4XJ67|C4XJ67_DESMR S-adenosylmethionine:tRNA ribosyltransferase-isomerase OS=Desulfovibrio magneticus (strain ATCC 700980 / DSM 13731 / RS-1) OX=573370 GN=queA P E=3 SV=1
MTDAKAPPAPPVPEDLLASYHFELPDALIADRPCEVRDACRLMVLDRAAGSLDHRVFTDLPDLLPEGALLVVNNTKVAPVRLLGKRPTGGAAEFLLLTPVALLKPETDPATGWTSAPAAGLLRVSRPPRPGDRIDFAPDLAVTAVSRGAFGHTEVTLSWRGALPEILTRIGHVPLPPYIRRADDAADRETYQTVYARDDKLGSAAAPTAGLHFTEELLARLAGRGFRLTAVTCHVGLGTFSPVRVEDLRDHAMHQEWIEVSPEAASAVSRAKAEGRPVIAVGTTAARTLEGAVREAGAFGAFAGFTDIFIRPGHRFAVVDGMVTNFHLPGSSLVIMLAALAGRESILAAYGQAVASGYRFFSYGDAMLVL

SEQ ID NO: 65954 - protein, 379 aa, Desulfovibrio mexicanus
  REGION 1..379: note = tr|A0A238ZTW2|A0A238ZTW2_9DELT S-adenosylmethionine:tRNA ribosyltransferase-isomerase; OS = Desulfovibrio mexicanus OX=147047 GN=queA PE=3 SV=1
MRHDTTPRDESDVPEPFRLSSYVYELPEDRIARRPAERRDGSRLLYLDRSAPAADPRQFAELPELLAAKYPQGGLLVANNSRVFPARVFGRRATGGRVELLLLTPLPLLHVKPLPDGRLCAEAEGLVRTAKRMKEGEAAQFEAPQGMEFQVVLLQRGEYGRCLLRLEWRGGIEAILNEIGHMPLPPYLEREDDAADRERYQTTYAAAAKAGSVAAPTAGLHFTPEVRARLAQRGFRWAEVTLYVGYGTFSPVRAADIRQHKMHSEYVEVPDETAATIRDAKASGLPVIAVGTTSARSLEGMFAARGSVEAFSGETDIYIRPGGVFNVVDALLTNFHLPESSLLIMVSTLAGRERIMAAYAVALARGFRFFSYGDAMLIV

SEQ ID NO: 65955 - protein, 370 aa, Desulfovibrio piger
  REGION 1..370: note = tr|B6WVH0|B6WVH0_9DELT S-adenosylmethionine:tRNA ribosyltransferase-isomerase OS=Desulfovibrio piger ATCC 29098 OX=411464 GN=queA PE=3 SV=1
MPPVFVSEDDFLLQNYTYDLPQEQIAQYPPEQRGASRLLTMRRNGALDLEHHMFSDLPDCLPEGALLVANNSRVLQARLLGSRSTGGKVEFLLLTPLPLVRAAATPVKGREDTWSAEVNGLVRSGGSVREGETLHFGAGISVTILECGTFGHRRVRMCWKGDVADAFAATGHIPLPPYIKRSDAEEDFSRYQTIYSREEKTGSVAAPTAGLHFTDELRETLRRRGFQWAEVTLYVGYGTFSPVRCEDIRNHQMHREYVELPEETANAIAEAKAQHRPVIAVGTTSVRTLEGVAQVCGRAQPFAGWTDIFLYPGRPFRVVDGIITNFHLPESSLLMLVSAFAGRKRILEAYQEAVKKGYRFFSYGDAMLIR

SEQ ID NO: 65956 - protein, 375 aa, Desulfovibrio piger
  REGION 1..375: note = tr|A0A1K1LGR8|A0A1K1LGR8_9DELT S-adenosylmethionine:tRNA ribosyltransferase-isomerase; OS = Desulfovibrio piger OX=901 GN=queA PE=3 SV=1
MKEKTMPPVFVSEDDFLLQNYTYELPQEQIAQYPPDQRGASRLLTMRRSGALGLEHHMFSDLPDCLPEGALLVANNSRVLQARLLGSRSTGGKVEFLLLTPLPLVRADATPVKGREDTWCAEVSGLIRSGGSVREGETLHFGAGISVTILECGTFGHRRVRMCWKGDVAEAFAATGHIPLPPYIKRSDAEEDFSRYQTIYAREEKTGSVAAPTAGLHFTDELRETLRRRGFQWAEVTLYVGYGTFSPVRCEDIRNHQMHREYVELPEETADAIAEAKARHRPVIAVGTTSVRTLEGVAQVCGRAKPFAGWTDIFLYPGRPFRVVDGIITNFHLPESSLLMLVSAFAGRKRILEAYQEAVKEGYRFFSYGDAMLIR

SEQ ID NO: 65957 - protein, 366 aa, Desulfovibrio salexigens
  REGION 1..366: note = tr|C6BUS8|C6BUS8_DESAD S-adenosylmethionine:tRNA ribosyltransferase-isomerase OS=Desulfovibrio salexigens (strain ATCC 14822 / DSM 2638 / NCIB 8403 / VKM B-1763); OX = 526222 GN=queA PE=3 SV=1
MKTEKMNINTEDFFLKSYDFELPEEQIAQCPAVMRHGSKLMVLDQKTGETEIKNFTDIVDLLPEGALLVANNSKVVPARIFGKKPTGGRVEFLLLTPLPLIKAEPTSDGYKAQARGLLRASKGPKTGDIIYFDGGLKLTVLGKGKFGLSEVELEWSGDLKKIFEECGKIPLPPYIRRAADETDNDRYQTLYACDEKAGSVAAPTAGLHFSEEINEKLKAKNIERAEVTLYVGYGTFSPVRAEDIRDHEMHHEYIEIPEETAAAVIKAKEEGRPVIAVGTTSARTLEGAFQQTGEICEFKGETNIFIYPGFEFKVVDRMITNFHLPESSLVIMISALAGRINVLNAYTEAVDNKFRFFSYGDSMYIK

SEQ ID NO: 65958 - protein, 372 aa, Desulfovibrio sp.
  REGION 1..372: note = tr|I2Q496|I2Q496_9DELT S-adenosylmethionine:tRNA ribosyltransferase-isomerase OS=Desulfovibrio sp. U5L; OX = 596152 GN=queA PE=3 SV=1
MPNPLDSAPTPAPTPDDLLAAYHFDLPDDRIAERPCERRDACKLMTVSRATGEVGHAVFADLPDLLPEGALLVANNTKVAPVRLLGHKSTGGAAEFLLVTPIALLRPTADPATGWTSAPAAGLLRVSRPPRPGDRIDFAPDLFITATRRGAFGHTEVVLSWRGSLPAVMDRIGHVPLPPYIRRADDASDRETYQTVYARDDKLGSAAAPTAGLHFTEDLLLRLKARGFGFATVTCHVGIGTFSPVRVADIREHAMHKEWIEVPDEAATAVLAAKAEGRPVVAVGTTAARTLEGVVREAGAVRPFAGETDIFIRPGHAFRVVDGMVTNFHLPGSSLVIMLAALVGRENLLAAYGRAVASGYRFFSYGDAMLAL

SEQ ID NO: 65959 - protein, 368 aa, Desulfovibrio sp.
  REGION 1..368: note = tr|S7U3W2|S7U3W2_9DELT S-adenosylmethionine:tRNA ribosyltransferase-isomerase OS=Desulfovibrio sp. X2; OX = 941449 GN=queA PE=3 SV=1
MNMSDAPDELLASYDFALPEELIAQHPAPRRDASRLMVVDRAGEGEELARFADLPRILSERLPEGALLVANNSRVAPARLFGARASGGRVEMLLLTPPPLLEPEPDAVPGFSRARAEVLLRASKTLRRDEELDFGPDLVVRVGARGEFGRHEVELSWRGELAAVLAKQGCMPLPPYIRREAAGDDMERYQTVYASADKAGSVAAPTAGLHFTPEVRADLAARGIEWAEVTLYVGYGTFSPVRAADIRDHRMHAEWVEVPEATAAAVARAKAEGRPVLAVGTTSVRSLEGAFAQTGEPAPFCGTTSIFIRPGFRFRVVDHMLTNFHLPLSSLIIMVSAFAGRVRILSAYDRAVRERFRFFSYGDAMLIL

SEQ ID NO: 65960 - protein, 371 aa, Desulfovibrio vulgaris
  REGION 1..371: note = sp|Q725S3|QUEA_DESVH S-adenosylmethionine:tRNA ribosyltransferase-isomerase OS=Desulfovibrio vulgaris (strain Hildenborough / ATCC 29579 / DSM 644 / NCIMB 8303); OX = 8 82 GN=queA PE=3 SV=1
MKDDATGADFLLSGYDYELPEDRIAQHPPVERGLSRLLVLDRTTGERIHARFADLAEHLPEGALLVANNSKVLPARLLGHRPTGGKVEFLLLTPLPLVTPLAAGPASGTVEPGWCVAEVEGLLRASKPLRPGDTLSFGDDLRVEVVHKGEFGRSMVLLFWRGELATLFAREGHLPLPPYIRRADGDEDRDRYQTVFAREDRLGSVAAPTAGLHFTPSLRETLTARGHQWAEVTLYVGYGTFSPVRCADIRDHAMHREYVEVTAETVEVIRRAKADGRPVVAVGTTSCRVLEGVATAKGTLEPYAGWTDIFMYPGYTFKVVDHLITNFHLPESSLLMLVSAFAGRERVLATYREAIEEGYRFFSYGDAMLLR

SEQ ID NO: 65961 - protein, 371 aa, Desulfovibrio vulgaris
  REGION 1..371: note = sp|A1V9F1|QUEA_DESVV S-adenosylmethionine:tRNA ribosyltransferase-isomerase OS=Desulfovibrio vulgaris subsp. vulgaris (strain DP4) OX=391774 GN=queA PE=3 SV=1
MKDDATGADFLLSGYDYELPEDRIAQHPPVERGLSRLLVLDRTTGERIHARFADLAEHLPEGALLVANNSKVLPARLLGHRPTGGKVEFLLLTPLPLVTPLAAGPASGTVEPGWCVAEVEGLLRASKPLRPGDTLSFGDDLRVEVVHKGEFGRSMVLLFWRGELATLFAREGHLPLPPYIRRADGDEDRDRYQTVFAREDRLGSVAAPTAGLHFTPSLRETLTARGHQWAEVTLYVGYGTFSPVRCADIRDHAMHREYVEVTAETVEAIRRAKADGRPVVAVGTTSCRVLEGVATAKGTLEPYAGWTDIFMYPGYTFKVVDHLITNFHLPESSLLMLVSAFAGRERVLATYREAIEEGYRFFSYGDAMLLR

SEQ ID NO: 65962 - protein, 364 aa, unidentified
  source 1..364: note = Desulfovibrionaceae bacterium
  REGION 1..364: note = tr|A0A2V2G8T4|A0A2V2G8T4_9DELT S-adenosylmethionine:tRNA ribosyltransferase-isomerase; OS = Desulfovibrionaceae bacterium OX=2049043 GN=queA PE=3; SV = 1
MSIDPFSLDSYDYDLPEERIAQYPPERRGSSRLLVLDKNGPDRVDALFADLPAYLPEGAVLVANNSKVAPARLLGARPSGGKAELLLLTPPPLVERAARSEGGDGFSAPAEALLKPGRSIHPGDRLGFGPDIEVLVEAKHDFGRHDVRLFWRGSLTARLEETGRLPLPPYIRREQGPDDRTRYQTLYARPDKAGSVAAPTAGLHFTDALRARLADLGFPWLEVTLHVGYGTFSPVREQDIREHPMHREFVELPAETARAVNEARRQGRPVIAVGTTSARTLEGVALASGGLPDEGWQGWTDIFIYPGFRFQVLDGLITNFHLPKSSLLMLVSALAGRETVLDAYAHAVRKKYRFFSYGDAMLIR

SEQ ID NO: 65963 - protein, 375 aa, unidentified
  source 1..375: note = Desulfovibrionaceae bacterium
  REGION 1..375: note = tr|A0A1J4T2S6|A0A1J4T2S6_9DELT S-adenosylmethionine:tRNA ribosyltransferase-isomerase; OS = Desulfovibrionaceae bacterium CG1_02_65_16 OX=1805130; GN = queA PE=3 SV=1
MRTHQAPPENPDIPPEFRLSSYVYELPEERIARRPADTRDGSRLLVLDREADTRRVDEFRHLPDILSQRFPKGALLVANNSRVFPARIFGRRATGGRVELLLLTPLPLLHVKRLPDGRNSAEAEGLVRTAKRMKEGETALFDAPLTVTLLARGDFGRCRVRLEWAGDIAEIFNNIGHMPLPPYLEREDDASDRERYQTVYADADKAGSVAAPTAGLHFTPEVRAKLAGLGIGWVEVTLYVGYGTFSPVREGDIRQHKMHAEYVEVPETTAEAVRRAKAEGVPVVAVGTTSARSLEGMFAARGEVAAFAGETDIYILPGRAFKVVDALLTNFHLPESSLLIMVSALAGRERIMAAYALALASGLRFFSYGDAMLIV

SEQ ID NO: 65964 - protein, 341 aa, Desulfurella acetivorans
  REGION 1..341: note = tr|W0JF09|W0JF09_DESAE S-adenosylmethionine:tRNA ribosyltransferase-isomerase OS=Desulfurella acetivorans A63 OX=694431 GN=queA PE=3 SV=1
MNLDTFDYNLPKELIAQKPHIPPDECRLFVYNKKNKSISHKIFKDIIEFLSPGDLIVLNNTKVIPAKLSAKKESGGSIGILLIEQIEKNTYYCFVKGKIKHDTKINLAKNLKATIIQTNGQKKIIKFDTTNDIREYLYEIGSMPLPPYIKRKNKEFDALDKQYYQTVFAEIEGSIAAPTASLHFTSNLLDQIKQKGIQIAYITLHVGLGTFKSVETQNIQEHKMHEEYFEISAKTAQIYNKAKLENRNILPVGTTVVRALESVSNDQGYIKPTSAKTDIFIYPGYKFKTVNNILTNFHLPKSTLIMLVAALIGIEDTHFCYKKAIEEKYRFFSYGDVFLVI

SEQ ID NO: 65965 - protein, 341 aa, unidentified
  source 1..341: note = Desulfurella amilsii
  REGION 1..341: note = tr|A0A1X4XZF3|A0A1X4XZF3_9DELT S-adenosylmethionine:tRNA ribosyltransferase-isomerase; OS = Desulfurella amilsii OX=1562698 GN=queA PE=3 SV=1
MNLDIFDYALPKELIAQSPHIPPDECKLFIYNKKTKKISHKIFRDIIDYLSPNDLIVLNNTKVIPAKLSATKESGGSLQILLIEQIEKNIYYCFVKGKIKHDTKVILPKSLKATILQTNEQKKIIKFEINSDIKDYLYDIGSMPLPPYIKRKDNQLDALDKQYYQTVFAEIEGSIAAPTASLHFTSKLLEKIKQKGIKIAYITLHVGLGTFKSVETQNIKEHKMHEEYFEISPKTAQIYNKALLENRTILPVGTTVVRALESASNTQGFLKPISTKTDIFIYPGYQFKTVKNILTNFHLPKSTLIMLICALIGVENTHFCYQKAIEERYRFFSYGDAFLVI

SEQ ID NO: 65966 - protein, 341 aa, Desulfurella multipotens
  REGION 1..341: note = tr|A0A1G6QZ26|A0A1G6QZ26_9DELT S-adenosylmethionine:tRNA ribosyltransferase-isomerase; OS = Desulfurella multipotens OX=79269 GN=queA PE=3 SV=1
MNLDTFDYNLPKELIAQKPHIPPDECRLFVYNKKNKSISHKIFKDIIEFLSPGDLIVLNNTKVIPAKLSAKKESGGSIGILLIEQIEKNTYYCFVKGKIKHDTKINLAKNLKATIIQTNGQKKIIKFDTTNDIREYLYEIGSMPLPPYIKRKNKEFDVLDKQYYQTVFAEIEGSIAAPTASLHFTSNLLDQIKQKGVQIAYITLHVGLGTFKSVETQNIQEHKMHEEYFEISAKTAQIYNKAKLENRNILPVGTTVVRALESASNDKGYIKPTSAKTDIFIYPGYKFKTVNNILTNFHLPKSTLIMLVAALIGIEDTHFCYKKAIEEKYRFFSYGDAFLVI

SEQ ID NO: 65967 - protein, 341 aa, Desulfurella sp.
  REGION 1..341: note = tr|A0A2N7PZT6|A0A2N7PZT6_9DELT S-adenosylmethionine:tRNA ribosyltransferase-isomerase; OS = Desulfurella sp. OX=1962857 GN=queA PE=3 SV=1
MNLDTFDYNLPKELIAQKPHIPPDECRLFVYNKKNKSISHKIFKDIIEFLSPGDLIVLNNTKVIPAKLSAKKESGGSIGILLIEQIEKNTYYCFVKGKIKHDTKINLAKNLKATIIQTNGQKKIIKFDTTNDIREYLYEIGSMPLPPYIKRKNKEFDALDKQYYQTVFAEIEGSIAAPTASLHFTSNLLDQIKQKGIQIAYITLHVGLGTFKSVETQNIQEHKMHEEYFEISAKTAQIYNKAKLENRNILPVGTTVVRALESASNDQGYIKPTSAKTDIFIYPGYKFKTVNNILTNFHLPKSTLIMLVAALIGIEDTHFCYKKAIEEKYRFFSYGDAFLVI

SEQ ID NO: 65968 - protein, 351 aa, unidentified
  source 1..351: note = Desulfuribacillus alkaliarsenatis
  REGION 1..351: note = tr|A0A1E5G1M8|A0A1E5G1M8_9BACL S-adenosylmethionine:tRNA ribosyltransferase-isomerase; OS = Desulfuribacillus alkaliarsenatis OX=766136 GN=queA; PE = 3 SV=1
MKVQDFDFYLPEELIAQSPLSDRAGSRLMVVDTEANKIYDKQFADLYDSIKSGDTLVLNDTRVIPARLLGRSIDTGSKIEFLLLKPLEDDRWEILVKPGKKAKVGRVFEFGNGSLKAEIIDITPAGGRIVHFQYNGIFNEILDELGSMPLPPYITEQLEDKERYQTVYSKYRGSVAAPTAGLHFTKEMLDSLQDKGVNIAYVTLHVGLGTFRPVQVDDVEEHVMHSEYYEISKDTADIINRTKASGGRVISVGTTSTRVLETVGQFDGIVTETSGWTDIFIYPGYKFKVVDGLLTNFHLPKSTLIMLVSAFANQDLILKAYEHAVSERYRFFSFGDAMLLMKGAGKNGRNI

SEQ ID NO: 65969 - protein, 345 aa, unidentified
  source 1..345: note = Desulfuribacillus stibiiarsenatis
  REGION 1..345: note = tr|A0A1E5L379|A0A1E5L379_9BACL S-adenosylmethionine:tRNA ribosyltransferase-isomerase; OS = Desulfuribacillus stibiiarsenatis OX=1390249 GN=queA; PE = 3 SV=1
MKVQDFDFDLPEELIAQSPLKDRESSRLMVIDTLKQEIYDRTFSDIREFLQEGDTLVLNDTRVIPARLLGEKTGSGGKIEFLLLKPTGEDCWEILVKPGRKAKVGATFEFGQGKLKAEVLEITPAGGRIVKFYFKGIFQEILDELGNMPLPPYITETLQDKERYQTVYSKNPGSVAAPTAGLHFTKEIIQELQAKGIRIAYVTLHVGLGTFRPVQVENILDHDMHSEYYEITQETADIINATKEQGGRVISVGTTSTRVLETVGQKGYPIQEESGWTSIFIYPGYRFTVVDGLLTNFHLPKSTLIMLVSAFANRELILKAYNHAINEQYRFFSFGDAMLLLKGAE

SEQ ID NO: 65970 - protein, 339 aa, Desulfurispirillum indicum
  REGION 1..339: note = tr|E6W2L7|E6W2L7_DESIS S-adenosylmethionine:tRNA ribosyltransferase-isomerase OS=Desulfurispirillum indicum (strain ATCC BAA-1389 / S5) OX=653733 GN=queA PE=3 SV=1
MSEYLCDYHVDIPAELIAQEPLAQRDASRLLVLSRALAPAIVGESTFSRLSEYLRPGDLLVFNDTRVIPARLKGRKSTGGAVEIFLVEPCAPRCWRVLTRGKKLVPGTLVHIGDGVEAVIEERDGEMAVARFSVDDQELFACGAIPLPPYIKREADSRDNQRYQSVFAARDGAVAAPTASLHFTSAIVEGLRQRGVRTATITLHVGLGTFLPVKSERIDEHRMHSEHFHVPAQTLDLVADTRRSGGRVIAVGTTVVRALESCFGHTPLRTGGSTDIFIRPGYSFAVIDGMVTNFHLPDSTLILLVSAFYGRENIQQIYQYAVSQRYRFFSYGDGMLFLP

SEQ ID NO: 65971 - protein, 358 aa, Desulfurivibrio alkaliphilus
  REGION 1..358: note = tr|D6Z6L0|D6Z6L0_DESAT S-adenosylmethionine:tRNA ribosyltransferase-isomerase OS=Desulfurivibrio alkaliphilus (strain DSM 19089 / UNIQEM U267 / AHT2); OX = 589865 GN=qu eA PE=3 SV=1
MTAYSLDDYDYHLPPELIAQQPPPRRDGSRLLVCDGRRDFALSDQLFPDMLSWLAPGDLLVFNDTRVFPARLSGHKESGGRVELLLLAYPVLSDVSGPGATEAEAWGLLKSSKGARPGTWLQFGDDLRALVEEKGEGGKVRVRLVLGAPLADCLARYGRMPLPPYIKRENEQEEDRRRYQTIYAQTPGAVAAPTAGLHFTQELLGQIKKKGVGMAHITLHVGYGTFAPVRSQDIRRHQIHAEEYLISRENAELINRTKAAGGRIWAVGTTSVRTLEAAAGEDGRVNPGSGSCRLYIYPGYSFKVVDNLLTNFHLPRSSLLFLVSALAGRENILRAYRHAVAERYRFFSYGDAMAIIRK

SEQ ID NO: 65972 - protein, 363 aa, Desulfurivibrio sp.
  REGION 1..363: note = tr|A0A3A6P8A6|A0A3A6P8A6_9DELT S-adenosylmethionine:tRNA ribosyltransferase-isomerase; OS = Desulfurivibrio sp. OX=2093369 GN=queA PE=3 SV=1
MAENIPLIYDIDSYRFNLPPERIAQQPAVNRDRSRLLALNPATGAVSDLHFTDIVDFFSPHDLLVVNNTRVFPARLLGRKESGGKVELLILHYPQETLPAADKHGQVAVTGLLKSSKGCRPGQRIIFADELTAEVVELYAAGKARLQLHFQGELAPLLDKYGQLPLPPYIRREQGEEPQDRERYQTVFAAATGAIAAPTAGLHFTDELLSAIARKGVERESVTLHVGYGTFAPVRVQDIRQHRIHSEFLTVSAGTAAKINEVRDRGGRLWAVGTTTVRALEFAADDAGRVQAREGWCDLYIYPGYQFKVVRNLITNFHLPGSSLLFMVSALAGRERVLAAYAHAVARGYRFFSYGDAMILVGG

SEQ ID NO: 65973 - protein, 343 aa, Desulfurobacterium atlanticum
  REGION 1..343: note = tr|A0A238YV37|A0A238YV37_9BACT S-adenosylmethionine:tRNA ribosyltransferase-isomerase; OS = Desulfurobacterium atlanticum OX=240169 GN=queA PE=3; SV = 1
MKVSLFDYELPEELIAKEPAEPRDSARLLVLNRKTGEIEHRIFRDIIHYMNKGDVLVINNTKVIPARLIGKFPTGGSAEIFLVRQIKENVWEVIGKPGRKLKPGKKVIFDENFYCEIVERKEEGKRIVEFFTTDGEATLNKIYKIGKMPLPPYINREETEKDKEEYQTVFAKEEGAVAAPTAGLHFTAELLEKLKEKGVIIKEITLHVGLGTFKPVKVEEVEEHKMHYESYKVPKDTAIEIEKAKKEGRRVIAVGTTVVRTLETCFNEKGIATSLEGSTNLFIYPGYNFKVIDGLITNFHLPKSTLLMLVSAFAGRERILNAYEEAVKKRYRFFSYGDAMFIY

SEQ ID NO: 65974 - protein, 341 aa, unidentified
  source 1..341: note = Desulfurobacterium indicum
  REGION 1..341: note = tr|A0A1R1MJF0|A0A1R1MJF0_9BACT S-adenosylmethionine:tRNA ribosyltransferase-isomerase; OS = Desulfurobacterium indicum OX=1914305 GN=queA PE=3 SV=1
MKVSLFNYELPKNLIAKFPVEPRDSAKLLLLNRKTGEIEHKIFRDIKNYLKPGDVLVINNTKVIPARLLGKFFTGGKVEIFLTRQIEKDIWEAIGKPGKRLKPGKKVIFDNELSCEILKIEDEGKRIIRFHSPKSTLEKIYEIGHVPLPPYIEREDTEKDKEEYQTVFAKEEGAVAAPTAGLHFTEELLKQLKEKGIIIKEITLHVGLGTFRPVKVNEVEKHKMHYESFKIPQDTAKEIEKAKSEGRRVIAVGTTVVRTLESGFEKGGKVKILEGSTNLFIYPGYNFKVVDAIITNFHLPKSTLLMLVCAFAGREKVLNAYKEAVKHGYRFYSYGDAMFIY

SEQ ID NO: 65975 - protein, 343 aa, Desulfurobacterium sp.
  REGION 1..343: note = tr|A0A432QUD5|A0A432QUD5_9BACT S-adenosylmethionine:tRNA ribosyltransferase-isomerase; OS = Desulfurobacterium sp. OX=2004706 GN=queA PE=3 SV=1
MKVSDFDYELPKELIAKFPVEPRDTARLMVLHRDSGKIEHRIFRDIVEYLKEGDVLVLNDTKVIPARLFGKLETGGKVELLLVRQPFPKVWEVMAKPARKLKEGKRILFDEELEGIVKEYVGEGKRLVEFNVKGNKDFMEKLEEIGHVPLPPYIEREERPEDREKYQTVFAQKPGAVAAPTAGLHFTKELLEKLKNKGVIIKTVTLHVGPGTFKPVKVENVEEHQMDYETYNVPEETAREINRAKEEGRRIVAVGTTVVRTLESSSDEVGRVKAGEGSTNLFIYPGYKFKVIDALITNFHLPRSTLLMLVSAFAGRERILNAYRKAVKEGYRFYSYGDAMLIL

SEQ ID NO: 65976 - protein, 343 aa, Desulfurobacterium thermolithotrophum
  REGION 1..343: note = tr|F0S207|F0S207_DESTD S-adenosylmethionine:tRNA ribosyltransferase-isomerase OS=Desulfurobacterium thermolithotrophum (strain DSM 11699 / BSA) OX=868864; GN = queA PE= 3 SV=1
MKVSDFDYKLPKELIAKFPVEPRDSSRLMVLNKNTGKIEHRIFKDIVEYLKAGDVLVINDTKVIPARLFGKLDTGGKVEILLVRQPGLNTWEVMAKPARKLKKGRKISFDEELEAVVKEYSGEGKRIIEFVIKSNKDFMEKIEEIGHIPLPPYIEREEKPEDREKYQTVFARKEGAVAAPTAGLHFTTELLENLKSKGIIIKNITLHVGPGTFKPVKVENVEDHQMDYETYYVPEDTAIEINRAKEEGRRVIAVGTTVTRTLESAADESGKVKQGEDSTNLFIYPGYKFKVIDALITNFHLPRSTLLMLVSAFAGKERILNAYKEAVRKGYRFYSYGDAMFIF

SEQ ID NO: 65977 - protein, 343 aa, unidentified
  source 1..343: note = Desulfuromonadaceae bacterium
  REGION 1..343: note = tr|A0A1G2WE56|A0A1G2WE56_9DELT S-adenosylmethionine:tRNA ribosyltransferase-isomerase; OS = Desulfuromonadaceae bacterium GWB2_53_15 OX=1801895; GN = queA PE=3 SV=1
MFVKDFDYHLPPDLIARYPASERDASRLMLLNRQSGSIGEDIFRNISAQFVPGDLLVMNDTRVIPARLFGKKETGGKVEIFLLRREECSSERWSCLLRSSKGVREGSVIHLAEGVTARINTKLLSGSWQIEFVGADDFSAWLEREGHIPLPPYLQRDDEVQDRERYQTVFAQTAGAVAAPTAGLHFTRGLLAELERMGVQIAHLTLHTGLGTFQPIRVERVEDHLIHTEHYSIPAVTADVIRSTKTRGGRVVAVGTTTARTLEHAAIGDGNVRAGDGEANIFIYPGYTFKVVDALVTNFHLPESTLLMLVSAFAGRDLVMESYREAVSRGFRFYSYGDAMLIQ

SEQ ID NO: 65978 - protein, 343 aa, unidentified
  source 1..343: note = Desulfuromonadaceae bacterium
  REGION 1..343: note = tr|A0A1G2WGY3|A0A1G2WGY3_9DELT S-adenosylmethionine:tRNA ribosyltransferase-isomerase; OS = Desulfuromonadaceae bacterium GWC2_58_13 OX=1801896; GN = queA PE=3 SV=1
MHLTHFDFELPETLIAQHPPNSREDSRLMVLSRREKEIRAGMFPDILDYFAAGDLLVLNDTRVIPARLLGEKESGGRIEVFLVRRLASHEEDWACLTRCSKTPKAGARLLLGGEIEGTLLAGGEAPYRHIRFRCQGDFTQVLERVGRIPLPPYIRREDDQLDRDRYQTVFAITNGAVAAPTAGLHFTERILEGLRSRGVTICPLTLHVGLGTFLPVRVENILEHRMHVETYHIPRTTADAVNRAKAEGRRVFALGTTTTRTLEHAVDETGCLKAGEGNSDLFIYPGFKFRMVDAMITNFHLPKSTLLMLVSGFAGRDFILEAYRRAVRERFRFFSYGDCMLIL

SEQ ID NO: 65979 - protein, 295 aa, unidentified
  source 1..295: note = Desulfuromonadales bacterium
  REGION 1..295: note = tr|A0A1E7HL47|A0A1E7HL47_9DELT S-adenosylmethionine:tRNA ribosyltransferase-isomerase (Fragment) OS=Desulfuromonadales bacterium C00003094; OX = 1869310 GN=BA870_02610PE=3 SV=1
MHLNDFDFDLPEELIAQEPLAERTGSRLMILNRGTGSLTIGGFSSIVDHFRAGDVLVINDTRVIPARLLGCKESGGKVEVLLVRRLAGDEETWICLTKASKGPRVGTRLLLGDTLTGTVVDGGEEPYKHIQFACEGDFLQQIEEIGRMPLPPYIRRDDSQLDKERYQTVFAQNAGAVAAPTAGLHFTPEILQQLRNKGVEIHPLTLHVGIGTFLPVRVDNIREHRMHAEHFTVPVATAAAVNQARASGRRIFSLGTTSTRTLEYAVDDQGQLQAGSGDCDLFIYPGYRFCTVDAM

SEQ ID NO: 65980 - protein, 290 aa, unidentified
  source 1..290: note = Desulfuromonadales bacterium
  REGION 1..290: note = tr|A0A1E7GM99|A0A1E7GM99_9DELT S-adenosylmethionine:tRNA ribosyltransferase-isomerase (Fragment) OS=Desulfuromonadales bacterium C00003096; OX = 1869311 GN=BA871_07730PE=3 SV=1
DVLVVNDTRVIPARLLGCKESGGKVEVLLVRRLVGDTETWICLTKASKGPRVGTRLLLGDTLTGTVVEGGQDPYKHIQFACEGDFLQQIEEIGRMPLPPYIRRDDSQLDKERYQTVFAQNAGAVAAPTAGLHFTPEILEQLRNKGVEIHPLTLHVGIGTFLPVRVDNIREHRMHEEHFTVPAATAAAVNQARAEGRRVFALGTTSTRTLEYAVDDQGLLQVGSGSCDLFIYPGYRFRTVDAMLTNFHLPRSTLLMLVSAFAGREPVLAAYRRAVAEGFRFFSYGDCMLII

SEQ ID NO: 65981 - protein, 343 aa, Desulfuromonas acetexigens
  REGION 1..343: note = tr|A0A550JKH8|A0A550JKH8_9DELT S-adenosylmethionine:tRNA ribosyltransferase-isomerase; OS = Desulfuromonas acetexigens OX=38815 GN=queA PE=3 SV=1
MFLDDFDFALPESLIAQYPRPEREDARLLVLRRDDREIRSTAFRDLGAFFRPGDLLVLNDTRVIPARLLGEKESGGRIEVFLVRRLATDGEEWACLTKSSKSPRPGTRLRLGVAIEGTVLPGGEQPYRHIRFECSGDFTAALEREGQIPLPPYIRRDADASDRTRYQTVFARSDGAVAAPTAGLHFTERTLDELRGRGVEIHPLTLHVGLGTFLPVRVENVLEHRMHHEPYVVPTETAAAVNRAKEEGRRVFALGTTTTRALEHAVDGQGRLRAGEGSSDLFIYPGFRFRLVDALITNFHLPKSTLLMLVSAFADREFVLEAYRQAVREEYRFFSYGDCMLIL

SEQ ID NO: 65982 - protein, 350 aa, Desulfuromonas acetoxidans
  REGION 1..350: note = tr|Q1K1D4|Q1K1D4_DESA6 S-adenosylmethionine:tRNA ribosyltransferase-isomerase OS=Desulfuromonas acetoxidans (strain DSM 684 / 11070) OX=281689 GN=queA PE=3 SV=1
MYVTDFNYDLPQELIAQHPCEQRDGSRLMVLDCQAEKIVSDHFRQVDRYFEQGDVLVINDTRVIPARLLGCKESGGKVEVFLVRKLAEEGECWLCLTRASKGPRPGTRLLLGDQLTATVMEGGGDGYRHIRFDVEGDFLSLLDKIGRLPLPPYIDREPQGEDRERYQTTFSSRPGAVAAPTAGLHFTPEILDKLRAKGVIVCPLTLHVGLGTFLPVRVDNVEEHRMHAEAYCIPDETAVQVNRAKREGRRVIALGTTVTRTLEFSVDPQGELQAGDGMTDMFIYPGYRFKIVDALLTNFHLPQSTLLMLVSALAGREFVLQAYRQAVEERYRFFSYGDCMLIHNVIKEAS

SEQ ID NO: 65983 - protein, 315 aa, unidentified
  source 1..315: note = Desulfuromonas soudanensis
  REGION 1..315: note = tr|A0A0M4D8P8|A0A0M4D8P8_9DELT S-adenosylmethionine:tRNA ribosyltransferase-isomerase; OS = Desulfuromonas soudanensis OX=1603606 GN=queA PE=3 SV=1
MVLRRSAKTISNGDFPGIVDHFRPGDVLVVNDTRVIPARLLGARDSGGKIEVLLVRRLAGVEEIWACLTKCSKTPRPGTRLLLGGRIAGTVLEGGQEPYRHISFTCEGSFLEALEAVGHIPLPPYIRREDDSLDRERYQTVFSRKQGAVAAPTAGLHFTPEIFQVLKQRGVEVLPLTLHVGLGTFLPVRTENILDHRMHEEFYEIPEATASGVNRAKREGRRVFALGTTTTRTLEYAVDAEGQLMAGEGGSDLFIYPGFQFRIVDALITNFHLPRSTLLMLVSAFAGRDFVLEAYRRAVNDGFRFFSYGDCMLIL

SEQ ID NO: 65984 - protein, 344 aa, Desulfuromonas sp.
  REGION 1..344: note = tr|A0A2N6EK14|A0A2N6EK14_9DELT S-adenosylmethionine:tRNA ribosyltransferase-isomerase; OS = Desulfuromonas sp. OX=892 GN=queA PE=3 SV=1
MQLEDFDFLLPEELIAQHPTERRDGSRLMLVDRQRGAISTAGFPSVVDAFRKGDLLVINDTRVIPARLLGRKESGGKVEIFLVRRLAGAVDEDWLCMTRSSRSLKVGTQLKLAEGLTAEVLDGTEPPQRMVRFFCDGPFLDTIERVGHLPLPPYITRPDSAEDRQRYQTVFACNDGALAAPTAGLHFTEDILQQLRDKGVEILPLTLHVGLGTFLPVRVEDIRQHKMHAEIYSVPSATAAAVNRAKAERRRIVALGTTAARALESAVDEQGCLQAGEDESEIFIYPGYRFKLVDALITNFHLPKSTLLMLVSAFAGRDFILQAYQRAVAERFRFFSYGDCMLIV

SEQ ID NO: 65985 - protein, 343 aa, Desulfuromonas sp.
  REGION 1..343: note = tr|A0A357YEN5|A0A357YEN5_9DELT S-adenosylmethionine:tRNA ribosyltransferase-isomerase; OS = Desulfuromonas sp. OX=892 GN=queA PE=3 SV=1
MQLSDFDFELPEALIAQTPLARRDASRLLVLDRKTATLRHEAFPAIASILGAGDLLVVNDTRVIPARLHGFKDSGGHIEVFLVRRYPGAEEIWGCLTRSSKPPRPGSRLHLAEGVVATVLDGADDDLRRVRFEGVGDFLATLERAGEIPLPPYIRREAEELDRERYQTVFAAAPGAVAAPTAGLHFTPELLERLRRRGVEICNLTLHVGPGTFLPVREDGLRNHRMHAESYLIPAATATAVNRAKREGRRVVALGTTTTRTLEHGADVGGELLPGEGMTDLFILPGYRFRLVDAMITNFHLPRSTLLMLVSAFAGRELLLQAYREAVLERYRFFSYGDSMVIL

SEQ ID NO: 65986 - protein, 345 aa, Desulfuromonas thiophila
  REGION 1..345: note = tr|A0A1G7CCH8|A0A1G7CCH8_9DELT S-adenosylmethionine:tRNA ribosyltransferase-isomerase; OS = Desulfuromonas thiophila OX=57664 GN=queA PE=3 SV=1
MRLTDFDYALPAELIAQQPAERRDASRLLVLDRANGSCRSDWFSHIASYFRPGDVLVRNDTRVIPARLLGRKDSGGRVEVFLVRQLSAAADGLCWRCLTRSSKPVRPGQLLYFAEGLKASVLALGEAGERDLCFHHAGDFSALLDRIGQVPLPPYITRPAEADDRERYQTTFARVPGAVAAPTAGLHFTPECFARLERLGVELCNLTLHVGLGTFLPVRVEDPRHHRMHEEAYAVPEATAATINRARAEGRRIVALGTTVARTLEAASMADGHLRTGDGLTDIFIYPGYRFRQVDALVTNFHLPQSTLLMLVCALAGREAVLAAYARAVAEGYRFFSYGDCMFIQ

SEQ ID NO: 65987 - protein, 347 aa, Desulfuromusa kysingii
  REGION 1..347: note = tr|A0A1H3YDA1|A0A1H3YDA1_9DELT S-adenosylmethionine:tRNA ribosyltransferase-isomerase; OS = Desulfuromusa kysingii OX=37625 GN=queA PE=3 SV=1
MQLTDFDFLLPDELIAQVPATQRDGSRLLCLKRQSATIAARQFVDIPEYFERGDVLVINDTKVIPARLLGQKLTGGKVEIFLVRKVAGVASTDADEWLCLTKSSKPLRVGTVVQFTAEFSAEVLDEMDAPYRLVRFHCPGDFMQMVDKVGHLPLPPYIKRDDSREDRSRYQTVFANQEGAVAAPTAGLHFTTEILQQLTAAGVEIVNLTLHVGLGTFLPVRVDDICQHKMHSELYSISAATAAAVNLAHQEGRRVFALGTTSARALETAATADGLLRSGAGESEIFIYPGYKFKIVDALITNFHLPKSTLLMLVSAFAGREFILTAYRQAIEKRFRFFSYGDCMLIL

SEQ ID NO: 65988 - protein, 342 aa, Dethiobacter alkaliphilus
  REGION 1..342: note = tr|C0GKE7|C0GKE7_9FIRM S-adenosylmethionine:tRNA ribosyltransferase-isomerase OS=Dethiobacter alkaliphilus AHT 1 OX=555088 GN=queA PE=3 SV=1
MHLSEFDYELPEELIAQVPLTDREASRLLILHRKSGAVEHGNFSDILSHLQAGDTLVLNDTKVLPARLTGRKKGGGAMAEVLLLTRKDKACWEALVKPGRRLRPGAEVEFGNGELTAVIKEELADGTRLVEFRYDGIFEEVLDRLGEMPLPPYITEKLADRQRYQTVYAKNEGSAAAPTAGLHFTPRLLAEAQDRGINVVYLTLHVGLGTFRPVKTEDIREHHMHSEYYNISPESAQILNSCRRAGGRIVAVGTTSCRVLETVAQDDGTINAGSGWTDIFIYPGYRFKTVNALLTNFHLPKSTLIMMISAFAGRDNVLNAYREAVQERYRFFSFGDAMLIID

SEQ ID NO: 65989 - protein, 347 aa, Dethiobacter sp.
  REGION 1..347: note = tr|A0A3A6NSX7|A0A3A6NSX7_9FIRM S-adenosylmethionine:tRNA ribosyltransferase-isomerase; OS = Dethiobacter sp. OX=2093370 GN=queA PE=3 SV=1
MEIDSKLKTEDFSYDLPPELIAQEPLRERDNSRLLVLGRNSGKIEDTTFKRLPSYLERGDLLILNNTRVLPARLLGRKKDGGGQVELLLLRRLEEMKWEVLCSPGKRARPGVVLTFGSGQLEAEVLEKTAAGGRIVAFKTAHPLEEILYQLGQVPLPPYIKKHLEDRERYQTVYASEEGSAAAPTAGLHFTASVFEELRTRGIDWAYLTLHIGVGTFRPVKDKYIEDHLMHSEYFELPASTAQSINRTREKGGRIVAVGTTCCRVLETLGDGQGKVSEGRGETDLFIYPGYHFKVIDALLTNFHLPRSTLLMLISAFAGRENILKAYEKAVELRYRFYSFGDSMLIL

SEQ ID NO: 65990 - protein, 363 aa, unidentified
  source 1..363: note = Dethiosulfatarculus sandiegensis
  REGION 1..363: note = tr|A0A0D2HKX7|A0A0D2HKX7_9DELT S-adenosylmethionine:tRNA ribosyltransferase-isomerase; OS = Dethiosulfatarculus sandiegensis OX=1429043 GN=queA; PE = 3 SV=1
MNPALLRSAEASSPLDAYDYQLPPELIAQHPAPRRVQARLMVLAEGQAAPVHKRAYNLLEWLRKDDLLVINNTSVVPARLRGRKPTGGKVEVFLLSPAHPLDVMDDGSEVHETLIKTHRRLAKGARINLDPEENLWAEVVEVSDRGKALVKFPGSALSLASDLGEVPLPPYIKRPDGPLAEDKQRYQTVYAHKQGAVAAPTAGLHLSKELMAALLKRGVRVAPVTLHVGYGTFAEPSAEDLASGKLHSEWVEISCETARAVEETRQKGGRVICVGTTSLRAVEWRGTEQGLVEPGAGWCDILIDESSAIKVADGILTNFHLPRTTLLMLVAAMAGRERILAAYAEAIRMKYRFYSFGDAMLII

SEQ ID NO: 65991 - protein, 344 aa, Dethiosulfatibacter aminovorans
  REGION 1..344: note = tr|A0A1M6D3B2|A0A1M6D3B2_9FIRM S-adenosylmethionine:tRNA ribosyltransferase-isomerase; OS = Dethiosulfatibacter aminovorans DSM 17477 OX=1121476; GN = queA PE=3 SV=1
MKNDKLTTSDFTFDLPEDQIAQTPIMNREQSKLMVLDKTGETIEHRKFYNILEYLNEGDCLVMNNSRVLPARMFGTKTTGAVIEILLLKRQSLDRWECLVKPGKRAKPGTVINFGNKLQGEVLEDLEDGVKLVEFKYEGVFESIIEELGEMPLPPYIKEKLEDQERYQTVYAEVSGSAAAPTAGLHFTEDLMDKVREKGISIAYVTLHVGLGTFRPVKVDNIDEHIMHSEYYELNEYNADIIKAARNKGGRIISVGTTSTRTLESICKKLGKLDKDSGWTDIFIYPGYEFKAVDALITNFHLPESTLLMLVSAFSNREFILKAYKEAVDNDYRFFSFGDAMFIY

SEQ ID NO: 65992 - protein, 344 aa, Dethiosulfovibrio peptidovorans
  REGION 1..344: note = tr|D2Z3E1|D2Z3E1_9BACT S-adenosylmethionine:tRNA ribosyltransferase-isomerase OS=Dethiosulfovibrio peptidovorans DSM 11002 OX=469381 GN=queA PE=3 SV=1
MEENIFKVSSYDYRLPKELIAQNPADPRDSSRLMVLSREDGSLEHRVFSDLVDYLRSDDVLIRNDTRVMAARLKGKKVEGEAEVEILVLSRLSGQTWEAMVRPGRRLKPGISVLLSDGTTVKVDGIRPEGLRSVTFPEGVDVLSLLDKVGTVPLPPYITDSNASPEAYQTVFANKVGSAAAPTAGLHFTPELIERIEKKGVEILDVTLQVGLGTFRPVKEEDLRHHPMHRERCQISSYTADRINKAKAQGRRIVAVGTTSVRTLESMGDSGVLLSGERDTSLFIYPGFEFKIVDAMITNFHLPQSTLLMLVSAFAGRERTLNAYKEAVSMEYRFFSFGDAMFIY

SEQ ID NO: 65993 - protein, 345 aa, Dethiosulfovibrio peptidovorans
  REGION 1..345: note = tr|A0A2G6M5A5|A0A2G6M5A5_9BACT S-adenosylmethionine:tRNA ribosyltransferase-isomerase; OS = Dethiosulfovibrio peptidovorans OX=47055 GN=queA PE=3; SV = 1
MTDERLYLTSSYGYQLPEGLIAQSPAVPRDSSRLLILSRRDGTMEHRRFSDLTEYLHPGDLLVRNDTRVMAARLMGTKIGGGAKVELLLLSRLSDRTWEALVRPGRRLQPGVPVELEDGTTVTIEANRSEGLREVAFPDGLNVDKLMDRLGVVPLPPYITNTSSPAESYQTVFSRNPRSAAAPTAGLHFTSELLDKVARMGVEIVDVTLHVGLGTFRPVQEDDIRAHHMHRERCFISSKTAEAVNRARREGRRVVAVGTTSVRTLESMVENGEVVSGSRETSLYIYPGFRFQAVDAMITNFHLPHSSLLMLVSAFAGLDMVQNAYREAVRREYRFFSFGDAMLIT

SEQ ID NO: 65994 - protein, 344 aa, Dethiosulfovibrio salsuginis
  REGION 1..344: note = tr|A0A1X7I4W1|A0A1X7I4W1_9BACT S-adenosylmethionine:tRNA ribosyltransferase-isomerase; OS = Dethiosulfovibrio salsuginis OX=561720 GN=queA PE=3 SV=1
MDEKFYRVSTYNYSLPEKLIAQNPVVPRDCSRLLFLSKKDGAIEHRRFCNLLDYLVPGDLLVRNNTKVMPSRLIGFKPGMASEVEILLLSPLSTDTWEAMVRPGRRLKPGTSVSLSDGTKIKVESVRDDGLRALSFPPGTDVMDLMDRLGSIPLPPYINSSTAPDESYQTVFAKEATSAAAPTAGLHFTDSLIESIRLKGVEIVDVTLDVGLGTFRPVKEEDLREHPMHLERCRVPEATAAAINKAKKEGRRVIAVGTTSVRTLESMYREGILKHGDTDTSLFIYPGYSFQVIDGMVTNFHLPQSTLLMLVSAFAGYEFTMSAYKEAVSEEYRFFSFGDAMLIL

SEQ ID NO: 65995 - protein, 359 aa, Devosia chinhatensis
  REGION 1..359: note = tr|A0A0F5FMC0|A0A0F5FMC0_9RHIZ S-adenosylmethionine:tRNA ribosyltransferase-isomerase; OS = Devosia chinhatensis OX=429727 GN=queA PE=3 SV=1
MLVSDFDFELPETLIALHPAEPRDSARLLVVRPEEALEDRHIPDLRTLLRPGDVLVVNDTRVLPAELRGVRIRGENRAGVSFNLHKRVDAHTWRAFARPAKKMGLLDDLELGNGEGELLRARIAGKGDTGEVTLEFELGGAQLDEAIKSHGAMPLPPYIGAKRAVEERDKVDYQTVYAAEDGAVAAPTAGLHFTEKLLQDLADMDVAMERVTLHVGAGTFLPMKVDDTDDHVMHSEWGEIDQATVERINARRAAGGRVIAVGTTSLRLLETASRATGELKPFVGDTDIFITPGFRFRTVDVLMTNFHLPKSTLFMLVSAFCGLETMKRAYAHAIANGYRFYSYGDSSLLHRAAHPEDDA

SEQ ID NO: 65996 - protein, 360 aa, Devosia crocina
  REGION 1..360: note = tr|A0A1I7N925|A0A1I7N925_9RHIZ S-adenosylmethionine:tRNA ribosyltransferase-isomerase; OS = Devosia crocina OX=429728 GN=queA PE=3 SV=1
MRVSEFDFELPENLIALHPAEPRDSARLLQVVPGEAFRDRHIPDLLDILKPGDVLVVNDTRVLPAELRGTRRRGDIRANVSFNLHKRVDAHTWRAFARPAKKLALLDELELGNGSADVLRARVAGKGDTGEITLEFELGGAQLDEAIRSHGAMPLPPYIGAKRAVEERDKVDYQTVYAAEDGAVAAPTAGLHFTEKLLQQLSDRGVTMERVTLHVGAGTFLPMKADDTDDHVMHSEWGEIDQATVERINAKRELGGRVVAVGTTSLRLLETASRATGALQPFMGDTDIFITPGFRFRTVDILMTNFHLPKSTLFMLVSAFSGLDTMKGAYAHAIANGYRFYSYGDSSLLFRAPGDEDDTA

SEQ ID NO: 65997 - protein, 359 aa, unidentified
  source 1..359: note = Devosia elaeis
  REGION 1..359: note = tr|A0A178HU92|A0A178HU92_9RHIZ S-adenosylmethionine:tRNA ribosyltransferase-isomerase; OS = Devosia elaeis OX=1770058 GN=queA PE=3 SV=1
MRVSEFDFELPESLIALHPAEPRDSARLLVVRPGEKPEDRHIPDLRTLLRPGDVLVVNDTRVLPAELRGIRIRGENRAGVSFNLHKRVDAKTWRAFARPAKKLALLDALELGNGIGEPLRARVAGRGDTGEVTLEFDLGGAQLDEAIKSHGAMPLPPYIGAKRDVEERDKVDYQTVYAAEDGAVAAPTAGLHFTEKLLQDLADMDVALERVTLHVGAGTFLPMKVDDTEDHVMHSEWGEIDRATVERINARRAAGGRVVAVGTTSLRLLETASRATGTLQPFIGDTDIFITPGFHFRTVDVLMTNFHLPKSTLFMLVSAFSGLETMKAAYAHAIENGYRFYSYGDSSLLHRAPHPGDAA

SEQ ID NO: 65998 - protein, 359 aa, unidentified
  source 1..359: note = Devosia enhydra
  REGION 1..359: note = tr|A0A1K2HVB5|A0A1K2HVB5_9RHIZ S-adenosylmethionine:tRNA ribosyltransferase-isomerase; OS = Devosia enhydra OX=665118 GN=queA PE=3 SV=1
MRVSDFDFELPNDLIALHPAEPRDSARLLLVGEKGRLEDRHVTDLVEILRPGDVLVVNDTRVLPAELSGTRIRGENRSSVSFNLHKRVDANTWRAFARPAKRLHVLDALELGGGEGQGQPMRARVAGKGDTGEVTLEFELGGAELDEAIKAHGAMPLPPYIGAKRGVEPRDSVDYQTVYAAVDGAVAAPTAGLHFTEALLQRLADRGVALERVTLHVGAGTFLPMKVEDLSEHRMHAEWGELTAATAERLEAARAAGGRIVAVGTTSLRLLETAARATGRIAPFIGETDIFITPGFRFRAVDVLMTNFHLPRSTLFMLVSAFAGYDEMRKAYAHAIASGYRFYSYGDGSLLFRAPGDEE

SEQ ID NO: 65999 - protein, 359 aa, unidentified
  source 1..359: note = Devosia epidermidihirudinis
  REGION 1..359: note = tr|A0A0F5QFB9|A0A0F5QFB9_9RHIZ S-adenosylmethionine:tRNA ribosyltransferase-isomerase; OS = Devosia epidermidihirudinis OX=1293439 GN=queA PE=3 SV=1
MLVSDFDFDLPEKLIALHPVEPRDSARLLLVDPVNGLSDKHIPDLLSLIGDGDVLVVNDTRVLPAELRGTRIRGENRSTVSFNLHKRVDAHTWRAFARPAKRLALLDRLELGNGQADALTARVAGKGETGEITLEFDLGGAELDEAIKSHGAMPLPPYIGAKRDVEERDLVDYQTVYAAEDGAVAAPTAGLHFTEALLQKLSDQGVTIERVTLHVGAGTFLPMKVDDTDDHIMHSEWGEIDQATVERINAKRAAGGRVVAVGTTSLRLLETASRATGTLQPFIGDTDIFITPGFRFRTVDALMTNFHLPKSTLFMLVSAFAGMEVMRKAYEHAIAEGYRFYSYGDSSLLLRAAHPQGEE

SEQ ID NO: 66000 - protein, 361 aa, Devosia geojensis
  REGION 1..361: note = tr|A0A0F5FT72|A0A0F5FT72_9RHIZ S-adenosylmethionine:tRNA ribosyltransferase-isomerase; OS = Devosia geojensis OX=443610 GN=queA PE=3 SV=1
MRVDLFDFELPEDRIALHPAEPRDSARLLVVDPRDGLEDRNVRDLLWLLRPGDVLVVNDTRVLPAELRGERVRGEHRASVSFNLHKRVDARTWRAFARPAKRLKVFDRLELGSDGMEPLLATVAGKGDTGEVTLEFDLSGAALDEAIKSHGAMPLPPYIEAKRRPSERDRTDYQTVYAAEDGAVAAPTAGLHFTEDLLVGLQQKGVSIERVTLHVGAGTFLPMKAEDTDDHVMHAEWGEIEADTVRRILAARQKGGRVVAVGTTSLRLLETAARATGTLAPFVGETDIFITPGFRFRAVDVLMTNFHLPKSTLFMLVAAFSGLDVMKRAYAHAIANGYRFYSYGDSSLLYRASPRDDEDGA

SEQ ID NO: 66001 - protein, 350 aa, Devosia insulae
  REGION 1..350: note = tr|A0A1E5XL56|A0A1E5XL56_9RHIZ S-adenosylmethionine:tRNA ribosyltransferase-isomerase; OS = Devosia insulae DS-56 OX=1116389 GN=queA PE=3 SV=1
MKVDDFDFDLPAESIALHPAEPRDAARMLVVRPGEALVDGHVRDLLTILRAGDVLVVNDTRVLPAELTGTRIRGELRANVSFNLHKRVDANTWRAFARPAKKLHLLDRLELGDNGSILATVAGKGDTGEITLAFDLGGAELDEAIKAHGAMPLPPYIEAKRHTEERDKSDYQTVYAARDGAVAAPTAGLHFTESLLQQLADLGVSVERVTLHVGAGTFLPVKVDDTDDHVMHAEWGDIPAAVVERILAARAKGGRVIAVGTTSLRLLETAARATGTLQPFVGDTDIFITPGYRFNAVDMLMTNFHLPRSTLFMLVSAFAGLDTMRAAYAHAIGNGYRFYSYGDASLLFRA

SEQ ID NO: 66002 - protein, 357 aa, Devosia limi
  REGION 1..357: note = tr|A0A0F5LKR3|A0A0F5LKR3_9RHIZ S-adenosylmethionine:tRNA ribosyltransferase-isomerase; OS = Devosia limi DSM 17137 OX=1121477 GN=queA PE=3 SV=1
MLVSDFDFDLPEELIALHPVEPRDSARLLLVDPDNGLFDRHIPDLLTLLRPGDVLVVNDTRVLPAELRGTRIRGENRASVSFNLHKRVDAHTWRAFARPAKRLALLDQLELGNGQADALTARVAGKGETGEVTLEFDLGGARLDEAIKSHGAMPLPPYIGAKRKAEARDNVDYQTVYAAEDGAVAAPTAGLHFTETLLQQLSDLGVSIERVTLHVGAGTFLPMKVDNTDDHVMHAEWGDIDQATVERILAAKAAGGRVVAVGTTSLRLLETASRATGTLQPFIGDTDIFITPGFRFRTVDVLMTNFHLPKSTLFMLVSAFAGMDTMRRAYEHAIATGYRFYSYGDSSLLLRAEQDDE

SEQ ID NO: 66003 - protein, 359 aa, unidentified
  source 1..359: note = Devosia lucknowensis
  REGION 1..359: note = tr|A0A1Y6ERN1|A0A1Y6ERN1_9RHIZ S-adenosylmethionine:tRNA ribosyltransferase-isomerase; OS = Devosia lucknowensis OX=1096929 GN=queA PE=3 SV=1
MRVTEFDFDLPETLIALHPAEPRDSARLLVVRPGEPFANQHIPDLRTLLRPGDVLVVNDTRVLPAELKGIRVRGETRANVSFNLHKRDDAHTWRAFARPAKKLHLLDRLELGNGGADPLIARVAGKGDTGEVTLEFELGGAQLDEAIKSHGAMPLPPYIGAKRPVEERDKVDYQTVYAAEDGAVAAPTAGLHFTEKLLQDLADMDVAMERVTLHVGAGTFLPMKADDTDDHVMHSEWGEIDQATVERINARRAAGGRVIAVGTTSLRLLETASRATGELKPFVGDTDIFITPGFRFRTVDVLMTNFHLPKSTLFMLVSAFSGLQTMKDAYAHAIGNAYRFYSYGDSSLLHRAPHPEDDA

SEQ ID NO: 66004 - protein, 361 aa, Devosia psychrophila
  REGION 1..361: note = tr|A0A0F5PUX3|A0A0F5PUX3_9RHIZ S-adenosylmethionine:tRNA ribosyltransferase-isomerase; OS = Devosia psychrophila OX=728005 GN=queA PE=3 SV=1
MLVSDFDFDLPEKLIALHPAEPRDSARLLVVDPKAGLADGHIPDLLWLLKPGDVLVVNDTRVLPAELRGTRVRGENRANISFNLHKRVDAHTWRAFARPAKKLALLDRLELGNGQTDALVARVAGRGDTGEVTLEFELGGAQLDEAIKSHGAMPLPPYIGAKRGVEERDLVDYQTVYAAEDGAVAAPTAGLHFTKKLLQDLTDKGVTIERVTLHVGAGTFLPMKVEDTKDHVMHAEWGEIDQATVERINVKRALGGRVIAVGTTSLRLLETASRKTGTLQPFTGDTDIFITPGFRFATVDALMTNFHLPKSTLFMLVSAFAGFDVMKAAYAHAIADGYRFYSYGDSSLLLRAGRDGLDEGF

SEQ ID NO: 66005 - protein, 360 aa, Devosia riboflavina
  REGION 1..360: note = tr|A0A087M1L8|A0A087M1L8_9RHIZ S-adenosylmethionine:tRNA ribosyltransferase-isomerase; OS = Devosia riboflavina OX=46914 GN=queA PE=3 SV=1
MRVSEFDFELPENLIALHPAEPRDSARLLVVRPGEALQDRHIPDLLELFQPGDVLVVNDTRVLPAELRGTRVRGETRANVSFNLHKRVDAHTWRAFARPAKKLALLDALELGNGQADALKARVAGKGDTGEVTLEFELGGAQLDEAIKSHGAMPLPPYIGAKRAVEERDKVDYQTVYAAEDGAVAAPTAGLHFTEKLLQQLSDRGVTMERVTLHVGAGTFLPMKVDDTEDHVMHSEWGDIDQATVERINAKRALGGRVIAVGTTSLRLLETASRATGRLQPFIGDTDIFITPGFKFRTVDILMTNFHLPKSTLFMLVSAFSGLDQMKAAYHHAISNGYRFYSYGDSSLLFRASGDEDDEA

SEQ ID NO: 66006 - protein, 361 aa, Devosia soli
  REGION 1..361: note = tr|A0A0F5LBI4|A0A0F5LBI4_9RHIZ S-adenosylmethionine:tRNA ribosyltransferase-isomerase; OS = Devosia soli OX=361041 GN=queA PE=3 SV=1
MRVSEFDFDLPENLIALHPAEPRDSARLLVVRPGRGVEDRHIPDLLEILQPGDVLVVNDTRVLPAELRGVRVRGETRANVSFNLHKRVDAHTWRAFARPAKKLALLDELELGNGQTDALKARVAGKGDTGEVTLEFELGGAQLDEAIKSHGAMPLPPYIGAKRDVEERDKVDYQTVYAAEDGAVAAPTAGLHFTEKLLQQLVERGVSMERVTLHVGAGTFLPMKVDDTEDHVMHSEWGEIDQATVERINAKRAAGGRVIAVGTTSLRLLETASRATGMLQPFMGDTDIFITPGFRFRTVDVLMTNFHLPKSTLFMLVSAFSGLDTMKAAYHHAIANGYRFYSYGDSSLLFRDRSADRDDEV

SEQ ID NO: 66007 - protein, 352 aa, Devosia sp.
  REGION 1..352: note = tr|A0A1E4A6D6|A0A1E4A6D6_9RHIZ S-adenosylmethionine:tRNA ribosyltransferase-isomerase; OS = Devosia sp. SCN 66-27 OX=1660097 GN=queA PE=3 SV=1
MKVDDFDFDLPAESIALHPAEPRDSARMLVVRPGEALVDGHVRDLLTILRAGDVLVVNDTRVLPAELTGTRIRGELRANVSFNLHKRVDTNTWRAFARPAKKLHLLDRLELGDNGSIAATVTGKGETGEITLAFDLGGAELDEAIKAHGAMPLPPYIEAKRHTEERDKTDYQTVYAARDGAVAAPTAGLHFTESLLQQLADLGVSVERVTLHVGAGTFLPVKVDDTDDHVMHAEWGDIPAAVVERILAARAKGGRVIAVGTTSLRLLETAARATGTLQPFVGDTDIFITPGYRFNAVDMLMTNFHLPRSTLFMLVSAFAGLNTMRAAYRHAIDDGYRFYSYGDSSLLFRAEP

SEQ ID NO: 66008 - protein, 359 aa, Devosia sp.
  REGION 1..359: note = tr|A0A2U0TC95|A0A2U0TC95_9RHIZ S-adenosylmethionine:tRNA ribosyltransferase-isomerase; OS = Devosia sp. PTEAB7WZ OX=2135613 GN=queA PE=3 SV=1
MRVTEFDFDLPENLIALHPAEPRDSARLLVVRPGEPFADQYIPDLKTLLRPGDVLVVNDTRVLPAELKGVRLRGDVRANVAFNLHKRVDAKTWRAFARPAKKLHLLDRLELGNGEAEPLVARVAGKGETGEVTLEFELGGAQLDEAIKSHGAMPLPPYIGAKRQVEERDKVDYQTVYAAEDGAVAAPTAGLHFTEKLLQELANMDVVMERVTLHVGAGTFLPMKADDTDDHVMHSEWGEIDQATVERINARRAAGGRVVAVGTTSLRLLETASRATGELKPFMGDTDIFITPGFRFRTVDVLMTNFHLPKSTLFMLVSAFSGLDTMKAAYAHAIANGYRFYSYGDSSLLHRAAHPEDDA

SEQ ID NO: 66009 - protein, 339 aa, Dialister invisus
  REGION 1..339: note = tr|C9LLI7|C9LLI7_9FIRM S-adenosylmethionine:tRNA ribosyltransferase-isomerase OS=Dialister invisus DSM 15470 OX=592028 GN=queA PE=3 SV=1
MKLEDFNYVLPKELIAQQPAEPRDSCRLLMVDKKTGEWQHRRFRDILDEIRPGDVFVFNNTKVIPARLFGRRKGTGGKVEALLLTPKGNDVWEILVNPGRKALPGQEIEFSENFSCTVIDKTEFGGRLVKFHYSGDFDNWLDQLGEMPTPPYIHKKLENKDEYQTVYAKFKGSAAAPTAGLHFTPELLEKMKDKGAELLFVTLHVGIGTFRPVAEENIEDHEMHREWYTIEKETAQKVNEAKEEGRRIIAVGTTSVRTLESAGQTGRVEAGSSWTQLYIYPGYQWQVVDAIVTNFHLPESTLIMMMASFAGREHILAAYEEAVRQKYRFFSFGDAMFLR

SEQ ID NO: 66010 - protein, 339 aa, Dialister invisus
  REGION 1..339: note = tr|R5T5Q1|R5T5Q1_9FIRM S-adenosylmethionine:tRNA ribosyltransferase-isomerase OS=Dialister invisus CAG:218; OX = 1263072 GN=queA PE=3 SV=1
MKLEDFNYVLPKELIAQQPAEPRDSCRLLMVDKKTGEWQHCRFRDILDEIRPGDVFVFNNTKVIPARLFGRRKGTGGKVEALLLTPKGNDVWEILVNPGRKALPGQEIEFSENFSCTVIDKTEFGGRLVKFHYSGDFDNWLDQLGEMPTPPYIHKKLENKDEYQTVYAKFKGSAAAPTAGLHFTPELLEKMKDKGAELLFVTLHVGIGTFRPVAEENIEDHEMHREWYTIEKETAQKVNEAKEEGRRIIAVGTTSVRTLESAGQTGRVEAGSSWTQLYIYPGYQWQVVDAIVTNFHLPESTLIMMMASFAGREHILAAYEEAVRQKYRFFSFGDAMFLR

SEQ ID NO: 66011 - protein, 339 aa, Dialister micraerophilus
  REGION 1..339: note = tr|F2BV07|F2BV07_9FIRM S-adenosylmethionine:tRNA ribosyltransferase-isomerase OS=Dialister micraerophilus DSM 19965 OX=888062 GN=queA PE=3 SV=1
MKLENFNYELPESLIAQEPVEPRDSCKLMVLDKETGHLSHHVFTDILDEIKENDLIVFNNTKVIPARLNGYRKQTGGKVEVLLLTPKGNDEWEVLVNPGRKALIGQEIIFSDKFYCVVLDKTDFGGRRVKFYYDGDFDLLLDEVGEMPIPPYIHKKLKNKEEYQTVYAKYKGSAAAPTAGLHFTSELINKIKEKGAEICFVTLHVGLGTFRPVNEENIEDHEMHKEWYVISEQTADAINKAKKEGRRIIAVGTTSVRTLESAGQSGKLKAGANWTNLYIYPGYSWKIVDAIITNFHLPESTLLMMMASFVGTDKILNAYKEAVAKKYRFFSFGDAMFLR

SEQ ID NO: 66012 - protein, 339 aa, unidentified; identical to SEQ ID NO: 66011
  source 1..339: note = Dialister microaerophilus
  REGION 1..339: note = tr|E4L918|E4L918_9FIRM S-adenosylmethionine:tRNA ribosyltransferase-isomerase OS=Dialister microaerophilus UPII 345-E OX=910314 GN=queA PE=3 SV=1

SEQ ID NO: 66013 - protein, 339 aa, Dialister pneumosintes
  REGION 1..339: note = tr|A0A1B3WD51|A0A1B3WD51_9FIRM S-adenosylmethionine:tRNA ribosyltransferase-isomerase; OS = Dialister pneumosintes OX=39950 GN=queA PE=3 SV=1
MKLENFNYDLPTNLIAQEPAEPRDSCRLMLVDKKTGEWEHQSFRDILNEIRAGDVLVFNNTKVIPARLYGQRKGTGGKVEMLLLSPKGNDNWEVLVKPGKKALPGTEIVFNEHMSCQIVDKTDFGGRIAHFKYNGEFDSILDQIGEMPIPPYIHKKLEDKNKYQTIYAKYKGSAAAPTAGLHFTEELLEEIKNRGAGVYFVTLHVGLGTFRPVAKENIEEHEMHKEWYDVPQITADAVNRAKTEGRRIIAVGTTSVRTLESAGQTGTLVAGGGWTQLYIYPGYEWNIVDAIVTNFHLPESTLIMMMAAFAGTNHILSAYKEAVNQKYRFFSFGDAMFLR

SEQ ID NO: 66014 - protein, 339 aa, Dialister sp.
  REGION 1..339: note = tr|A0A510GCG9|A0A510GCG9_9FIRM S-adenosylmethionine:tRNA ribosyltransferase-isomerase; OS = Dialister sp. 5BBH33 OX=2582419 GN=queA PE=3 SV=1
MKLEEFNYDLPKELIAQEPAEPRDSCRLMMLDKNTGEWEHHGFRDILNEIRKGDIFVFNNTKVIPARLYGKKKDTGGKVEMLLLTPKGNDVWEVLVNPGRKALPGMEIEFSDDCYCKVLDKTEFGGRLVEFHYNGNFDSLLDQIGEMPTPPYIHKKLDNNDEYQTVYAKYKGSAAAPTAGLHFTPELMEEMKKKGAELLFVTLHVGIGTFRPVSEENIEDHEMHKEWYTVSEETAEKINKAKEEGRRIIAVGTTSVRTLESAGQSRKLKSGSNWTQLYIYPGYQWKMVDAIVTNFHLPESTLIMMMASFAGREHILAAYEEAVRQKYRFFSFGDAMFIR

SEQ ID NO: 66015 - protein, 339 aa, Dialister sp.
  REGION 1..339: note = tr|R7CTB2|R7CTB2_9FIRM S-adenosylmethionine:tRNA ribosyltransferase-isomerase OS=Dialister sp. CAG:357; OX = 1262869 GN=queA PE=3 SV=1
MKLEEFNYDLPKELIAQEPAEPRDSCRLMMLDKNTGEWEHHGFRDILNEIRKGDIFVFNNTKVIPARLYGKKKDTGGKVEMLLLTPKGNDVWEVLVNPGRKALPGTEIEFSDDCYCKVLDKTEFGGRLVEFHYNGNFDSLLDQIGEMPTPPYIHKKLDNNDEYQTVYAKYKGSAAAPTAGLHFTPELMEEMKKKGAELLFVTLHVGIGTFRPVSEENIEDHEMHKEWYTVSEETAEKINKAKEEGRRIIAVGTTSVRTLESAGQSGKLKSGSNWTQLYIYPGYQWKMVDAIVTNFHLPESTLIMMMASFAGREHILAAYEEAVRQKYRFFSFGDAMFIR

SEQ ID NO: 66016 - protein, 339 aa, Dialister succinatiphilus
  REGION 1..339: note = tr|H1D2U6|H1D2U6_9FIRM S-adenosylmethionine:tRNA ribosyltransferase-isomerase OS=Dialister succinatiphilus YIT 11850 OX=742743 GN=queA PE=3 SV=1
MKLEEFNYNLPKELIAQEPAEPRDSCRLMMLDKNTGAWEHHHFRDILDEIRPGDVFVFNNTKVIPARLYGKKRTTGGKVEMLLLTPKGNDVWEVLVNPGKKALPGTEIEFSDSCYCKVLDKTDFGGRVVEFHYDGNFDSLLDQLGEMPTPPYIHKKLENKDEYQTVYAKYKGSAAAPTAGLHFTPELMEEMKKKGAELLFVTLHVGIGTFRPVNEENIEDHEMHKEWYTVSQETADAVNQARSEGRRIIAVGTTSVRTLESAGQSGTLQSGSGWTQLYIYPGYQWHMVDAIVTNFHLPESTLIMMMASFAGREHILAAYEEAVKQKYRFFSFGDAMFIR

SEQ ID NO: 66017 - protein, 366 aa, Diaphorobacter nitroreducens
  REGION 1..366: note = tr|A0A3N1ZHD8|A0A3N1ZHD8_9BURK S-adenosylmethionine:tRNA ribosyltransferase-isomerase; OS = Diaphorobacter nitroreducens OX=164759 GN=queA PE=3 SV=1
MSSASTAPRTFTLSDFDFELPELLIAQHPAPQRSGSRLLDGRTAPPTDRIFRELPDLLQPGDLLVFNDTRVVKARVFGEKASGGKLELLIERVLTGNEVVAHMKVSKKPLPGATLHLAGGAAAGGFDATLLGRYPDADGPLFRLALRGPAGESPWELMERHGHLPLPPYIERQQAGGNDPHAGEDSERYQTVFARAPGAVAAPTAALHFDDAVLARLAERGIERASVTLHVGAGTFQPVKTENLAEHRMHSEWYEVPLATLAALERCRQRGGRVVAVGTTTVRTLESWAASGQAAGDTSIFITPGFQFQVVDLLLTNFHLPKSTLMMLVSAFAGYEHIMHLYRHAVAQRYRFFSYGDCMLLERPRA

SEQ ID NO: 66018 - protein, 366 aa, unidentified
  source 1..366: note = Diaphorobacter polyhydroxybutyrativorans
  REGION 1..366: note = tr|A0A2Z2LJU5|A0A2Z2LJU5_9BURK S-adenosylmethionine:tRNA ribosyltransferase-isomerase; OS = Diaphorobacter polyhydroxybutyrativorans OX=1546149; GN = queA PE=3 SV=1
MSSASTAPRTFTLSDFDFELPELLIAQHPAPQRSGSRLLDGRTVPPTDRIFRELPDLLQPGDLLVFNDTRVVKARVFGEKASGGKLELLIERVLTGNEVVAHMKVSKKPLPGATLHLAGGAAAGGFDATLLGRYPDADGPLFRLALRGPAGESPWELMERHGHLPLPPYIERQQAGGNDPHAGEDSERYQTVFARAPGAVAAPTAALHFDDAVLARLAERGIERASVTLHVGAGTFQPVKTENLAEHRMHSEWYEVPLATLAALERCRQRGGRVVAVGTTTVRTLESWAASGQAAGDTSIFITPGFQFQVVDLLLTNFHLPKSTLMMLVSAFAGYEHIMQLYRHAVAQRYRFFSYGDCMLLERPHA

SEQ ID NO: 66019 - protein, 366 aa, Diaphorobacter sp.
  REGION 1..366: note = tr|A0A2S4KCS0|A0A2S4KCS0_9BURK S-adenosylmethionine:tRNA ribosyltransferase-isomerase; OS = Diaphorobacter sp. LR2014-1 OX=1933219 GN=queA PE=3 SV=1
MSSASTAPRTFTLSDFDFELPELLIAQHPAPQRSGSRLLDGRAAPPTDRIFRELPDLLQPGDLLVFNDTRVVKARVFGEKASGGKLELLIERVLTGNEVVAHMKVSKKPLPGATLHLAGGAAAGGFDATLLGRYPDADGPLFRLALRGPAGESPWELMERHGHLPLPPYIERQQAGGNDPHAGEDSERYQTVFARAPGAVAAPTAALHFDDAVLARLAERGIERASVTLHVGAGTFQPVKTENLAEHRMHSEWYEVPLATLAALERCRQRGGRVVAVGTTTVRTLESWAASGQAAGDTSIFITPGFPFQVVDLLLTNFHLPKSTLMMLVSALAGYEHIMQLYRHAVAQRYRFFSYGDCMLLERPRA

SEQ ID NO: 66020 - protein, 366 aa, Diaphorobacter sp.
  REGION 1..366: note = tr|A0A0J0UR06|A0A0J0UR06_9BURK S-adenosylmethionine:tRNA ribosyltransferase-isomerase; OS = Diaphorobacter sp. J5-51 OX=680496 GN=queA PE=3 SV=1
MSSASTAPRTFTLGDFDFELPELLIAQHPAPQRSGSRLLDGRTAPPTDRIFRELPDLLQPGDLLVFNDTRVVKARVFGEKASGGKLELLIERVLTGNEVVAHMKVSKKPLPGATLHLAGGAAAGGFDATLLGRYPDADGPLFRLALRGPAGESPWELMERHGHLPLPPYIERQQASGNDPHAGEDSERYQTVFARAPGAVAAPTAALHFDDAVLARLAERGIERASVTLHVGAGTFQPVKTENLAEHRMHSEWYEVPLATLAALERCRQRGGRVVAVGTTTVRTLESWAASGQAAGDTSIFITPGFPFQVVDLLLTNFHLPKSTLMMLVSAFAGYEHIMQLYRHAVAQRYRFFSYGDCMLLERPRA

SEQ ID NO: 66021 - protein, 354 aa, Dichelobacter nodosus
  REGION 1..354: note = tr|A0A5F1ABE1|A0A5F1ABE1_DICNO S-adenosylmethionine:tRNA ribosyltransferase-isomerase; OS = Dichelobacter nodosus OX=870 GN=queA PE=3 SV=1
MQHTLKKSDFFYELPEHLIARYPLQNRSDSRLLVAAVESAQKVHISNKQMIDFIDFLKPEDLLVINNTRVVPARMFGHKISGGKVEVFIERLLSEQRVKAHIRASKAPLLGSQIVIGAQKVTIEDKKDGIYTVFSEMPWTKLMAQQGKMPIPPYLARDAEALDSERYQTVYAQIAGAVAAPTAGLHFDQKLLERIAAKGVKRAAITLHVGAGTFQPVRVENLNEHVMHQEWFSLSQEVVDAVAACRAQNGRVIAIGTTALRALESAAIGSGKVGVFQGDTDLFITPGYEFQVVDALFTNFHLPESTLLMLVSAFAGVNNIRRIYQHAITEQYRFFSYGDAMFLPHRLPALETLL

SEQ ID NO: 66022 - protein, 354 aa, Dichelobacter nodosus; identical to SEQ ID NO: 66021
  REGION 1..354: note = sp|A5EWY6|QUEA_DICNV S-adenosylmethionine:tRNA ribosyltransferase-isomerase OS=Dichelobacter nodosus (strain VCS1703A) OX=246195 GN=queA PE=3 SV=1

SEQ ID NO: 66023 - protein, 369 aa, Dichotomicrobium thermohalophilum
  REGION 1..369: note = tr|A0A397QBE7|A0A397QBE7_9RHIZ S-adenosylmethionine:tRNA ribosyltransferase-isomerase; OS = Dichotomicrobium thermohalophilum OX=933063 GN=queA; PE = 3 SV=1
MSGPDKTSGGLRLDDFDYNLPEDRIALRPASPRDSARLLVVRPGAALELEDRIVRDLPDILAPGDTLVFNDTRVIPAQLNAKRVGRGETEPEIGITLHKRESGNRWRAFAKPGRKLAEGDRLAISGLERKALYARVEEKSGGEVLLAFEAESQALDALIDAAGVMPLPPYIASRRPPDERDREDYQTMFAAREGAVAAPTAGLHFTPELMDRLHARGIGWETVTLHVGAGTFLPVKVEDIANHRMHAEWGEISAETADKLNETRARRGRIVCVGTTCLRILETAVTRDRKIRPFSGETDIFITPGHTFRAIDVLMTNFHLPRSTLVMLVAAFSGLERIMRAYEHAVESGYRFYSYGDACLLWPDPAALP

SEQ ID NO: 66024 - protein, 355 aa, unidentified
  source 1..355: note = Dickeya aquatica
  REGION 1..355: note = tr|A0A375AD82|A0A375AD82_9GAMM S-adenosylmethionine:tRNA ribosyltransferase-isomerase; OS = Dickeya aquatica OX=1401087 GN=queA PE=3 SV=1
MRVSDFSFELPESLIARYPQATRSGCRLLSLDGPTGAVSHGVFTDLLDKLQPGDLLVFNNTRVIPARLFGRKVSGGRLEVLVERMLDEQRVLAHVRASKAPKPGTELLLGEDESVKATMLARHDALFEIRFDDARDVLTILNDIGHMPLPPYIDRPDEAADRELYQTVYGERPGAVAAPTAGLHFDEPLLAALKEKGIQMAFVTLHVGAGTFQPVRVETIEEHVMHAEYAEVPPDVVDAVLACKARGNRVIAVGTTSVRSLESAAQASQQALIAPFFGDTRIFIYPGYHYQVVDALVTNFHLPESTLIMLVSAFAGYQHTMAAYHQAVAAQYRFFSYGDAMFITRNPAAEQEQIG

SEQ ID NO: 66025 - protein, 357 aa, Dickeya chrysanthemi
  REGION 1..357: note = tr|C6CEL4|C6CEL4_DICC1 S-adenosylmethionine:tRNA ribosyltransferase-isomerase OS=Dickeya chrysanthemi (strain Ech1591) OX=561229 GN=queA PE=3 SV=1
MVMRVADFSFELPEYLIARYPQAKRSGCRLLSLDGPTGAIAHGVFTDLLDKLQPGDLLVFNNTRVIPARLFGRKASGGKLEVLVERMLDDKRVLAHVRASKAPKPGTALLLGEDESVKATMLARHDALFEIQFDDTRDVLTILNDIGHMPLPPYIDRPDEAADRELYQTVYSQRPGAVAAPTAGLHFDEPLLAALKEKGVEMAFVTLHVGAGTFQPVRVESIEDHIMHAEYAEVPQAVVDAVLACKARGNRVIAVGTTSVRSLESAAQASAGESLAPFFGDTRIFIYPGYHYRVVDALVTNFHLPESTLIMLVSAFAGYRHTMAAYRQAVTEQYRFFSYGDAMFITRNPSAEQEQVG

SEQ ID NO: 66026 - protein, 355 aa, Dickeya dadantii
  REGION 1..355: note = tr|E0SD34|E0SD34_DICD3 S-adenosylmethionine:tRNA ribosyltransferase-isomerase OS=Dickeya dadantii (strain 3937) OX=198628 GN=queA PE=3 SV=1
MRVADFSFELPESLIAHYPQAKRSGCRLLSLDGPTGALTHGVFTDLLDKLQPGDLLVFNNTRVIPARLFGRKVSGGKLEVLVERMLDDKRVLAHVRASKVPKPGTELLLGEDESVKATMLARHDALFEIQFDDTRDVLTILNDIGHMPLPPYIDRPDEAADRELYQTVYSQRPGAVAAPTAGLHFDEPLLAALKEKGVEMAFVTLHVGAGTFQPVRVESIEDHIMHAEYTEVPQVVVDAVLACKARGNRVIAVGTTSVRSLESAAQASTGEIIAPFFGDTRIFIYPGYRYRVVDALVTNFHLPESTLIMLVSAFAGYRHTMTAYQQAVAEQYRFFSYGDAMFITRNPSAEQEQVG

SEQ ID NO: 66027 - protein, 355 aa, Dickeya dianthicola
  REGION 1..355: note = tr|A0A3A4CQY3|A0A3A4CQY3_9GAMM S-adenosylmethionine:tRNA ribosyltransferase-isomerase; OS = Dickeya dianthicola OX=204039 GN=queA PE=3 SV=1
MRVADFSFELPESLIARYPQAKRSGCRLLSLDGPTGALTHGVFTDLLDKLQPGDLLVFNNTRVIPARLFGRKASGGKLEVLVERMLDDKRVLAHVRASKAPKPGAELLLGEDESVKATMLARHDALFEIQFDDTRDVLTILNDIGHMPLPPYIDRPDDAADRELYQTVYSQRPGAVAAPTAGLHFDEPLLAALKEKGVDMAFVTLHVGAGTFQPVRVESIEDHIMHAEYAEVPQAVVDAVLACKARGNRVIAVGTTSVRSLESAAQASTGEVIAPFFGDTRIFIFPGYHYQVVDALVTNFHLPESTLIMLVSAFAGYRYTMTAYRQAVAEQYRFFSYGDAMFITRNPSAEQEQVG

SEQ ID NO: 66028 - protein, 355 aa, unidentified
  source 1..355: note = Dickeya fangzhongdai
  REGION 1..355: note = tr|A0A2K8QTZ8|A0A2K8QTZ8_9GAMM S-adenosylmethionine:tRNA ribosyltransferase-isomerase; OS = Dickeya fangzhongdai OX=1778540 GN=queA PE=3 SV=1
MRVADFSFELPESLIARYPQAKRSGCRLLSLDGPTGALTHGVFTDLLDKLQPGDLLVFNNTRVIPARLFGRKASGGKLEVLVERMLDDQRVLAHVRASKAPKPGTELLLGEDESVKATMLERHDALFEIRFDDTRDVLTILNDIGHMPLPPYIDRPDEAADRELYQTVYSQRPGAVAAPTAGLHFDEPLLAALKEKGVEMAFVTLHVGAGTFQPVRVESIEDHIMHAEYAEVPQAVVDAVLACKARGNRVIAVGTTSVRSLESAAQASTGEAIAPFFGDTRIFIYPGYHYRVVDALVTNFHLPESTLIMLVSAFAGYRHTMTAYRQAVTEQYRFFSYGDAMFITRNPSAEQEQVG

SEQ ID NO: 66029 - protein, 362 aa, Dickeya paradisiaca
  REGION 1..362: note = tr|C6CBS2|C6CBS2_DICP7 S-adenosylmethionine:tRNA ribosyltransferase-isomerase OS=Dickeya paradisiaca (strain Ech703) OX=579405 GN=queA PE=3 SV=1
MVMRVADFSFELPESLIARYPQAQRSACRLLSLEGTTGALTHGVFTDLLDTLNPGDLLVFNNTRVIPARLFGRKASGGKLEVLVERMLDDKRVLAHVRASKAPKPGMELLLGEDESVHATMLERHDALFEIRFDDERDILTILNDIGHMPLPPYIDRPDEAADRELYQTVYSQRPGAVAAPTAGLHFDEPLLAALKEKGVQMAFVTLHVGAGTFQPVRVESIEEHVMHAEYAEVPQEVLDAVLACKARGNRVVAVGTTSVRSLESAAQASPAGQLAPFFGDTSIFIYPGYHYRVVDALVTNFHLPESTLIMLVSAFAGYRHTMEAYRQAVVSEYRFFSYGDAMFITPNPAAEQEIVGQDPRR

SEQ ID NO: 66030 - protein, 357 aa, unidentified
  source 1..357: note = Dickeya solani
  REGION 1..357: note = tr|A0A2K8W3H2|A0A2K8W3H2_9GAMM S-adenosylmethionine:tRNA ribosyltransferase-isomerase; OS = Dickeya solani RNS 08.23.3.1.A OX=1240086 GN=queA PE=3; SV = 1
MVMRVADFSFELPESLIARYPQAKRSGCRLLSLDGPTGALAHGVFTDLLDKLQPGDLLVFNNTRVIPARLFGRKASGGKLEVLVERMLDEHRVLAHVRASKAPKPGTELLLGEDESVKATMLERHDALFEIRFDDTRDVLTILNDIGHMPLPPYIDRPDEAADRELYQTVYSQRPGAVAAPTAGLHFDEPLLAALKEKGVEMAFVTLHVGAGTFQPVRVESIEDHIMHAEYAEVPQAVVDAVLACKARGNRVIAVGTTSVRSLESAAQASTGEVIAPFFGDTRIFIYPGYHYRVVDALVTNFHLPESTLIMLVSAFAGYRHTMTAYQQAVAEQYRFFSYGDAMFITRNPSAEQEQVG

SEQ ID NO: 66031 - protein, 355 aa, Dickeya sp.
  REGION 1..355: note = tr|A0A5B8IG14|A0A5B8IG14_9GAMM S-adenosylmethionine:tRNA ribosyltransferase-isomerase; OS = Dickeya sp. NCPPB 569 OX=568768 GN=queA PE=3 SV=1
MRVADFSFELPESLIARYPQAKRSGCRLLSLDGPTGAVVHGVFTDLLDKLQPGDLLVFNNTRVIPARLFGRKASGGKLEVLVERMLDNHRVLAHVRASKAPKPGTELLLGEDESVKATMLARHDALFEIQFDDTRDVLTILNDIGHMPLPPYIDRPDEAADRELYQTVYSQRPGAVAAPTAGLHFDEPLLAALKEKGVEMAFVTLHVGAGTFQPVRVESIEDHVMHAEYAEVPQTVVDAVLACKARGNRVIAVGTTSVRSLESAAQASVEAVIAPFFGDTRIFIYPGYHYQVVDALVTNFHLPESTLIMLVSAFAGYRHTMDAYHQAVAEQYRFFSYGDAMFITRNPSAEQEQVG

SEQ ID NO: 66032 - protein, 355 aa, Dickeya sp.
  REGION 1..355: note = tr|A0A3N0G4P5|A0A3N0G4P5_9GAMM S-adenosylmethionine:tRNA ribosyltransferase-isomerase; OS = Dickeya sp. FVG1-MFV-O17 OX=2487136 GN=queA PE=3 SV=1
MRVADFSFELPESLIARYPQAKRSGCRLLSLDGPTGALAHGVFTDLLDKLQPGDLLVFNNTRVIPARLFGRKASGGKLEVLVERMLDDQRVLAHVRASKAPKPGTELLLGEDESVKATMLERHDALFEIRFDDTRDVLTILNDIGHMPLPPYIDRPDDAADRELYQTVYSQRPGAVAAPTAGLHFDEPLLAALKEKGVEMAFVTLHVGAGTFQPVRVESIEDHIMHAEYAEVPQAVVDAVLACKARGNRVIAVGTTSVRSLESAAQASTGEVIAPFFGDTRIFIYPGYHYRVVDALVTNFHLPESTLIMLVSAFAGYHHTMTAYRQAVAEQYRFFSYGDAMFITRNPSAEQEQVG

SEQ ID NO: 66033 - protein, 355 aa, Dickeya zeae
  REGION 1..355: note = tr|A0A2K9QC64|A0A2K9QC64_9GAMM S-adenosylmethionine:tRNA ribosyltransferase-isomerase; OS = Dickeya zeae OX=204042 GN=queA PE=3 SV=1
MRVADFSFELPESLIARYPQAQRSGCRLLSLDGPTGAVAHGVFTDLLDKLQPGDLLVFNNTRVIPARLFGRKASGGKLEVLVERMLDDKRVLAHVRASKAPKPGTALLLGEDESVKATMLARHDALFEIQFDDTRDVLTILNDIGHMPLPPYIDRPDEAADRELYQTVYSQRPGAVAAPTAGLHFDEPLLAALKEKGVEMAFVTLHVGAGTFQPVRVESIEDHVMHAEYAEVPQTVVDAVLACKARGNRVIAVGTTSVRSLESAAQASAEAVIAPFFGDTRIFIYPGYHYHVVDALVTNFHLPESTLIMLVSAFAGYRHTMDAYHQAVAEQYRFFSYGDAMFITRNPSAEQEQVG

SEQ ID NO: 66034 - protein, 355 aa, Dickeya zeae
  REGION 1..355: note = tr|A0A0A8FG29|A0A0A8FG29_9GAMM S-adenosylmethionine:tRNA ribosyltransferase-isomerase; OS = Dickeya zeae EC1 OX=1427366 GN=queA PE=3 SV=1
MRVADFSFELPESLIARYPQAQRSGCRLLSLDGPTGAVAHGVFTDLLDKLQPGDLLVFNNTRVIPARLFGRKASGGKLEVLVERMLDDKRVLAHVRASKAPKPGTALLLGEDESVKATMLARHDALFEIQFDDKRDVLTILNDIGHMPLPPYIDRPDEAADRELYQTVYSQRPGAVAAPTAGLHFDEPLLAALKEKGVEMAFVTLHVGAGTFQPVRVESIEDHVMHAEYAEVPQTVVDAVLACKARGNRVIAVGTTSVRSLESAAQASAKAVIAPFFGDTRIFIYPGYHYQVVDALVTNFHLPESTLIMLVSAFAGYRHTMEAYHQAVAEQYRFFSYGDAMFITRNPSAEQEQVG

SEQ ID NO: 66035 - protein, 374 aa, unidentified
  source 1..374: note = Dictyobacter alpinus
  REGION 1..374: note = tr|A0A402B8R7|A0A402B8R7_9CHLR S-adenosylmethionine:tRNA ribosyltransferase-isomerase; OS = Dictyobacter alpinus OX=2014873 GN=KDA_31860 PE=3 SV=1
MMYLNAETFGPDTVDIALTSLLDFTLPAELEASMPPEARGLTRDQVRLLVSYRSNNHIIHTQFQHIEEVLQAGDVLVINTSATMKASLPVTNSQGTQLELHLSTHLPADLWIVEIRQHHHKTTLPFFAIQPGEVFQLPEGGSVTLHTPHHAGYRELDRAALHPRLWIATLNLPAVTTRDEFLTKHGQPIRYSYVKDAWPIEYYQTAYANEIGSAEMPSAGRAFTPTLLTRLIARGVQIVPLLLHTGVASLESHEPPYEEFYRVPATTASLVTTARQEGRRVIAVGTTVVRALETVTTPNGITHPGEGWTRTIVTPERGIHSVNALLTGFHEPQATHLAMLEALATRSHLQLTYQEALQQRYLWHEFGDLHLLLP

SEQ ID NO: 66036 - protein, 366 aa, unidentified
  source 1..366: note = Dictyobacter alpinus
  REGION 1..366: note = tr|A0A402B5H5|A0A402B5H5_9CHLR S-adenosylmethionine:tRNA ribosyltransferase-isomerase; OS = Dictyobacter alpinus OX=2014873 GN=queA PE=3 SV=1
MDNTLKISDFDYDLPLELIAQTPIEPRDSSRLLVVQRQTETMEHRHFRDLGDYLKPGDLLIANQSRVIPARLLGYRAETRGAAEVLLLAERSELGPDHWETLVRPGRRLREGARIYFGAPDQEPRLIGEILQRTEAGGRIVHFQVPDQETSNPGDPYNVLTVRQRIDEIGRMPLPPYIHETLEDQERYQTVYARIQGSAAAPTAGLHFTPELLERLRQQGVRTGFVTLHVGLDTFRPVEHENVSEHKMHSEEIELDSATAELINETKKAGGRVVAVGTTSVRVLESVASFYDGKIAAYKGNTNLFITPGTKFQVVDAMITNFHLPRSTLLLLVSAFMGKELMERAYQEAIRERYRFFSFGDAMLLL

SEQ ID NO: 66037 - protein, 365 aa, unidentified
  source 1..365: note = Dictyobacter aurantiacus
  REGION 1..365: note = tr|A0A401ZE18|A0A401ZE18_9CHLR S-adenosylmethionine:tRNA ribosyltransferase-isomerase; OS = Dictyobacter aurantiacus OX=1936993 GN=queA PE=3 SV=1
MDNNLKISDFDYDLPIELIAQTPIEPRDASRLLVVRREDKTFTHRHFRDLGEFLRPGDLLIANQSRVIPARLLGYRPQTNGSAEVLLLTERNELGPDHWEALVRPGRRLREGAIIHFGPQDQPPRLIGEIQQRTEAGGRIVHFTVPDQQANSDDPYQLLSVRQRIDEIGRMPLPPYIHETLEDQERYQTVYARIQGSAAAPTAGLHFTPELLDHLRQQGVRTGFVTLHVGLDTFRPVEHENVSEHKMHSEEIELDAETAVLINETRQAGGRVVAVGTTSVRVLESVASIYDGEIAPYKGSTSLFITPGTPFRAVDAMITNFHLPRSTLLLLVSAFMGKELMEQAYQEAIKERYRFFSFGDAMLLL

SEQ ID NO: 66038 - protein, 368 aa, unidentified
  source 1..368: note = Dictyobacter kobayashii
  REGION 1..368: note = tr|A0A402AIF9|A0A402AIF9_9CHLR S-adenosylmethionine:tRNA ribosyltransferase-isomerase; OS = Dictyobacter kobayashii OX=2014872 GN=queA PE=3 SV=1
MDNTLKISDFNYDLPLELIAQTPIEPRDASRLLVVQRATGTFEHRHFRDLGDFLRPGDLLIANQSRVIPARLLGYRAETKGAVEVLLLTERNDLGPDHWETLVRPGRRLREGARIYFGPQDQAPRLIGEIQQRTEAGGRIVHFWTPEQEAGSSGSADPYQVLSVRQRIDEIGRMPLPPYIHETLEDQERYQTVYARIQGSAAAPTAGLHFTPELLERLRQQGVRTGFVTLHVGLDTFRPVEHENVSEHKMHSEEIELDSPTAELINETKKAGGRVIAVGTTSVRVLESVASFHNGEIAPYKGSTRLFITPGTRFQAVDAMITNFHLPRSTLLLLVSAFMGKELMEQAYQEAIKERYRFFSFGDAMLLL

SEQ ID NO: 66039 - protein, 368 aa, unidentified
  source 1..368: note = Dictyobacter sp.
  REGION 1..368: note = tr|A0A5A5T5R0|A0A5A5T5R0_9CHLR S-adenosylmethionine:tRNA ribosyltransferase-isomerase; OS = Dictyobacter sp. Uno17 OX=2014874 GN=queA PE=3 SV=1
MDNILKISDFDYDLPLELIAQTPIEPRDASRLLVARRADQTLEHRHFRDIGEYLRPGDLLIANQSRVIPARLLGQRAETGGAVEVLLLAERTEKGPDHWETLVRPGRRLREGALIHFGPTGQAPRLMAEIKERTEAGGRIVHFWVPQEPNDASNDPYQILTVRQRIDEIGRMPLPPYIHESLADQERYQTVYARIRGSAAAPTAGLHFTTELLERLRQQGVRTGFVTLHVGLDTFRPVEEENVSEHKMHSEEIELDAPTAELINATRKAGGRIIAVGTTSVRVLESVASLQEGQDETTPFKGSTRLFITPGRKYKLVDAMITNFHLPRSTLLLLVSAFMGKEFMETAYQEAIQERYRFFSFGDAMLLL

SEQ ID NO: 66040 - protein, 120 aa, unidentified
  source 1..120: note = Dictyobacter sp.
  REGION 1..120: note = tr|A0A5A5T9F2|A0A5A5T9F2_9CHLR S-adenosylmethionine:tRNA ribosyltransferase-isomerase; OS = Dictyobacter sp. Uno17 OX=2014874 GN=KDI_11080 PE=3 SV=1
MTSLESHEPPYEEYYRVSSTSARLITTARADGRRLIAVGTTVVRTLETVMDDQGSTHPGEGWTSIIVSPERGDTRSVHALLTGFHEPQATHLAMLEAFASRHHLKLAYQAALNTGYRWHE

SEQ ID NO: 66041 - protein, 339 aa, Dictyoglomus sp.
  REGION 1..339: note = tr|A0A2J6XX03|A0A2J6XX03_9BACT S-adenosylmethionine:tRNA ribosyltransferase-isomerase; OS = Dictyoglomus sp. NZ13-RE01 OX=2010949 GN=queA PE=3 SV=1
MVLKLSDYDYYLPEELIAQEPVEPRDSSKLMVVSRESGEISICIFRDIHRFLRKGDVLVLNDTKVIPARIYGRKETGAKIEVLLLKKIDDLTFSALIKPGRRAKIGSKILFKDDVFCEVLERNEDGIFLLKFSTPNLENILPEIGKIPLPPYIKKPLENPERYQTVYAKKLGSVAAPTAGLHFTPELLENLKNMGIEILYITLHVGLGTFRPVVVDDITKHKIDPEYYEISEEVSYRINKAKEEGRRIIAVGTTVTRTLEGNREGSRVKAGKGLVDLFIYPGFEFKIIDGLITNFHLPKSTLLMLVSAFMGYDLMKKAYAKAIEERFRFYSFGDAMFIY

SEQ ID NO: 66042 - protein, 339 aa, Dictyoglomus thermophilum
  REGION 1..339: note = tr|B5YFK6|B5YFK6_DICT6 S-adenosylmethionine:tRNA ribosyltransferase-isomerase OS=Dictyoglomus thermophilum (strain ATCC 35947 / DSM 3960 / H-6-12) OX=309799; GN = queAPE=3 SV=1
MVLKLSDYDYYLPEELIAQEPAEPRDTSRLMLVNRKTGEINITIFREIKNYLKAGDVLVLNNTKVIPARLYGKKETGAKIEVLLLKKIGEGKYEALLKPGKRAKIGTKIHFLEDIYAEVVERNEEGIFVLKFSQEDLDKILPEIGNIPLPPYIKKPIDDPNKYQTVYAQKEGAVAAPTAGLHFTEELLKTLGEMGVEILYITLHVGLGTFRPVVVEDITKHKLDPEYFEVSDEVAERINKAKEERRRVIAVGTTVTRVLEAQGRSGKVEPGSGLVDLFIYPGFEFKIIDGLITNFHLPKSTLLMLVAAFMGYDLMKKAYNKAIEERMRFYSFGDAMFIY

SEQ ID NO: 66043 - protein, 339 aa, Dictyoglomus thermophilum
  REGION 1..339: note = tr|A0A5D4XKK8|A0A5D4XKK8_DICTH S-adenosylmethionine:tRNA ribosyltransferase-isomerase; OS = Dictyoglomus thermophilum OX=14 GN=queA PE=3 SV=1
MVLKLSDYDYYLPEELIAQEPAEPRDTSRLMLVNRKTGEINITIFREIKNYLKSGDVLVLNNTKVIPARLYGKKETGAKIEVLLLKKIGEGKYEALLKPGKRAKIGTKIYFFEDIYAEVVNRNEEGIFVLKFSQEDLDKILPEIGNIPLPPYIKKPIDDPDKYQTVYAQKEGAVAAPTAGLHFTEELLKTLGEMGVEILYITLHVGLGTFRPVVVEDITKHKLDPEYFEVSDEVAERINKAKEERRRVIAVGTTVTRVLEAQGRSGKVEPGSGLVDLFIYPGFEFKVIDGLITNFHLPKSTLLMLVAAFMGYDLMKKAYNKAIEERMRFYSFGDAMFIY

SEQ ID NO: 66044 - protein, 339 aa, Dictyoglomus turgidum
  REGION 1..339: note = tr|B8E2N6|B8E2N6_DICTD S-adenosylmethionine:tRNA ribosyltransferase-isomerase OS=Dictyoglomus turgidum (strain Z-1310 / DSM 6724) OX=515635 GN=queA PE=3 SV=1
MVLKLSDYDYYLPEELIAQEPAEPRDSSRLMLVNRRTGEIDITIFREIKNYLKSGDVLVLNNTKVIPARLYGKKDTGAKIEVLLLKKVEEGVYEALVKPGKRAKIGTKIYFSGDIYAEVVERKEEGIFVLRFSQEDLEEILPEIGNIPLPPYIKKPLNDPNKYQTVYAQKEGAVAAPTAGLHFTEELLHTLQKMGIEILYITLHVGLGTFRPVVVEDITKHKLDPEYFEVREDVAERINRAKEEGRRVIAVGTTVTRVLEAQGRSGRVEPGAGLVDLFIYPGFEFKILDGLITNFHLPKSTLLMLVAAFMGYDLMKKAYNRAIEERMRFYSFGDAMFIY

SEQ ID NO: 66045 - protein, 340 aa, unidentified
  source 1..340: note = Dielma fastidiosa
  REGION 1..340: note = tr|A0A318KVQ7|A0A318KVQ7_9FIRM S-adenosylmethionine:tRNA ribosyltransferase-isomerase; OS = Dielma fastidiosa OX=1034346 GN=queA PE=3 SV=1
MKTSEFDFDLPEELIAQTPLKERSESRLLVLHRSTGEIEHRHFYDLCDYLKPGDVLVRNNTRVIPARLFGTKEETNAHVELLLLKQEGDVWECLVGNARVVKMGTVISFGEGELKAECIGIGEKGLRTFKMIYEGIFYEILDHLGNVPLPPYIKEKLEDPERYQTVYAKVKGSAAAPTAGLHFTDALFAKIKAMGVEVEDVTLHVGLGTFRPMDTEDVLEHHMHSEFYMMDADTAQRLNQAKSEGRRIIAIGTTSCRTLEAIMQKYGQFQACAEETDIFIYPGYEFKAIDALITNFHLPKSTLVMLVSALASKELIMKAYQEAIDEKYRFFSFGDSMFIE

SEQ ID NO: 66046 - protein, 440 aa, unidentified
  source 1..440: note = Dinghuibacter silviterrae
  REGION 1..440: note = tr|A0A4V6Q9Z1|A0A4V6Q9Z1_9BACT S-adenosylmethionine:tRNA ribosyltransferase-isomerase; OS = Dinghuibacter silviterrae OX=1539049 GN=queA PE=3 SV=1
MIARQGAVRNLYTGKCVFLIVVQNKGADRCVSPLLFLPYLCSMKQGPRVLNINDYTYNLPEDRIAQYPLAERDASKLLVYKNGGITEAPYRDLPAHIPQDAFMVFNDTKVIEARLLFRKESGGQIEIFCLEALGVEPTTAMMQQGEATWKCLVGGAGKWKTGALIRTWEGVTLTAEKLGQVPDGYQVKFTWTPEELHFAEVLHRAGLVPLPPYLHRSSEALDTERYQTVYARTDGSVAAPTAGLHFTQGLIEALRDKGVDTGFVTLHVGAGTFKPVKADRMEDHVMHAEWIDVTRTFIQTLRDTKGPVIPVGTTALRTLESLYWMGVKAQGGTKNLDLTQWEVYEDLPQEMTTKQALDGLLEWMDGRDRLVAQTQLLIAPGYRPRVARALVTNFHQPGSTLLLLVAALIGVDWKKVYAYALEHDFRFLSYGDGSLLWFKK

SEQ ID NO: 66047 - protein, 349 aa, unidentified
  source 1..349: note = Dinghuibacter silviterrae
  REGION 1..349: note = tr|A0A4R8DEX7|A0A4R8DEX7_9BACT S-adenosylmethionine:tRNA ribosyltransferase-isomerase; OS = Dinghuibacter silviterrae OX=1539049 GN=queA PE=3 SV=1
MKLSQFTFDLPLNLIAQHPSKKRDESRLMVIERKTGNIENRNFKDIMDYFDDKDVFVVNNTKVFPARMYGRKEKTGAKIEVFLLRELNKPNRLWDVIVDPARKIRVGNKLYFGDNDELVAEVIDNTTSRGRTIRFLFEGSDDEFRNILETLGETPLPKYIKRKPDEEDKERYQTVYAKFEGAVAAPTAGLHFSRELIKRLEIKGIRFAEVTLHTGLGTFRPIEVEDLSKHKMDAEYYRIDDFACKIVNKAKEEGHRICSVGTTTMRALESSVTAQKLLKPSEGWTNTFIHPPYDFNIADSLVTNFHLPKTSLLIMVCAFAGYELTMEAYKKAIKDKYRFFSYGDAMVVL

SEQ ID NO: 66048 - protein, 353 aa, Dinoroseobacter shibae
  REGION 1..353: note = sp|A8LI68|QUEA_DINSH S-adenosylmethionine:tRNA ribosyltransferase-isomerase OS=Dinoroseobacter shibae (strain DSM 16493 / NCIMB 14021 / DFL 12) OX=398580; GN = queA PE= 3 SV=1
MHLSDFDFDLPETLIATRPARPRSSARLLVAEARGPFRDRRVTDLVDELQPGDRLVLNNTKVIPARLFGTRHRDSAQGPVSAKVEITLLEPASEGWTALAKPLRKLAEGEEIVFSDALRATVAERGADRVRLVFNCTGDDFDAALAQAGAMPLPPYIAAKRAADAQDRDDYQTVFAARKGAVAAPTASLHFDEALLAALRARGVEFSFVTLHVGAGTFLPVKVDDVTTHKMHSEWGEISDQAAAEILATRADGRRVIPVGTTALRLIETAAAQPGGFGPWEGDTDIFIYPGFEFRITDGLMTNFHLPKSTLMMLVSALMGAERIREIYAHAIAQEYRFFSYGDSSLLLPDRGA

SEQ ID NO: 66049 - protein, 136 aa, Dinoroseobacter sp.
  REGION 1..136: note = tr|A0A2D8TLQ1|A0A2D8TLQ1_9RHOB S-adenosylmethionine:tRNA ribosyltransferase-isomerase (Fragment) OS=Dinoroseobacter sp. OX=2003366; GN = CL945_11975 PE=3 SV=1
MNLSDFDFDLPEHLIATRPARPRSSARLLVADGDTTRDLHVRDLPDLLRAGDRLILNDTKVIPARLTGQRWRDSAQGRVAAKIEVTLLEPGPDGTWSALAKPMRKLRPGESVGFPGGLSAEVVALEGGLRLRFNLA

SEQ ID NO: 66050 - protein, 319 aa, unidentified
  source 1..319: note = Dissulfuribacter thermophilus
  REGION 1..319: note = tr|A0A1B9F3U3|A0A1B9F3U3_9DELT S-adenosylmethionine:tRNA ribosyltransferase-isomerase; OS = Dissulfuribacter thermophilus OX=1156395 GN=queA PE=3; SV = 1
MVLHRGQGRWEHRRFCDLPDLLSETDVLILNDTKVFPARLFGKKPTGGRVEVVLLNFPRVEEEGRATSEALLRSSKPLRPGQRIIVGTDLEIEIMEGADDWIKKISLMYDGELLKVLETHGHVPLPPYIRRQDEDLDKKRYQTIFARNIGSVAAPTAGLHFSNALLERLKDIGVKIGYITLHVGYGTFAPVRTEDIREHKIHSEWIDVPSSALQLVRSAKANGSRIICVGTTTVRALEYVFKEHEKADSYSGPCDLYIYPGFTFRATDAIITNFHLPKSSLLIMVSAFAGRELILSAYNEAVKAQYRFYSYGDSMLILP

SEQ ID NO: 66051 - protein, 366 aa, Dokdonella fugitiva
  REGION 1..366: note = tr|A0A4R2I3R7|A0A4R2I3R7_9GAMM S-adenosylmethionine:tRNA ribosyltransferase-isomerase; OS = Dokdonella fugitiva OX=328517 GN=queA PE=3 SV=1
MVHTVAPIASTIPHSLFPIPALKKSDFHFDLPPELIAQAPLPERSASRLLVADARSRSLADRRFTDLVELLQPGDLLVFNDTRVLPARLFGRKPSGGLVEILIERVTGTHEARAQLGVSKKPKAGGRIVLADGSEASVLGRDGEFFLLRFETMEPVEKVLLRLGRMPLPPYIDREAGSADDERYQTVFARHAGAVAAPTAGLHFDAGLLRRLEARGVESGYVTLHVGAGTFQPVRSERLEDHVMHREWLNVGAELVEKIRRTRERGGRVVAVGTTVVRALESSMHDGQVAPFAGETQIFIMPGYRITSIDALVTNFHLPESTLLMLVSAFAGREFMLDAYRHAVAERYRFFSYGDAMLILPPGAPA

SEQ ID NO: 66052 - protein, 368 aa, unidentified
  source 1..368: note = Dokdonella immobilis
  REGION 1..368: note = tr|A0A1I4V7A2|A0A1I4V7A2_9GAMM S-adenosylmethionine:tRNA ribosyltransferase-isomerase; OS = Dokdonella immobilis OX=578942 GN=queA PE=3 SV=1
MIVPLKKSDFHFDLPPELIAQAPLAERSSSRLLVLDVDRKSLLDRQFRELPDLLRAGDLLVFNDTRVLPARLFGRKSSGGAVEILIERVTGRHEATAQLGVSKKPKEGSAIELADGSLVRVLGRDGEFFRLRFEAAEPLEKLLLRLGRMPLPPYIDREADAVDGERYQTVFAREPGAVAAPTAGLHFDQSLLATLAERGIESGHVTLHVGAGTFQPMRAERVEDHVMHREWLNVGAELVDRIHRTRARGGRVIAVGTTVVRALESASRNGVLEPFAGETQIFIFPGYRFTSIDGLLTNFHLPESTLLMLVSALAGRELILDAYRHAVEQRYRFFSYGDAMLIWPDCRESGMENGESVKRRPPSASSNS

SEQ ID NO: 66053 - protein, 345 aa, Dokdonella koreensis
  REGION 1..345: note = tr|A0A160DXS3|A0A160DXS3_9GAMM S-adenosylmethionine:tRNA ribosyltransferase-isomerase; OS = Dokdonella koreensis DS-123 OX=1300342 GN=queA PE=3 SV=1
MKKSDFHFDLPPELIAQVPLAERSASRLLVLDAAARRFEDRALRDLPDLLAPGDLLVFNDTRVVPARLFGRKETGGAAEILIERLTGAHEATAQIGVSKKPREGTAIVLADGTVVRVLGRDGEFFRLRFETTEPLEKLLLRLGRLPLPPYIARDPDAADAERYQTVFAREPGAVAAPTAGLHFDAPLLAALERRGVAVGQVTLHVGAGTFQPMRAERLDQHVMHREWLNVGAGLVEKIRHTRERGGRVVAVGTTVVRALETATRDGVLGPYAGETQIFIFPGYRITSVDALLTNFHLPESTLLMLVSALAGRELILEAYRHAVEQRYRFFSYGDAMLILPDRGQP

SEQ ID NO: 66054 - protein, 349 aa, Dokdonia donghaensis
  REGION 1..349: note = tr|A0A0A2GUW7|A0A0A2GUW7_9FLAO S-adenosylmethionine:tRNA ribosyltransferase-isomerase; OS = Dokdonia donghaensis DSW-1 OX=1300343 GN=queA PE=3 SV=1
MKLSHFDFNLPAELLAEHPAENRDESRLMVLNRKEQTIEHKMFKDLIDYFEPEDVMVLNNTKVFPARLYGNKEKTGARIEVFLLRELNSETRLWDVLVDPARKIRIGNKLYFGDDESLVAEVIDNTTSRGRTLRFLYDGSYEEFRKKLTSLGETPLPKYINREVEPEDEERYQTIYAKEEGAVAAPTAGLHFSKHLLKRLEIKGIDFAEVTLHVGLGTFSAVEVEDLSKHKMDSEEAYIRKPATEIINKAISEKRRVCAVGTTAMRVMESAVSSSGTLNEFGGWTNKFIFPPYDFSIANCMITNFHTPKSTLLMMVSAFAGHDFMKRAYDEAVKEKYKFYSYGDAMLII

SEQ ID NO: 66055 - protein, 349 aa, unidentified
  source 1..349: note = Dokdonia pacifica
  REGION 1..349: note = tr|A0A239C2K8|A0A239C2K8_9FLAO S-adenosylmethionine:tRNA ribosyltransferase-isomerase; OS = Dokdonia pacifica OX=1627892 GN=queA PE=3 SV=1
MKLSHFNFNLPEELLAERPAENRDESKLMVLNRKDQTIEHKTFKDLIDYFDPEDVMVLNNTKVFPARLYGNKEKTGARIEVFLLRELNSETRLWDVLVDPARKIRIGNKLYFGDDESLVAEVIDNTTSRGRTLRFLYDGSYEEFRRKLTDLGETPLPKYIKREVEPEDQERYQTIYAKEEGAVAAPTAGLHFSRHLLKRLEIKGVNFAEVTLHVGLGTFSPVEVEDLSKHKMDSEEAYIRKPATDTINRAITEKRRICAVGTTVMRALESAVSSANTLNEFEGWTNKFIFPPYDFSIANCMITNFHTPKSTLLMMVSAFAGHDLMKKAYDEAIKEGYQFYSYGDAMLII

SEQ ID NO: 66056 - protein, 349 aa, Dokdonia sp.
  REGION 1..349: note = tr|A0A3M0G677|A0A3M0G677_9FLAO S-adenosylmethionine:tRNA ribosyltransferase-isomerase; OS = Dokdonia sp. SH27 OX=2479847 GN=queA PE=3 SV=1
MKLSHFHFDLPEELLAERPAENRDESRLMVLNRKEQTIEHKQFKDLINYFDEKDVMVLNNTKVFPARLYGNKEKTGARIEVFLLRELNPETRLWDVLVDPARKIRIGNKLYFGDDETLVAEVIDNTTSRGRTLRFLYDGSYEEFRQKLTELGETPLPKYIQREVEPEDEERYQTIYATEEGAVAAPTAGLHFSKHLLKRLEIKGVDFAEVTLHVGLGTFSPVEVEDLSKHKMDSEEAYVRADTVATINKALTEKRRICAVGTTVMRALESSVSSSNTLNEFGGWTNKFIFPPYDFSIANCMVTNFHTPKSTLLMMVSAFAGHDFMKRAYDEAIKEKYKFYSYGDAMLII

SEQ ID NO: 66057 - protein, 349 aa, Dokdonia sp.
  REGION 1..349: note = tr|A0A2S1QCY3|A0A2S1QCY3_9FLAO S-adenosylmethionine:tRNA ribosyltransferase-isomerase; OS = Dokdonia sp. Dokd-P16 OX=2173169 GN=queA PE=3 SV=1
MKLSHFNFDLPDELLADRPAENRDESRLMVLNRKEQTIEHKMFKDIIDYFEPEDVMVLNNTKVFPARLYGNKEKTGARIEVFLLRELNSETRLWDVLVDPARKIRIGNKLYFGDDESLVAEVIDNTTSRGRTLRFLYDGSYEEFRKKLTSLGETPLPKYINREVEPEDEDRYQTIYATEEGAVAAPTAGLHFSKHLLKRLEIKGVDFAEVTLHVGLGTFSAVEVEDLSKHKMDSEEAYIHKPATEIINKALKEKRRICAVGTTSMRVMESAVSSNHTLNEFGGWTNKFIFPPYDFSIANCMITNFHTPKSTLLMMVSAFAGHDFMKKAYEEAVKEKYKFYSYGDAMLII

SEQ ID NO: 66058 - protein, 378 aa, unidentified
  source 1..378: note = Dolichospermum compactum
  REGION 1..378: note = tr|A0A1Z4V794|A0A1Z4V794_9CYAN S-adenosylmethionine:tRNA ribosyltransferase-isomerase; OS = Dolichospermum compactum NIES-806 OX=1973481 GN=queA; PE = 3 SV=1
MKQQIIQDNVETQNVNLDCSLSGYDYELPPGLIAQNPAVPRDSSKLLVVNSPETAKSIPPLHHIFRDLSELLKAGDLLVMNNTKVIPARLYGCKDTGAGVEVLLLEERGHNCWLALVKPGKRFKVGSEIIFTAGGDGNKQELRATVVESDPETGGRLLQFDLPPAVPLVQVLGKFGQIPLPPYITASTAADEQYQTVYAAEQGAIAAPTAGLHFTPELLEKLRNNGINQAFITLHVGVGTFRPVEVEDVTTHAMHEEWIEVTADTVEQIRATQAAGGRIIAVGTTVVRALEGAAQSGDLQPFVGKTNLFIYPGYKWQVVQGLITNFHLPRSSLLMLVSALIGRERLLDLYRQAISFEYRFYSFGDAMLILPEGKSIQL

SEQ ID NO: 66059 - protein, 381 aa, unidentified
  source 1..381: note = Dolichospermum planctonicum
  REGION 1..381: note = tr|A0A480AAI9|A0A480AAI9_9CYAN S-adenosylmethionine:tRNA ribosyltransferase-isomerase; OS = Dolichospermum planctonicum OX=136072 GN=queA PE=3 SV=1
MSSLEVQDVNLDCSLSSYDYELPPGLIAQNPAVPRDSSRLLVVNSLKNPHTIPVSHHIFRDLPELLQPGDLLVMNNTKVIPARLYGCKSTGAEVEVLLLEERQHNCWLALVKPGKRFKIGNEIIFTAGGEENQQTLRATVVESDPQTGGRLLQFDLPPAVPLVQVLGKFGEIPLPPYITASTAANEQYQTVYAQEAGAIAAPTAGLHFTPELLERLRVCGINQAFITLHVGVGTFRPVEVEDVTTHAMHEEWIEVSADTVEQIRATQAAGGRIIAVGTTVVRALEGAAQLGDLQPFMGKTNLFIYPGYKWQVVEGLITNFHLPRSSLLMLVSALIGRERLLDIYQEAIASEYRFYSFGDAMVILPADKKKSIKLHETSGEN

SEQ ID NO: 66060 - protein, 376 aa, unidentified
  source 1..376: note = Dolichospermum sp.
  REGION 1..376: note = tr|A0A5C0DQI4|A0A5C0DQI4_9CYAN S-adenosylmethionine:tRNA ribosyltransferase-isomerase; OS = Dolichospermum sp. UHCC 0315A OX=1914871 GN=queA PE=3; SV = 1
MKQKILQAESQDINLDCSLSGYEYELPPGRIAQNPAVPRDSSKLLVVNSPETAKTIPPLHHIFRNLPELLKPGDLLVMNNTKVIPARLYGYTSTSGSVEVLLVEERRHNCWLALVKPGKRFKIGNEIIFTSGEQGNKQTLKATVVESDSETGGRLLQFELPEQVPLLQVLGTFGQIPLPPYITASTAADEQYQTVYAAEEGAIAAPTAGLHFTPELLEKLRSCGINQAFITLHVGIGTFRPVEVKDVTTHAMHEEWIEVPADTVEQIRATQAAGGRIIAVGTTAVRALEGAAQLGDLQPFVGKTNLFIYPGYKWQVVEGLITNFHLPRSSLLMLVSALIGRERLLDLYQEAITSEYRFYSFGDAMLILPEGKSIKL

SEQ ID NO: 66061 - protein, 345 aa, Dolosicoccus paucivorans
  REGION 1..345: note = tr|A0A1G8M5L4|A0A1G8M5L4_9LACT S-adenosylmethionine:tRNA ribosyltransferase-isomerase; OS = Dolosicoccus paucivorans OX=84521 GN=queA PE=3 SV=1
MTFTKKDFEFNLPEELIAQTPLKDRSSSKLLVVDRATDQITDTNFTHILDYLSKGDALVVNETRVIPARLFGIKPDTNGHLEVLLLTNTQGDRWECLIKPARRAKKGTKIQFGEQGQLKATVVEELDHGGRIIEMEYEGVFLEVLETLGEMPLPPYIKERLNDPNRYQTVYAKHNGSAAAPTAGLHFTPQLLKQAKDKGIQVIPVTLHVGLGTFRPMSAERIEDHQMHAEFYTVSSTSAQAIEEVRKNGGKIIAVGTTTVRTLETVANENDGKIVASSGWTSIFITPGYQFKAVDHLITNFHLPASTLVMLVSAFYTRQGILNAYEHAIKEKYRFFSFGDAMLLL

SEQ ID NO: 66062 - protein, 352 aa, unidentified
  source 1..352: note = Domibacillus aminovorans
  REGION 1..352: note = tr|A0A177KSJ0|A0A177KSJ0_9BACI S-adenosylmethionine:tRNA ribosyltransferase-isomerase; OS = Domibacillus aminovorans OX=29332 GN=queA PE=3 SV=1
MKVEDFDFDLPEELIAQIPLLERAESRMMVLDKQTGNIQHDVFKHIVEYIQPGDLLVLNDTKVLPARLHGVKEETGANIEVLLLKQDEKDVWETLVKPAKRIKEGSIISFGDGKLRAVCTAEKEHGGRMLRFEYEGIFYEVLDELGEMPLPPYIKEQLEEKDRYQTVYAKERGSAAAPTAGLHFTEQLLNEIKMRGVRVEFITLHVGLGTFRPVSVDMIEEHDMHAEYYTISKQTEDAIRETKENGGRVIAVGTTSVRTLETAALDHGTVKESNGWTDIFIYPGFEFRAIDGMITNFHLPKSTLIMLISALAGQKEVLKAYAEAVKEQYRFFSFGDAMLIIDSKGGTEYDSH

SEQ ID NO: 66063 - protein, 352 aa, unidentified
  source 1..352: note = Domibacillus aminovorans
  REGION 1..352: note = tr|A0A177LAK1|A0A177LAK1_9BACI S-adenosylmethionine:tRNA ribosyltransferase-isomerase; OS = Domibacillus aminovorans OX=29332 GN=queA PE=3 SV=1
MKVEDFDFDLPEELIAQIPLLERAESRMMVLDKQTGNIQHDVFKHIVEYIQPGDLLVLNDTKVLPARLHGVKEETGANIEVLLLKQDEKDVWETLVKPAKRIKEGSIISFGDGKLRAVCTAEKEHGGRMLRFEYEGIFYEVLDELGEMPLPPYIKEQLEEKDRYQTVYAKERGSAAAPTAGLHFTEQLLNEIKMRGVRVEFITLHVGLGTFRPVSVDTIEEHDMHAEYYTISKQTEDAIRETKENGGRVIAVGTTSVRTLETAALDHGTVKESNGWTDIFIYPGFEFRAIDGMITNFHLPKSTLIMLISALAGQKEVLKAYAEAVKEQYRFFSFGDAMLIIDSKGGTDNDSH

SEQ ID NO: 66064 - protein, 352 aa, unidentified
  source 1..352: note = Domibacillus antri
  REGION 1..352: note = tr|A0A1Q8Q852|A0A1Q8Q852_9BACI S-adenosylmethionine:tRNA ribosyltransferase-isomerase; OS = Domibacillus antri OX=1714264 GN=queA PE=3 SV=1
MKVEDFDFNLPEELIAQTPLKERAESRMMVLDKKTGAVRHEVFKHIVDYLQPGDLLVLNDTKVLPARLHGVKEDTGANIEVLLLKQNEQDVWETLVKPAKRMKKGSVISFGDGKLRAVCTAEEEHGGRMLRFEYEGIFYEVLDELGEMPLPPYIKEQLEEKDRYQTVYAKERGSAAAPTAGLHFTEQLLSELKERGVGVEFITLHVGLGTFRPVSVDSIEDHDMHAEYYTISERTAEAIQKTKAEGGRVIAVGTTSVRTLETAARDHGVVEASSGWTDIFIYPGFQFGAIDGMITNFHLPKSTLIMLISALAGKENVLSAYAEAVKEKYRFFSFGDAMLIIDLEGGLDNVSH

SEQ ID NO: 66065 - protein, 347 aa, unidentified
  source 1..347: note = Domibacillus enclensis
  REGION 1..347: note = tr|A0A1N6PX54|A0A1N6PX54_9BACI S-adenosylmethionine:tRNA ribosyltransferase-isomerase; OS = Domibacillus enclensis OX=1017273 GN=queA PE=3 SV=1
MKVEDFNFNLPEELIAQAPLKERAESRLMVLDKKDGAITHASFKDITRYLKPGDLLVLNDTKVLPARLHGVKEETGANIEVLLLKQEETDVWETLVKPAKRIKEGSIISFGDGKLKAVCTGEKEQGGRMLRFQYEGIFYEVLEELGEMPLPPYIKEQLEEKERYQTVYAKERGSAAAPTAGLHFTDALLSELKERGIRIEFITLHVGLGTFRPVSVDSIEDHDMHAEFYTISKQTEEAIQETKQQGGRVIAVGTTSVRTLETAARDHGTVKESSGWTDIFIYPGFQFGAIDGMITNFHLPKSTLIMLISALAGQKQVLAAYEEAVKEQYRFFSFGDAMLIMDTKGGK

SEQ ID NO: 66066 - protein, 352 aa, unidentified
  source 1..352: note = Domibacillus epiphyticus
  REGION 1..352: note = tr|A0A1V2A9B7|A0A1V2A9B7_9BACI S-adenosylmethionine:tRNA ribosyltransferase-isomerase; OS = Domibacillus epiphyticus OX=1714355 GN=queA PE=3 SV=1
MKVEDFDFDLPEELIAQTPLKERAESRMMILDKETGDIRHEVFKHIVNYLQQGDLLVLNNTKVLPARLYGVKEDTGANIEVLLLKQGKEDEWETLVKPAKRIKEGSIISFGDGKLRAVCTAEKEHGGRMLRFEYEGIFYEVLDELGEMPLPPYIKEQLEEKDRYQTVYAKERGSAAAPTAGLHFTEQLLMELKERGVRVEFITLHVGLGTFRPVSVDSVEDHDMHAEYYTISERTAEAIRETKDNGGRVIAVGTTSVRTLETAARDHGAVKASSGWTDIFIYPGFKFGAIDGMITNFHLPKSTLIMLISALAGQKEVLEAYSEAVKEKYRFFSFGDAMLIIDLKGGLDNVSH

SEQ ID NO: 66067 - protein, 352 aa, unidentified
  source 1..352: note = Domibacillus iocasae
  REGION 1..352: note = tr|A0A1E7DMG4|A0A1E7DMG4_9BACI S-adenosylmethionine:tRNA ribosyltransferase-isomerase; OS = Domibacillus iocasae OX=1714016 GN=queA PE=3 SV=1
MKVEDFDFNLPEELIAQTPLKERAESRMMVLDKQTGTLTHETFKNVVNYLKPGDLLILNDTKVLPARLHGVKEETGANIEVLLLKQDEKDVWETLVKPAKRIKEGSVISFGNGRLKAVCTGEKEQGGRMLRFEYDGIFYEVLDELGEMPLPPYIKEQLDEKDRYQTVYAKERGSAAAPTAGLHFTEPLLAQLKEHGVRIEFITLHVGLGTFRPVSVDSIEDHDMHAEYYTISKQTEEAIRETKKQGGRVIAVGTTSVRTLETAARDHGIVRESSGWTDIFIYPGFEFKAIDGMITNFHLPKSTLIMLISALAGQSHVMTAYAEAVKERYRFFSFGDAMLIIDMKGGNTIDSH

SEQ ID NO: 66068 - protein, 352 aa, unidentified
  source 1..352: note = Domibacillus mangrovi
  REGION 1..352: note = tr|A0A1Q5P7I9|A0A1Q5P7I9_9BACI S-adenosylmethionine:tRNA ribosyltransferase-isomerase; OS = Domibacillus mangrovi OX=1714354 GN=queA PE=3 SV=1
MKVEDFDFDLPEELIAQTPLLQRAESRMMVLDKQTGDIQHDVFKHIADYVQPGDLLVLNNTKVLPARLHGVKEGTGANIEVLLLKQDEKDVWETLVKPAKRIKEGSIISFGDGKLRAVCTAEKEHGGRMLHFEYEGIFYEVLDELGEMPLPPYIKEQLEEKDRYQTVYAKERGSAAAPTAGLHFTEQLLNELKVRGVRVEFITLHVGLGTFRPVSVDTIEEHDMHAEYYTISKQTEDAIRETKENGGRVIAVGTTSVRTLETAARDDGAVKESNGWTNIFIYPGFEFRAIDGMITNFHLPKSTLIMLISALAGQKEVLKAYAEAVKEQYRFFSFGDAMLIIDTKGETDDDSH

SEQ ID NO: 66069 - protein, 349 aa, Donghicola sp.
  REGION 1..349: note = tr|A0A1M4N3H4|A0A1M4N3H4_9RHOB S-adenosylmethionine:tRNA ribosyltransferase-isomerase; OS = Donghicola sp. KarMa OX=1779855 GN=queA PE=3 SV=1
MKLSDFDFHLPESLIATRPAKPRSASRLLVSRPDGLSDLHVYDLPDLLQAGDRLVLNDTRVIPARLFGQRWRDSAQGRVSAKIEVTLLEPRPNGQWAALVKPLRKLGEGEWVEFSADLKAQLVGREEGQAVLEFNLTGDDFDAALAEAGAMPLPPYIAAKRAADSQDKEDYQTVWARNTGAVAAPTASLHFDQPLLDKLAGMGVGFSYVTLHVGAGTFLPVKVDDVTTHKMHSEWGEVSQAAASEIAETKARGGRVIPVGTTALRLIETAARDTGAIRPWSGDTDIFIYPGFEFRVADALMTNFHLPKSTLMMLVSALVGRDRIMAAYDHAISQKYRFFSYGDASLLIP

SEQ ID NO: 66070 - protein, 350 aa, Donghicola sp.
  REGION 1..350: note = tr|A0A1B7Z4V5|A0A1B7Z4V5_9RHOB S-adenosylmethionine:tRNA ribosyltransferase-isomerase; OS = Donghicola sp. JL3646 OX=1836468 GN=queA PE=3 SV=1
MKLSDFDFDLPESLIATRPAKPRSSARLLLAKGREISDLRVTDLVDVLLAGDRLVLNDTRVIPARLSGLRHRDSAQGHVSAQIEVTLLEPKADGTWGALIKPLKKVKDGEDIVFSDRLTATVVDRMDGHARVRFNLTGDDFDDALANAGAMPLPPYIAALRAPDEQDKEDYQTVWARNTGAVAAPTASLHFDDELLERLKAKGVEFTYVTLHVGAGTFLPVKVDDIRDHKMHAERGIVTAKAAEEINATKAAGGRVIPVGTTALRLIESAATDDGIAAWDGATDIFITPGFKFRIADALMTNFHLPKSTLMMLVSALIGVDEIRTIYDHAIANGYRFFSYGDASLLIPDA

SEQ ID NO: 66071 - protein, 349 aa, unidentified
  source 1..349: note = Donghicola tyrosinivorans
  REGION 1..349: note = tr|A0A2T0X5A3|A0A2T0X5A3_9RHOB S-adenosylmethionine:tRNA ribosyltransferase-isomerase; OS = Donghicola tyrosinivorans OX=1652492 GN=queA PE=3 SV=1
MKLSDFDFHLPETLIATRPAKPRSSARLLVSRPSGISDLRVTDLVDQLQAGDRLVLNDTKVIPARLFGLRWRDSAQGRVSAKIEVTLLEPRPNGQWAALIKPLRKVNEGEWIVFSDALSAQLVAREEGQAVLEFNLSGDDFDAALAEAGAMPLPPYIAAKRQADAQDKEDYQTVWARNSGAVAAPTASLHFDDALLSALRAKGVQFTHVTLHVGAGTFLPVKVEDVTTHKMHAEWGHVSEEAAAEIAATKAAGGRVIPVGTTALRLIETAARDTGAIAPWQGETDIFIYPGFEFKVADALMTNFHLPKSTLMMLVAALVGHDRILDVYEHAISQEYRFFSYGDASLLFP

SEQ ID NO: 66072 - protein, 376 aa, Dongia mobilis
  REGION 1..376: note = tr|A0A4R6WN81|A0A4R6WN81_9PROT S-adenosylmethionine:tRNA ribosyltransferase-isomerase; OS = Dongia mobilis OX=578943 GN=queA PE=3 SV=1
MTSGQEKAKTPAMTGPRTPLTLSDFDFALPPERVALYPANPRDSARLLYVPAVPSGVGDGFGDFRVRDLPGLLQAGDLLISNDTRVIPAQLAGKRGTAGIEVTLIEDARVRDARAADAVRWWAFAKPGKKLKPGDTVTFGENFAATVVEKKPEGEILFDFGSDPVAFQANLARFGAMPLPPYIRKSRAVGSADASDYQTIFAARDGAVAAPTAGLHFTPELLAALERRGVEQHRVTLHVGAGTFLPVKVENIAEHRMHAEYGEVSAATADAVNRARAEGRRIVAIGTTSLRILESAAKDGRLLPFAGATDIFITPGYRFQIVDLLMTNFHLPKSTLFMLVAAFAGLERMRAAYAHAIAGSYRFFSYGDASLLECRR

SEQ ID NO: 66073 - protein, 341 aa, Dorea formicigenerans
  REGION 1..341: note = tr|A0A3E4FAP2|A0A3E4FAP2_9FIRM S-adenosylmethionine:tRNA ribosyltransferase-isomerase; OS = Dorea formicigenerans OX=39486 GN=queA PE=3 SV=1
MKRQDFYYDLPEELIAQDPLEDRSSSRLLVLDKETGATSHHIFKEITGYLKEGDCLVINDTKVIPARLIGAKEGTGAKIEILLLKRKENNIWETLVKPGKKAKVGTRIVFGEGILVGEVVGIVEEGNRLVKFEYEGIFEEILDQLGQMPLPPYITHQLEDKNRYQTVYAKHTGSAAAPTAGLHFTPELLKEIEEKGIDIARVTLHVGLGTFRPVKVDEITDHHMHSEFYQVDEEAAEKINRAKDSGHRVICVGTTSCRTIESAADETGHLKPTSGWTEIFIYPGYKFKILDGLITNFHLPESTLIMLVSALAGREHVLAAYEEAVQERYRFFSFGDAMLII

SEQ ID NO: 66074 - protein, 341 aa, Dorea formicigenerans
  REGION 1..341: note = tr|A0A3E5GUB0|A0A3E5GUB0_9FIRM S-adenosylmethionine:tRNA ribosyltransferase-isomerase; OS = Dorea formicigenerans OX=39486 GN=queA PE=3 SV=1
MKRQDFYYDLPEELIAQDPLEDRSSSRLLVLDKETGATSHHIFKEITGYLKEGDCLVINDTKVIPARLIGAKEGTGAKIEILLLKRKENNIWETLVKPGKKAKVGTRIVFGEGLLVGEVVGIVEEGNRLVKFEYEGIFEEILDQLGQMPLPPYITHQLEDKNRYQTVYAKHTGSAAAPTAGLHFTPELLKEIEEKGIDIARVTLHVGLGTFRPVKVDEITDHHMHSEFYQVDEEAAEKINRAKDSGHRVICVGTTSCRTIESAADETGHLKPTSGWTEIFIYPGYKFKILDGLITNFHLPESTLIMLVSALAGREHVLAAYEEAVQERYRFFSFGDAMLII

SEQ ID NO: 66075 - protein, 194 aa, Dorea longicatena
  REGION 1..194: note = tr|A6BFJ7|A6BFJ7_9FIRM S-adenosylmethionine:tRNA ribosyltransferase-isomerase OS=Dorea longicatena DSM 13814 OX=411462 GN=DORLON_01069 PE=3 SV=1
MPLPPYITHQLEDKNRYQTVYATHTGSAAAPTAGLHFTPELLEEIKEKGVDIARVTLHVGLGTFRPVKVDEITEHHMHSEFFMIDEEAAEKINRAKETGHRVICVGTTSCRTVESAADENGHLEAKSGWTQIFIYPGYKFKVLDCLITNFHLPESTLIMLVSALAGREHVLAAYEEAVKERYRFFSFGDAMFIQ

SEQ ID NO: 66076 - protein, 341 aa, Dorea longicatena
  REGION 1..341: note = tr|A0A174D4L2|A0A174D4L2_9FIRM S-adenosylmethionine:tRNA ribosyltransferase-isomerase; OS = Dorea longicatena OX=88431 GN=queA PE=3 SV=1
MKRQDFYYELPEELIAQDPLEDRSSSRLLVLDKETGAFSHHVFKEITEYLHEGDCLVINDTKVIPARLIGSKVETNAKIEVLLLKRKENNVWETLVKPGKKAKVGAKISFGDGLLMGEVIDVVEEGNRLIKFDFDGIFEEILDQLGQMPLPPYITHQLEDKNRYQTVYATHTGSAAAPTAGLHFTPELLEEIKAKGVDIARVTLHVGLGTFRPVKVDEITEHHMHSEFFMIDEEAAEKINRAKETGHRVICVGTTSCRTVESAADENGHLEAKSGWTQIFIYPGYKFKVLDCLITNFHLPESTLIMLVSALAGREHVLAAYEEAVKERYRFFSFGDAMFIQ

SEQ ID NO: 66077 - protein, 341 aa, Dorea sp.
  REGION 1..341: note = tr|A0A396L075|A0A396L075_9FIRM S-adenosylmethionine:tRNA ribosyltransferase-isomerase; OS = Dorea sp. AF36-15AT OX=2292041 GN=queA PE=3 SV=1
MKRQDFYFDLPEELIAQDPLEDRSSSRLLVLDKETGETSHHIFKEIVDYLNPGDCLVINDTKVIPARLIGAREGTGAKIEVLLLKRKENNVWETLVKPGKKARPGTRIVFGEGLLVGEVIDVVEEGNRLIKFEYEGIFEEILDQLGQMPLPPYITHQLEDKNRYQTVYAKHTGSAAAPTAGLHFTPELLKQIEEKGIDIARVTLHVGLGTFRPVKVDDILEHHMHSEFYHIDAEAAEKINRAKDNGGRVICVGTTSCRTVESAADENGRLRECSGWTEIFIYPGYKFKILDALITNFHLPESTLIMLVSALAGREHVLNAYQEAIEQKYRFFSFGDAMFIK

SEQ ID NO: 66078 - protein, 341 aa, Dorea sp.
  REGION 1..341: note = tr|R6WFX3|R6WFX3_9FIRM S-adenosylmethionine:tRNA ribosyltransferase-isomerase OS=Dorea sp. CAG:317; OX = 1262873 GN=queA PE=3 SV=1
MKRQDFYYELPEELIAQDPLEDRSSSRLLVLDKESGAVSHHVFKDVIDYLNEGDCLVINDTKVLPARLIGAKVGTDAKIEVLLLKRKENNIWETLVKPGKKAKIGTKISFGDGLLMGEVVDIVEEGNRLIQFTYEGIFEEILDRLGQMPLPPYITHHLEDKNRYQTVYAEHTGSAAAPTAGLHFTPELLEKIEKKGVDIARVTLHVGLGTFRPVKVDEITDHHMHSEFFQIEEEAATKINRAKDAGKKVICVGTTSCRTVESAADETGHLKACSGWTEIFIYPGYQFKVLDSLITNFHLPESTLVMLVSALAGREHVLAAYEEAVKERYRFFSFGDAMLIQ

SEQ ID NO: 66079 - protein, 349 aa, unidentified
  source 1..349: note = Draconibacterium orientale
  REGION 1..349: note = tr|X5DDU1|X5DDU1_9BACT S-adenosylmethionine:tRNA ribosyltransferase-isomerase OS=Draconibacterium orientale; OX = 1168034 GN=queA PE=3 SV=1
MKLSKFKYNLEQEKIALHPADNRDESKLMVLNRATRTIEHKLFKDLLDYFDDKDVMVFNDTKVFPARLYGNKEKTGAEIEVFLLRELNREQRLWDVLVDPARKIRIGNKLYFGDDDLLVAEVIDNTTSRGRTLRFLFDGPYDEFKQTLYSLGETPLPKFINRPVQPEDKDRFQTIFAKHEGAVAAPTAGLHFSRELLKRLEIKGVDFSYVTLHVGLGNFRSVDVEDLTKHKMDSEQIWIKNEACEMVNKAKQEKRNVCAVGTTVMRTLESSVSTQGFLKPFEGWTNKFIFPPYEFSVANSMITNFHLPYSTLLMMVAAFGGYDFVMEAYDIATKNDYRFGTYGDAMLII

SEQ ID NO: 66080 - protein, 403 aa, unidentified
  source 1..403: note = Draconibacterium orientale
  REGION 1..403: note = tr|X5DUL7|X5DUL7_9BACT S-adenosylmethionine:tRNA ribosyltransferase-isomerase OS=Draconibacterium orientale; OX = 1168034 GN=FH5T_02690 PE=3 SV=1
MNRYKDIKISDYTYNLPDERIAKYPLNERDKSKLLIRQNGTIQQDIFENCANYLPEDAQLVFNNTRVIHARLFFHKETGAKIEIFCLEPVEPADYQVAFQETEEVTWKCMVGNSKKWKEGFLTQTFEIDGKTIELTAAKIGQEGNSFHIRFVWNGGVHFSEIIEHIGQLPIPPYLNRDTEESDEETYQTVYAKIDGSVAAPTAGLHFTDPVIAQLAEKNITTNEITLHVGAGTFQPVKSETIEGHTMHHEQVIIPIEILRSFLENPKNIIAVGTTSVRSLESLYWIGLQLEEKRFDPFHPEVKQWEPYTNEATISLEKALQNIIYFLAENDEKAIRFSTQIIILPGYDFKLISGMFTNFHQPQSTLLLLISAFLGNDWKKIYDYALANDFRFLSYGDSNLYLK

SEQ ID NO: 66081 - protein, 349 aa, unidentified
  source 1..349: note = Draconibacterium sediminis
  REGION 1..349: note = tr|A0A0D8J9H5|A0A0D8J9H5_9BACT S-adenosylmethionine:tRNA ribosyltransferase-isomerase; OS = Draconibacterium sediminis OX=1544798 GN=queA PE=3 SV=1
MKLSKFKYNLEQEKIALHPADNRDESKLMVLNRATRTIEHRLFKDLLDYFDDKDVMVFNDTKVFPARLYGNKEKTGAEIEVFLLRELNREQRLWDVLVDPARKIRIGNKLYFGDDDLLVAEVIDNTTSRGRTLRFLFDGPYDEFKQTLYSLGETPLPKFINRPVQPEDKDRYQTIFAKHEGAVAAPTAGLHFSRELLKRLEIRGVDFSYVTLHVGLGNFRSVDVEDLTKHKMDSEQIWIKNEACEMVNNAKQEKRNVCAVGTTVMRTLESSVSTQGFLKPFEGWTNKFIFPPYEFSVANSMITNFHLPYSTLLMMVAAFGGYDFVMEAYDVATKNDYRFGTYGDAMLII

SEQ ID NO: 66082 - protein, 405 aa, unidentified
  source 1..405: note = Draconibacterium sediminis
  REGION 1..405: note = tr|A0A0D8JDS8|A0A0D8JDS8_9BACT S-adenosylmethionine:tRNA ribosyltransferase-isomerase; OS = Draconibacterium sediminis OX=1544798 GN=LH29_06660; PE = 3 SV=1
MVLNRYKDIKISDYTYNLPDERIAKYPLTERDKSKLLVRQNGTITQDIFENCANYLPEETQLVFNNTRVIHARLFFYKETGAKIEIFCLEPVEPADYQVAFQETEEVTWKCMVGNSKKWKEGFLSQTFKIDGQVIELTAAKIGQEGNSFHIRFVWNGGVHFSEIIEHIGQLPIPPYLNRDTEESDEESYQTVYAKIDGSVAAPTAGLHFTDPVIAQLADKNITTNEITLHVGAGTFQPVKSETIEGHTMHHEQVIIPIDILRSFVENPKNIIAVGTTSVRSLESLYWIGLQLEEQRFNPFHPEVKQWEPYENDAKISIEKALQNIIYFLVENNEKAIRFSTQIIILPGYDFKLISGMFTNFHQPQSTLLLLISAFLGNKWKEVYDYALANDFRFLSYGDSNLYLK

SEQ ID NO: 66083 - protein, 349 aa, unidentified
  source 1..349: note = Draconibacterium sp.
  REGION 1..349: note = tr|A0A2G6R9L9|A0A2G6R9L9_9BACT S-adenosylmethionine:tRNA ribosyltransferase-isomerase; OS = Draconibacterium sp. OX=1965318 GN=queA PE=3 SV=1
MKLSKFKFELDPKKIAMYPVHNRDESRLMVLNRGTRTIEHRQFKDIIDYFDDKDVMVFNNTKVFPARLHGNKEKTGADIEVFLLRELNREQRLWDVLVDPARKIRIGNKLYFGEDELLVAEVIDNTTSRGRTLRFLFDGPYDEFKKTLYALGETPLPKFISRPVEADDKERYQTIYAKHEGAVAAPTAGLHFSRELMKRLEIKGVDFSYVTLHVGLGNFRSVDVEDLTKHKMDSEQIWIKKDACEMVNEAKANKRNVCAVGTTVMRTIESSVSTQGFLKPYEGWTNKFIFPPYEFSVPNSMISNFHLPYSTLLMMVAAFGGYDFVMEAYQTALKEDYRFGAYGDAMLLI

SEQ ID NO: 66084 - protein, 404 aa, unidentified
  source 1..404: note = Draconibacterium sp.
  REGION 1..404: note = tr|A0A2G6RBN4|A0A2G6RBN4_9BACT S-adenosylmethionine:tRNA ribosyltransferase-isomerase; OS = Draconibacterium sp. OX=1965318 GN=CSA36_01635 PE=3 SV=1
MKEKYTNINISDYSYDLPASHIAKYPLQNRDASKLLLWEKGKISEKTFKNAVDTIPENALLVFNNTRVIHARIFFQKETGAKIEIFCLEPVHPADYQLCFQQTKRTSWKCILGNAKKWKNNKLKKNFELNGKKVEITAEKKKQEGNIFEIEFVWTGNFAFAEIIECAGTIPIPPYLNRKTEQSDKKTYQTVYAKIDGSVAAPTAGLHFTKNVLSQLSEKNIATAEVTLHVGAGTFQPVKSELVQHHTMHHEKVIVSKAVIELLLKNNRKVIAVGTTSVRSLESLYWLGVQLKDNTFHAESPEILQWEPYEKKASISNSQALQNIVDYLENSNLNTIQFSTQIIILPGYDFKIVNGMFTNFHQPQSTLLLLISAFLGDDWKKVYDYALKNDFRFLSYGDSNLYLK

SEQ ID NO: 66085 - protein, 341 aa, unidentified
  source 1..341: note = Drancourtella sp.
  REGION 1..341: note = tr|A0A1Y4H5J3|A0A1Y4H5J3_9FIRM S-adenosylmethionine:tRNA ribosyltransferase-isomerase; OS = Drancourtella sp. An210 OX=1965589 GN=queA PE=3 SV=1
MKKEDFYFDLPEELIAQDPLEDRSGSRLLVLNKETGEIAHHVFRDVIDYLNPGDCLVINDTKVIPARLIGSKVGTDAKIEILLLKRRENDVWETLVKPGKKAKPGTKIQFGEGLLTGEVIDVVEEGNRLIQFTYDGIFEEILDQLGQMPLPPYITHQLKDKNRYQTVYAKHSGSAAAPTAGLHFTPELLEEIQKKGVQIAHVTLHVGLGTFRPVKVENIMEHHMHSEFYQIEASEAEKINRAKEEGHRVICVGTTSCRTVESAAGDDGKLRECSGWTDIFIYPGYKFKILDCLITNFHLPESTLIMLVSALAGREHVLGAYEEAVKEKYRFFSFGDAMLIQ

SEQ ID NO: 66086 - protein, 341 aa, unidentified
  source 1..341: note = Drancourtella sp.
  REGION 1..341: note = tr|A0A1Y3W3E3|A0A1Y3W3E3_9FIRM S-adenosylmethionine:tRNA ribosyltransferase-isomerase; OS = Drancourtella sp. An57 OX=1965647 GN=queA PE=3 SV=1
MKKEDFYFELPQELIAQDPLEDRSGSRLLVLDKESGEIEHRTFRDIKEYLEPGDCLVINDTKVIPARLIGSKVGTNAKIEILLLKRKENDIWETLVKPGKKAKPGTKISFGEGLLIGEVLDVVDEGNRLIQFSYEGIFEEILDQLGQMPLPPYITHQLEDKNRYQTVYAKHSGSAAAPTAGLHFTPELLEEIKESGVEIAHVTLHVGLGTFRPVKVENIQEHHMHSEFYRIEASEAEKINRAKREGHRVICVGTTSCRTVESAAKPDGTLSECSGWTEIFIYPGYRFKVLDCLLTNFHLPESTLIMLVSALAGREHVLHAYEEAVKERYRFFSFGDAMLIR

SEQ ID NO: 66087 - protein, 341 aa, unidentified
  source 1..341: note = Duganella phyllosphaerae
  REGION 1..341: note = tr|A0A1E7X6J2|A0A1E7X6J2_9BURK S-adenosylmethionine:tRNA ribosyltransferase-isomerase; OS = Duganella phyllosphaerae OX=762836 GN=queA PE=3 SV=1
MYSLSDFDFNLPQERIAQFPLPDRSASRLLHLDGAQIVDRQFADIVGLLQAGDLLVMNDTRVLKARFFGTKESGGKVEALVERVLDNRTVLAQVRASRSPLAGTKMRLADAFDVTVGERAGEFFTLHFDADVFDLIEAHGRLPLPPYIEHDADSFDETRYQTVFNKVPGAVAAPTAGLHFDQALLDILKAKGVNFAFITLHVGAGTFQPVRNEVLSEHQMHTEWYTMPQETVDAVRATRAAGRDVVAVGTTSLRALESASQSGQLEAGSADTALFITPGYRFKTVTRLITNFHLPKSTLLMLVSAFAGYDEIRAAYAHAIANEYRFFSYGDAMLLTTQARA

SEQ ID NO: 66088 - protein, 341 aa, unidentified
  source 1..341: note = Duganella sacchari
  REGION 1..341: note = tr|A0A1M7PZW6|A0A1M7PZW6_9BURK S-adenosylmethionine:tRNA ribosyltransferase-isomerase; OS = Duganella sacchari OX=551987 GN=queA PE=3 SV=1
MYSLSDFDFNLPQERIAQFPLPDRSASRLLHLDGKQIIDRQFADIVAQLQAGDLLVMNNTRVLKARFFGTKESGGKVEALVERVLDNRTVLAQVRASRSPLAGTKMRLADAFDVTVGERAGEFFTLHFDADVFDLIEAHGRLPLPPYIEHDADSFDENRYQTVFNKVPGAVAAPTAGLHFDEPLLEKLKAKGVNFAYVTLHVGAGTFQPVRHENLSDHQMHTEWYTMPQETVDAVRAARAAGRDVVAVGTTSLRALESASQSGQLEAGSADTALFITPGYQFKTVTRLITNFHLPKSTLLMLVSAFAGFEEIRAAYAHAIANEYRFFSYGDAMLLTTQNKE

SEQ ID NO: 66089 - protein, 341 aa, Duganella sp.
  REGION 1..341: note = tr|A0A3D9KXJ3|A0A3D9KXJ3_9BURK S-adenosylmethionine:tRNA ribosyltransferase-isomerase; OS = Duganella sp. GV023 OX=2135490 GN=queA PE=3 SV=1
MYSLSDFDFNLPQERIAQFPLPDRSASRLLHLDGEQIIDRQFADILDLLQPGDLLVMNNTRVLKARFFGTKESGGKVEALVERVLDNRTVLAQVRASRSPLAGTKMRLADAFDVTFGERAGEFFTLHFDADVFDLIEAHGRLPLPPYIEHDADSFDENRYQTVFNKVPGAVAAPTAGLHFDEPLLEKLKAKGVNFAYVTLHVGAGTFQPVRHEKLADHQMHTEWYTMPQETVEAVRATRAAGRDVVAVGTTSLRALESASQSGQLEAGSADTALFITPGYLFKTVTRLITNFHLPKSTLLMLVSAFAGYEEIRKAYAHAIANEYRFFSYGDAMLLTTNNKE

SEQ ID NO: 66090 - protein, 341 aa, Duganella sp.
  REGION 1..341: note = tr|A0A0Q8QF36|A0A0Q8QF36_9BURK S-adenosylmethionine:tRNA ribosyltransferase-isomerase; OS = Duganella sp. Root198D2 OX=1736489 GN=queA PE=3 SV=1
MYSLSDFDFHLPPERIAQFPLPDRSASRLLHVDGKTLHDRQFTDILDQLQAGDLLVMNNTRVLKARFFGVKDSGGKVEALVERVLDTRTVLAQVRASKSPGPGVKIRLADAFDVTVGERAGEFYTLHFDADVFDLIEQYGRLPLPPYIEHAPGEVDETRYQTVFNKVPGAVAAPTAGLHFDEALLQKLKDKGVQFAYVTLHVGAGTFQPVRTENLAEHKMHTEWYTMPQETVDAVREARAAGRDVVAVGTTSLRALESASQSGSLEAGSGDTNLFITPGYKFKTVTRLITNFHLPKSTLLMLVSAFAGFTEIRHAYQHAIANEYRFFSYGDAMLLTTHNRA

SEQ ID NO: 66091 - protein, 350 aa, unidentified
  source 1..350: note = Duncaniella muris
  REGION 1..350: note = tr|A0A2V1IKD5|A0A2V1IKD5_9BACT S-adenosylmethionine:tRNA ribosyltransferase-isomerase; OS = Duncaniella muris OX=2094150 GN=queA PE=3 SV=1
MKLSQFKFRLPEELIAQRPAPERDQSRMMVVNRRTGEIEHKIFKDIIDYFDDGDLFVYNDTMVFPARLYGNKEKTGARIEVFLLRELSAENKLWDVLVEPARKIRIGNKLYFGDDESMVAEVIDNTTSRGRTLRFLYDGPHEEFKKELYKLGTTPLPYYINREPDEEDAERYQTIFARKEGAVIVPGAALHFSRELLKRLEIKGVNQGFITIHSGLGNYRDIDVEDLTKHRMDSEEMEADEELVKLVNATKDGGHRVCAVGTSVLRAVASSVSMGDHMKTYSGWTNKFIFPPYDFSVTDALVSNFHLPYSTMLMMVAAFGGYDLVMDAYKKAVKEGYKFGVYGDAMLIVS

SEQ ID NO: 66092 - protein, 410 aa, unidentified
  source 1..410: note = Duncaniella muris
  REGION 1..410: note = tr|A0A2V1IP05|A0A2V1IP05_9BACT S-adenosylmethionine:tRNA ribosyltransferase-isomerase; OS = Duncaniella muris OX=2094150 GN=C5O23_10180 PE=3 SV=1
MNIRDIRIENFDYPLPDERIARHPLAQRDRCLLLFKDSDGALSTRSFHELPGLLPAGSMLVYNNTRVINARLRFRKGEAADGALIEIFCLEPVEPADYACNFASVSGCSWTCFVGNSKRWKSGELLMPLSIDGHDFTLRATRVSREGNTSVVRFDWDDREITFSRIISAVGEIPIPPYLNRGTEESDSTDYQTVFSHIDGSVAAPTAGLHFTPEVLEAIDAVGIARRELTLHVGAGTFQPVKSDTIGEHDMHSEFIAVDRSLIGELAAIERRIIAVGTTSVRTLESLYHLGCRLAAGLPADVLPQWYPYDPSHPDLPVAEAMRAILSHLDTTGENTFVASTRLMIAPGYRYRVVKGMVTNFHQPKSTLLLLVSAFLASDPANPDWRAIYDYALADSRYRFLSYGDACLFL

SEQ ID NO: 66093 - protein, 350 aa, unidentified; identical to SEQ ID NO: 66091
  source 1..350: note = Duncaniella sp.
  REGION 1..350: note = tr|A0A4P7VX02|A0A4P7VX02_9BACT S-adenosylmethionine:tRNA ribosyltransferase-isomerase; OS = Duncaniella sp. C9 OX=2530392 GN=queA PE=3 SV=1

SEQ ID NO: 66094 - protein, 349 aa, unidentified
  source 1..349: note = Duncaniella sp.
  REGION 1..349: note = tr|A0A4Z0V4R8|A0A4Z0V4R8_9BACT S-adenosylmethionine:tRNA ribosyltransferase-isomerase; OS = Duncaniella sp. TLL-A3 OX=2530391 GN=queA PE=3 SV=1
MKLSQFKFKLPEELIAQHPVGERDEARLMVVNRKDGTIEDHSFKEIINYFDEGDLFVYNDSMVFPALLYGNKEKTGARIEVFLLRELSAENKLWDVLVEPARKIRIGNKLYFGDDESMVAEVIDNTTSRGRTLRFLYDGSHEEFKEELYKLGSTPLPFYINRDSAQEDTERYQTIYARNEGAVVASGAGLHFSRELMKRLEIKGVGEAFITIHSGLGNYREIDVEDLTKHRMDSEEMEASQVLVDKVNATKDAGRKVCAVGTQVLRGIASAVSMGGHMKTYSGWTNKFIFPPYDFTVTDALVSNFHLPYSTMLMMVAAFGGYDLVMEAYKKAVKEGYKFGVYGDSMLII

SEQ ID NO: 66095 - protein, 349 aa, Dyadobacter fermentans
  REGION 1..349: note = tr|C6VRV1|C6VRV1_DYAFD S-adenosylmethionine:tRNA ribosyltransferase-isomerase OS=Dyadobacter fermentans (strain ATCC 700827 / DSM 18053 / NS114) OX=471854 GN=queA; PE = 3 SV=1
MKLSEFKFDLPQSLIALHPSDRGESRLMVVHRKTGEIEHKTFADVINYFDDGDVMAINDTKVFPARLYGQKEKTGAKIEVFLLRELNREMRLWDVLVDPARKIRVGNKLYFGDSDLVAEVIDNTTSRGRTIRFLYDGDNDAFMKLVDELGETPLPPEIISRRKVESADRERFQTIFAEHVGAVAAPTAGMHFTKAIMKRLEIKGVSFAPVTLHVGLGTFRTVDVEDLTKHKTDSENYRITQSTAEVVNKAIDGKKRICAVGTTSLRAIESSVSASGHLKPVEGWTDKFVFPPYDFKIANALLSNFQLPESILLMAACAFGGFDLVMKAYDIAIKEKYKFFTYGDAMLII

SEQ ID NO: 66096 - protein, 410 aa, Dyadobacter fermentans
  REGION 1..410: note = tr|C6VRZ1|C6VRZ1_DYAFD S-adenosylmethionine:tRNA ribosyltransferase-isomerase OS=Dyadobacter fermentans (strain ATCC 700827 / DSM 18053 / NS114) OX=471854 GN=queA; PE = 3 SV=1
MWRKEAEAIDLQSYTYDLPDDRIAKYPMEVRDQSKLMVYRGGELGHLRFTDISSELPEKTLLVFNDTKVIPARAHFKKETGAIIELLLLHPELPTRVINDAMLVTHACVWECMIGNKKRWKAGDSLSNVIQVNGFEVHLQVSYHDYERNLVRLTWDAGVTFLDLVKALGEIPLPPYLNRDTEEPDKETYQTVYANHDGAVAAPTAGLHFTPRVFDELEKKGIGKAFLTLHVGAGTFQPIKVEKVTEHRMHSEQVVFTRELINDLVQSVDHIVPVGTTSLRSLESLYWYGVKLFAGETTDFHIEKLYPYPWRETELPTAAQSLQAIADHMDAGGLHEIVGETEIFIFPGYRFRLCRGIITNYHQPGSTLILLVAAFVGNDWKKIYSEALSNDYRFLSYGDSSLLWLNGDVS

SEQ ID NO: 66097 - protein, 349 aa, unidentified
  source 1..349: note = Dyadobacter jejuensis
  REGION 1..349: note = tr|A0A316AIJ1|A0A316AIJ1_9BACT S-adenosylmethionine:tRNA ribosyltransferase-isomerase; OS = Dyadobacter jejuensis OX=1082580 GN=queA PE=3 SV=1
MKLSEFKFDLPQSLIALHPADRGESRLMVVHRKTGEIEHKTFADLINYFDDGDVMAINDTKVFPARLFGQKEKTGAKIEVFLLRELNREMRLWDVLVDPARKIRVGNKLYFGDSDLVAEVIDNTTSRGRTIRFLYDGDNDAFMKLVDELGETPLPPEIISRRKVETADRERFQTIFAEHTGAVAAPTAGMHFTKAMMKRLEIKGVGFAPVTLHVGLGTFRNVDVEDLTKHKTDSENYRISPESAAIVNKAIDQGKRVCAVGTTSLKAIESSVSASGHLKEVEGWTDRFVFPPYDFKIANAMISNFQLPESILLMSACAFGGYDLVMKAYELAIKEKYKFFTYGDAMLII

SEQ ID NO: 66098 - protein, 413 aa, unidentified
  source 1..413: note = Dyadobacter jejuensis
  REGION 1..413: note = tr|A0A316AQG5|A0A316AQG5_9BACT S-adenosylmethionine:tRNA ribosyltransferase-isomerase; OS = Dyadobacter jejuensis OX=1082580 GN=queA PE=3 SV=1
MGMKEKWLERAERIRLSDYVYDLPDERVAKYPLAERDQSKLLVYNQRQISHLQFTSLPGQLPAETLLVFNDTKVIPARAYFRKPTGATIELLLLHPEFPSRIINEAMLVKGGCVWACMIGNKKRWKAQDTLETQVLIDGERIRLVADYADYENNLVRLQWDSEHVFLDIVRALGEIPLPPYLHRKSEASDTLAYQTVYARQDGAVAAPTAGLHFTEPVLKALEQNTIHKTHLTLHVGAGTFQPIKVDTVTEHRMHSEQVVFTRQTIQDLLDHTGCIVPVGTTSMRSLESLYWFGVKLFRKETTVFMIEKLYPYALLEEELPSAEQALEAILSWMQAQGVEEIVGETEIFIFPGYRFQLCKGLVTNFHQPGSTLLLLIAALIGESWRDLYAEALEHGYRFLSYGDSSLLWAKEA

SEQ ID NO: 66099 - protein, 423 aa, unidentified
  source 1..423: note = Dyadobacter jiangsuensis
  REGION 1..423: note = tr|A0A2P8FLU8|A0A2P8FLU8_9BACT S-adenosylmethionine:tRNA ribosyltransferase-isomerase; OS = Dyadobacter jiangsuensis OX=1591085 GN=queA PE=3 SV=1
MEGKIAAEGSDNALWRKEAEAIDLESYTYDLPDDRIAKYPMEVRDQSKLMVYKRGEINHLRFTDITSQLPADTLLVFNDTKVIPARAHFRKETGAVIELLLLHPELPTRVINDAMLVKHSCVWECMIGNKKRWKAGDALSNVIQVNGKEVHLQVSYHDYEHNLVKLTWDADVTFLDLVKALGEIPLPPYLNRDTEEPDKETYQTVYAHHDGAVAAPTAGLHFTPRVFEALAEKGIRKSFLTLHVGAGTFQPIKVEKVTEHRMHSEQVVFTRALIDNLLQSVNHIVPVGTTSLRSLESLYWYGVKLFKGETTDFHIEKLYPYPWKEAEPPSATQSLQAIADYMDASGFQEIVGETEIFIFPGYRFRLCRGIITNYHQPGSTLILLVAAFVGNDWKTIYSEALAKEYRFLSYGDSSLLWLIDEAS

SEQ ID NO: 66100 - protein, 349 aa, unidentified
  source 1..349: note = Dyadobacter jiangsuensis
  REGION 1..349: note = tr|A0A2P8FV24|A0A2P8FV24_9BACT S-adenosylmethionine:tRNA ribosyltransferase-isomerase; OS = Dyadobacter jiangsuensis OX=1591085 GN=queA PE=3 SV=1
MKLSEFKFDLPQSLIALHPSDRGESRLMVVHRKTGEIEHKTFADVINYFDDGDVMAINDTKVFPARLYGQKEKTGAKIEVFLLRELNREMRLWDVLVDPARKIRVGNKLYFGDSDLVAEVIDNTTSRGRTIRFLYDGDNDAFMKLVDELGETPLPPEIISRRKVESADRERFQTIFAEHVGAVAAPTAGMHFTKAIMKRLEIKGVSFAPVTLHVGLGTFRTVDVEDLTKHKTDSENYRITQGTAEVVNKAIDGKKRICAVGTTSLRAIESSVSASGHLKPVEGWTDKFVFPPYDFKIANALLSNFQLPESILLMAACAFGGFDLVMKAYDIAIKEKYKFFTYGDAMLII

SEQ ID NO: 66101 - protein, 409 aa, Dyadobacter koreensis
  REGION 1..409: note = tr|A0A1H6X7W7|A0A1H6X7W7_9BACT S-adenosylmethionine:tRNA ribosyltransferase-isomerase; OS = Dyadobacter koreensis OX=408657 GN=queA PE=3 SV=1
MENNWLEQAESLRIESFDYDLPDERIARYPLDPRDSSKLLVFNQGKIKHGTFCDLTGNLPSDTLLVFNDTKVIPARAYFQKETGATIEILLLHPELPTRIINDAMLVTDSCIWECMIGNKKRFKLTDTLSTELFVNGKTVRLQVAYADYDRNHIKLWWDQEIQFLDIVQALGEIPLPPYLKRETEEGDKQTYQTVYARQNGAVAAPTAGLHFTENVFKKLAEKGIRKSFLTLHVGAGTFQPIKANSVTEHKMHSEQVVYSRALITELLKNTESIVPVGTTSLRSLESLYWFGVKLFRAETTVFNIEKLYPYPFKAEELPSAHDALTAIATYMDAGKLDEVVGETEIFIFPGYTFRLCKGLITNYHQPGSTLILLVAALVGEDWRRIYKEAMDNGYRFLSYGDSSLLWKK

SEQ ID NO: 66102 - protein, 349 aa, Dyadobacter koreensis
  REGION 1..349: note = tr|A0A1H6R4M1|A0A1H6R4M1_9BACT S-adenosylmethionine:tRNA ribosyltransferase-isomerase; OS = Dyadobacter koreensis OX=408657 GN=queA PE=3 SV=1
MKLSEFKFDLPQSLIALHPSDRGESRLMVVNRATGEIEHKMFPDLINYFGDGDVMAINDTKVFPARLYGQKEKTGAKIEVFLLRELNREMRLWDVLVDPARKIRVGNKLYFGDSDLVAEVIDNTTSRGRTIRFLYDGDNDEFMKLVDQLGETPLPPEIISRRKVENSDRERFQTIFAEHIGAVAAPTAGLHFTKAMMKRLEIKGVNFAPVTLHVGLGTFRTVDVEDLTKHKTDSENYRISQPSADIVNAALDAKKRVCAVGTTSLKAIESSVSASGHLKAVEGWTDKFVFPPYDFKIANAMISNFQLPESILLMSACAFGGFDLVMKAYEMAIKEKYKFFTYGDAMLII

SEQ ID NO: 66103 - protein, 421 aa, Dyadobacter psychrophilus
  REGION 1..421: note = tr|A0A1T5HAM1|A0A1T5HAM1_9BACT S-adenosylmethionine:tRNA ribosyltransferase-isomerase; OS = Dyadobacter psychrophilus OX=651661 GN=queA PE=3 SV=1
MKEEESKGSGNWQNDWLKAAESIRLEDYTYDLPDERIAKYPLENRDQSKLLIHNSGEIAHKCFTDLPENLPAETLLVFNDTKVIPARAYFKKETGAVIEILLLHPELPTRVINDAMLVKNSCVWECMIGNKKRWKLADTLTTEININGQLVTLSVTYEDYDRNLVRLNWNGDFVFLDIVKALGEIPLPPYLNRDTEARDSETYQTVYAHHDGAVAAPTAGLHFTPEVFEKLQSKGVKRSFLTLHVGAGTFQPIKVSSVTEHRMHSEQVVFTKQLINDLLENLGMIIPVGTTSLRSLESLYWFGVKLYRQETTDFFIKKLYPYPFEEKDLPSASEALHSILAFMEQHNTDHIVGETEIFIFPGYKFRLCKAIVTNFHQPGSTLILLVAALTGQDWKRIYAEALENDYRFLSYGDSSLLWRKD

SEQ ID NO: 66104 - protein, 349 aa, Dyadobacter psychrophilus
  REGION 1..349: note = tr|A0A1T5FMV1|A0A1T5FMV1_9BACT S-adenosylmethionine:tRNA ribosyltransferase-isomerase; OS = Dyadobacter psychrophilus OX=651661 GN=queA PE=3 SV=1
MKLSEFKFDLPQSLIALHPSDRGESRLMVVHRKTGEIEHKTFADLINYFDDGDVMAINDTKVFPARLYGQKEKTGAKIEVFLLRELNREMRLWDVLVDPARKIRVGNKLYFGDSDLVAEVIDNTTSRGRTIRFLYDGDNDAFMKLVDELGETPLPPEIISRRKVETSDRERFQTIFAEHIGAVAAPTAGMHFTKAIMKRLEIKGVNFAPVTLHVGLGTFRTVDVEDLTKHKTDSENYRITQGSADIVNAAIDNKKRICAVGTTSLKAVESSVSASGHLKAVEGWTDKFVFPPYDFKIANALLSNFQLPESILLMSACAFGGFDLVMKAYELAIKEKYKFFTYGDAMLII

SEQ ID NO: 66105 - protein, 349 aa, Dyadobacter soli; identical to SEQ ID NO: 66095
  REGION 1..349: note = tr|A0A1G7XI10|A0A1G7XI10_9BACT S-adenosylmethionine:tRNA ribosyltransferase-isomerase; OS = Dyadobacter soli OX=659014 GN=queA PE=3 SV=1

SEQ ID NO: 66106 - protein, 420 aa, Dyadobacter soli
  REGION 1..420: note = tr|A0A1G7YMQ2|A0A1G7YMQ2_9BACT S-adenosylmethionine:tRNA ribosyltransferase-isomerase; OS = Dyadobacter soli OX=659014 GN=queA PE=3 SV=1
MEGKMAVEDNVLWRIEAEAIDLESYTYDLPDDRIAKYPMDVRDQSKLMIYRSGEINHLRFTDITAQLPENTLLVFNDTKVIPARAHFRKETGAVIELLLLHPELPTRVINDAMLVKHSCVWECMIGNKKRWKVADTLSNVIQVSGTELHLQVSYHDYERNLVKLTWDADVTFLELVKALGEIPLPPYLNRDTEEPDKETYQTVYAHHDGAVAAPTAGLHFTPRVFEALEQKGIRKSFLTLHVGAGTFQPIKVEKVTEHRMHSEQVVFTRELINDLLLSVDHIVPVGTTSLRSLESLYWYGVKLFKKETTDFNIEKLYPYPWKEAELPSAAQSMQAIADHMDATGVSEIVGETEIFIFPGYRFRLCRGIITNYHQPGSTLILLVAAFVGKDWKTIYSEALANDYRFLSYGDSSLLWLIDEA

SEQ ID NO: 66107 - protein, 411 aa, Dyadobacter sp.
  REGION 1..411: note = tr|A0A4U6DD37|A0A4U6DD37_9BACT S-adenosylmethionine:tRNA ribosyltransferase-isomerase; OS = Dyadobacter sp. AR-3-8 OX=2576211 GN=queA PE=3 SV=1
MENNWLERAESLRIESFDYDLPDERIARYPLDPRDGSKLLVYGQGNIQHQKFTDLVENLPENTLLVFNDTKVIPARAYFQKETGATIEILLLHPELPTRIINDAMLVRDFCVWECMIGNKKRFKLTDILSTNLIVNGKAVKLQVAYADYEKNQVKFWWDQDIEFLDIVQALGEIPLPPYLKRDTEEGDKQTYQTVYARQNGAVAAPTAGLHFTENVFEKLDEKGIRRSFLTLHVGAGTFQPIKANSVTEHKMHAEQVVYSRQLITELLKNTDTIVPVGTTSLRSLESLYWYGVKLFRAETSVFNIEKLYPYPFSPDELPSASESLTAIADYMDAQKLNEIVGETEIFIFPGYQFRLCKGLITNYHQPGSTLILLVAALVGEDWQRIYKVAMDNGYRFLSYGDSSLLWRSEV

SEQ ID NO: 66108 - protein, 410 aa, Dyadobacter sp.
  REGION 1..410: note = tr|A0A3D8YD16|A0A3D8YD16_9BACT S-adenosylmethionine:tRNA ribosyltransferase-isomerase; OS = Dyadobacter sp. RS19 OX=2259619 GN=queA PE=3 SV=1
MKTNWLEQAESIRLEAFHYDLPDERIARYPLNPRDSSKLLVYKDGKIAHQQFPDLVSQLPADSLLVFNNTKVIPARAHFQKETGATIEILLLHPELPTQVINDAMLVTQTCVWECMIGNKKRWKKADVLSTTISVNGESLKLEVEYVDYERNHVRLSWNREFTFLEIVKALGEIPLPPYLNRETEELDKQTYQTVYADRDGAVAAPTAGLHFTEQVFDKLNAKGVKRSFLTLHVGAGTFQPIKASTVTEHRMHSEQVVFSRELIDELLAGIGSVIPIGTTSMRSLESLYWYGVKLFRKETTAFQIEKLYPYPFEEHELPTAQVALTAIANFMDELEISQLIGETEIFIFPGYKFRICKGIVTNFHQPGSTLILLVAALVGEDWTRIYNEALDNDYRFLSYGDSSLLWGRG

SEQ ID NO: 66109 - protein, 342 aa, Dyella japonica
  REGION 1..342: note = tr|A0A075K0Q7|A0A075K0Q7_9GAMM S-adenosylmethionine:tRNA ribosyltransferase-isomerase; OS = Dyella japonica A8 OX=1217721 GN=queA PE=3 SV=1
MKKTDFDFDLPPELIAQAPLAERSASRMLVLDVEAQARQDRMFRDLPEFLREGDLLVFNDTRVLPARLYGRKDTGGQVEILIERVTGAHEATVQLGVSKKPKEGGRIELADGSHAVVLGRDGSFFRLRFESPDPLERLLLRLGEMPLPPYIERHADDSDMERYQTVFAREPGAVAAPTAGLHFDEATLANLRGRGIQFGYVTLHVGAGTFQPVRADDLKDHQMHREWLNVGASLVEQIRRTRAAGGRVIAVGTTVVRALESAVRDGEVQPFAGETQIFIFPGYRFSSIDGLLTNFHLPQSTLLMLVSALAGRDFMLASYRHAVEQKYRFFSYGDSMLILPKG

SEQ ID NO: 66110 - protein, 342 aa, Dyella japonica
  REGION 1..342: note = tr|A0A0G9H973|A0A0G9H973_9GAMM S-adenosylmethionine:tRNA ribosyltransferase-isomerase; OS = Dyella japonica DSM 16301 OX=1440762 GN=queA PE=3 SV=1
MKKTDFDFELPPELIAQAPLSERSASRLLVLDVDAQSRQDRMFRELPAFLREGDLLVFNDTRVLPARLYGRKDTGGQVEILIERVTGAHEATVQLGVSKKPKEGGRIELADGSHAVVLGRDNAFFRLHFESPEPLERLLLKLGEMPLPPYIERHADASDMERYQTVFAREPGAVAAPTAGLHFDEAMLATLRERGIQFGYVTLHVGAGTFQPIRADDIKDHQMHREWLNVGASLVEQIRRTRAAGGRVIAVGTTVVRALESAVRDGELQPFAGETQIFIFPGYQFSSIDGLLTNFHLPQSTLLMLVSALAGRDFMLGSYRHAVEQKYRFFSYGDAMLILPKG

SEQ ID NO: 66111 - protein, 342 aa, unidentified
  source 1..342: note = Dyella jiangningensis
  REGION 1..342: note = tr|A0A023NNM3|A0A023NNM3_9GAMM S-adenosylmethionine:tRNA ribosyltransferase-isomerase; OS = Dyella jiangningensis OX=1379159 GN=queA PE=3 SV=1
MKKTDFDFELPPELIAQAPLPERSASRLLVLDVEAQARQDRMFRDLPEFLRDGDLLVFNDTRVLPARLYGRKDTGGQVEILIERVTGTHEATVQLGVSKKPKEGGRIELADGSHALVLGRDGPFFRLRFESTDPLERLLLRLGEMPLPPYITRHADQSDMERYQTVFAREPGAVAAPTAGLHFDEATLATLRERGVQFGYVTLHVGAGTFQPVRADDIKDHQMHREWLNVGASLVEQIRRTRAAGGRVIAVGTTVVRALESAVRDGELQPFAGETQIFIFPGYKFSSIDGLLTNFHLPQSTLLMLVSALAGKDFMLASYRHAVEQKYRFFSYGDAMLILPKG

SEQ ID NO: 66112 - protein, 342 aa, unidentified
  source 1..342: note = Dyella jiangningensis
  REGION 1..342: note = tr|A0A328P3U4|A0A328P3U4_9GAMM S-adenosylmethionine:tRNA ribosyltransferase-isomerase; OS = Dyella jiangningensis OX=1379159 GN=queA PE=3 SV=1
MKKTDFDFELPPELIAQAPLAERSASRLLVLDVEAQARQDRMFRDLPDFLRKGDLLVFNDTRVLPARLYGRKDTGGQVEILIERVTGAHEATVQLGVSKKPKEGGRIELADGSHAVVLGRDGPFFRLRFESTDPLERLLLRLGEMPLPPYITRHADQGDMERYQTVFAREPGAVAAPTAGLHFDETTLATLRERGVQFGYVTLHVGAGTFQPVRADDIKDHQMHREWLNVGASLVEQIRRTRAAGGRVIAVGTTVVRALESAVRDGELQPFAGETQIFIFPGYRFSSIDGLLTNFHLPQSTLLMLVSALAGRDFMLASYRHAVEQKYRFFSYGDAMLILPKG

SEQ ID NO: 66113 - protein, 342 aa, Dyella marensis
  REGION 1..342: note = tr|A0A1I2IAF4|A0A1I2IAF4_9GAMM S-adenosylmethionine:tRNA ribosyltransferase-isomerase; OS = Dyella marensis OX=500610 GN=queA PE=3 SV=1
MKKSDFDFRLPPELIAQAPLPERSASRLLLLDTQAQALQDRMFRELPTLLRAGDLMIFNDTRVLPARLYGRKESGGAVEILLERVTGAHEATAQLGVSKKPKEGGRIELADGSHAVVLGRDGQFFRLRFESPEPLERLLRRLGEMPLPPYIERHADASDLERYQTVFAREPGAVAAPTAGLHFDEAMLAQLRELGVDFGYVTLHVGAGTFQPVRAEEIKDHQMHREWLNVGAGLVEQVRRARARGGRVIAVGTTVVRALESACRDGELRPFAGETQIFIFPGYKFSSIDGLITNFHLPQSTLLMLVSALAGREFVLQAYRHAVAQRYRFFSYGDAMMILPPG

SEQ ID NO: 66114 - protein, 344 aa, Dyella soli
  REGION 1..344: note = tr|A0A4R0YZU2|A0A4R0YZU2_9GAMM S-adenosylmethionine:tRNA ribosyltransferase-isomerase; OS = Dyella soli OX=522319 GN=queA PE=3 SV=1
MKKSDFDFDLPPELIAQAPLPERSASRLLLLDVERKALEDRMFRDLPGLLRAGDLLVFNDTRVLPARLYGRKESGGAVEILIERVTGAHEATVQLGVSKKPKEGGRIELADGSFATVLGRDGAFFRLRFESPDPLERLLLRLGEMPLPPYIERHADASDLERYQTVFAREPGAVAAPTAGLHFDEPMLQKLRDLGVEFGYVTLHVGAGTFQPVRADDIKDHQMHREWLNVGASLVEQIRRTRANGGRVIAVGTTVVRALESAVRDGELQPFAGETQIFIFPGYQFTSIDGLITNFHLPQSTLLMLVSALAGRDFVLDAYRHAVEQRYRFFSYGDAMAILPPARD

SEQ ID NO: 66115 - protein, 343 aa, Dyella soli
  REGION 1..343: note = tr|A0A4R0YV87|A0A4R0YV87_9GAMM S-adenosylmethionine:tRNA ribosyltransferase-isomerase; OS = Dyella soli OX=522319 GN=queA PE=3 SV=1
MKKTDFDFELPPELIAQAPLAERSASRLLVLDAEAQSRQDRLFRDLPEFLREGDLLVFNDTRVLPARLYGRKETGGAVEILIERVTGAHEAMVQLGVSKKPKEGGRIELADGSHATVLGREGQFFRLRFESPDSLERLLLKLGEMPLPPYIERRADASDMERYQTVFAREPGAVAAPTAGLHFDEAMLALLRERGVQFGYVTLHVGAGTFQPVRAEELKDHQMHREWLNVGASLVEQIRRTRAAGGRVFAVGTTVVRALESASRDGELQPFAGETQIFIFPGYKFSSIDGLLTNFHLPQSTLLMLVSALAGRDFMLESYRHAVEQKYRFFSYGDAMLILPQSP

SEQ ID NO: 66116 - protein, 343 aa, Dyella sp.
  REGION 1..343: note = tr|A0A370XB86|A0A370XB86_9GAMM S-adenosylmethionine:tRNA ribosyltransferase-isomerase; OS = Dyella sp. 4MSK11 OX=1927960 GN=queA PE=3 SV=1
MKKSDFHFELPPELIAQAPLAERSASRLLLLDVPARTWRDRMFRELPSLLRKGDLLVFNDTRVLPARLYGHKPSGGAVEILIERVTGAHEATVQLGVSKKPRVGTHIILADGSWATVLGRDDAFFHLRFESPEPLERLLQRLGEMPLPPYISRHADASDLERYQTVYAREPGAVAAPTAGLHFDDRLLTQLREKGVDFGYVTLHVGAGTFQPVRVEDLSHHQMHREWLNVGAGLVDQIHRTRRTGGRVIAVGTTVLRALESATVDGVLRPFAGETQIFIFPGYRITSIDGLVTNFHLPQSTLLMLVSALAGREFILGAYEHAVKQRYRFFSYGDAMLILPQGG

SEQ ID NO: 66117 - protein, 344 aa, Dyella sp.
  REGION 1..344: note = tr|A0A410UET5|A0A410UET5_9GAMM S-adenosylmethionine:tRNA ribosyltransferase-isomerase; OS = Dyella sp. M7H15-1 OX=2501295 GN=queA PE=3 SV=1
MKKSDFNFDLPTELIAQSPLPQRSASRLLLLDVPVRTWQDRMFRELPSFLRKNDLLVFNDTRVLPARLYGHKPSGGAVEILIERVTGTHDAIVQLGVSKKPRPGTAIILADGSQATVQGREESFFRLRFESPEPLERLLMRLGEMPLPPYISRHADASDLERYQTVYAREPGAVAAPTAGLHFDEGLLTQIRDKGVHFGYVTLHVGAGTFQPVRTDDLAHHQMHREWLNVGAGLVDQIHRTRRAGGRVIAVGTTVVRALESATVDSVLRPFAGETQIFIFPGYRITSIDGLITNFHLPQSTLLMLVSALAGREYILGAYEHAVKQRYRFFSYGDAMLIFPQGAT

SEQ ID NO: 66118 - protein, 347 aa, Dyella thiooxydans
  REGION 1..347: note = tr|A0A160N253|A0A160N253_9GAMM S-adenosylmethionine:tRNA ribosyltransferase-isomerase; OS = Dyella thiooxydans OX=445710 GN=queA PE=3 SV=1
MKKSDFDFDLPNALIAQAPLPERSASRLLHLDAAAGTMSDRMFRELPEFLRPGDLLVFNDTRVLPARLYGRKDTGGAVEILIERVTGAHEAVVQLGVSKKPKEGGRIELGDGSHAVVLGREDAFFRLRFESHEPLEKLLHKLGEMPLPPYIERSAEASDLERYQTVYAREPGAVAAPTAGLHFDEEMLARLREKGVQSGYVTLHVGAGTFQPVRADDIKDHHMHREWLNVGAHLVEQVRRTRAAGGRVIAVGTTVVRALESASVDGELHPFAGETQIFIFPGYRFSSIDGLITNFHLPQSTLLMLVSALAGREFMLAAYRHAVAGRYRFFSYGDAMLILPPVPEALR

SEQ ID NO: 66119 - protein, 350 aa, unidentified
  source 1..350: note = Dysgonamonadaceae bacterium
  REGION 1..350: note = tr|A0A2N4SBK4|A0A2N4SBK4_9BACT S-adenosylmethionine:tRNA ribosyltransferase-isomerase; OS = Dysgonamonadaceae bacterium OX=2065189 GN=queA PE=3 SV=1
MKLSQFKFNLPEELIAKYPAKYRDESRMMVLHKKSGEIEHRIFKEILEYFNEKDFFIFNDTKVFPARLFGNKEKTGAQIEVFLLRELNPNQHLWDVLVNPARKIRIGNKLYFGENEELVAEVIDNTTSRGRTLRFLYDGPHEEFKKLLFSIGEMPIPEYMDRHADSDDELRYQNIFAANEGAVVAPAAGLHFSRELMKRMEIKGIDYGFLTLHNGLGAYRDIDVEDLTKHKIDSEQFSISEELCERVNKAFDEGHNICAVGTSVLRALETTVTPSGHLKPKEGWTNKFIFPPYEFVLTKSLVTNFHMPYSTLLMMTTAFGGYDQVMKAYQVAIDEKYRFGAYGDAMLIID

SEQ ID NO: 66120 - protein, 415 aa, unidentified
  source 1..415: note = Dysgonamonadaceae bacterium
  REGION 1..415: note = tr|A0A2N4S7I7|A0A2N4S7I7_9BACT S-adenosylmethionine:tRNA ribosyltransferase-isomerase; OS = Dysgonamonadaceae bacterium OX=2065189 GN=queA PE=3 SV=1
MKRKEIEQLHITDYDYPLPDERIAKYPLEKRDASKLLFYDDGIISESIFSNLADYIPSGSLMIFNNTRVIHARLLFRKETGAQIEVFCLSPADPEDYAMNFAAKQYCSWHCMIGNAKRWKADILTMKIEHGGNGILTLRAEKIVVTDKDTTVRFSWDDDRLSFSEILEIAGKLPIPPYLNRPGETKDDETYQTVYSRIEGSVAAPTAGLHFTDEVMTSLRRKGIATADVTLHVGAGTFRPVKSETIGEHEMHTEFISVPKETIKAIYDNENPLVVVGTTSMRTIESLYYIGARLAINPVAEPYELSVSQWEPYENFLHDIEAKQSLKNILDYLDRNDADHLISATQIMIAPGFRFHYADALITNFHQPQSTLLLLISAFVGDNWRMIYDYALKSDFRFLSYGDSSLLWRNHNKMK

SEQ ID NO: 66121 - protein, 407 aa, unidentified
  source 1..407: note = Dysgonomonas alginatilytica
  REGION 1..407: note = tr|A0A2V3PS29|A0A2V3PS29_9BACT S-adenosylmethionine:tRNA ribosyltransferase-isomerase; OS = Dysgonomonas alginatilytica OX=1605892 GN=queA PE=3 SV=1
MELSDPRHIHIKDYNYDLPDNKIAKYPLEGRDNSKLLVYKDKSITDSHFSSITDYLPEDSLMIFNNTKVIQARLHFNKSTGAQIEIFCLDPYLPHDYNLIFQATEECSWQCMIGNLKKWKEGTLVKEVKIDNQTILLKADRIESAGNTHIIKFEWDNPQYTFADILDAVGELPIPPYLNRDTEEKDKETYQTLYSKIKGSVAAPTAGLHFTEKVFEKLKKKGIETNEVTLHVGAGTFKPVKSEVINDHEMHSEFISVKRETIEHILSHKGNIIAVGTTSVRTLESLYHIGVALEKSPNLNTLKVEQWQPYNSSFDNNITKEKALKNILDYLDKHSINTLLADTQIMIVPGYTFKIVSGIVTNFHQPQSTLLLLVSAFVEGNWMSIYNHALTHEYRFLSYGDSSLLLR

SEQ ID NO: 66122 - protein, 349 aa, unidentified
  source 1..349: note = Dysgonomonas alginatilytica
  REGION 1..349: note = tr|A0A2V3PTW8|A0A2V3PTW8_9BACT S-adenosylmethionine:tRNA ribosyltransferase-isomerase; OS = Dysgonomonas alginatilytica OX=1605892 GN=queA PE=3 SV=1
MKLSQFRFDFPEELIASHPNKNRDESRMLVFDRKTGQVEHKQFKDILEYFDDKDVFVFNDTKVFPARLYGNKEKTGAKIEVFLLRELNEEFHLWDVLVDPARKIRIGNKLYFGDDDSMVAEVIDNTTSRGRTLRFLYDGPAEEFKTALYSLGETPIPKYLGRQEEEDDKHRYQTIFAKNEGAVVAPAAGMHFSRELLKRMEIKGIDFAHITLHSGLGNYREIDVEDLTKHKMDSEQMEVTQHAADIVNKAKANGAKICAVGTSSMRAIETIVSTDHQLKASKGWTNKFIFPPYEFNIADAMVTNLHLPQSTLLMMTAAFGGYDKVMELYEEAVKEKYRFGTYGDSMLIL

SEQ ID NO: 66123 - protein, 406 aa, Dysgonomonas capnocytophagoides
  REGION 1..406: note = tr|A0A4Y8KVU8|A0A4Y8KVU8_9BACT S-adenosylmethionine:tRNA ribosyltransferase-isomerase; OS = Dysgonomonas capnocytophagoides OX=45254 GN=queA PE=3; SV = 1
MNNSDPRHIHIKDFTYDLPDNRIAKYPLEERDSSQLLVYKNNQITDSNFISITDFLPSDSLMVFNNTKVIQARMYFQKSTGAQIEIFCLDPYFPHDYNLIFQTTDKCSWHCMIGNLKKWKEGELTKEVIIKGDTLHITAKRIHSAGNTHIVEFSWNDRRFTFADILDICGELPIPPYLNRDTEEKDKATYQTVYSKIKGSVAAPTAGLHFTERVFTNLKDKGIKTDEVTLHVGAGTFKPVKSDTINDHEMHSEFISVRKETIEHLLSHQGNIIAVGTTSVRTLESLFYIGAGLETNPNPEHLKVDQWQPYDSSQNLITKDKALRNILDYLAENSLKVLLADTQIIIAPGYEFKIVTGIVTNFHQPQSTLLLLVSAFVKGDWKTIYNHALTHDYRFLSYGDSSLLLR

SEQ ID NO: 66124 - protein, 349 aa, Dysgonomonas capnocytophagoides
  REGION 1..349: note = tr|A0A4Y8KXZ5|A0A4Y8KXZ5_9BACT S-adenosylmethionine:tRNA ribosyltransferase-isomerase; OS = Dysgonomonas capnocytophagoides OX=45254 GN=queA PE=3; SV = 1
MKLSQFRFDFPEELIATHPAKNRDESRLLVYNRKTDKVEHKQFKDILEYFDDKDVFIFNDTKVFPARLYGNKEKTGAKIEVFLLRELNEEFHLWDVLVDPARKIRIGNKLYFGDDDSMVAEVIDNTTSRGRTLRFLYDGPSEEFRTALYSLGETPIPRYLGRDEDADDKERYQTIFAKNEGAVVAPAAGLHFSRELMKRMEIKGLEFAYVTLHSGLGNYREIDVEDLTKHKMDSEQMEITDEAADIVNKAKSRGSKICAVGTSVMRGIETIVSTDHQLKSSKGWTNKFIFPPYDFNIADAMVTNLHLPQSTLLMMTAAFGGYDRVMELYEEAVKEKYKFGTYGDAMLIL

SEQ ID NO: 66125 - protein, 349 aa, Dysgonomonas gadei
  REGION 1..349: note = tr|F5J3I0|F5J3I0_9BACT S-adenosylmethionine:tRNA ribosyltransferase-isomerase OS=Dysgonomonas gadei ATCC BAA-286 OX=742766 GN=queA PE=3 SV=1
MKLSQFKFDLPEELIASHPAKNRDESRLLVVNRKTGEVEHKVFKDIIEYFDDKDIFIFNDTKVFPARLYGNKEKTGATIEVFLLRELNEEFHLWDVLVDPARKIRIGNKLYFGDDDSMVAEVIDNTTSRGRTLRFLYDGPSEEFRKALYALGETPIPKYLNRGEEADDKDRYQTIFAKNEGAVVAPAAGLHFSRELLKRMEIKGIDFAYITLHSGLGNYRDIDVEDLTKHKMDSEQLQITEEAIMHVNRAKDAGHRVCAVGTSVMRAIETIVSTDGHLKTNEGWTNKFIFPPYDFGIADSMVTNFHLPQSTLLMMTAAFGGYDRIMDIYDMAVKEKYRFGTYGDAMLII

SEQ ID NO: 66126 - protein, 409 aa, Dysgonomonas gadei
  REGION 1..409: note = tr|F5J1I4|F5J1I4_9BACT S-adenosylmethionine:tRNA ribosyltransferase-isomerase OS=Dysgonomonas gadei ATCC BAA-286 OX=742766 GN=queA PE=3 SV=1
MEVSIFWDIRINDYDYGLPDSRIAKYPLVKRDESKLLVYKEGKITDARFCNLAEYLPDNSLMIFNNTKVIQARLHFQKITGAQIEIFCLEPHSPNDYQLNFQQTQRCSWVCLVGNLKKWKEGDLIKELVVNGEPVMFKARRIQTNGDSHIIEFEWDNTGVTFSELLEVAGELPIPPYLNRDTEEQDKETYQTIYSKIDGSVAAPTAGLHFTPEVFELLGKSGVKTAEVTLHVGAGTFRPVKTEEVKDHVMHSEFISVKRDVIEQLLNHKGKVIAVGTTSVRTLESLYYIGELLEKDNSSGELKVTQWQPYKASTEKELSVKESLTNILTYLDKNNLTSLIAETQIIIAPGYIYKIVDGIITNFHQPKSTLLLLVSAFTGGDNWKAIYKHALDNDYRFLSYGDSSLLLKE

SEQ ID NO: 66127 - protein, 349 aa, unidentified
  source 1..349: note = Dysgonomonas macrotermitis
  REGION 1..349: note = tr|A0A1M4TY90|A0A1M4TY90_9BACT S-adenosylmethionine:tRNA ribosyltransferase-isomerase; OS = Dysgonomonas macrotermitis OX=1346286 GN=queA PE=3 SV=1
MKLSQFRFDFPEELIATHPAKNRDEARLLVYNRKTDKVEHKQFKDILEYFNDKDVFVFNDTKVFPARLYGNKEKTGAKIEVFLLRELNEEFHLWDVLVDPARKIRIGNKLYFGDDDSMVAEVIDNTTSRGRTLRFLYDGPAEEFKTALYALGETPIPRYLGREEEADDKTRYQTIFAKNEGAVVAPAAGLHFSRELMKRMEIKGIDFAYITLHSGLGNYREIDVEDLTKHKMDSEQMEITEEAANIVNQAKARGSKICAVGTSVMRSIETIVSTDNQLKSSKGWTNKFIFPPYEFNIADSMVTNLHLPQSTLLMMTAAFGGYDRVMELYEEAVKEKYKFGTYGDAMLIL

SEQ ID NO: 66128 - protein, 412 aa, unidentified
  source 1..412: note = Dysgonomonas macrotermitis
  REGION 1..412: note = tr|A0A1M5EEA3|A0A1M5EEA3_9BACT S-adenosylmethionine:tRNA ribosyltransferase-isomerase; OS = Dysgonomonas macrotermitis OX=1346286 GN=queA PE=3 SV=1
MVIPYQMESLDPRQIHIKDYNYNLPDDRIAKYPLEERDSSRLLVYKEGRITDSSFTTLPDFLPSDSLMIFNNTKVIQARMYFQKSTGAQIEIFCLDPYEPHDYNLVFQSTGCCSWHCLVGNLKKWKEGKLSKSITIGGQEVLITVERKHSAGNTHIIEFAWDNSQFTFADILDSCGELPIPPYLNRDTEEKDKETYQTLYSKIKGSVAAPTAGLHFTERVFADINKKGIKTDEVTLHVGAGTFKPVKSELISDHEMHSEFISVRRETIENILNHQGNIIAVGTTSVRTIESLYHIGAALEKDPSPGYLLVKQWQPYEETNSTITKEQALQNILDYLDSHSMKVLLADTQIIIAPGYEFKIVKGIVTNFHQPQSTLLLLVSAFVKGDWKTIYNHALTHDYRFLSYGDSSLLLR

SEQ ID NO: 66129 - protein, 407 aa, Dysgonomonas mossii
  REGION 1..407: note = tr|F8WVL2|F8WVL2_9BACT S-adenosylmethionine:tRNA ribosyltransferase-isomerase OS=Dysgonomonas mossii DSM 22836 OX=742767 GN=queA PE=3 SV=1
MEISSPQKIHIQDYNYNLPDDRIAKYPLTKRDNSKLLVYKNEKITDTVFSNINNFLPENCLMVFNNTKVIQARLHFQKTTGAQIEIFCLEPCIPNDYQLNFQQTEKCSWVCLIGNLKKWKEGSLTRQIKVNEQIVNFTATRAGSHGDAHVIDFEWDNQSVTFSELLDAVGELPIPPYLNRATEEQDKQTYQTVYSKIDGSVAAPTAGLHFTPEVMKSLKDQGMKLAEVTLHVGAGTFRPVKSDEIGDHVMHSEFISVQKSFIEGLLKFEGKVIAVGTTSVRTLESLYYIGVSLENQKQSHLHVSQWMPYNDSNNRLSKKDALRNILAYLEKNSLSMLIADTQIIIAPGYEFKIVDGIVTNFHQPQSTLLLLVSAFLGNNNWKNIYEHALSSDYRFLSYGDSSLLLKD

SEQ ID NO: 66130 - protein, 407 aa, Dysgonomonas mossii
  REGION 1..407: note = tr|A0A4Y9ILG8|A0A4Y9ILG8_9BACT S-adenosylmethionine:tRNA ribosyltransferase-isomerase; OS = Dysgonomonas mossii OX=163665 GN=queA PE=3 SV=1
MEISSPQKIHIQDYNYNLPDNRIAKYPLTKRDNSKLLVYKNEKITDTVFSNINNFLPENCLMVFNNTKVIQARLHFQKTTGAQIEIFCLEPCIPNDYQLNFQQTEKCSWVCLIGNLKKWKEGSLTRQINVNEQIVNFTATRTKSHGDAHVIDFEWDNQGVTFSELLDAVGELPIPPYLNRATEEQDKQTYQTVYSKIDGSVAAPTAGLHFTSEVMKSLKDQGMKLAEVTLHVGAGTFRPVKSDEIGDHVMHSEFISVQKSFIEELIRFEGKVIAVGTTSVRTLESLYYIGVSLESQKQSHLHVSQWMPYSDSNNRLSKKDALKNILAYLEANSLSTLIADTQIIIAPGYEFKIVDGIVTNFHQPQSTLLLLVSAFLGNNNWKNIYEHALSSDYRFLSYGDSSLLLKD

SEQ ID NO: 66131 - protein, 349 aa, Dysgonomonas sp.
  REGION 1..349: note = tr|A0A3D3TC97|A0A3D3TC97_9BACT S-adenosylmethionine:tRNA ribosyltransferase-isomerase; OS = Dysgonomonas sp. OX=1891233 GN=queA PE=3 SV=1
MKLSQFKFDFPSELIAAHPAKNRDESRLLVYNRKEDKTEHRLFKDILEYFNDKDVFIFNDTKVFPARLYGNKEKTGAKIEVFLLRELNEELHLWDVLVDPARKIRIGNKLYFGEDDSMVAEVIDNTTSRGRTLRFLYDGPPEEFRSALYALGETPIPKYLGRGEEPEDKERYQTIFAKNEGAVVAPAAGLHFSRELLKRMEIKGIDFAYITLHSGLGNYREIDVEDLTKHKMDSEQMEITPEAAAIVNKAKANGNKICAVGTSVMRTIETVVSTDHQLKPNEGWTNKFIFPPYEFNIADAMVTNLHLPQSTLLMMTAAFGGYDKVMELYEEAVKEKYKFGTYGDAMLIL

SEQ ID NO: 66132 - protein, 407 aa, Dysgonomonas sp.
  REGION 1..407: note = tr|A0A1M3LEZ1|A0A1M3LEZ1_9BACT S-adenosylmethionine:tRNA ribosyltransferase-isomerase; OS = Dysgonomonas sp. 37-18 OX=1895907 GN=queA PE=3 SV=1
MEISSPQKIHIQDYNYNLPDDRIAKYPLTKRDNSKLLVYKNEKITDTVFSNINNFLPENCLMVFNNTKVIQARLHFQKTTGAQIEIFCLEPCIPNDYQLNFQQTVKCSWVCLIGNLKKWKEGSLTRQINVNEKVVNLTTTRTKSHGDTHVIDFEWDNQNVTFSELLDAVGELPIPPYLNRATEEQDKQTYQTVYSKIDGSVAAPTAGLHFTPEVMKSLKEQGMKLAEVTLHVGAGTFRPVKSDEIGNHVMHSEFISVQKSFIEELIRFEGKVIAVGTTSVRTLESLYYIGVSLENQKQSHLHVSQWMPYNDSNNRLSKKDALKNILAYLEANSLSTLIADTQIIIAPGYEFKIVDGIVTNFHQPQSTLLLLVSAFLGNNNWKNIYEHALSSDYRFLSYGDSSLLLKD

SEQ ID NO: 66133 - protein, 341 aa, unidentified
  source 1..341: note = Dysosmobacter welbionis
  REGION 1..341: note = tr|A0A4D7B3C4|A0A4D7B3C4_9FIRM S-adenosylmethionine:tRNA ribosyltransferase-isomerase; OS = Dysosmobacter welbionis OX=2093857 GN=queA PE=3 SV=1
MKTSDFYYDLPQELIAQTPIEKRDTSRLMTLDRVSGATGHHHFYDLPDYLNPGDCLILNNSRVLPARLVGQRLPGGGICEVLLLNDRGDKVWECLVRPGRKLRKGTRLSFGNGELTAEIVEQLEEGGRLIRFDYEGIFLETLERLGKMPLPPYIKEELQDQERYQTVYSKVLGSAAAPTAGLHFTPELLEKIRAKGVKIGYVTLHVGLGTFRPVKEDTIEDHPMHSEYCTIPQETADLINETRKGGGRCICVGTTSCRTLESWAAEDGHMEAKSGWTDIYIYPGYRFKVMDGLVTNFHLPESTLIMLVSAFAGREHVLAAYEEAVREKYRFFSFGDAMFIS

SEQ ID NO: 66134 - protein, 349 aa, Echinicola sp.
  REGION 1..349: note = tr|A0A514CCK1|A0A514CCK1_9BACT S-adenosylmethionine:tRNA ribosyltransferase-isomerase; OS = Echinicola sp. LN3S3 OX=2591634 GN=queA PE=3 SV=1
MKLSDFKFEVPKKLISLYPTDNRDESRLMVVHRDTGEIEHRVFKDIIEYFDEGDVFVTNNTKVFPARLYGNKEKTGAKIEVFLLRELNQELRLWDVLVDPARKIRVGNKLYFGDSDLVAEVIDNTTSRGRTIRFLFDGTDEEFYKTIDTLGETPILKDFIDRKVEEEDRERYQTIYAEHVGAVAAPTAGLHFTPHLLKRLEIKGVEVSPITLHIGLGTFRQVDVEDLTKHKMDSENYDIPEKTVDLVNGAIEAKKRVVAVGTTSLKTVESSVTASNKLKSSSGWTDKFIIPPYEFKIANALITNFHLPESTLLMTTAAFGGYDLIMKAYKEAVKEKYRFFSYGDAMLIL

SEQ ID NO: 66135 - protein, 407 aa, Echinicola sp.
  REGION 1..407: note = tr|A0A514CLQ7|A0A514CLQ7_9BACT S-adenosylmethionine:tRNA ribosyltransferase-isomerase; OS = Echinicola sp. LN3S3 OX=2591634 GN=queA PE=3 SV=1
MDTTSDIKLSDYQYELPEDRIAKFPLEKRDESKLLHFEDGNVDHHRFYNLPALLPSNTLMVFNNTKVIPARLIFQRASGAKIEIFLLQPIAPSTIINETMMHTGAVTWQAMIGNLKKWKDGEVLEGKVMANGNVLTINATLENREERLVKIDWKDDNLPFAAVVEAVGEVPLPPYLNRKATNEDKPRYQTVYSLKEGAVAAPTAGLHFTDETLRKLTDAGIKTDYLTLHVGAGTFQPIKEEIVTHHPMHSEQVVVTRENIRHFLAHDGNIVAVGTTSMRSLESIYWYGVKLLNGDSKAFQIQKLYPYQEGLIKASLQESFQAILDFMNTENLDEITGSTEIFIMPGYEFRVCNGLLTNFHQPASTLILLVAAFTKGTWQKIYHEALSHDYRFLSYGDSSLLWHHKKA

SEQ ID NO: 66136 - protein, 349 aa, unidentified
  source 1..349: note = Echinicola strongylocentroti
  REGION 1..349: note = tr|A0A2Z4IFH8|A0A2Z4IFH8_9BACT S-adenosylmethionine:tRNA ribosyltransferase-isomerase; OS = Echinicola strongylocentroti OX=1795355 GN=queA PE=3; SV = 1
MKLSDFKFEVPKKLISLYPSDNRDESRLMVVHRDTGKIEHRIFKDVIEYFDEGDVFVTNNTKVFPARLYGNKEKTGAKIEVFLLRELNQELRLWDVLVDPARKIRVGNKLYFGDSDLVAEVIDNTTSRGRTIRFLFDGTDEEFYKTIDALGETPILKDFIDRKVEEEDRERYQTIYAEHVGAVAAPTAGLHFTPHLLKRLEIKGVEVSPITLHIGLGTFRQVDVEDLTKHKMDSENYDIPEKTVDLVNDALDAKRRVVAVGTTSLKTVESSVTANNRLKPSSGWTDKFIIPPYDFKIANSLITNFHLPESTLLMTTAAFGGYDLIMKAYQEAIKEKYKFFSYGDAMLIL

SEQ ID NO: 66137 - protein, 407 aa, unidentified
  source 1..407: note = Echinicola strongylocentroti
  REGION 1..407: note = tr|A0A2Z4IEB0|A0A2Z4IEB0_9BACT S-adenosylmethionine:tRNA ribosyltransferase-isomerase; OS = Echinicola strongylocentroti OX=1795355 GN=queA PE=3; SV = 1
MGITPDIKLSDYHYHLPEDRIAKFPLEKRDRSKLLHFEDGKIGHHHFYDLPELLPSDTLMVFNNTKVIPARLIFQRESGARIEIFLLQPIAPSTVINQIMQHTGSVTWQAMIGNSKKWKDGEILTGKVLINDRPLTITASLANRTDRQVTINWEDEQLPFAAVVEAAGEVPLPPYLNRKATSEDKPRYQTVYSKKEGAVAAPTAGLHFTDEILKTLSDQGIKTDYLTLHVGAGTFQPIKDEIVTHHPMHSEQVVVSKENIQYLLGHKGNIVAVGTTSMRSLESIYWYGVKLLNGDGKDFLIPKLYPYQQRLKKASFEESFRAIMDHMTEENLNEITGSTEIFIMPGYRFKVCNGLLTNFHQPASTLILLVAAFTKGHWQKIYSEALSHDYRFLSYGDSSLLWHHKKA

SEQ ID NO: 66138 - protein, 349 aa, Echinicola vietnamensis
  REGION 1..349: note = tr|L0FUI9|L0FUI9_ECHVK S-adenosylmethionine:tRNA ribosyltransferase-isomerase OS=Echinicola vietnamensis (strain DSM 17526 / LMG 23754 / KMM 6221) OX=926556; GN = queAPE=3 SV=1
MKLSDFKFEVPKKLISLYPSDNRDESRLMVVHRDTGEIEHRVFKDIIEYFDEGDVFVTNNTKVFPARLYGNKEKTGAKIEVFLLRELNQELRLWDVLVDPARKIRVGNKLYFGDSDLVAEVIDNTTSRGRTIRFLFDGTDEEFYKTIDALGETPILKEFIDRKVEEEDRERYQTIYAEHVGAVAAPTAGLHFTPHLLKRLEIKGVEVSPITLHIGLGTFRQVDVEDLTKHKMDSENYDIPEKTVDLVNDAIDAKKRVVAVGTTSLKTVESSVTASNRLKPSSGWTDKFIIPPYEFKIANALITNFHLPESTLLMTTAAFGGYDLIMKAYKEAVKEKYRFFSYGDAMLIL

SEQ ID NO: 66139 - protein, 425 aa, Echinicola vietnamensis
  REGION 1..425: note = tr|L0G548|L0G548_ECHVK S-adenosylmethionine:tRNA ribosyltransferase-isomerase OS=Echinicola vietnamensis (strain DSM 17526 / LMG 23754 / KMM 6221) OX=926556; GN = queAPE=3 SV=1
MVITFPLPGKSQQLRGMQMDTTAEIKLSDYQYDLPEDRIAKFPLEKRDQSKLLHYENGKIAHHRFYELPTLLPSNTLMVFNNTKVIPARLIFQRDSGAKIEVFLLQPTAPSTLINETMMHTGTVTWQAMIGNLKKWKDGEVLQGKVMANGTALTIRATLENREERRVKIDWDDDHLTFAAVVEAVGEVPLPPYLNRKATNEDKPRYQTVYSQKEGAVAAPTAGLHFTDEILKKLSDTGIQTDYLTLHVGAGTFQPIKAEIVTHHPMHSEQVVVTKENIRHFLAHDGNIVAVGTTSMRSLESIYWYGVKLLNGDSKEFQIQKLYPYQKQLKKATLKESLQAILDYMNAENLHEITGSTEIFIMPGYEFRVCNGLLTNFHQPASTLILLVAAFTKGRWQNIYHEALSHDYRFLSYGDSSLLWHHKKA

SEQ ID NO: 66140 - protein, 349 aa, Ectothiorhodosinus mongolicus
  REGION 1..349: note = tr|A0A1R3W633|A0A1R3W633_9GAMM S-adenosylmethionine:tRNA ribosyltransferase-isomerase; OS = Ectothiorhodosinus mongolicus OX=233100 GN=queA PE=3; SV = 1
MQLSDFVYDLPAELIAQHPPEKRGDSRLLCLEGEDGALADRHIRDLPRLLNAGDLLVVNNTSVIPARLHGVKQASGGRVEVLVERLLGPFEALAHVRASKSPAAGTQLLLEDVIEAEVTGREGDLFALCFKDSVLDLLDTHGHMPLPPYIARDDAPADRQRYQTVYAKEPGAIAAPTAGLHFDDALMQAVKNQGVEVAEVTLHVGAGTFQPVRVTDIAQHVMHSEWLRVTESVCAQVRACKARGNRVVAVGTTSVRSLETAAQSGEIMAFEGETQLFITPGYRFQVVDALLTNFHLPESTLLMLVSAFAGREQVLAAYAHAVAQRYRFFSYGDAMWLTPHKSATPQHEI

SEQ ID NO: 66141 - protein, 348 aa, Ectothiorhodospira haloalkaliphila
  REGION 1..348: note = tr|W8KRC8|W8KRC8_9GAMM S-adenosylmethionine:tRNA ribosyltransferase-isomerase OS=Ectothiorhodospira haloalkaliphila OX=421628 GN=queA PE=3 SV=1
MQVRDFDFFLPQELIAQAPLPDRGGARLLCLDGPTGQLADRQIRDLPELLSPDDLLVFNDTRVIPARLKGHKVETGGQVEVLVERITGRQAALAHVRASKAPGPGTRLCLEGVVEATVEGRDGDLFVLVFDAPVLDQLERHGHMPLPPYITREDTEEDRQRYQTVFAREPGAVAAPTAGLHFDDALLAAIRARGVETASVTLHVGAGTFQPVRVADTQDHVMHAEWVRVTQDTCDQVTRCRARGGRVVAVGTTSVRCLETAAAGGELIPFEGDTRLFITPGFEYRAVDAMVTNFHLPQSTLLMLVCAFGGQAAVLAAYQHAVRQQYRFFSYGDAMFITAQRGAQRDAV

SEQ ID NO: 66142 - protein, 348 aa, Ectothiorhodospira magna
  REGION 1..348: note = tr|A0A1H9DI53|A0A1H9DI53_9GAMM S-adenosylmethionine:tRNA ribosyltransferase-isomerase; OS = Ectothiorhodospira magna OX=867345 GN=queA PE=3 SV=1
MQVHDFQFDLPPQLIAQAPLPERSASRLLHLDGISGALADRHVRDLPDLLQPGDLLVFNDTRVIPARLHGRKRDSGGRVEVLVERLEAKHQVLAHLRASKSPGAGVWLWLEEATEAQVLGREGDLFRLRFTDPVLEVLERHGHMPLPPYIDRPDTQDDRQRYQTVFARAPGAVAAPTAGLHFDDALLERIRARGVETASVTLHVGAGTFQPVRVQDIREHVMHAEWVQVSARTCDQVAACKARGGRVVAVGTTSVRSLESAARGGALAPFEGDTRLFIVPGYDYRVVDALVTNFHLPESTLLMLVSAFAGRDQVLAAYRHAVRERYRFFSYGDAMFMTRRPLEHPTEP

SEQ ID NO: 66143 - protein, 348 aa, Ectothiorhodospira marina
  REGION 1..348: note = tr|A0A1H7FN16|A0A1H7FN16_9GAMM S-adenosylmethionine:tRNA ribosyltransferase-isomerase; OS = Ectothiorhodospira marina OX=1396821 GN=queA PE=3 SV=1
MQVSDFDFFLPQELIAQAPLPDRGGARLLCLDGPTGQLADRQIRDLPELLSPDDLLVFNDTRVIPARLKGRKVETGGQVEVLVERITGRQAALAHVRASKAPGPGTRLCLEGVVEATVEGRDGDLFVLVFDAPVLDQLEQHGHMPLPPYITREDTEEDRQRYQTVFAREPGAVAAPTAGLHFDDALLAAIRARGVETASVTLHVGAGTFQPVRVADTQDHVMHAEWVRVTQATCDQVARCRARGGRVVAVGTTSVRCLETAAAGGALAPFEGDTRLFITPGFEYRTVDAMVTNFHLPQSTLLMLVCAFGGQAAVLAAYAHAVSQGYRFFSYGDAMFMTAQRGMQHNAV

SEQ ID NO: 66144 - protein, 349 aa, Ectothiorhodospira mobilis
  REGION 1..349: note = tr|A0A1I4SSU1|A0A1I4SSU1_ECTMO S-adenosylmethionine:tRNA ribosyltransferase-isomerase; OS = Ectothiorhodospira mobilis OX=195064 GN=queA PE=3 SV=1
MQVSDFTYTLPPERIAQAPLPERSAARMLCLDGADASLADRHVRDLPQLLHPGDLLVFNDTRVIPARLTGHKIPSGGRVEVLLERLQGPQRALAHVRASKAPREGARLWLEEAVEAVVEGREGDLFCLRFEGGEVLEQLERHGHMPLPPYIRRQDTPEDRRRYQTVFARAPGAVAAPTAGLHFDEALLQALQERGVETASVTLHVGAGTFQPVRVQDPKDHVMHAEWVQVDAEACERVAACRARGGRVVAVGTTSVRCLETAAAGGSLAPFQGDTRLFITPGYRFRVVDALLTNFHLPESTLLMLVCAFAGREAVLSAYAHAVDQGYRFFSYGDAMFLTPCAQARGHAI

SEQ ID NO: 66145 - protein, 348 aa, Ectothiorhodospira sp.
  REGION 1..348: note = tr|A0A167BID1|A0A167BID1_9GAMM S-adenosylmethionine:tRNA ribosyltransferase-isomerase; OS = Ectothiorhodospira sp. BSL-9 OX=1442136 GN=queA PE=3; SV = 1
MQVSDFDFFLPQELIAQTPLPDRGGARLLCLDGPTGQVTDRQIRDLPELLSPDDLLVFNNTRVIPARLKGRKIETGGQVEVLVERITGRQTALAHVRASKSPGVGTRLCLEGVVEATVEGRDGDLFRLAFDGPVLDQLEQHGHMPLPPYITREDTQEDRQRYQTVFAREPGAVAAPTAGLHFDEALLEAIRARGVETASVTLHVGAGTFQPVRVADTQDHVMHAEWVRVTQATCDQVARCRARGGRVVAVGTTSVRCLETAAAGGELIPFGGDTRLFITPGFEYRAVDAMVTNFHLPQSTLLMLVCAFGGQAAVLAAYQHAVRQQYRFFSYGDAMFITAQHGAQHDAV

SEQ ID NO: 66146 - protein, 347 aa, Ectothiorhodospira sp.
  REGION 1..347: note = tr|H1G2U2|H1G2U2_9GAMM S-adenosylmethionine:tRNA ribosyltransferase-isomerase OS=Ectothiorhodospira sp. PHS-1 OX=519989 GN=queA PE=3 SV=1
MQVSDFTFDLPPELIAQAPLPERSASRLLHLDGASGALADRHVRDLPDLLRPGDLLVFNDTRVIPARLHGRKRDSGGRVEVLVERLEDRHQVLAHLRASKSPGAGVWLWLEEAAEAQVLGREGDLFRLRFTDPVLEVLERHGHMPLPPYIDRPDTQDDRRRYQTVFARSPGAVAAPTAGLHFDEALLERIRARGVETASVTLHVGAGTFQPVRVQDIREHVMHAEWVQVSARTCDQVAACKARGGRVVAVGTTSVRSLESAARGGALAPFEGDTRLFIVPGYDYRVVDALVTNFHLPESTLLMLVSAFAGRDQVLAAYRHAVRERYRFFSYGDAMFMTRRPLEPTEP

SEQ ID NO: 66147 - protein, 349 aa, unidentified
  source 1..349: note = Ectothiorhodospiraceae bacterium
  REGION 1..349: note = tr|A0A2A4XSE3|A0A2A4XSE3_9GAMM S-adenosylmethionine:tRNA ribosyltransferase-isomerase; OS = Ectothiorhodospiraceae bacterium OX=2026737 GN=queA; PE = 3 SV=1
MRRSDFNFELPPELIAQHPLAERTASRLLTLLTGEMPCDRQFQDIADLLRPGDLLVMNNTRVIPARLFGHKATGGKVEVLVERVLDEHRVLAHVRASKSPKPGMVLTLEGEVSATVEGREGDLFVLSFAGDTTVVSLLEEHGHMPLPPYIDRADQPADRERYQTVFAERQGAVAAPTAGLHFDQPLLDALAEKGIESTFVTLHVGAGTFQPVRAEMIADHHMHAETIEVSAQTVAAVVATRARGGRVVAVGTTSVRALESAARSGELTPFQGDTDIFITPGYQFQVVDALLTNFHLSESTLLMLVCAFAGYDEVMAAYRHAVEQQYRFFSYGDAMFLTRQTHAAQSFNR

SEQ ID NO: 66148 - protein, 344 aa, unidentified
  source 1..344: note = Ectothiorhodospiraceae bacterium
  REGION 1..344: note = tr|A0A2E0UGX1|A0A2E0UGX1_9GAMM S-adenosylmethionine:tRNA ribosyltransferase-isomerase; OS = Ectothiorhodospiraceae bacterium OX=2026737 GN=queA; PE = 3 SV=1
MKLSDFDYNYPKTLIAKYPAEPRDSARLMVVDRNTGDIEHRRFTDIHEYFRKGDCLVLNDTKVFPARLFGRKEKTNAKIEVFLLRELSKDEHIWDVIVDPARKVRIGNKIYFSDNLMCEVIDNTTSRGRTVKFNYEGDFFKIIEDVGNTPLPPYIKRDAEEEDKARYQTVFAENIGAVAAPTAGLHFTKPLLSRLKRKGVSVTSLLLHIGLGTFRPVEVEDLTKHKMDSEYYEIPPEACMSVNKAKDAKKNIFVCGTSTVRAAESSVTTMRKLTPARGWTDKFIFPPYDFKVTDKLITNFHMPKTTLLMMVAAFMDYDLMMKAYKKAVKERYRLFSYGDAMIIL

SEQ ID NO: 66149 - protein, 351 aa, unidentified
  source 1..351: note = Edaphobacillus lindanitolerans
  REGION 1..351: note = tr|A0A1U7PQ69|A0A1U7PQ69_9BACI S-adenosylmethionine:tRNA ribosyltransferase-isomerase; OS = Edaphobacillus lindanitolerans OX=550447 GN=queA PE=3; SV = 1
MNIEDFDFDLPEELIAQTPLLDRTGSRLMVVDRMTGGVEDRQFPDILDYLEPGDCLVLNDTKVLPARLLGTKEETGATIEVLLLTDKGGDEWETLAKPAKRVRPGTVIEFGDGLLKAECTGVSDHGGRTFKFTYDGIFYEVLDRLGEMPLPPYIHEKLDDQDRYQTVFAKERGSAAAPTAGLHFTEELLEKIQDKGIELVFITLHVGLGTFRPVSVDSIEEHEMHSEYYSVSEEAASAIRRVKERGGKVISVGTTSTRTLETIASENDGEIVAAGGWTSIFIYPGYEYKAIDGLITNFHLPKSTLIMLVSALADRETILSAYRHAVEERYRFFSFGDAMFIKPPNRKGRTK

SEQ ID NO: 66150 - protein, 366 aa, Edaphobacter aggregans
  REGION 1..366: note = tr|A0A428MHB9|A0A428MHB9_9BACT S-adenosylmethionine:tRNA ribosyltransferase-isomerase; OS = Edaphobacter aggregans OX=570835 GN=queA PE=3 SV=1
MRVADFHFDLPDELIAQSPPPVRGTSRMLVLDREAAEYRDDFFRNLPHLLRSGDLLILNDSRVIPARLFATRARGLHTQPSSPDPTGRIEVLLTEHIGGEDWSALVRPSRKVQPGERLHFAALNESEPLLEAEILAAGEFGERTLRFNPVQDFRAILDKIGHMPLPPYIHRDDSEEDKDRYQTVFSHEPGSAAAPTAGLHFTPEILAELRQRGVQIETITLHVGLGTFQPVRAENVEDIRLHAEHYTLPAATAEAVNAALREGRRIIAAGTTTTRTLEHCAQHSLEFEPHAGVRLEAHSGSTSIFISPGYRFRVVSGLLTNFHLPQSTLLMLVSAFAGREAVLAAYAHAVRERYRFFSYGDCMLIL

SEQ ID NO: 66151 - protein, 367 aa, unidentified
  source 1..367: note = Edaphobacter dinghuensis
  REGION 1..367: note = tr|A0A495BWV2|A0A495BWV2_9BACT S-adenosylmethionine:tRNA ribosyltransferase-isomerase; OS = Edaphobacter dinghuensis OX=1560005 GN=queA PE=3 SV=1
MRVTDFHFDLPEELIAQSPPPVRGTSRMLRLDRRTGEYSDDFFRNLPEILRPGDLLILNDSRVIPARLYATRAGLHTQQNSPHPSGRIEVLLTQHLGGEDWSALVRPSRKVQPGEHLHFYASGETEPLLAAEILTAGEFGERTLRFAATENFQSILEKIGHMPLPPYIHRSDTSEDRDRYQTVFSHEPGSAAAPTAGLHFTPEILAQLKQNGIQIETITLHVGLGTFQPVRAENLADIHLHAEHYTLPAATATAINAALAEGRRIVAAGTTTTRTLEHCAQLANTDPFEPHAGLRLHPHSGSTEIFISPGHTFRVVSGLLTNFHLPQSTLLMLVSAFAGRESVLAAYAHAVRERYRFFSYGDCMLLL

SEQ ID NO: 66152 - protein, 373 aa, Edaphobacter modestus
  REGION 1..373: note = tr|A0A4Q7YXS2|A0A4Q7YXS2_9BACT S-adenosylmethionine:tRNA ribosyltransferase-isomerase; OS = Edaphobacter modestus OX=388466 GN=queA PE=3 SV=1
MRVSDFHFDLPEELIAQSPPPVRGSSRMLVLDRRAGEYRDNFFRNLPELLQPGDLLILNDSRVIPARLYATRARGPQTQAGSPDPTGRIEVLLTQQLSQHEWTALVRPGRKVQPGERLHFAASPTSENPAPTPLLEAEVIAAADFGERTLRFAPTPEFRAILDRIGHMPLPPYIHRSDTPEDRDRYQTVFSHEPGSAAAPTAGLHFTPEILDQLRARGVQTETLTLHVGLGTFQPVRAENVEDIRLHAEHYTLPPSTADAINAALREKRRIIAAGTTTTRTLEHCAHIASTDAFEPHAGLRLHPHSGETSIFISPGYQFRVVSGLLTNFHLPQSTLLMLVSAFAGRESVFAAYSHAVRERYRFFSYGDCMLIL

SEQ ID NO: 66153 - protein, 357 aa, unidentified
  source 1..357: note = Edwardsiella anguillarum
  REGION 1..357: note = tr|A0A076LS08|A0A076LS08_9GAMM S-adenosylmethionine:tRNA ribosyltransferase-isomerase; OS = Edwardsiella anguillarum ET080813 OX=667120 GN=queA; PE = 3 SV=1
MRVSDFTFELPDELIARYPQEQRSGCRLLSLDGPTGAREHGVFTDIVDKLNPGDLLVFNNTRVIPARLFGRKASGGKVEVLVERVLDRARVLAHVRASKAPKPGAELLLGDNEDIRATMLARHDALFELGFDDPRDVLTILNAAGHMPLPPYIDRPDEEADRELYQTVYSSRPGAVAAPTAGLHFDQPLLDKLRDKGVEMAFVTLHVGAGTFQPVRVESIEDHIMHSEYAEVPQEVVDAVLACKARGNRVIAVGTTSVRSLESAAAASKQALIAPFFDDTQIFIYPGYHYQVIDALITNFHLPESTLIMLVSAFAGYRHTLDAYRDAVARQYRFFSYGDAMYITRNPQAEQEQVVSA

SEQ ID NO: 66154 - protein, 357 aa, Edwardsiella hoshinae
  REGION 1..357: note = tr|A0A376DJ08|A0A376DJ08_9GAMM S-adenosylmethionine:tRNA ribosyltransferase-isomerase; OS = Edwardsiella hoshinae OX=93378 GN=queA PE=3 SV=1
MRVSDFTFELPDELIARYPQAQRSACRLLSLDGPTGKLEHGVFTDIVDKLQPGDLLVFNNTRVIPARLFGRKASGGKIEVLVERVLDRARVLAHVRASKAPKPGAELLLGDNEEIRATMLARHDTLFELGFEDERDVLTILNAVGHMPLPPYIDRPDEHADRELYQTVYSTRPGAVAAPTAGLHFDQPLLDRLRAKGVEMAFVTLHVGAGTFQPVRVESIEDHIMHSEYAEVPQEVVDAVLACKARGNRVIAVGTTSVRSLESAAAASQSALIAPFFDDTQIFIYPGYHYQVIDALITNFHLPESTLIMLVSAFAGYRHTLNAYHEAVAQQYRFFSYGDAMYITRNPQAEQECITSA

SEQ ID NO: 66155 - protein, 357 aa, Edwardsiella ictaluri
  REGION 1..357: note = sp|C5BCF6|QUEA_EDWI9 S-adenosylmethionine:tRNA ribosyltransferase-isomerase OS=Edwardsiella ictaluri (strain 93-146) OX=634503 GN=queA PE=3 SV=1
MRVSDFTFELPDELIARYPQEQRSGCRLLSLDGPTGARQHGVFTDIVDKLNPGDLLVFNNTRVIPARLFGRKASGGKVEVLVERVLDRTRVLAHVRASKAPKPGAGLLLGDNEDIRATMLARHDALFELGFDDPRDVLTILNAAGHMPLPPYIDRPDEEADRELYQTVYSSRPGAVAAPTAGLHFDQPLLDRLRDKGVEMAFVTLHVGAGTFQPVRVESIEDHVMHSEYAEVPQEVVDAVLACKARGNRVIAVGTTSVRSLESAAAANKQALIAPFFDDTQIFIYPGYHYQVIDALITNFHLPESTLIMLVSAFAGYRHTLDAYRDAVVQQYRFFSYGDAMYITRNPQAEQEQVVSA

SEQ ID NO: 66156 - protein, 357 aa, unidentified; identical to SEQ ID NO: 66153
  source 1..357: note = Edwardsiella piscicida
  REGION 1..357: note = tr|A0A034T5I0|A0A034T5I0_9GAMM S-adenosylmethionine:tRNA ribosyltransferase-isomerase; OS = Edwardsiella piscicida OX=1263550 GN=queA PE=3 SV=1

SEQ ID NO: 66157 - protein, 357 aa, unidentified
  source 1..357: note = Edwardsiella piscicida
  REGION 1..357: note = tr|A0A411GZZ8|A0A411GZZ8_9GAMM S-adenosylmethionine:tRNA ribosyltransferase-isomerase; OS = Edwardsiella piscicida OX=1263550 GN=queA PE=3 SV=1
MRVSDFTFELPDELIARYPQEQRSGCRLLSLDGPTGAREHGVFTDIVDKLNPGDLLVFNNTRVIPARLFGRKTSGGKVEVLVERVLDRARVLAHVRASKAPKPGAELLLGDNEDIRATMLARHDALFELGFDDPRDVLAILNAAGHMPLPPYIDRPDDEADRELYQTVYSSRPGAVAAPTAGLHFDQPLLDRLRDKGIEMAFVTLHVGAGTFQPVRVESIEDHIMHSEYAEVPQEVVDAVLACKARGNRVIAVGTTSVRSLESAAAASKQALIAPFFDDTQIFIYPGYHYQVIDALITNFHLPESTLIMLVSAFAGYRHTLDAYRDAVARQYRFFSYGDAMYITRNPQAEQEQVVSA

SEQ ID NO: 66158 - protein, 357 aa, Edwardsiella tarda; identical to SEQ ID NO: 66157
  REGION 1..357: note = tr|A0A0H3DP13|A0A0H3DP13_EDWTF S-adenosylmethionine:tRNA ribosyltransferase-isomerase; OS = Edwardsiella tarda (strain FL6-60) OX=718251 GN=queA; PE = 3 SV=1

SEQ ID NO: 66159 - protein, 357 aa, Edwardsiella tarda
  REGION 1..357: note = tr|A0A2X1IGH9|A0A2X1IGH9_EDWTA S-adenosylmethionine:tRNA ribosyltransferase-isomerase; OS = Edwardsiella tarda OX=636 GN=queA PE=3 SV=1
MRVSDFTFELPDELIARYPQAQRSACRLLSLDGPTGKREHGVFTDIVDKLQPGDLLVFNNTRVIPARLFGRKESGGRIEVLVERVLDRARVLAHVRASKAPKPGAALLLGDNEEIRATMLARHDTLFELGFEDERDVLTILNAAGHMPLPPYIDRPDDEADRELYQTVYSTRPGAVAAPTAGLHFDQPLLDRLRAKGVEMAFVTLHVGAGTFQPVRVESIEDHVMHSEYAEVPQAVVDAVLACKARGNRVIAVGTTSVRSLESAAAASQSALIAPFFDDTQIFIYPGYHYQVIDALITNFHLPESTLIMLVSAFAGYRHTLDAYHEAVAQQYRFFSYGDAMYITRNPQSEQETIVSA

SEQ ID NO: 66160 - protein, 346 aa, unidentified
  source 1..346: note = Effusibacillus lacus
  REGION 1..346: note = tr|A0A292YNF5|A0A292YNF5_9BACL S-adenosylmethionine:tRNA ribosyltransferase-isomerase; OS = Effusibacillus lacus OX=1348429 GN=queA PE=3 SV=1
MRVEDFDFELPEELIAQHPLQERTGSRLLVLGRSSGRIEHRMFTELLDYLQPEDCLILNDTRVIPARLYGRKPDTGGQVEFLLLKERGPDLWEVLVRPGKRLKPGTTVEFGDGMLRADILETTEEGGRIVRFDYEGLFYEVLDRFGEMPLPPYITERLEDAERYQTVFSRNKGSAAAPTAGLHFTGEFLDKVRANGVRTGFVTLHVGLGTFRPVSTETVEEHKMHAEYYEFPQATADLIRDTRQRGGRVIAVGTTACRTLETVGSKMAALGEDSLREDRGWTDIFIYPGYSFKVVDGLLTNFHLPKSTLIMLVSALAGRDNVMQAYEEAVRERYRFFSFGDAMLII

SEQ ID NO: 66161 - protein, 359 aa, Eggerthella lenta
  REGION 1..359: note = tr|A0A369NWH5|A0A369NWH5_EGGLN S-adenosylmethionine:tRNA ribosyltransferase-isomerase; OS = Eggerthella lenta OX=84112 GN=queA PE=3 SV=1
MKTSDFDYDLPPELIAQEPAAERDGCRLLVMNRVTGEVEDRVFRDIVDYLTPNDLLVANETRVMPARLLGAKRGTGGAAEVFLLRQHGTPTENRSALWEVLVRPGKRLKPGTGAVVDFVDAVGEVALSAEIVDWLPDAQKGERLARLTTPLPSLDEALHAVGHTPLPPYIKDYAGDEELYQTVYSRRESSAAAPTAGLHFTPALIERLREQGVRWETVELEVGLDTFRIVDEDDPTQHAIHTEYYTVPERTVEAIAETRERGGRVVAVGTTSVRSLESAWDDGTGAVTPRDRETTSLYLLPGSQFHVVDALITNFHVPRSTLMMLVSAFSTREHIMAAYRHAIEERYRMLSFGDAMFIC

SEQ ID NO: 66162 - protein, 361 aa, Eggerthella lenta
  REGION 1..361: note = tr|A0A5C5C7J5|A0A5C5C7J5_EGGLN S-adenosylmethionine:tRNA ribosyltransferase-isomerase; OS = Eggerthella lenta OX=84112 GN=queA PE=3 SV=1
MKTSDFDYELPPELIAQEPAAERDGCRLLVMDRATGELEDRIFRDIVDYLRPDDLLVVNETRVMPARLLGAKRGTGGAAEVFLLREVHDREPHTNHSALWEVLVRPGKRLKPGTGAVVDFVDAQGDVALSAEIVDWADGAQKGERLARLTTTLPSLDEALHAVGHTPLPPYIKNYAGDEELYQTVYSRRESSAAAPTAGLHFTPALIERLRDQGVRWETVELEVGLDTFRIVDEDDPQQHVIHTEYYTVPQRTVDAIAETRERGGRVVAVGTTSVRSLESAWNPEAGAVTARDRETTSLYLLPGSQFHVVDALVTNFHVPRSTLMMLVSAFSSREHIMAAYRHAIEQRYRLLSFGDAMFIC

SEQ ID NO: 66163 - protein, 361 aa, Eggerthella sinensis
  REGION 1..361: note = tr|A0A3N0IT27|A0A3N0IT27_9ACTN S-adenosylmethionine:tRNA ribosyltransferase-isomerase; OS = Eggerthella sinensis OX=242230 GN=queA PE=3 SV=1
MKTSDFDYDLPPELIAQEPAAERDGCRLLVMDRATGALEDRIFRDIADYLRPNDLLIANETRVMPARLLGAKRGTGGAAEVFLLREIHDREPRTNQSALWEVLVRPGKRLKPGTGAVVDFTNAEGTVALSAEIVDWADGAQKGERLARLTTSLPSLDEALHAVGHTPLPPYIKNYAGDEELYQTVYSRRESSAAAPTAGLHFTPTLIERLLDAGVRWETVELEVGLDTFRIVDEDDPEQHTIHTEYYTVPQRTVDAIAETRERGGRVIAVGTTSVRSLESAWDAEAGAVTPRDRETTSLYLLPGSEFHVVDALVTNFHVPRSTLMMLVSAFSTREHIMAAYEHAVQERYRLLSFGDAMFIC

SEQ ID NO: 66164 - protein, 630 aa, Eggerthella sp.
  REGION 1..630: note = tr|R5FJU8|R5FJU8_9ACTN Multifunctional fusion protein OS=Eggerthella sp. CAG:1427 OX=1262874 GN=queA; PE = 3 SV=1
MKLLLHACCGPCSLEPVRLLQAAGHDITIAYMNSNIAPADEYQHRLSTLLEWARSQGIPVIEGPYEPDRWQEAVRASWHPDPARLATRLADSAGNASSDTDAACPGADPEFDTGIDPEFDPARDPKFAHLYSDRDNRCRACYRLRLEELARYAHEHGFDAIGTTLSVSPYQYTSIIKEELERAAAHYDGLTALFEDFRPYYPNATKRSRDLGMYRQNYCGCAYSNKEAAAERAARKAARKKKKEEERRAKLQALTTDDFDYELPEELIAQEPAPIRDECRLLVMKRDTGTLEDKIFKDIIDYLQPGDLLVANETRVMPARLIGHKRGTGGAAEVFLLREAKQELERTNQSATWEALVRPGKRLKPGAVVDFVSSSDPTSSPDPTSSSDPASSSTENVVLSAEVIDWVEGAQKGERLVRLSTALPSLDEALHAVGHTPLPPYIKNYAGDEELYQTVYSHEERSAAAPTAGLHFTPELIEDIKAKGIGWETVHLEVGLDTFRIVEEDNPRDHQIHTERYTVPQRTVDAIKRTKEQGGRVIAVGTTSVRSLESAWDAEQGLIARDREATSLYILPGYEFKVVDALITNFHVPRSTLMMLVSAFSTRDNIMKAYRHAIKRKYRMLSFGDAMFIR

SEQ ID NO: 66165 - protein, 359 aa, Eggerthella sp.
  REGION 1..359: note = tr|F7UVL4|F7UVL4_EEGSY S-adenosylmethionine:tRNA ribosyltransferase-isomerase OS=Eggerthella sp. (strain YY7918) OX=502558 GN=queA PE=3 SV=1
MLTSDFDYNLPPELIAQEPALDRDGCRMLVMDRETGALEDRIFRDIVEYLHPGDLLVANETRVMPARLLGAKRGTGGAAEVFLLRQHGTPLENKSALWEVLVRPGKRLKPGTGAVVDFTDADGNVALSAEIVDWVDNAQKGERLARLSTTLPSLDEALHAVGHTPLPPYIKDYAGDEELYQTVYSRRESSAAAPTAGLHFTPELIERLRNQGVGWETVELEVGLDTFRIVDEDDPTQHVIHTEYYTVPQRTADAIAETRERGGRVVAVGTTSVRSLESAWDAEAAAVTPRDRETTSLYLLPGSEFHVVDALVTNFHVPRSTLMMLVSAFSSRERIMAAYAHAIEERYRMLSFGDAMFIC

SEQ ID NO: 66166 - protein, 416 aa, unidentified
  source 1..416: note = Eggerthellales bacterium
  REGION 1..416: note = tr|A0A316PQS9|A0A316PQS9_9ACTN S-adenosylmethionine:tRNA ribosyltransferase-isomerase; OS = Eggerthellales bacterium OX=2137879 GN=queA PE=3 SV=1
MYRQNFCGCHWSNVEAAEERVERARQRKQKKAEEKQAKLRSLTTSDFDYDLPQELIAQTPHPTRDGCKMLVMKRENGSLQDRIFRDIYDYLKPGDLLVANETRVIPARLLGNKHETGGAAEVLLLRERFDIEEKTSTSAVWEALVKPGRRLKPGAIIDFTREQNDSLSASSNDPASTSDSPVIMQVEVLDWIEDAQKGERLVRLTTPLDSLDEALHQIGHTPLPPYIKNYQGDEELYQTVFSREEKSAAAPTAGLHFTPELIERLKEKGVGFETVHLEVGLDTFRVVETEDPHEHHMHTEYYSVPQKTVDAIKRTKENGGRVIAVGTTSVRSLESAWDNEASELVARERQTTNLFIFPGYTFNVVDALITNFHVPRSTLMMLVSAFSSRDNIMKAYRHAIKRKYRLLSFGDAMFIY

SEQ ID NO: 66167 - protein, 344 aa, Eggerthia catenaformis
  REGION 1..344: note = tr|A0A251WSU1|A0A251WSU1_9FIRM S-adenosylmethionine:tRNA ribosyltransferase-isomerase; OS = Eggerthia catenaformis OX=31973 GN=queA PE=3 SV=1
MDINLFDYYLPEELIAQTPLLKRDTSRLMVLNKKTQTIEHKHFYDIIDYLKPGDILVRNNTKVIPARLFGTKEMTHAHVEVLLLKNLHDDVWECLCGNAKTIKHDTIISFGDGRLKAQCIEVKDEGIRVLEMIYEGIFYEILDQLGIMPLPPYIKEKLNDPYRYNTVYAKIEGSAAAPTAGLHFTKELFSKCRDKGIEVLDVTLHVGLGTFRPVKTDNILEHHMHSEYYEIDEKTADRLNKAKDNNHRIIAIGTTSCRTLEANYSKYGCFKAVHENTDIFIYPGYTFKAIDCLITNFHLPKSTLIMLVSALSSRDYILKAYQQAVKEKYRFFSFGDAMFINNGE

SEQ ID NO: 66168 - protein, 350 aa, Eggerthia catenaformis
  REGION 1..350: note = tr|M2NGQ6|M2NGQ6_9FIRM S-adenosylmethionine:tRNA ribosyltransferase-isomerase OS=Eggerthia catenaformis OT 569 = DSM 20559 OX=999415 GN=queA PE=3 SV=1
MKGPFNMDINLFDYYLPEELIAQTPLLKRDTSRLMVLNKKTQTIEHKHFYDIIDYLKPGDILVRNNTKVIPARLFGTKEMTHAHVEVLLLKNLHDDVWECLCGNAKTIKHDTIISFGDGRLKAQCIEVKDEGIRVLEMIYEGIFYEVLDQLGIMPLPPYIKEKLNDPDRYNTVYAKIEGSAAAPTAGLHFTKELFSKCRDKGIEVLDVTLHVGLGTFRPVKTDNILEHHMHSEYYEIDEKTADRLNKAKDNNHRIIAIGTTSCRTLEANYSKYGCFKAVHENTDIFIYPGYTFKAIDCLITNFHLPKSTLIMLVSALSSRDYILKAYQQAVKEKYRFFSFGDAMFIDNGE

SEQ ID NO: 66169 - protein, 343 aa, Eikenella corrodens
  REGION 1..343: note = tr|A0A1A9RTP3|A0A1A9RTP3_EIKCO S-adenosylmethionine:tRNA ribosyltransferase-isomerase; OS = Eikenella corrodens OX=539 GN=queA PE=3 SV=1
MQLADFDFHLPEHLIAQQPPERRGSSRLLDARPGRPLCDRLFAELPNLLEAGDLLVFNNTKVMKARLFGHKASGGRIEALIERVLDEHCALAHIRSSKSPKPGSLLEFDGGIRAQMEEREGELFKLRFSGSLNVYQILEQTGRLPLPPYIERAADAADDERYQTIYAKHQGAVAAPTAGLHFTPELLNQLQANGIHRAEITLHVGAGTFQPVRSENIVEHKMHKEWYNIPTETVEAIAETKANGKRVWAVGTTSMRSLEAAAQNSHLQAGEGDTDIFITPGYRFQVADGLITNFHLPKSTLLMLVSAFSGVEHIRTAYRHAIEQQYRFFSYGDAMLLTRAEAT

SEQ ID NO: 66170 - protein, 343 aa, Eikenella corrodens
  REGION 1..343: note = tr|C0DTW1|C0DTW1_EIKCO S-adenosylmethionine:tRNA ribosyltransferase-isomerase OS=Eikenella corrodens ATCC 23834 OX=546274 GN=queA PE=3 SV=1
MQLADFDFHLPEHLIAQQPPEQRGSSRLLDARSGDLLCDRLFAELPNLLEAGDLLVFNNTKVMKARLFGHKASGGRIEALIERVLDEHCALAHIRSSKSPKPGSLLEFDGGIRAQMEEREGELFKLRFSGSLNVYQILEQTGRLPLPPYIERAADAADDERYQTIYAKHQGAVAAPTAGLHFTPELLNQLQANGIHRAEITLHVGAGTFQPVRSENIVEHKMHKEWYSIPTETVEAIAETKANGKRVWAVGTTSMRSLEAAAQNSHLQAGEGDTDIFITPGYRFQVADGLITNFHLPKSTLLMLVSAFSGVEHIRAAYRHAIEQQYRFFSYGDAMLLTRAEAT

SEQ ID NO: 66171 - protein, 343 aa, unidentified
  source 1..343: note = Eikenella exigua
  REGION 1..343: note = tr|A0A5B9BVE7|A0A5B9BVE7_9NEIS S-adenosylmethionine:tRNA ribosyltransferase-isomerase; OS = Eikenella exigua OX=2528037 GN=queA PE=3 SV=1
MQLTDFDFHLPEHLIAQQPPEQRGSSRLLDARPGRSLCDLLFAELPNLLEVGDLLVFNNTRVMKARLFGHKASGGRIEALIERVLDEHCALAHIRSSKSPKPGSLLEFDGSIQAQMEEREGELFKLRFSGSLNVYQILEQTGRLPLPPYIERAADAADDERYQTVYAKHQGAVAAPTAGLHFTPELLAGLQAKGIRRAEVTLHVGAGTFQPVRSKNIAEHKMHKEWYSIPAETVEAIAETKANGKRVWAVGTTSMRSLEAAAQSGHLQAGEGDTDIFITPGYRFQVADGLITNFHLPKSTLLMLVSAFSGVEHIRAAYRHAIEQQYRFFSYGDAMLLTRSEAS

SEQ ID NO: 66172 - protein, 343 aa, Eikenella sp.
  REGION 1..343: note = tr|A0A1A9S0H4|A0A1A9S0H4_9NEIS S-adenosylmethionine:tRNA ribosyltransferase-isomerase; OS = Eikenella sp. NML03-A-027 OX=1795828 GN=queA PE=3 SV=1
MQLADFDFHLPEHLIAQQPPEQRGSSRLLDARPGRSLCDRLFAELPNLLEVGDLLVFNNTKVMKARLFGHKASGGRIEALIERVLDKHCALAHIRSSKSPKPGSLLEFDGSIQAQMEEREGELFKLRFSGSLNVYQILEQTGRLPLPPYIERAADAADDERYQTVYAKHQGAIAAPTAGLHFTPELLAGLQANGIRRAEITLHVGAGTFQPVRSKNIAEHKMHKEWYSIPAETVETIAETKANGKRVWAVGTTSMRSLEAAAQSGHLQAGKGDTDIFITPGYRFQVADGLITNFHLPKSTLLMLVSAFSGVEHIRAAYRHAIEQQYRFFSYGDAMLLTRSEAS

SEQ ID NO: 66173 - protein, 343 aa, Eikenella sp.
  REGION 1..343: note = tr|A0A1F0F8G7|A0A1F0F8G7_9NEIS S-adenosylmethionine:tRNA ribosyltransferase-isomerase; OS = Eikenella sp. HMSC073A11 OX=1739535 GN=queA PE=3 SV=1
MQLADFDFHLPEHLIAQQPPERRGSSRLLDARPGRPLCDRLFAELPNLLEAGDLLVFNNTKVMKARLFGHKASGGRIEALIERVLDEHCALAHIRSSKSPKPGSLLEFDGGILAQMEEREGELFKLRFSGSLNVYQILEQTGRLPLPPYIERAADAADDERYQTIYAKHQGAVAAPTAGLHFTPELLNQLQANGIRRTEVTLHVGAGTFQPVRSENIAEHKMHKEWYSIPAETVEAIKETKANGKRVWAVGTTSMRSLEAAAQNSHLQAGEGDTDIFITPGYRFQVADGLITNFHLPKSTLLMLVSAFSGVEHIRTAYRHAIEQQYRFFSYGDAMLLTRAEAT

SEQ ID NO: 66174 - protein, 362 aa, unidentified
  source 1..362: note = Eilatimonas milleporae
  REGION 1..362: note = tr|A0A3M0CPJ0|A0A3M0CPJ0_9PROT S-adenosylmethionine:tRNA ribosyltransferase-isomerase; OS = Eilatimonas milleporae OX=911205 GN=queA PE=3 SV=1
MDVTLFDFDLPEDRIALRPARPRDSARMLVVRPDLDGDAALAHATARDLPDFLNPGDVLVFNDTRVIPARLHGRRGEAGVEVTLHQHVGGTSWKVFARPARKCRVGDRLVFGELAASVTAQGDGGERTLAFDVAEEDFAAALEQAGIMPLPPYIASKRAVDALDEEDYQTAFADRDGSVAAPTAGLHFTDGLLAALDARGVRRQGVTLHVGAGTFLPVKATDTRDHKMHSEWGEVSAEAAAWINAARAAGGRIVAVGTTSMRLLESAVDENGILHPFDGETDIFITPGFRFRAVDVLMTNFHLPKSTLFMLVSAFSGLDMMKRAYGAAVEKGYRFYSYGDASLLHRPTAGVTDGSEDGADKS

SEQ ID NO: 66175 - protein, 341 aa, unidentified
  source 1..341: note = Eisenbergiella massiliensis
  REGION 1..341: note = tr|A0A3E3IKG5|A0A3E3IKG5_9FIRM S-adenosylmethionine:tRNA ribosyltransferase-isomerase; OS = Eisenbergiella massiliensis OX=1720294 GN=queA PE=3 SV=1
MKTSDFYYELPPELIAQDPLEDRSSSRLMVLDKETGEVSHHVFKEIGSFLEPGDCLVLNNTKVIPARLMGVREETGGAIEVLLLKRRENDIWETLVKPGKKARPGTKLVFGDGLLHAEVLEVVEEGNRLIQFHYEGIWEEVLDRLGEMPLPPYITHKLQDKNRYQTVYARYEGSAAAPTAGLHFTQELLKELEEKGIDIAYVTLHVGLGTFRPVKVENLQEHHMHSEYYQVTREAADKINRAKAAGHRVVCVGTTSCRTVESACDENGFLQECCDNTEIFIYPGYRFKVLDALITNFHLPESTLVMLVSALAGREHVLAAYEEAVKEKYRFFSFGDAMLIK

SEQ ID NO: 66176 - protein, 341 aa, unidentified
  source 1..341: note = Eisenbergiella massiliensis
  REGION 1..341: note = tr|A0A3E3I0J3|A0A3E3I0J3_9FIRM S-adenosylmethionine:tRNA ribosyltransferase-isomerase; OS = Eisenbergiella massiliensis OX=1720294 GN=queA PE=3 SV=1
MKTSDFYYELPPELIAQDPLEDRSSSRLMVLDKETGEVSHHVFKEIGSFLEPGDCLVLNNTKVIPARLMGVREETGGAIEVLLLKRRENDIWETLVKPGKKARPGTKVVFGDGLLHAEVLEVVEEGNRLIQFHYEGIWEEVLDRLGEMPLPPYITHKLQDKNRYQTVYARYEGSAAAPTAGLHFTQELLKELEEKGIDIAYVTLHVGLGTFRPVKVENLQEHHMHSEYYQVTREAADKINRAKAAGHRVVCVGTTSCRTVESACDENGLLQECCDNTEIFIYPGYRFKVLDALITNFHLPESTLVMLVSALAGREHVLAAYEEAVKEKYRFFSFGDAMLIK

SEQ ID NO: 66177 - protein, 344 aa, unidentified
  source 1..344: note = Eisenbergiella sp.
  REGION 1..344: note = tr|A0A416HBH1|A0A416HBH1_9FIRM S-adenosylmethionine:tRNA ribosyltransferase-isomerase; OS = Eisenbergiella sp. OF01-20 OX=2292348 GN=queA PE=3 SV=1
MEELRTSDFYYELPPELIAQDPLEDRSSSRLMVLDKGTGQVSHHVFREIGDYLEPGDCLVLNNTKVIPARLMGIREETGGTVEVLLLKRRDNDIWETLVKPGKKARPGTKLVFGEGLLHAEVLDVVEEGNRLIRFQYQGIWEEVLDQLGEMPLPPYITHKLQDKNRYQTVYAKYEGSAAAPTAGLHFTRDLLKELEGKGVDTAYVTLHVGLGTFRPVKVENLKEHHMHSEYYQVTREAADKINKAKENGHRVICVGTTSCRTVESACDENGHMEECCDNTEIFIYPGYHFKVLDALITNFHLPESTLVMLVSALAGREQVLAAYEEAVKERYRFFSFGDAMLIQ

SEQ ID NO: 66178 - protein, 344 aa, unidentified
  source 1..344: note = Eisenbergiella tayi
  REGION 1..344: note = tr|A0A1E3AC87|A0A1E3AC87_9FIRM S-adenosylmethionine:tRNA ribosyltransferase-isomerase; OS = Eisenbergiella tayi OX=1432052 GN=queA PE=3 SV=1
MEELKTSDFYYDLPPELIAQDPLEDRSSSRLMVLDKETGEVSHHVFREIGNYLEPGDCLVLNNTKVIPARLMGIREETGGAVEVLLLKRRENDIWETLVKPGKKARPGTKLVFGGGLLHARVLEVVEEGNRLIQFQYQGIWEEVLDQLGEMPLPPYITHKLQDKNRYQTVYAKYEGSAAAPTAGLHFTTELLQELEQKGVDIAYVTLHVGLGTFRPVKVDNLKEHHMHSEYYQVTREAADKINKAKENGHRVVCVGTTSCRTVESACDENGHMEECCDNTEIFIYPGYRFKVLDALITNFHLPESTLVMLVSALAGREHVLAAYEEAVKEKYRFFSFGDAMLIK

SEQ ID NO: 66179 - protein, 344 aa, unidentified
  source 1..344: note = Eisenbergiella tayi
  REGION 1..344: note = tr|A0A1E3A0E2|A0A1E3A0E2_9FIRM S-adenosylmethionine:tRNA ribosyltransferase-isomerase; OS = Eisenbergiella tayi OX=1432052 GN=queA PE=3 SV=1
MEELKTSDFYYDLPPELIAQDPLEDRSSSRLMVLDKETGEVSHHVFREIGNYLEPGDCLVLNNTKVIPARLMGIREETGGAVEVLLLKRRENDIWETLVKPGKKARPGTKLVFGNGLLHARVLEVVEEGNRLIQFQYQGIWEEVLDQLGEMPLPPYITHKLQDKNRYQTVYAKYEGSAAAPTAGLHFTTELLQELEQKGVDIAYVTLHVGLGTFRPVKVDNLKEHHMHSEYYQVTREAADKINKAKENGHRVVCVGTTSCRTVESACDENGHMEECCDNTEIFIYPGYRFKVLDALITNFHLPESTLVMLVSALAGREHVLAAYEEAVKEKYRFFSFGDAMLIK

SEQ ID NO: 66180 - protein, 386 aa, Ekhidna lutea
  REGION 1..386: note = tr|A0A239K5B1|A0A239K5B1_9BACT S-adenosylmethionine:tRNA ribosyltransferase-isomerase; OS = Ekhidna lutea OX=447679 GN=queA PE=3 SV=1
MDLKLDDFLYELPDDRIAKHPPETRGGSRLLVYKQGEISHHEFMNIPSLLPDESLLVFNDTKVIPARIILHKESGARIEVFLLEPLTPSKVHEEVMNTKKECSWKCMIGNAKKWKIGTSLHLEDLSLNAIRTAHDEVTFHWNNSLTFSDLLTEIGKIPLPPYIDREVEEFDQERYQTVYSRMKGAVAAPTAGLHFTNEIIETITKKRIKTDYLTLHVSAGTFQPIKNANIAEHPMHNEQIWVSRENVENLLLAKKVISVGTTSMRTLESLYWYGVKLKSGDSEFFIDKKDAYNLKPIEREEALQYVLEEMKRRNVERIGGQTEIFIYPGYKFQICDGLVTNYHLPGSTLILLVASFIGNDWKHVYDSALNNNYRFLSYGDSSLLLP

SEQ ID NO: 66181 - protein, 350 aa, Ekhidna lutea
  REGION 1..350: note = tr|A0A239J3I5|A0A239J3I5_9BACT S-adenosylmethionine:tRNA ribosyltransferase-isomerase; OS = Ekhidna lutea OX=447679 GN=queA PE=3 SV=1
MGMKLSEFKFDLPSSLIALHPTDNRDDSRLMVVHKDTGEIEHKVFKDVVDYFGEDDVFVLNDTKVFPARLYGNKEKTGAKIEVFLLRELNTEMKLWDVLVDPARKIRVGNKLYFGDGELVAEVIDNTTSRGRTIRFLFDGDQEQFYKMIDALGETPLPKEIKRSAEPEDRDRFQTIYAKNIGAVAAPTAGLHFTPQLMKRLELIGIDIAPITLHVGLGTFRPVDVEDLTKHKMDSENYWVEKPTADRVNRALAEKSKICAVGTTAMKTLESSVSANGLLKDNSGWTDKFIFPPYEFKICDALITNFHLPESTLLMMASAFGGYDLIQEAYQTAIKEKYRFFSYGDAMLII

SEQ ID NO: 66182 - protein, 336 aa, Elioraea sp.
  REGION 1..336: note = tr|A0A541C5M5|A0A541C5M5_9PROT S-adenosylmethionine:tRNA ribosyltransferase-isomerase; OS = Elioraea sp. Yellowstone OX=2592070 GN=queA PE=3 SV=1
MFALTDYDYALPPERIAQEPARPRDAARLLVVARDRLEDRIVADLPAVLRPDDLLVVNDTRVIPAQLEGTAGGARVGVTLDRPLPDGTWEALARNARRLKPGSVIDFGAITAEVLARAGGTVRLGFSGDPTASATLALPPYIDRAQGPTPADAEDYQTTFARHPGAVAAPTAGLHLTPRLIEALAARGIRLAHVTLHVGAGTFLPIRVEDVRAHRLHAERATLPAETAAAIAATKRAGGRIVAVGTTSLRTLETAARATGEVRPFSGETDLYITPGFDFRAADLLLTNFHLPRTSLMVLVCAFAGRDRIMVAYAHALAAGYRFASYGDATLLERSA

SEQ ID NO: 66183 - protein, 349 aa, Elizabethkingia anophelis
  REGION 1..349: note = tr|A0A290MTF0|A0A290MTF0_9FLAO S-adenosylmethionine:tRNA ribosyltransferase-isomerase; OS = Elizabethkingia anophelis R26 OX=1246994 GN=queA PE=3; SV = 1
MKTSDFNFNLPDHLLAEHPSENRDEAKLMVLDRKTQTIEHKLFKDVIDYFNEDDLFIFNNTKVFPARLYGNKEKTGAKIEVFLLRELDREARVWDVLVDPARKIRIGNKLFFTEDESLVAEVIDNTTSRGRTLRFLFDGSYEEFRAKLTELGETPLPKYIKRDVEPEDAERYQTIYAEIEGAVAAPTAGLHFSKHLMKRMEIKGINFANVTLHVGLGTFNPIEVEDLSKHKMECEQAIITQDNADIINKAIEENRRVCAVGTTTMRAIETSVSTNRRLSAYEGWTNKFIYPPYDFGIANAMITNFHTPKSTLIMMIAAFAGRDFVMHAYEEAIKNDYKFYSYGDAMLIL

SEQ ID NO: 66184 - protein, 349 aa, Elizabethkingia anophelis; identical to SEQ ID NO: 66183
  REGION 1..349: note = tr|A0A077EI42|A0A077EI42_9FLAO S-adenosylmethionine:tRNA ribosyltransferase-isomerase; OS = Elizabethkingia anophelis NUHP1 OX=1338011 GN=queA PE=3; SV = 1

SEQ ID NO: 66185 - protein, 349 aa, unidentified; identical to SEQ ID NO: 64866
  source 1..349: note = Elizabethkingia bruuniana
  REGION 1..349: note = tr|A0A5E8CX93|A0A5E8CX93_9FLAO S-adenosylmethionine:tRNA ribosyltransferase-isomerase; OS = Elizabethkingia bruuniana OX=1756149 GN=queA PE=3 SV=1

SEQ ID NO: 66186 - protein, 349 aa, Elizabethkingia meningoseptica
  REGION 1..349: note = tr|A0A1V3TYE6|A0A1V3TYE6_ELIME S-adenosylmethionine:tRNA ribosyltransferase-isomerase; OS = Elizabethkingia meningoseptica OX=238 GN=queA PE=3 SV=1
MKTSDFNFNLPEHLLAEHPTENRDEAKLMVLDRKTQTIEHKLFKDVIDYFNEDDLFIFNNTKVFPARLYGNKEKTGAKIEVFLLRELDREARVWDVLVDPARKIRIGNKLFFTEDESLVAEVIDNTTSRGRTLRFLFDGSYEEFRAKLTELGETPLPKYIKRDVEPEDAERYQTIYAEIEGAVAAPTAGLHFSKHLMKRMEIKGINFANITLHVGLGTFNPIEVEDLSKHKMECEQAIITQDNADIINRAIEENRRVCAVGTTTMRAIETSVSTNRRLSAYEGWTNKFIYPPYDFGIANAMITNFHTPKSTLIMMIAAFAGRDFVMQAYEEAIKNEYKFYSYGDAMLIL

SEQ ID NO: 66187 - protein, 349 aa, Elizabethkingia meningoseptica; identical to SEQ ID NO: 66183
  REGION 1..349: note = tr|A0A376DTE8|A0A376DTE8_ELIME S-adenosylmethionine:tRNA ribosyltransferase-isomerase; OS = Elizabethkingia meningoseptica OX=238 GN=queA PE=3 SV=1

SEQ ID NO: 66188 - protein, 349 aa, Elizabethkingia miricola; identical to SEQ ID NO: 64866
  REGION 1..349: note = tr|A0A0A2H8V2|A0A0A2H8V2_ELIMR S-adenosylmethionine:tRNA ribosyltransferase-isomerase; OS = Elizabethkingia miricola OX=172045 GN=queA PE=3 SV=1

SEQ ID NO: 66189 - protein, 349 aa, unidentified
  source 1..349: note = Elizabethkingia occulta
  REGION 1..349: note = tr|A0A1T3MBU1|A0A1T3MBU1_9FLAO S-adenosylmethionine:tRNA ribosyltransferase-isomerase; OS = Elizabethkingia occulta OX=1867263 GN=queA PE=3 SV=1
MKTSDFNFNLPDHLLAEHPSENRDEAKLMVLDRKTQTIEHKLFKDVIDYFNEDDLFIFNNTKVFPARLYGNKEKTGAKIEVFLLRELDREARVWDVLVDPARKIRIGNKLFFTEDESLVAEVIDNTTSRGRTLRFLFDGSYEEFRAKLTELGETPLPKYIKRDVEPEDAERYQTIYAEIEGAVAAPTAGLHFSKHLMKRMEIKGINFANVTLHVGLGTFNPIEVEDLSKHKMECEQAIITQDNADTINKAIEENRRVCAVGTTTMRAIETSVSTNRRLSAYEGWTNKFIYPPYDFGIANAMITNFHTPKSTLIMMIAAFAGRDFVMHAYEEAIKNDYKFYSYGDAMLIL

SEQ ID NO: 66190 - protein, 349 aa, Elizabethkingia sp.; identical to SEQ ID NO: 64866
  REGION 1..349: note = tr|A0A2T5RML2|A0A2T5RML2_9FLAO S-adenosylmethionine:tRNA ribosyltransferase-isomerase; OS = Elizabethkingia sp. YR191 OX=2135666 GN=queA PE=3 SV=1

SEQ ID NO: 66191 - protein, 349 aa, Elizabethkingia sp.
  REGION 1..349: note = tr|A0A5B7UDX8|A0A5B7UDX8_9FLAO S-adenosylmethionine:tRNA ribosyltransferase-isomerase; OS = Elizabethkingia sp. JS20170427COW OX=2583851 GN=queA; PE = 3 SV=1
MKTSNFNFNLPDHLLAKYPAENRDEARLMVLNRKDQTIEHKLFKDVIDYFDEKDLFIFNNTKVFPARLYGNKEKTGAQIEVFLLRELDREARVWDVLVDPARKIRIGNKLFFTEDESLVAEVIDNTTSRGRTLRFLFDGSYEEFREKLNSLGETPLPKYIDRPVEPEDEERYQTIYAEVEGAVAAPTAGLHFSKHLLKRLEIKGIDFANITLHVGLGTFNPIEVEDISKHKMECEQVIINQENADIINAAIEEKRRICAVGTTTMRAIETSVSSNRRLSPFEGWTNKFIYPPYDFGIANAMITNFHTPKSTLLMMIAAFAGKDFILEAYHEAIKEEYRFYSYGDAMLIL

SEQ ID NO: 66192 - protein, 349 aa, unidentified
  source 1..349: note = Elizabethkingia ursingii
  REGION 1..349: note = tr|A0A1T3FR09|A0A1T3FR09_9FLAO S-adenosylmethionine:tRNA ribosyltransferase-isomerase; OS = Elizabethkingia ursingii OX=1756150 GN=queA PE=3 SV=1
MKTSDFNFNLPDHLLAEHPSENRDEAKLMVLDRKTQTIEHKLFKDVIDYFNEDDLFIFNNTKVFPARLYGNKEKTGAKIEVFLLRELDREARVWDVLVDPARKIRIGNKLFFTEDESLVAEVIDNTTSRGRTLRFLFDGSYEEFRAKLTELGETPLPKYIKRDVEPEDAERYQTIYAEIEGAVAAPTAGLHFSKHLMKRMEIKGINFANVTLHVGLGTFNPIEVEDLSKHKMECEQAIITQDNADIINKAIEENRRVCAVGTTTMRAIETSVSTNRRLSAYEGWTNKFIYPPYDFGIANAMITNFHTPKSTLIMMIAAFAGRDFIMQAYEEAIKNDYKFYSYGDAMLIL

SEQ ID NO: 66193 - protein, 353 aa, unidentified
  source 1..353: note = Elstera cyanobacteriorum
  REGION 1..353: note = tr|A0A255XRB6|A0A255XRB6_9PROT S-adenosylmethionine:tRNA ribosyltransferase-isomerase; OS = Elstera cyanobacteriorum OX=2022747 GN=queA PE=3 SV=1
MNVADFDFDLPDSLIAERPMEPREAARLLCVGDRLTDKTIGDLPSLLGPGDLIVFNDTKVIPARLHGRRERVEGGAVVAVELLLHQRHSSAEWTAFAKPGKRLRIGDTIRFGDLLRAELLEKRDSGEVLIRFDRKDAELTAALEAIGEMPLPPYIRRAQDARDRQDYQTIFAAKEGAVAAPTAGLHITPGLLQALRERGVATETVTLHVGAGTFQPVKAERVEDHKMHSEWAELSPEGAARLNAHRAAGGRIIACGTTSLRTLESAVAPDRRFSALSGGTEIFLYPGKPIYSADRLLTNFHLPRSTLFMLVSAFSGPNRMRAAYQHAIRQNYRFFSYGDACLLERRDDDTAAL

SEQ ID NO: 66194 - protein, 346 aa, unidentified
  source 1..346: note = Elstera litoralis
  REGION 1..346: note = tr|A0A0F3IW73|A0A0F3IW73_9PROT S-adenosylmethionine:tRNA ribosyltransferase-isomerase; OS = Elstera litoralis OX=552518 GN=queA PE=3 SV=1
MNVADFDFDLPGHLIAERPMEPREGARLLCVGEALEDRIIGDLPTLFGPGDVIVFNDTRVIPARLHGVRARQEGGVTVPVELLLHQRQGDGSWTAFAKPGKRLKIGDTILIGEVLRATLLEKRDSGEVLVQFDRAGADLTAALEQVGEMPLPPYIRRAQDAQDRHDYQTIFATKDGAVAAPTAGLHITPRLLEALKARGVLTETVTLHVGAGTFQPVKVDRIEDHKMHSEWAELSPETAARLNAHRASGGRIIACGTTSLRTLESAVAPDRSFSALAGSTEIFLYPGKPVYSVDRLLTNFHLPRSTLFMLVSAFAGQARMRAAYDHAIASGYRFFSYGDACLLERA

SEQ ID NO: 66195 - protein, 347 aa, unidentified
  source 1..347: note = Elusimicrobia bacterium
  REGION 1..347: note = tr|A0A2M7S001|A0A2M7S001_9BACT S-adenosylmethionine:tRNA ribosyltransferase-isomerase; OS = Elusimicrobia bacterium CG_4_10_14_0_8_um_filter_37_32; OX = 2014301 GN=queA PE =3 SV=1
MGILRVADDLQLEGYDYALPEKFIAQHPADKRDQSKLLVFDRRENVVEHRVFSDIMDYLSPGDCVVINKTKVLPARLYCRKNTGGKIELFLLKKISENSWTALCRENVSGKELILPDGNSKVKVVDKNKYGEYILEFMGEIDIYELMNKYGHSPLPPYIKRHYPGKEERYQTVYAESEGAVAAPTAGLHFTLELMKKIKAKGIEIEYIVLHIGWATFKPVSAENINEHKMLPEYFEITKETADKINSCRQKDGRIIAVGTSTVRALESQADVNGNLIPGKGETELYIYPGYKFKVIDAMLTNFHLPKSTNLILVSAFAGKEKLLSLYKSAMENNYRFYSYGDAMLVL

SEQ ID NO: 66196 - protein, 291 aa, unidentified
  source 1..291: note = Elusimicrobia bacterium
  REGION 1..291: note = tr|A0A353CPR4|A0A353CPR4_9BACT S-adenosylmethionine:tRNA ribosyltransferase-isomerase; OS = Elusimicrobia bacterium OX=2030800 GN=DDW67_01210 PE=3; SV = 1
MLNRSAVRKARLPARKLTGGKAELLLVAPVDESLTRWKALGRKLSPGTPLELPDGSGAEIEGLADDASLLVRFSVPLTSAWLDLHGEAPLPGYIIKSRRRRGLPEERADDKSLYQTVYAAEEGSIAAPTAGFHFTPALLDTVSGSGVDIAYITLHVGWGTFRPVRVPHPADHVMLPESCEVSREAAEKVNSCLARGGRVIPVGTSSMRTLETLSGEDGRLSPGKADATLFIYPGHRFRTAAGFITNLHVPGSAPLYMTAAFAGEEKLYSAYAEAVKEKYRFYSYGDAMLII

SEQ ID NO: 66197 - protein, 341 aa, Elusimicrobium minutum
  REGION 1..341: note = tr|B2KCE2|B2KCE2_ELUMP S-adenosylmethionine:tRNA ribosyltransferase-isomerase OS=Elusimicrobium minutum (strain Pei191) OX=445932 GN=queA PE=3 SV=1
MFERFHNLKINIARTPATPRDSAKLMVLNRDGQKIEHRIFRDISQYFTPGDCLVINDTKVFPAKLFAKKPTGGKVEVLLVRPLEKPNEWTALMRDYKEGIELSFSEDLKAVMDFRNENGEVILKFNNDDVLGYACENGLMPLPQYIEKARKHDGLSASIETDKERYQTVYAQFQGSIAAPTAGFHFTPELLKKIEDKGVKIARVTLHIGWGTFKPLKTDPKEHKMLAEYGTVSEEASKKINEARASGGRIFSVGTTSTRTLESFTENGITKSGGRWTDLFIYPGYKFKAIDCLITNFHFPDSTPLCMASAFASEDFIFKAYNEAVENNYRFYSFGDSMLIL

SEQ ID NO: 66198 - protein, 345 aa, Elusimicrobium sp.
  REGION 1..345: note = tr|A0A1Y4DBV0|A0A1Y4DBV0_9BACT S-adenosylmethionine:tRNA ribosyltransferase-isomerase; OS = Elusimicrobium sp. An273 OX=1965617 GN=queA PE=3 SV=1
MAFERFKKLNLDPLIAKQPATPRDSARQMVLHRDTHTIEHRIFRDIHEYFNPGDALVINNTKVFPAKLFAHKPTGGKVEVLLVRPMQKPNVWAVLTRDYKEGITLDFGDGLRAKATGKTENNEAVLEFNQEDILPFCNTHGLMPLPQYIEKARKHDGMTPSIATDKDRYQTVYAKYTGSIAAPTAGFHFTPELLQKLKDKGVHICYITLHVGWGTFKPLRGEPEQHHMLAELGEVSPETADTLNAVRANGKRVFSCGTTSTRTLETFTDENHITHPGKKWTDLFIYPGYKFKGIDCLITNFHFPDSTPLCMTSAFAGEDFIYEAYLQAVEKKYRFYSFGDSMMIL

SEQ ID NO: 66199 - protein, 346 aa, unidentified
  source 1..346: note = Emcibacter congregatus
  REGION 1..346: note = tr|A0A2G4YN76|A0A2G4YN76_9PROT S-adenosylmethionine:tRNA ribosyltransferase-isomerase; OS = Emcibacter congregatus OX=2043170 GN=queA PE=3 SV=1
MKVDLFDFELPRESIALRPVATRDGARFLVVKGNERSDKAVTDLPDYLQAGDVLVFNDTRVIPARLTGKRGLAKIQITLHMNEGEGLWRAFAKPAKKLKTDDVILFEGGLEATVLEKGDAGEVSLQFNYAGDALREALDRAGVMPLPPYIASQRPVDDQDLVDYQTVYSRKDGAVAAPTAGLHFTDRLIEEIASLGVKIVHVTLHVGAGTFLPVKVEDTEDHKMHSEWGEIDAETAEIINAAHLAGRNVVAVGTTSLRLLESAADESGIVHPFAAATDIFITPGYQFRAVDMLMTNFHLPKSTLFMLVSAFAGYAPMKAAYAHAIASGYRFYSYGDSSLLFREDKL

SEQ ID NO: 66200 - protein, 349 aa, unidentified
  source 1..349: note = Emcibacter nanhaiensis
  REGION 1..349: note = tr|A0A501PRF8|A0A501PRF8_9PROT S-adenosylmethionine:tRNA ribosyltransferase-isomerase; OS = Emcibacter nanhaiensis OX=1505037 GN=queA PE=3 SV=1
MKVDLFDFELPRELIALRPAADRAGARFLVVKGNELEDRQVSDIVDYLRPGDVMVFNDTRVIPARLTGKRRDAKIELTLHMNAGEGCWKAFAKPAKKLKPGDVINFQDKLAAEVLEKGEAGEVTLQFDRQGTALREALDEVGVMPLPPYIASQRPVDEQDLSDYQTVYSEKDGAVAAPTAGLHFTDELLAKIDDAGVERLTVTLHVGAGTFLPVKAEDTEEHKMHAEWGEITPEVADKINAAHARGNRVIAVGTTSLRLLESATDEQGVTRPFSADTDIFITPGYRFRCVDVLMTNFHLPKSTLFMLVSAFAGFDNMKAAYAHAIDEGYRFYSYGDSSLLCREDQICRK

SEQ ID NO: 66201 - protein, 347 aa, unidentified
  source 1..347: note = Emergencia timonensis
  REGION 1..347: note = tr|A0A415E412|A0A415E412_9FIRM S-adenosylmethionine:tRNA ribosyltransferase-isomerase; OS = Emergencia timonensis OX=1776384 GN=queA PE=3 SV=1
MKIDEFDYELPKELIAQKPSERRDVCRMMVLDRQDGTIEHKHFYDVIDYLNPGDCLVLNNSKVLPARLFGEKEGTGAKVEFLLIKRMEGDRWETMVKPGKRLKPGDSVAFSDNFRVEILDYGPDGTRIAEFHYDGIFMERLEELGKMPLPPYIERESTLEDKDMYQTVYCKEEGSVAAPTAGLHFTEELLQKAKDKGVRLAYVTLHVGIGTFRPVKCENVEDHHMHFEEYFVDEETAKTINETILAGGRIISVGTTSTRTLESAAYHDEASGKNLIRAGEGSTGIFIYPGYTFKVVDALITNFHLPKSTLLMLISALYDREKILEAYQAAVDEKYRFFSYGDAMLIQ

SEQ ID NO: 66202 - protein, 351 aa, Empedobacter brevis
  REGION 1..351: note = tr|A0A511NL77|A0A511NL77_9FLAO S-adenosylmethionine:tRNA ribosyltransferase-isomerase; OS = Empedobacter brevis NBRC 14943 = ATCC 43319 OX=1218108; GN = queA PE=3 SV=1
MKMKTSDFDFTLPEELLADRPSENRDEARLMVVHRDTGEIEHRQFKDLIDYFDEGDVMIRNNTKVFPARLMGNKEKTGAQIEVFLLRELDAETRLWDVLVDPARKIRIGNKLFFDNDDTLVAEVVDNTTSRGRTLRFLFDGSYEEFRAKLKELGETPLPKYILRDVEPEDAERYQTIYAKHEGAVAAPTAGLHFSKHLLKRLEIKGVDFAELTLHIGLGTFQAVEVEDLSKHKMESEQVIIPQATADLVNRAIDEKKKVCAIGTTSMRSIESSVSADGHLNAFDGWTNKFIHPPYDFSIANCMITNFHTPKSTLIMMISAFAGHDLTMKAYNEAVKEGYKFYSYGDAMLIL

SEQ ID NO: 66203 - protein, 351 aa, Empedobacter brevis; identical to SEQ ID NO: 63058
  REGION 1..351: note = tr|A0A3P6MFN0|A0A3P6MFN0_9FLAO S-adenosylmethionine:tRNA ribosyltransferase-isomerase; OS = Empedobacter brevis OX=247 GN=queA PE=3 SV=1

SEQ ID NO: 66204 - protein, 349 aa, unidentified
  source 1..349: note = Empedobacter falsenii
  REGION 1..349: note = tr|A0A3R8TNX0|A0A3R8TNX0_9FLAO S-adenosylmethionine:tRNA ribosyltransferase-isomerase; OS = Empedobacter falsenii OX=343874 GN=queA PE=3 SV=1
MKTSDFDFTLPEELLADRPSENRDEARLMVVHRDTGEIEHRQFKDLIEYFDEGDVMIRNNTKVFPARLMGNKEKTGAQIEVFLLRELDAETRLWDVLVDPARKIRIGNKLFFDNDDTLVAEVVDNTTSRGRTLRFLFDGSYEEFRAKLKELGETPLPKYILRDVEPEDAERYQTIYAKHEGAVAAPTAGLHFSKHLLKRLEIKGVDFAELTLHIGLGTFQAVEVEDLSKHKMESEQVIIPQESADLVNRAIDEKKKVCAIGTTSMRSIESSVSADGHLNAFDGWTNKFIHPPYDFSIANCMITNFHTPKSTLIMMISAFAGHDLTMKAYNEAVKEGYKFYSYGDAMLIL

SEQ ID NO: 66205 - protein, 351 aa, unidentified
  source 1..351: note = Empedobacter falsenii
  REGION 1..351: note = tr|A0A376G5Y2|A0A376G5Y2_9FLAO S-adenosylmethionine:tRNA ribosyltransferase-isomerase; OS = Empedobacter falsenii OX=343874 GN=queA PE=3 SV=1
MKMKTSDFDFTLPEELLADRPSENRDEARLMVVHRDTGEIEHRQFKDLIEYFDEGDVMIRNNTKVFPARLMGNKEKTGAQIEVFLLRELDAETRLWDVLVDPARKIRIGNKLFFDNDDTLVAEVVDNTTSRGRTLRFLFDGSYEEFRAKLKELGETPLPKYILRDVEPEDAERYQTIYAKHEGAVAAPTAGLHFSKHLLKRLEIKGVDFAELTLHIGLGTFQAVEVEDLSKHKMESEQVIIPQESADLVNRAIDEKKKVCAIGTTSMRSIESSVSADGHLNAFDGWTNKFIHPPYDFSIANCMITNFHTPKSTLIMMISAFAGHDLTMKAYNEAVKEGYKFYSYGDAMLIL

SEQ ID NO: 66206 - protein, 341 aa, unidentified
  source 1..341: note = Empedobacter haloabium
  REGION 1..341: note = tr|A0A5C7BF54|A0A5C7BF54_9FLAO S-adenosylmethionine:tRNA ribosyltransferase-isomerase; OS = Empedobacter haloabium OX=592317 GN=queA PE=3 SV=1
MYSLSDFDFNLPPERIAQFPLPDRSASRLLHVDGPRLADRQFTDILALLQPGDLLVMNDTRVLKARFFGVKDSGGKVEVLVERVLDTRTVLAQVRASKSPGPGVRIRLAEAFDVTVGERAGEFYTLKFEADVFDLIEQYGRLPLPPYIEHAPGEVDETRYQTVFNKVPGAVAAPTAGLHFDEALLQKLRDKGVNFAYVTLHVGAGTFQPVRTENLAEHKMHTEWYTMPQETVDAVRATRAAGRDVIAVGTTSLRALESASQTGELVAGSADTALFITPGYLFKTVTRLITNFHLPKSTLLMLVSAFAGYDEIRAAYAHAIAHEYRFFSYGDAMLLTTPNRA

SEQ ID NO: 66207 - protein, 349 aa, Empedobacter sp.
  REGION 1..349: note = tr|A0A4Z1BI15|A0A4Z1BI15_9FLAO S-adenosylmethionine:tRNA ribosyltransferase-isomerase; OS = Empedobacter sp. MRS2 OX=2491114 GN=queA PE=3 SV=1
MKTSDFDFTLPEELLADRPSENRDEARLMVVHRDTGEIEHRQFKDLIEYFDEGDVMIRNNTKVFPARLMGNKEKTGAQIEVFLLRELDAETRLWDVLVDPARKIRIGNKLFFDNDDTLVAEVVDNTTSRGRTLRFLFDGSYEEFRAKLKELGETPLPKYILRDVEPEDAERYQTIYAKHEGAVAAPTAGLHFSKHLLKRLEIKGVDFAELTLHIGLGTFQAVEVEDLSKHKMESEQVIIPQATADLVNRAIDDKKKVCAIGTTSMRSIESSVSADGHLNAYDGWTNKFIHPPYDFSIANCMITNFHTPKSTLIMMISAFAGHDLTMKAYNEAVKEGYKFYSYGDAMLIL

SEQ ID NO: 66208 - protein, 397 aa, Emticicia sp.
  REGION 1..397: note = tr|A0A2N4X8Q9|A0A2N4X8Q9_9BACT S-adenosylmethionine:tRNA ribosyltransferase-isomerase; OS = Emticicia sp. TH156 OX=2067454 GN=queA PE=3 SV=1
MITLDLDKYTYHLPDERIARFPVEPRDVSKLLVYKDSLINEDRFYNLAGHLPKESFLVFNNTKVIPARLYFQKESGALIEIFLLNPVAPSTVISQIMETRDTCTWACMIGNKKRLKGRLVGKYSVHTTDDLELVAELVDNEKNYVQFTWNNPELTFAEIVRFFGQIPLPPYLKRDTEEKDYDTYQTVYSKNDGAVAAPTAGLHFTEKVLFDLVTNDIEYDFITLHVGAGTFQPIKVQNVVEHQMHSEQIVFEKDFIKKLLANRAFVIPVGTTSMRSLESLYWFGVKLLEGDETFFIEKLFPYQWQNEVGIEASLQAVLNYMDLKNIEQLIGETEIFIFPGYQFRICKGIITNFHQPDSTLILLVAALVGDNWRTIYDFALENNFRFLSYGDSSLLIP

SEQ ID NO: 66209 - protein, 350 aa, Emticicia sp.
  REGION 1..350: note = tr|A0A2N4XBM7|A0A2N4XBM7_9BACT S-adenosylmethionine:tRNA ribosyltransferase-isomerase; OS = Emticicia sp. TH156 OX=2067454 GN=queA PE=3 SV=1
MKLSEFKFDLPHSLVAMYPPEQRDGARMMVVNRKTKKIEHKMFKDIVDYFGEKDTLVVNDTKVFPARLYGSKEKTGAKIEVFLLRELNREMRLWDVLVDPARKIRVGNKLYFGDSDLVAEVIDNTTSRGRTIRFLFDGSHEEMMKTIHELGETPLPIDIIKRKVTDQDRERYQTIFADKEGAVAAPTAGMHFTRNVQRRMEINGVNFCPVTLHIGIGTFRQVDVEDLTKHKTDSENFFIPDNTCQIVNDSIDKEGKICAIGTTVLKALESSVSASNHLKPVDNGWTDKFIFPPYDFKITNSLLTNFHLPESILIMMACAFGGYELIMQAYHEAIKEKYKFFTYGDVMLIL

SEQ ID NO: 66210 - protein, 352 aa, unidentified
  source 1..352: note = Endomicrobium proavitum
  REGION 1..352: note = tr|A0A0G3WJ72|A0A0G3WJ72_9BACT S-adenosylmethionine:tRNA ribosyltransferase-isomerase; OS = Endomicrobium proavitum OX=1408281 GN=queA PE=3 SV=1
MTQDKLLTNYDYDIPSELIAQKPADRRDSSRLFVVDRKSGKFRHRHFSDITAYFSEGDCLVINTTKVVPSRLFGKKATGGKVELLFLDPVAHSKENSYKVLMKPFLETGKKVFFDNGYECEIKHKTPRGEVVVEFNKADILSFLQKQGVMPLPPYINRKEGLALQLSNFDKERYQTVYAAQQGAIAAPTAGLHFTQEILNALKDKGVKIATLTLHVGWGTFKPIVSDEIDNHKMMSEKFSIDSQNAQKINAAKKENKKIFSVGTTSTRALETLANIFNGEIKEYSGETSIFIYPGYKFKIPDVLITNLHLPKSTPLMMASAFASRELMLKAYKEAVKEKYRFFSYGDSMIIL

SEQ ID NO: 66211 - protein, 340 aa, unidentified
  source 1..340: note = Bathymodiolus septemdierum
  REGION 1..340: note = tr|A0A0P0UTJ9|A0A0P0UTJ9_9GAMM S-adenosylmethionine:tRNA ribosyltransferase-isomerase; OS = endosymbiont of Bathymodiolus septemdierum str. Myojin knoll OX=1303921 GN=q ueA PE=3 SV=1
MKLSDFDFDLPKALIAQSPPENRTSSRLLIPQLNIIDTIFSNIGDFIKEGDLLVLNNTKVIPARLFGHKESGGKVEIMIERLLSDCQALAMIKASRAPKVGSHIILENQVQATILQKGEGFYTLEFATDSLLNLLDKVGHIPLPPYIERADNAQDLSRYQTVFAQKEGAVAAPTAGLHFDDALLTSLKNQGVNSAFVTLHVGAGTFQPVKTNEIEDHHMHSEYYELPQQTVDKITKAKANGGRIIAVGTTAVRSLESAARHGALKQRQEETDIFIYPGYQFQVVDAMITNFHLPKSSLLMLVSAFIGRERMMEIYQHAIKGKYRFFSYGDAMLLERNNDL

SEQ ID NO: 66212 - protein, 347 aa, Ridgeia piscesae
  REGION 1..347: note = tr|A0A0T5YZN5|A0A0T5YZN5_9GAMM S-adenosylmethionine:tRNA ribosyltransferase-isomerase; OS = endosymbiont of Ridgeia piscesae OX=54398 GN=queA PE=3; SV = 1
MRLSDFRYELPDELIAQFPQPSRTASRLLCLDGSSGRVVDRQFTQLPDLLQAGDLLVFNDTRVMRARLYGRKTSGGRVELLIERVLAPQRVLAHVRASKSPKPGSRLLLGEADTEVEVVAREGALFELSLADGDFYQLMERQGHIPLPPYITRSDQVLDQERYQTVYARSEGAVAAPTAGLHFDLPLLDRLAASGIGMAQVTLHVGAGTFQPVRVENLDEHEMHSEYLEVDEVVCEKIRETRARGGRVVAVGTTTVRSLETASADGNIRPYRGDTRLFIRPGYRFSSVDAMVTNFHLPESTLLMLVSAFSGYDAVMATYRHAVEQRYRFFSYGDAMFLTPSSSAKYE

SEQ ID NO: 66213 - protein, 341 aa, unidentified
  source 1..341: note = Trimyema compressum
  REGION 1..341: note = tr|A0A191HVR4|A0A191HVR4_9FIRM S-adenosylmethionine:tRNA ribosyltransferase-isomerase; OS = endosymbiont 'TC1' of Trimyema compressum OX=243899; GN = queA PE=3 SV=1
MKVQLFDYYLPESLIAQKPMTPRDSSRLLVVHSKEKKWEHQHFYNLIDYLQAGDVLVLNHTKVIPARLFGKKETGAIIEVLLLKKKEIDIWEVLVKPGKKVKIGDRIFFGENQELRTTCIDITEEGSRIIQFYYEGVFEVILDFLGEMPLPPYITETLKDSSRYQTVYSKDGVSVAAPTAGLHFTEELLVKIKEKGIMVTSLLLNVGLGTFRPVKEENLEDHPMHEEYYELSEESANIINKAKNMNQRVIAVGTTSVRVLETIFLKYGKAVSDKGWTNIFIYPGYQYKCIDGLITNFHLPKSTLLMLVSALIGREFTLATYEEAVKQGYRFFSFGDAMFIE

SEQ ID NO: 66214 - protein, 350 aa, unidentified
  source 1..350: note = Endozoicomonadaceae bacterium
  REGION 1..350: note = tr|A0A3S3Q7Q5|A0A3S3Q7Q5_9GAMM S-adenosylmethionine:tRNA ribosyltransferase-isomerase; OS = Endozoicomonadaceae bacterium GTF-13 OX=2506149 GN=queA; PE = 3 SV=1
MQVSDFRFDLPDELIARYPKPDRSSSRLLCVDGQSGALEHRVFSDLEQLLEPGDLLVMNNTRVIPARLFGQKASGGKIEVLVERVLDAHEVLAHVRSSKSPKPGTRLLLEGGIEATMVERQESLFRLRFEGESPVLELLERHGHMPLPPYIERDDQLSDRERYQTVYARHQGAVAAPTAGLHFDEALLQRLADKGIETAFVTLHVGAGTFQPVRVERIEDHQMHSEYLELELAVCDAVNACRARGGRVVAVGTTSVRCLESASQAGEIRPYRGETDIFIYPGYRFRSVDLLVTNFHLPESTLLMLVSAFSGYETMMNAYRVAVEQKYRFFSYGDAMLLSPASPRSMQESM

SEQ ID NO: 66215 - protein, 342 aa, Endozoicomonas elysicola
  REGION 1..342: note = tr|A0A081KBJ7|A0A081KBJ7_9GAMM S-adenosylmethionine:tRNA ribosyltransferase-isomerase; OS = Endozoicomonas elysicola OX=305900 GN=queA PE=3 SV=1
MQVSDFDFDLPDEQIARFPAEDRTGSRLLCLDGNSGEIEHQQFSDIEGLLEPGDLLVLNNTRVIPARMYGQKETGGKIEVLIERVVEDNLALAQVRASKSPKPGSVLLLADGAVRVVVEGRQDFLFILRFETSVLPLLLEHGHMPLPPYIDREDGDSDRLRYQTVFAARDGAVAAPTAGLHFDEALLARLEAKGVRKAFVTLHVGSGTYQPVRVDRIEDHVMHAEYIEVSEEVCQAVRETRARGNRVVAVGTTSVRSLESASASGEIAPFQGDSKIFIYPGYEFRSVDLMVTNFHLPQSTLLMLVSAFAGREQVLDAYKEAVEKKYRFFSYGDAMLLARKTD

SEQ ID NO: 66216 - protein, 342 aa, Endozoicomonas montiporae
  REGION 1..342: note = tr|A0A081NBA5|A0A081NBA5_9GAMM S-adenosylmethionine:tRNA ribosyltransferase-isomerase; OS = Endozoicomonas montiporae OX=1027273 GN=queA PE=3 SV=1
MRVSDFDFDLPDEQIARFPAKERTGSRLLCLEGDSGEIAHRQFADIESFLNPGDLLVMNNTRVIPARLFGRKETGGKLEVLIERVLEEKKVLAHVRSSKSPKPGSRIYLADDQIMAEVTGRQGTLFLIDFDKPVLPQLQEYGHMPLPPYIDREDGSADRLRYQTVFAEKDGAVAAPTAGLHFDEAMLERLEKKGVNKAFVTLHVGSGTFQPVRVDNIADHEMHSEYIEVPEAVCQAVRETRARGNKVVAVGTTSVRSLESASTSGEIQPFTGDTDIFIYPGYQFRSVDAMITNFHLPQSTLLMLVSAFSGQEAILDAYNEAVKEGYRFFSYGDAMWLTRKSG

SEQ ID NO: 66217 - protein, 342 aa, Endozoicomonas montiporae; identical to SEQ ID NO: 66216
  REGION 1..342: note = tr|A0A142BB82|A0A142BB82_9GAMM S-adenosylmethionine:tRNA ribosyltransferase-isomerase; OS = Endozoicomonas montiporae CL-33 OX=570277 GN=queA PE=3; SV = 1

SEQ ID NO: 66218 - protein, 341 aa, unidentified
  source 1..341: note = Endozoicomonas numazuensis
  REGION 1..341: note = tr|A0A081N0Z2|A0A081N0Z2_9GAMM S-adenosylmethionine:tRNA ribosyltransferase-isomerase; OS = Endozoicomonas numazuensis OX=1137799 GN=queA PE=3 SV=1
MRVSDFDFELPDEQIARFPAQERTGSRLLRLDGPTETITHGQFADVESLLEPGDLLVMNNTRVIPARLFGRKETGGKLEVLIERVLEERKVLAHVRSSKAPKPGSRIFLADDCIEAEVTGRQGALFLIDFDEPVLPQLQEHGHMPLPPYIDREDGSADRLRYQTVFAEKDGAVAAPTAGLHFDEAMLQRLKEKGIEQAFVTLHVGSGTFQPVRVDNIADHEMHSEYIEVPEAVCAAVKAARARGNKVVAVGTTSVRSLESASRDGEIKPFFGDTDIFIFPGYEFRSVDAMITNFHLPQSTLLMLVSAFSGKDAILRAYNEAVKEGYRFFSYGDAMWLTRKS

SEQ ID NO: 66219 - protein, 341 aa, Endozoicomonas sp.
  REGION 1..341: note = tr|A0A1D2XA63|A0A1D2XA63_9GAMM S-adenosylmethionine:tRNA ribosyltransferase-isomerase; OS = Endozoicomonas sp. (ex Bugula neritina AB1) OX=1868284; GN = queA PE=3 SV=1
MQVTDFDFDLPDEQIARFPAEQRTASRMLCLDGKAGTIEHRQFVDIEHLLQPGDLLVLNNTRVIPARMYGRKETGGKIELLVERVIEDNLVLAQIRSSKSPKPGSTIYLADDAVKASIEGRQDFLFIVRFESSVLPVLQEHGHMPLPPYIDREDGQSDRLRYQTVFAEKEGAVAAPTAGLHFDEALLQRLEDKGIKKAFVTLHVGSGTYQPVRVDDIKDHVMHAEYIEVPEETCQAVRETRARGGRVIAVGTTSVRSLESASASGEIQPFQGDSNIFIYPGYEFRSVDAMVTNFHLPQSTLLMLVSAFAGKDEVLQAYDEAVQQKYRFFSYGDAMLLTRKD

SEQ ID NO: 66220 - protein, 350 aa, Endozoicomonas sp.; identical to SEQ ID NO: 66214
  REGION 1..350: note = tr|A0A3P3VRP6|A0A3P3VRP6_9GAMM S-adenosylmethionine:tRNA ribosyltransferase-isomerase; OS = Endozoicomonas sp. GTF13 OX=2528527 GN=queA PE=3 SV=1

SEQ ID NO: 66221 - protein, 348 aa, Enhydrobacter aerosaccus
  REGION 1..348: note = tr|A0A1T4S8E3|A0A1T4S8E3_9PROT S-adenosylmethionine:tRNA ribosyltransferase-isomerase; OS = Enhydrobacter aerosaccus OX=225324 GN=queA PE=3 SV=1
MRVDLFDFELPDDLIAQRPVSPRDSARLLDVAPDGLHDCTVRELPALLRRGDLLVFNDTKVIPARLKGVRPGGAGRQDVAVEALLIRDLGSAHWLCFGRPVKRLKRGDVIAFAGGIGAKVETLNADGSIVLVFDRSGHDFLTALESSGAVPLPPYIRGGVADAHDRTDYQTLFARVDGSVAAPTAGLHFTPALMAALAEAGIGATNVTLHVGAGTFQPVRVEDTDQHKMHAEWGEVPESTAQAIGRTRQAGGRVVSIGTTALRLLETVARDQEGAIRAWSGETDIFITPGFRFRAVDLLLTNFHLPRSTLFMLVAAFAGLERIKAAYAHAIAHRYRFYSYGDCCLLHR

SEQ ID NO: 66222 - protein, 348 aa, Enhydrobacter sp.
  REGION 1..348: note = tr|A0A5C8PGD8|A0A5C8PGD8_9PROT S-adenosylmethionine:tRNA ribosyltransferase-isomerase; OS = Enhydrobacter sp. CC-CFT640 OX=2586908 GN=queA PE=3 SV=1
MRVDAFDFELPPRLIAQRPAVPRDSARLLHLPRDGAPAEHVVRDLPGLLRSGDLLVFNDTRVIPARVYGRRDTGGRHEVLLLPPASPGAWTGMARGTAKLRAGTRLTFDGGLSATVTGFRDDGTITLDFGVADETVRETLHAHGHMPLPPYIRGGRDDARDREDYQTVMARRDGAVAAPTAALHFTEALLADLRAAGIMTATVTLHVGIGTFQPVRVDDTDQHVMHTEQGEIDAAAAASIDACRARGGRVVAVGTTSLRVLEAVALRHAGNLVPWQGGIDLFITPGFRFRAVDLLLTNFHLPRSTLFMLVSAFAGLDRMQALYAQAIARDFRFYSYGDACLLQRQEAA

SEQ ID NO: 66223 - protein, 357 aa, Enhydrobacter sp.
  REGION 1..357: note = tr|A0A1V2GP80|A0A1V2GP80_9PROT S-adenosylmethionine:tRNA ribosyltransferase-isomerase; OS = Enhydrobacter sp. H5 OX=1907940 GN=queA PE=3 SV=1
MPLTLDDFDYQLPDELIARYPLAVRSASRLLYLPAHGQPKDQQFVDLPELLNSGDLVVFNDTKVMKARLFGQKASGGAVEVLVERILPDDATSHQKHTALCHVRASRSPKEGQTLSLADGNIHATVMGREDNLFLLAFDQPILPVLEHYGELPIPPYFERHADDNDETRYQTVFHDPTKLASVAAPTASLHFDDNVLAAFKSKGINTAFVTLHVGAGTFAPVKTEDILRHKMHSEYAELPQATADLINQTKARGGQVIAVGTTVTRVLETAFQKTASFENPMLSAWSGDTDIFIYPSFRFGVIDKLITNFHLPKSTLLMLVSAFAGSEPIKQAYQHAIEQQYRFFSYGDAMLLEKMV

SEQ ID NO: 66224 - protein, 360 aa, Enhygromyxa salina
  REGION 1..360: note = tr|A0A2S9YQW4|A0A2S9YQW4_9DELT S-adenosylmethionine:tRNA ribosyltransferase-isomerase; OS = Enhygromyxa salina OX=215803 GN=queA PE=3 SV=1
MAGVAAVRVWSATVPSPADFDFELPTAQIAQRPPERRDAARLLLVPRAGPVQHRGIVDLPQLLADRPLIVVNDSKVVPARIHARRETGSRFELLIVDPAALGPGARVHAWIRKAKRLRVGELLQVEGAELTLRYQGRPTDQPDSRACVLEIVHGQLLAGLDAAGELPLPPYIARPDGPSAQDLERYQTVFARDRGSVAAPTAGLHFDDALLASLDHTAITLHVGPGTFLPLEAEDVRAHRVGAERYEISEQAAAQIESARAEGRAILAVGTTVTRTLESVAAAHGGRIVAGAGATELVITPGHPFSIVDRLLTNFHLPRSSLLMLVCSFAGRERVLAAYAEAVRANYRFYSYGDCMLVER

SEQ ID NO: 66225 - protein, 351 aa, Enhygromyxa salina
  REGION 1..351: note = tr|A0A0C2DEU0|A0A0C2DEU0_9DELT S-adenosylmethionine:tRNA ribosyltransferase-isomerase; OS = Enhygromyxa salina OX=215803 GN=queA PE=3 SV=1
MLSPLDFDFELPSDQIAQQPPAQRNAARMLVVPRAGAPEHHGVSALPDLLADPRGRAPLVVVNDSKVVPARIYARRDTGKRFELLVVDPAALGPGARVHAWIRGAKRLRVGELLHVDGAALTLRYQGRPTNEPDSRACVLEIVEGELLAGLEAGGELPLPPYISRPNGPSAADLERYQTVFARDRGSVAAPTAGLHFDDALLASIDHAAITLHVGPGTFLPLEAEDVRAHKVGAERYEITEQAAARIEAARAQGRPILAVGTTVTRTLESVAAANGGRIIPGAGATELVITPGHRFLVVDRLLSNFHLPRSSLLMLVCSFAGRERVLAAYAEAVRAGYRFYSYGDCMLVER

SEQ ID NO: 66226 - protein, 406 aa, unidentified
  source 1..406: note = Enorma massiliensis
  REGION 1..406: note = tr|A0A1Y3U3Q4|A0A1Y3U3Q4_9ACTN S-adenosylmethionine:tRNA ribosyltransferase-isomerase; OS = Enorma massiliensis OX=1472761 GN=queA PE=3 SV=1
MRTDDFDYNLPEELIAQAPAEPRDSCRLLVLHRGEPLATTGDVVPLAHGGSVEHRHFYDIIDYLEPGDLLVANETRVMPARLIGRKAKTGGMAETLLLTRREDQDSLGYVWECLVSPGKRLKPGAVIEYRAGGPHAPENAPVVLVGEVLDFVPDSRGGRLVRFTPQGENASGASRTLDEAIHAAGHVPLPPYITDYEGDPEKYQTVYAMSEEHSAAAPTAGLHFTPELIERIKQKGVGWATVELEVGIDTFRLVEEDDPTEHVMHTERYHVPQSVVDAVHATKAAGHRVIAVGTTAVRSLESAWDAQAAASEPPVVAHRFENAPGSAVEGMGDIVARENATTNLYLMPGSTYHVVDALITNFHVPRSTLMMLVSALATREQIMDAYREAVRERYRFFSFGDAMLIE

SEQ ID NO: 66227 - protein, 360 aa, Ensifer adhaerens
  REGION 1..360: note = tr|A0A2V4WFX2|A0A2V4WFX2_ENSAD S-adenosylmethionine:tRNA ribosyltransferase-isomerase; OS = Ensifer adhaerens OX=106592 GN=queA PE=3 SV=1
MRVDLFDFDLPETSIALRPASPRDSARMLVVRPDGADVLADKGVLDLPSFLREGDALVFNDTKVIPAQLEGIRRRGEEIATQVSLTLHMRVAPDRWKAFARPARRLKVDDRIAFGHGGSSCFLGTLDATVEEKGDAGEVTLRFDLSGPSLDEAIMAVGHIPLPPYIASKRAEDAQDRADYQTMYAREEGAVAAPTAGLHFTDRLFAKLDEAGIERHFVTLHVGAGTFLPVKADDTDDHVMHQEIGHVDARTAERLNAVKARGGRIVCVGTTSLRLIESATSEDGTVKSWSGPTGIFITPGYRFRAVDMLMTNFHLPKSTLFMLVSAFSGLDTMRAAYAHAIETGYRFYSYGDASLLFRKD

SEQ ID NO: 66228 - protein, 360 aa, Ensifer adhaerens
  REGION 1..360: note = tr|W8I214|W8I214_ENSAD S-adenosylmethionine:tRNA ribosyltransferase-isomerase OS=Ensifer adhaerens OV14; OX = 1416753 GN=queA PE=3 SV=1
MRVDLFDFDLPETSIALRPVNPRDSARMLVVDPQAPELLTDHGVLDLPSFLRPGDALVFNDTKVIPAQLEGIRRRGEEITTPVSLTLHMRVAPDRWKAFARPARRLKVGDRIAFGHGGNSCMLGTLDATVEEKGDAGEVTLRFDLAGPLLDEAIMAVGHIPLPPYIASKRAEDAQDRVDYQTVYAREEGAVAAPTAGLHFTERLFSRLNELGIERHFVTLHVGAGTFLPVKADDTDDHVMHLEIGQVDAATAERLNAVKARGGRMVCVGTTSLRLIESAADEHGIIHPWSGPTGIFITPGYRFRAVDMLMTNFHLPKSTLFMLVSAFCGLETMRAAYTYAIESGYRFYSYGDSSLLFRKD

SEQ ID NO: 66229 - protein, 360 aa, unidentified
  source 1..360: note = Ensifer alkalisoli
  REGION 1..360: note = tr|A0A1E3VFC3|A0A1E3VFC3_9RHIZ S-adenosylmethionine:tRNA ribosyltransferase-isomerase; OS = Ensifer alkalisoli OX=1752398 GN=queA PE=3 SV=1
MRVDLFDFDLPETSIALRPASPRDSARMLVVRPQGERLLADNCVLDLPSFLKAGDALVFNDTKVIPAQLEGIRRRGEDVATSVSLTLHMRVTADRWKAFARPAKRLKAGDRISFGHGENVCLLGALEATVEEKGEAGEVTLRFDLSGPALDEAIMSVGHIPLPPYIASKRPEDARDRTDYQTIYAREEGAVAAPTAGLHFTDRLFAKLDQAGIERHFVTLHVGAGTFLPVKADDTEDHVMHEEIGHVDAATAEKINAVRARGGRIVCVGTTSLRLVESAATKEGSIRPWSGPTGIFITPGYRFRAVDALVTNFHLPKSTLFMLVSAFAGLDTMRAAYTHAIASGYRFYSYGDASLLFRKD

SEQ ID NO: 66230 - protein, 361 aa, unidentified
  source 1..361: note = Ensifer glycinis
  REGION 1..361: note = tr|A0A178Y591|A0A178Y591_9RHIZ S-adenosylmethionine:tRNA ribosyltransferase-isomerase; OS = Ensifer glycinis OX=1472378 GN=queA PE=3 SV=1
MRVDLFDFDLPESSIALRPASPRDSARMLVVQPEAERVLGDYGVLDLPSFLKPGDALVFNDTKVIPAQLEGIRRRGEDVSTQVSLTLHMRVASDRWKAFARPARRLKPGDRISFGHGENACLLGALDATVEDKGEAGEVTLRFDLSGPVLDEAIMSVGHIPLPPYIASKRPEDARDRTDYQTVYAREEGAVAAPTAGLHFTDRLFGKLDEAGIERHFVTLHVGAGTFLPVKADDTNDHVMHEEIGHVDAATAERLNAVRARGGRIVCVGTTSLRLIESAATEEGKVRPWSGPTGIFITPGYRFRAVDMLMTNFHLPKSTLFMLVSAFAGLETMRAAYAHAIAAGYRFYSYGDASLLFRKEQ

SEQ ID NO: 66231 - protein, 372 aa, Ensifer sojae
  REGION 1..372: note = tr|A0A249PAQ4|A0A249PAQ4_9RHIZ S-adenosylmethionine:tRNA ribosyltransferase-isomerase; OS = Ensifer sojae CCBAU 05684 OX=716928 GN=queA PE=3 SV=1
MPRGGFAFVLQPMRVDLFDFDLPESSIALRPASPRDSARMLVVRPEGEPVLADHGVLDLTSFLNPGDALVFNDTKVIPAQLEGIRRRGEDVATAVSLTLHMRVASDRWKAFARPARRLKSGDRIQFGHGENTCLLGALEATVEEKGEAGEVTLRFDLSGPALDEAILGVGHIPLPPYIASKRPEDARDRADYQTIFAREEGAVAAPTAGLHFTDRLFAKLDEAGIERHFVTLHVGAGTFLPVKADDTDDHVMHEEIGHVDAATAEKLNAVRARGGRIVCVGTTSLRLIESAATEGGEIRHWSGPTGIFITPGYRFRAVDVLMTNFHLPKSTLFMLVSAFAGLDTMRAAYAHAIATGYRFYSYGDASLLFRKD

SEQ ID NO: 66232 - protein, 360 aa, Ensifer sp.
  REGION 1..360: note = tr|A0A2N8JEH2|A0A2N8JEH2_9RHIZ S-adenosylmethionine:tRNA ribosyltransferase-isomerase; OS = Ensifer sp. MMN_5 OX=2037902 GN=queA PE=3 SV=1
MRVDLFDFDLPENSIALRPASPRDSARMLIVRPDGEPVLEDRGVLDLPSFLRPGDALVFNDTKVIPAQLEGVRYRGEDISTPVSLTLHMRVAPSRWKAFARPARRLKPGDRISFGHGGNACLLGSLEAVVEEKGDAGEVTLRFDLSGPSLDEAIMAVGHIPLPPYIASKRADDARDRTDYQTVYAREEGAVAAPTAGLHFTDRLFASLDEAGIERYFVTLHVGAGTFLPVKADDTADHVMHEEIGHVDPVTAAKLNAVRERGGRIVCVGTTSLRLIESAAAEDGSIRPWSGATGIFITPGYRFRAVDMLMTNFHLPRSTLFMLVSAFAGLETMHAAYAHAIATGYRFYSYGDSSLLFRKD

SEQ ID NO: 66233 - protein, 360 aa, Ensifer sp.
  REGION 1..360: note = tr|A0A1C0T5P6|A0A1C0T5P6_9RHIZ S-adenosylmethionine:tRNA ribosyltransferase-isomerase; OS = Ensifer sp. LC54 OX=1873715 GN=queA PE=3 SV=1
MRVDLFDFDLPETSIALRPVSPRDSARMLVVDPQAPELLTDHGVLDLPSFLRPGDALVFNDTKVIPAQLEGIRRRGEEITTPVSLTLHMRVGPDRWKAFARPARRLKVGDRIAFGHGGNSCMLGTLDATVEEKGDAGEVTLRFDLAGPLLDEAIMAVGHIPLPPYIASKRAEDAQDRTDYQTVYAREEGAVAAPTAGLHFTERLFSRLNELGIERHFVTLHVGAGTFLPVKADDTDDHMMHQEIGLVDARTAERLNAVKARGGRIVCVGTTSLRLIESAADEQGAIHSWSGPTDIFITPGYRFRAVDMLMTNFHLPKSTLFMLVSAFCGLETMRAAYAHAIETGYRFYSYGDSSLLFRKD

SEQ ID NO: 66234 - protein, 357 aa, unidentified
  source 1..357: note = Enterobacillus tribolii
  REGION 1..357: note = tr|A0A370QNC3|A0A370QNC3_9ENTR S-adenosylmethionine:tRNA ribosyltransferase-isomerase; OS = Enterobacillus tribolii OX=1487935 GN=queA PE=3 SV=1
MRVADFSFELPDELIARYPQAERSGCRLLSLDGPTGALEHGTFTDILDKLNPGDLLVFNNTRVIPARLFGRKASGGKLEVLVERVLDDTRVLAHVRASKAPKPGAELLLGDDENIRATMVARHDALFELHFDDGRDVLSILNAAGHMPLPPYIDRPDEEADRELYQTVYADRPGAVAAPTAGLHFDEPLLEKLRAKGVEMAFVTLHVGAGTFQPVRVDTIENHVMHSEYAEVPPEVVEAVLACKARGNRVIAVGTTSVRSLESAAAASQDALIAPFFDDTQIFIYPGYHYQVIDALITNFHLPESTLIMLVSAFAGYRNTMAAYHEAVAQRYRFFSYGDAMFITHNAAAEQETVSGQ

SEQ ID NO: 66235 - protein, 356 aa, unidentified
  source 1..356: note = Enterobacter agglomerans
  REGION 1..356: note = tr|A0A379AKP1|A0A379AKP1_ENTAG S-adenosylmethionine:tRNA ribosyltransferase-isomerase; OS = Enterobacter agglomerans OX=549 GN=queA PE=3 SV=1
MRVADFAFELPESLIAHYPQAQRSGCRLLSLEGPSGTLSHGVFTDVLDKLNPGDLLVFNNTRVIPARVFGRKASGGKIEMLVERMLDDKRVLAHVRASKAPKPGAELLLGEDESVKATMVARHDALFEIVFDDERAVLDILNSVGHMPLPPYIDRPDEEADRELYQTVYSARPGAVAAPTAGLHFDEPLLQALKEKGIEMAFVTLHVGAGTFQPVRVDTIEEHHMHAEYAEVPQEVVDAVLACKARGNKVVAVGTTSVRSLESAAKASQDALIAPFFDDTQIFIYPGYEYQVIDALITNFHLPESTLIMLVSAFAGYQHTMAAYRAAVAEQYRFFSYGDAMFISKNPQAPLEKVGD

SEQ ID NO: 66236 - protein, 356 aa, unidentified
  source 1..356: note = Enterobacter agglomerans
  REGION 1..356: note = tr|A0A2A7V534|A0A2A7V534_ENTAG S-adenosylmethionine:tRNA ribosyltransferase-isomerase; OS = Enterobacter agglomerans OX=549 GN=queA PE=3 SV=1
MRVADFAFELPESLIAHYPQAQRSGCRLLTLDGPSGALSHGVFTDVLDKLNPGDLLVFNNTRVIPARVFGRKASGGKIEMLVERMLDDKRVLAHVRASKAPKPGAELLLGEDESVKATMVARHDALFEIAFDDERAVLDILNSVGHMPLPPYIDRPDEEADRELYQTVYSARPGAVAAPTAGLHFDEPLLQALKEKGVEMAFVTLHVGAGTFQPVRVETIEEHHMHAEYAEVPQEVVDAVLACKARGNKVVAVGTTSVRSLESAAKASQDALIAPFFDDTQIFIYPGYEYQVIDALITNFHLPESTLIMLVSAFAGYQHTMAAYRAAVAEQYRFFSYGDAMFISKNPQAPLEKVGD

SEQ ID NO: 66237 - protein, 356 aa, Enterobacter asburiae
  REGION 1..356: note = tr|A0A376F5J6|A0A376F5J6_ENTAS S-adenosylmethionine:tRNA ribosyltransferase-isomerase; OS = Enterobacter asburiae OX=61645 GN=queA PE=3 SV=1
MRVADFSFELPESLIAHYPMPERSSCRLLSLDGPTGELTHGTFTDLLDKLNPGDLLVFNNTRVIPARLFGRKASGGKIEVLVERMLDDKRILAHIRASKAPKPGAELLLGDDESIKATMTARHDALFEVAFDDERTVLDILNAIGHMPLPPYIERPDEEADRELYQTVYSQKPGAVAAPTAGLHFDEPLLEKLRAKGVEMAFVTLHVGAGTFQPVRVDSIEDHIMHSEYAEVPQDVVDAVLAAKGRGSRVVAVGTTSVRSLESAAQAAKSDLIEPFFGDTQIFIYPGYQYKVIDALVTNFHLPESTLIMLVSAFAGYQHTMAAYKSAVEQKYRFFSYGDAMFITYNPLALNERVGE

SEQ ID NO: 66238 - protein, 356 aa, Enterobacter asburiae
  REGION 1..356: note = tr|A0A5A9BNE3|A0A5A9BNE3_ENTAS S-adenosylmethionine:tRNA ribosyltransferase-isomerase; OS = Enterobacter asburiae OX=61645 GN=queA PE=3 SV=1
MRVADFSFELPESLIAHYPMPERSSCRLLSLDGPTGELTHGTFTDLLDKLNPGDLLVFNNTRVIPARLFGRKASGGKIEVLVERMLDDKRILAHIRASKAPKPGAELLLGDDESIKATMTARHDALFEVAFDDERTVLDILNAIGHMPLPPYIERPDEEADRELYQTVYSQKPGAVAAPTAGLHFDEPLLEKLRAKGVEMAFVTLHVGAGTFQPVRVDSIEDHIMHSEYAEVPQDVVDAVLAAKARGSRVVAVGTTSVRSLESAAQAAKNDLIEPFFGDTQIFIYPGYQYKVIDALVTNFHLPESTLIMLVSAFAGYQHTMAAYKSAVEQKYRFFSYGDAMFITYNPLALNERVGE

SEQ ID NO: 66239 - protein, 356 aa, unidentified
  source 1..356: note = Enterobacter bugandensis
  REGION 1..356: note = tr|A0A167H0G7|A0A167H0G7_9ENTR S-adenosylmethionine:tRNA ribosyltransferase-isomerase; OS = Enterobacter bugandensis OX=881260 GN=queA PE=3 SV=1
MRVADFSFELPESLIAHYPMPERSSCRLLSLDGPTGELTHGTFTDLLDKLNPGDLLVFNNTRVIPARLFGRKASGGKIEVLVERMLDDKRILAHIRASKAPKPGAELLLGDDESIKATMTARHDALFEVAFDDERTVLDILNAIGHMPLPPYIERPDEEADRELYQTVYSQKPGAVAAPTAGLHFDEPLLEKLRAKGVEMAFVTLHVGAGTFQPVRVDSIEDHIMHSEYAEVPQDVVDAVLAAKARGSRVVAVGTTSVRSLESAAQAAKNGLIEPFFGDTQIFIYPGYQYKVIDALVTNFHLPESTLIMLVSAFAGYQHTMNAYKSAVEQKYRFFSYGDAMFITYNPLALNERVGE

SEQ ID NO: 66240 - protein, 356 aa, Enterobacter cancerogenus
  REGION 1..356: note = tr|D2ZFY2|D2ZFY2_9ENTR S-adenosylmethionine:tRNA ribosyltransferase-isomerase OS=Enterobacter cancerogenus ATCC 35316 OX=500639 GN=queA PE=3 SV=1
MRVADFSFELPESLIAHYPMPERSSCRLLSLDGPTGELTHGTFTDLLDKLNPGDLLVFNNTRVIPARLFGRKASGGKIEVLVERMLDDKRILAHIRASKAPKPGAELLLGDDESTKATMTARHDALFEVEFNDERTVLDILNAIGHMPLPPYIERPDEESDRELYQTVYSQKPGAVAAPTAGLHFDEPLLEKLRAKGIEMAFVTLHVGAGTFQPVRVDSIEDHIMHSEYAEVPQEVVDAVLAAKARGSSVVAVGTTSVRSLESAAQAAKTDLIEPFFGDTQIFIYPGYQYKVIDALVTNFHLPESTLIMLVSAFAGYQHTMTAYKSAVEQKYRFFSYGDAMFITYNPQALNERVGE

SEQ ID NO: 66241 - protein, 356 aa, Enterobacter cancerogenus
  REGION 1..356: note = tr|A0A2I6E8R1|A0A2I6E8R1_9ENTR S-adenosylmethionine:tRNA ribosyltransferase-isomerase; OS = Enterobacter cancerogenus OX=69218 GN=queA PE=3 SV=1
MRVADFSFELPESLIAHYPMPERSSCRLLSLDGPTGELTHGTFTDLLDKLNPGDLLVFNNTRVIPARLFGRKASGGKIEVLVERMLDDKRILAHIRASKAPKPGAELLLGDDESIKATMTARHDALFEVEFNDERTVLDILNAIGHMPLPPYIERPDEESDRELYQTVYSQKPGAVAAPTAGLHFDEPLLEKLRAKGIEMAFVTLHVGAGTFQPVRVDSIEDHIMHSEYAEVPQEVVDAVLAAKARGSRVVAVGTTSVRSLESAAQAAKTDLIEPFFGDTQIFIYPGYQYKVIDALVTNFHLPESTLIMLVSAFAGYQHTMTAYKSAVEQKYRFFSYGDAMFITYNPQALNERVGE

SEQ ID NO: 66242 - protein, 356 aa, unidentified
  source 1..356: note = Enterobacter chengduensis
  REGION 1..356: note = tr|A0A0F4BSG7|A0A0F4BSG7_9ENTR S-adenosylmethionine:tRNA ribosyltransferase-isomerase; OS = Enterobacter chengduensis OX=2494701 GN=queA PE=3 SV=1
MRVADFSFELPESLIAHYPMPERSSCRLLSLDGPTGELTHGTFTDLLDKLNPGDLLVFNNTRVIPARLFGRKASGGKIEVLVERMLDDKRILAHIRASKAPKPGAELLLGDDESIKATMTARHDALFEVEFNDERTVLDILNAIGHMPLPPYIERPDEEADRELYQTVYSQKPGAVAAPTAGLHFDEPLLEKLRAKGVEMAFVTLHVGAGTFQPVRVDSIEDHIMHSEYAEVPQDVVDAVLAAKARGSRVVAVGTTSVRSLESAAQAAKNDLIEPFFGDTQIFIYPGYQYKVIDALVTNFHLPESTLIMLVSAFAGYQHTMNAYKSAVEQKYRFFSYGDAMFITYNPLALNERVGE

SEQ ID NO: 66243 - protein, 356 aa, unidentified
  source 1..356: note = Enterobacter chuandaensis
  REGION 1..356: note = tr|A0A3A3ZVT3|A0A3A3ZVT3_9ENTR S-adenosylmethionine:tRNA ribosyltransferase-isomerase; OS = Enterobacter chuandaensis OX=2497875 GN=queA PE=3 SV=1
MRVADFSFELPESLIAHYPMPERSSCRLLSLDGPTGDLTHGTFTDLLDKLNPGDLLVFNNTRVIPARLFGRKASGGKIEVLVERMLDDKRILAHIRASKAPKPGAELLLGDDESIKATMTARHDALFEVEFDDERSVLDILNAIGHMPLPPYIERPDEEADRELYQTVYSQKPGAVAAPTAGLHFDEPLLEKLRAKGIEMAFVTLHVGAGTFQPVRVDSIEDHIMHSEYAEVPQEVVDAVLAAKARGNRVVAVGTTSVRSLESAAQAAKSELIEPFFGDTQIFIYPGYQYKVIDALVTNFHLPESTLIMLVSAFAGYQHTMNAYKSAVEQKYRFFSYGDAMFITYNPLALNERVGE

SEQ ID NO: 66244 - protein, 356 aa, Enterobacter cloacae
  REGION 1..356: note = tr|A0A0F0TWU6|A0A0F0TWU6_ENTCL S-adenosylmethionine:tRNA ribosyltransferase-isomerase; OS = Enterobacter cloacae subsp. cloacae OX=336306 GN=queA; PE = 3 SV=1
MRVADFSFELPESLIAHYPMPERSSCRLLSLDGPTGELTHGTFTDLLDKLNPGDLLVFNNTRVIPARLFGRKASGGKIEVLVERMLDDKRILAHIRASKAPKPGAELLLGDDESIKATMTARHDALFEVEFNDERTVLDILNAIGHMPLPPYIERPDEEADRELYQTVYSQKPGAVAAPTAGLHFDEPLLEKLRAKGVEMAFVTLHVGAGTFQPVRVDSIEDHIMHSEYAEVPQEVVDAVLAAKARGSRVVAVGTTSVRSLESAAQAAQKDLIEPFFGDTQIFIYPGYQYKVIDALVTNFHLPESTLIMLVSAFAGYQHTMAAYKSAVEQKYRFFSYGDAMFITYNPLALNERVGE

SEQ ID NO: 66245 - protein, 356 aa, Enterobacter cloacae
  REGION 1..356: note = tr|A0A5D9SZ92|A0A5D9SZ92_ENTCL S-adenosylmethionine:tRNA ribosyltransferase-isomerase; OS = Enterobacter cloacae OX=550 GN=queA PE=3 SV=1
MRVADFSFELPESLIAHYPMPERSSCRLLSLDGPTGALTHGTFTDLLDKLNPGDLLVFNNTRVIPARLFGRKASGGKIEVLVERMLDDKRILAHIRASKAPKPGAELLLGDDESIKATMTARHDALFEVEFNDERTVLDILNAIGHMPLPPYIERPDEEADRELYQTVYSQKPGAVAAPTAGLHFDEPLLEKLRAKGIEMAFVTLHVGAGTFQPVRVDSIEDHIMHSEYAEVPQEVVDAVLAAKARGSRVVAVGTTSVRSLESAAQAAKKELIEPFFGDTQIFIYPGYQYKVIDALVTNFHLPESTLIMLVSAFAGYQYTMNAYKSAVEQKYRFFSYGDAMFITYNPQALNERVGE

SEQ ID NO: 66246 - protein, 356 aa, unidentified
  source 1..356: note = Enterobacter genomosp.
  REGION 1..356: note = tr|A0A0X4EVC3|A0A0X4EVC3_9ENTR S-adenosylmethionine:tRNA ribosyltransferase-isomerase; OS = Enterobacter genomosp. O OX=2364150 GN=queA PE=3 SV=1
MRVADFSFELPESLIAHYPMPERSSCRLLSLDGPTGELTHGTFTDLLDKLNPGDLLVFNNTRVIPARLFGRKASGGKIEVLVERMLDDKRILAHIRASKAPKPGAELLLGDDESIKATMTARHDALFEVAFDDERSVLDILNAIGHMPLPPYIERPDEEADRELYQTVYSQKPGAVAAPTAGLHFDEPLLEKLRAKGIEMAFVTLHVGAGTFQPVRVDSIEDHIMHSEYAEVPQDVVDAVLAAKARGSRVVAVGTTSVRSLESAAQAAKNSLIEPFFGDTQIFIYPGYQYKVIDALVTNFHLPESTLIMLVSAFAGYQHTMNAYKSAVEQKYRFFSYGDAMFITYNPLALNERVGE

SEQ ID NO: 66247 - protein, 356 aa, Enterobacter hormaechei
  REGION 1..356: note = tr|F5RV43|F5RV43_9ENTR S-adenosylmethionine:tRNA ribosyltransferase-isomerase OS=Enterobacter hormaechei ATCC 49162 OX=888063 GN=queA PE=3 SV=1
MRVADFSFELPESLIAHYPMPERSSCRLLSLDGPTGALTHGTFTDLLDKLNPGDLLVFNNTRVIPARLFGRKASGGKIEVLVERMLDDKRILAHIRASKAPKPGAELLLGDDESIKATMTARHDALFEVEFNDERTVLDILNAIGHMPLPPYIERPDEEADRELYQTVYSQKPGAVAAPTAGLHFDEPLLEKLRAKGIEMAFVTLHVGAGTFQPVRVDSIEDHIMHSEYAEVPQEVVDAVLAAKARGSRVVAVGTTSVRSLESAAQAAKSELIEPFFGDTQIFIYPGYQYKVIDALVTNFHLPESTLIMLVSAFAGYQHTMNAYKSAVEQKYRFFSYGDAMFITYNPQALNERVGE

SEQ ID NO: 66248 - protein, 356 aa, Enterobacter hormaechei
  REGION 1..356: note = tr|A0A5A9YDK1|A0A5A9YDK1_9ENTR S-adenosylmethionine:tRNA ribosyltransferase-isomerase; OS = Enterobacter hormaechei OX=158836 GN=queA PE=3 SV=1
MRVADFSFELPESLIAHYPMPERSSCRLLSLDGPTGALTHGTFTDLLDKLNPGDLLVFNNTRVIPARLFGRKASGGKIEVLVERMLDDKRILAHIRASKAPKPGAELLLGDDESIKATMTARHDALFEVEFNDERTVLDILNAIGHMPLPPYIERPDEEADRELYQTVYSQKPGAVAAPTAGLHFDEPLLEKLRAKGIEMAFVTLHVGAGTFQPVRVDSIEDHIMHSEYAEVPQEVVDAVLAAKARGNRVVAVGTTSVRSLESAAQAAKSELIEPFFGDTQIFIYPGYQYKVIDALVTNFHLPESTLIMLVSAFAGYQHTMNAYKSAVEQKYRFFSYGDAMFITYNPQALNERVGE

SEQ ID NO: 66249 - protein, 356 aa, unidentified
  source 1..356: note = Enterobacter huaxiensis
  REGION 1..356: note = tr|A0A3R9W162|A0A3R9W162_9ENTR S-adenosylmethionine:tRNA ribosyltransferase-isomerase; OS = Enterobacter huaxiensis OX=2494702 GN=queA PE=3 SV=1
MRVADFSFELPESLIAHYPMPERSSCRLLSLDGPTGELTHGTFTDLLDKLNPGDLLVFNNTRVIPARLFGRKASGGKIEVLVERMLDDKRILAHIRASKAPKPGAELLLGDDESIKATMTARHDALFEVAFDDERTVLDILNAIGHMPLPPYIERPDEEADRELYQTVYSQKPGAVAAPTAGLHFDEPLLEKLRAKGIEMAFVTLHVGAGTFQPVRVDSIEDHIMHSEYAEVPQDVVDAVLAAKARGSRVVAVGTTSVRSLESAAQAAKRDLIEPFFGDTQIFIYPGYQYKVIDALVTNFHLPESTLIMLVSAFAGYQHTMNAYKSAVEQKYRFFSYGDAMFITYNPQALNERVGE

SEQ ID NO: 66250 - protein, 356 aa, Enterobacter kobei; identical to SEQ ID NO: 66244
  REGION 1..356: note = tr|A0A5E1A1I0|A0A5E1A1I0_9ENTR S-adenosylmethionine:tRNA ribosyltransferase-isomerase; OS = Enterobacter kobei OX=208224 GN=queA PE=3 SV=1

SEQ ID NO: 66251 - protein, 356 aa, Enterobacter kobei
  REGION 1..356: note = tr|A0A156KN01|A0A156KN01_9ENTR S-adenosylmethionine:tRNA ribosyltransferase-isomerase; OS = Enterobacter kobei OX=208224 GN=queA PE=3 SV=1
MRVADFSFELPESLIAHYPMPERSSCRLLSLDGPTGELTHGTFTDLLDKLNPGDLLVFNNTRVIPARLFGRKASGGKIEVLVERMLDDKRILAHIRASKAPKPGAELLLGDDESIKATMTARHDALFEVEFQDERTVLDILNAIGHMPLPPYIERPDEEADRELYQTVYSQKPGAVAAPTAGLHFDEPLLEKLRAKGVEMAFVTLHVGAGTFQPVRVDSIEDHIMHSEYAEVPQEVVDAVLAAKARGNRVVAVGTTSVRSLESAAQAAKTGLIEPFFGDTQIFIYPGYQYKVIDALVTNFHLPESTLIMLVSAFAGYQHTMNAYKSAVEQKYRFFSYGDAMFITYNPQALNERVGE

SEQ ID NO: 66252 - protein, 356 aa, unidentified
  source 1..356: note = Enterobacter lignolyticus
  REGION 1..356: note = tr|E3G709|E3G709_ENTLS S-adenosylmethionine:tRNA ribosyltransferase-isomerase OS=Enterobacter lignolyticus (strain SCF1) OX=701347 GN=queA PE=3 SV=1
MRVADFSFELPESLIAHYPQPERSSCRLLSLDGPTGTLTHGTFTDLLDKLNPGDLLVFNNTRVIPARLFGRKASGGKIEVLVERMLDDKRILAHIRASKAPKPGTELLLGDDESINATMTARHDALFEVEFNDERPVLDILNAIGHMPLPPYIDRPDEDADRELYQTVYSQKPGAVAAPTAGLHFDEPLLAALREKGIEMAFVTLHVGAGTFQPVRVDSIEDHIMHSEYAEVPQEVVDAVMAAKARGSRVIAVGTTSVRSLESAAQAAKKERIEPFFGDTQIFIYPGYQYQIIDALVTNFHLPESTLIMLVSAFAGYQHTMNAYKAAVEQNYRFFSYGDAMFITYNPQALHERVGD

SEQ ID NO: 66253 - protein, 367 aa, Enterobacter ludwigii
  REGION 1..367: note = tr|G8LPA6|G8LPA6_9ENTR S-adenosylmethionine:tRNA ribosyltransferase-isomerase OS=Enterobacter ludwigii; OX = 299767 GN=queA PE=3 SV=1
MPPVFKSRVYVMRVADFSFELPESLIAHYPMPERSSCRLLSLDGPTGELTHGTFTDLLDKLNPGDLLVFNNTRVIPARLFGRKASGGKIEVLVERMLDDKRILAHIRASKAPKPGAELLLGDDESIRATMTARHDALFEVAFNDERTVLDILNAIGHMPLPPYIERPDEEADRELYQTVYSQKPGAVAAPTAGLHFDEPLLEKLRAKGIEMAFVTLHVGAGTFQPVRVDSIEDHIMHSEYAEVPQEVVDAVLAAKARGNRVVAVGTTSVRSLESAAQAAKNDLIEPFFGDTQIFIYPGYQYNVIDALVTNFHLPESTLIMLVSAFAGYQHTMAAYKSAVEQKYRFFSYGDAMFITYNPQALNERVGE

SEQ ID NO: 66254 - protein, 356 aa, Enterobacter ludwigii
  REGION 1..356: note = tr|W0BLX8|W0BLX8_9ENTR S-adenosylmethionine:tRNA ribosyltransferase-isomerase OS=Enterobacter ludwigii; OX = 299767 GN=queA PE=3 SV=1
MRVADFSFELPESLIAHYPMPERSSCRLLSLDGPTGELTHGTFTDLLDKLNPGDLLVFNNTRVIPARLFGRKASGGKIEVLVERMLDDKRILAHIRASKAPKPGAELLLGDDESIRATMTARHDALFEVAFNDERTVLDILNAIGHMPLPPYIERPDEEADRELYQTVYSQKPGAVAAPTAGLHFDEPLLEKLRAKGIEMAFVTLHVGAGTFQPVRVDSIEDHIMHSEYAEVPQEVVDAVLAAKARGNRVVAVGTTSVRSLESAAQAAKNDLIEPFFGDTQIFIYPGYQYNVIDALVTNFHLPESTLIMLVSAFAGYQHTMTAYKSAVEQKYRFFSYGDAMFITYNPQALNERVGE

SEQ ID NO: 66255 - protein, 356 aa, Enterobacter mori
  REGION 1..356: note = tr|A0A2J0N9W2|A0A2J0N9W2_9ENTR S-adenosylmethionine:tRNA ribosyltransferase-isomerase; OS = Enterobacter mori OX=539813 GN=queA PE=3 SV=1
MRVADFSFELPESLIAHYPMPERSSCRLLSLDGPTGELTHGTFTDLLDKLNPGDLLVFNNTRVIPARLFGRKASGGKIEVLVERMLDDKRILAHIRASKAPKPGAELLLGDDESIKATMTARHDALFEVAFDDERTVLDILNAIGHMPLPPYIERPDEEADRELYQTVYSQKPGAVAAPTAGLHFDEPLLEKLRAKGVEMAFVTLHVGAGTFQPVRVDSIEDHIMHSEYAEVPQEVVDAVLAAKGRGSRVIAVGTTSVRSLESAAQAAKSDLIEPFFGDTQIFIYPGYQYKVIDALVTNFHLPESTLIMLVSAFAGYQHTMNAYKSAVEQKYRFFSYGDAMFITYNPLALNERVGE

SEQ ID NO: 66256 - protein, 356 aa, unidentified
  source 1..356: note = Enterobacter roggenkampii
  REGION 1..356: note = tr|V3E2E3|V3E2E3_9ENTR S-adenosylmethionine:tRNA ribosyltransferase-isomerase OS=Enterobacter roggenkampii; OX = 1812935 GN=queA PE=3 SV=1
MRVADFSFELPESLIAHYPMPERSSCRLLSLDGPTGELTHGTFTDLLDKLNPGDLLVFNNTRVIPARLFGRKASGGKIEVLVERMLDDKRILAHIRASKAPKPGAELLLGDDESIKATMTARHDALFEVEFNDERTVLDILNAIGHMPLPPYIVRPDEEADRELYQTVYSQKPGAVAAPTAGLHFDEPLLEKLRAKGIEMAFVTLHVGAGTFQPVRVDSIEDHIMHSEYAEVPQDVVDAVLAAKARGSRVVAVGTTSVRSLESAAQAAKSELIEPFFGDTQIFIYPGYQYKVIDALVTNFHLPESTLIMLVSAFAGYQHTMNAYKSAVEQKYRFFSYGDAMFITYNPQALNERVGE

SEQ ID NO: 66257 - protein, 356 aa, unidentified
  source 1..356: note = Enterobacter roggenkampii
  REGION 1..356: note = tr|A0A167QT43|A0A167QT43_9ENTR S-adenosylmethionine:tRNA ribosyltransferase-isomerase; OS = Enterobacter roggenkampii OX=1812935 GN=queA PE=3 SV=1
MRVADFSFELPESLIAHYPMPERSSCRLLSLDGPTGELTHGTFTDLLDKLNPGDLLVFNNTRVIPARLFGRKASGGKIEVLVERMLDDKRILAHIRASKAPKPGAELLLGDDESIKATMTARHDALFEVEFNDERTVLDILNAIGHMPLPPYIERPDEEADRELYQTVYSQKPGAVAAPTAGLHFDEPLLEKLRAKGIEMAFVTLHVGAGTFQPVRVDSIEDHIMHSEYAEVPQDVVDAVLAAKARGSRVVAVGTTSVRSLESAAQAAKSELIEPFFGDTQIFIYPGYQYKVIDALVTNFHLPESTLIMLVSAFAGYQHTMNAYKSAVEQKYRFFSYGDAMFITYNPQALNERVGE

SEQ ID NO: 66258 - protein, 356 aa, unidentified
  source 1..356: note = Enterobacter sichuanensis
  REGION 1..356: note = tr|A0A0F1B5Q0|A0A0F1B5Q0_9ENTR S-adenosylmethionine:tRNA ribosyltransferase-isomerase; OS = Enterobacter sichuanensis OX=2071710 GN=queA PE=3 SV=1
MRVADFSFELPESLIAHYPMPERSSCRLLSLDGPTGELTHGTFTDLLDKLNPGDLLVFNNTRVIPARLFGRKASGGKIEVLVERMLDDKRILAHIRASKAPKPGAELLLGDDESINATMTARHDALFEVEFNDERTVLDILNAIGHMPLPPYIERPDEEADRELYQTVYSQKPGAVAAPTAGLHFDEPLLDKLRAKGVEMAFVTLHVGAGTFQPVRVDSIEDHIMHSEYAEVPQDVVDAVLAAKARGSRVVAVGTTSVRSLESAAQAAKNGLIEPFFGDTQIFIYPGYQYKVIDALVTNFHLPESTLIMLVSAFAGYQHTMNAYKSAVEQKYRFFSYGDAMFITYNPLALNERVGE

SEQ ID NO: 66259 - protein, 356 aa, Enterobacter soli
  REGION 1..356: note = tr|A0A198GR96|A0A198GR96_9ENTR S-adenosylmethionine:tRNA ribosyltransferase-isomerase; OS = Enterobacter soli ATCC BAA-2102 OX=1354262 GN=queA PE=3; SV = 1
MRVADFSFELPDSLIAHYPMPERSSCRLLSLDGPTGALTHGTFTDLLDKLNPGDLLVFNNTRVIPARLFGRKASGGKIEVLVERMLDDKRILAHIRASKAPKPGAELLLGDDESIKATMTARHDALFEVEFNDERTVLDILNTIGHMPLPPYIERPDEEADRELYQTVYSQKPGAVAAPTAGLHFDEPLLEKLRAKGVEMAFVTLHVGAGTFQPVRVDSIEDHIMHSEYAEVPQDVVDAVLAAKARGSRVIAVGTTSVRSLESAAQAAQNGLIEPFFGDTQIFIYPGYQYKVIDALVTNFHLPESTLIMLVSAFAGYQHTMTAYKSAVEQKYRFFSYGDAMFITYNPQALNERVGE

SEQ ID NO: 66260 - protein, 356 aa, Enterobacter sp.
  REGION 1..356: note = sp|A4W778|QUEA_ENT38 S-adenosylmethionine:tRNA ribosyltransferase-isomerase OS=Enterobacter sp. (strain 638) OX=399742 GN=queA PE=3 SV=1
MRVADFSFELPESLIAHYPQPERSGCRLLSLDGPTGALTHGTFTDLLDKLNPGDLLVFNNTRVIPARLFGRKASGGKIEVLVERMLDDKRILAHIRASKAPKPGAELLLGDDESINATMVARHDALFEVEFNDARPVLDILNAIGHMPLPPYIDRPDEDADRELYQTVYSQKPGAVAAPTAGLHFDEPLLERLREKGIEMAFVTLHVGAGTFQPVRVDTIEDHIMHSEYAEVPQDVVDAVLAAKARGNRVIAVGTTSVRSLESAAQAAKKDLIEPFFGDTKIFIYPGYQYTVIDALVTNFHLPESTLIMLVSAFAGYQNTMNAYKAAVEQNYRFFSYGDAMFITYNPQALNERVGE

SEQ ID NO: 66261 - protein, 354 aa, Enterobacter sp.
  REGION 1..354: note = tr|R9VV39|R9VV39_9ENTR S-adenosylmethionine:tRNA ribosyltransferase-isomerase OS=Enterobacter sp. R4-368; OX = 1166130 GN=queA PE=3 SV=1
MRVADFSFELPESLIAHYPQPERSSCRLLSLDGPTGALTHGTFTDLLDKLNPGDLLVFNNTRVIPARLFGRKASGGKIEVLVERMLDDKRILAHIRASKAPKPGAELLLGDAEDIQATMVARHDALFEVEFHDERPVLDILNAIGHMPLPPYIDRPDEDADRELYQTVYSEKPGAVAAPTAGLHFDEPLLERLRNKGIEMAFVTLHVGAGTFQPVRVDSIEDHIMHSEYAEVPQKVVDAVLAAKARGNRVVAVGTTSVRSLESAAQAAKKDLIEPFFGDTQIFIYPGYQYRVIDALVTNFHLPESTLIMLVSAFAGYQHTMNAYRAAVAEKYRFFSYGDAMFITYNPQAILERP

SEQ ID NO: 66262 - protein, 357 aa, unidentified
  source 1..357: note = Enterobacterales bacterium
  REGION 1..357: note = tr|A0A2I0FSM3|A0A2I0FSM3_9GAMM S-adenosylmethionine:tRNA ribosyltransferase-isomerase; OS = Enterobacterales bacterium CwR94 OX=2025587 GN=queA; PE = 3 SV=1
MRVADFTFDLPESLIAHYPQPERSGCRLLNLDGPTGALSHGVFTDLLDKLNPGDLLVFNNTRVIPARVFGRKASGGKMEMLVERMLDDKRVLAHVRASKAPKPGTELLLGDDESVKAVMVARHDTLFEIEFHDARPVLDILNAIGHMPLPPYIDRPDEASDRELYQTVYGQRPGAVAAPTAGLHFDEPMLAKLREKGIEMEFVTLHVGAGTFQPVRVDNIEDHIMHAEYAEVSQEVVDAVLACKARGNRVVAVGTTSVRSLESAAKAATETLIAPFFEDTSIFIFPGYHYQVVDALVTNFHLPESTLIMLVSAFAGYQHTMNAYREAVAEQYRFFSYGDAMYITRNPDAPSEAVGQA

SEQ ID NO: 66263 - protein, 167 aa, unidentified
  source 1..167: note = Enterobacteriaceae bacterium
  REGION 1..167: note = tr|A0A351NQK3|A0A351NQK3_9ENTR S-adenosylmethionine:tRNA ribosyltransferase-isomerase (Fragment) OS=Enterobacteriaceae bacterium OX=1849603; GN = queA PE=3 SV=1
MRVADFSFELPESLIAHYPQPERSSCRLLSLDGPTGALTHGTFTDLLDKLNPGDLLVFNNTRVIPARLFGRKASGGKIEVLVERMLDDKRILAHIRASKAPKPGAELLLGDDESIQATMVARHDALFEVEFNDARPVLDILNAIGHMPLPPYIDRPDEAEDRERYQT

SEQ ID NO: 66264 - protein, 356 aa, unidentified
  source 1..356: note = Enterobacteriaceae bacterium
  REGION 1..356: note = tr|A0A427BV43|A0A427BV43_9ENTR S-adenosylmethionine:tRNA ribosyltransferase-isomerase; OS = Enterobacteriaceae bacterium CCUG 66741 OX=1851514; GN = queA PE=3 SV=1
MRVADFSFELPESLIAHYPQPERSGCRLLSLDGPTGALTHGTFTDLLAKLNPGDLLVFNNTRVIPARLFGRKASGGKIEVLVERMLDDKRILAHIRASKAPKPGAELLLGDDESINATMVARHDALFEVQFNDERPVLDILNAIGHMPLPPYIDRPDEDADRELYQTVYSQKPGAVAAPTAGLHFDEPLLAKLREKGIEMAFVTLHVGAGTFQPVRVDTIEDHIMHSEYAEVPQDVVDAVLAAKARGSKVVAVGTTSVRSLESAAQAAKSDLIEPFFGDTQIFIYPGYQYKVIDALVTNFHLPESTLIMLVSAFAGYQNTMNAYKSAVEQKYRFFSYGDAMYITYNPSAIQERVGE

SEQ ID NO: 66265 - protein, 356 aa, Enterococcus aquimarinus
  REGION 1..356: note = tr|A0A1L8QW92|A0A1L8QW92_9ENTE S-adenosylmethionine:tRNA ribosyltransferase-isomerase; OS = Enterococcus aquimarinus OX=328396 GN=queA PE=3 SV=1
MRRTDLDKEKSGKMLTTEDFNFDLPEELIAQTPLKDRTSSRLLVLDSKTGAMADHHFYDIIDELEAGDALVMNDTRVLPARLYGEKPSTGGHLEVLLLTNLEGDTWETLIKPAKRAKVGTEISFGDGRLKAIVEKELPHGGRVIRFTYEGIFLENLESLGEMPLPPYIKERLEDPERYQTVYAKENGSAAAPTAGLHFTEDLLAKIQAKGVRLVYLTLHVGLGTFRPVSVDNIAEHEMHSEFYRLSEESAAILNEVKAAGGKIVAVGTTSIRTLETIGTKFNGAIQADSGWTSIFITPGYQFKVVDAFSTNFHLPKSTLVMLVSAFATRDFTLAAYHHAIEERYRFFSFGDAMFVK

SEQ ID NO: 66266 - protein, 343 aa, Enterococcus asini
  REGION 1..343: note = tr|A0A413AQJ0|A0A413AQJ0_9ENTE S-adenosylmethionine:tRNA ribosyltransferase-isomerase; OS = Enterococcus asini OX=57732 GN=queA PE=3 SV=1
MLTTEDFDFDLPEELIAQTPLADRSASRLLVLDRKSGAISDKHFADIVDELNPGDALVMNDTRVLPARLYGEKPDTGGHLEVLLLTNQEGDTWETLIKPAKRAKVGTKISFGDGRLQAVVEEELEHGGRIITFTYEGIFLEILESLGEMPLPPYIKERLEDPERYQTVYAKENGSAAAPTAGLHFTKELLEKIQAKGVELVYLTLHVGLGTFRPVSVDNIADHQMHSEFYRLTEDAAAKLRAVKANGGRIVAVGTTSIRTLESIGTKFAGEIKADSGWTDIFITPGYTFKVVDAFSTNFHLPKSTLVMLVSAFAGREHVLNAYQHAIEEGYRFFSFGDAMFVK

SEQ ID NO: 66267 - protein, 343 aa, Enterococcus asini
  REGION 1..343: note = tr|R2PM31|R2PM31_9ENTE S-adenosylmethionine:tRNA ribosyltransferase-isomerase OS=Enterococcus asini ATCC 700915 OX=1158606 GN=queA PE=3 SV=1
MLTTEDFDFDLPEELIAQTPLADRSASRLLVLDRKSGAISDKHFADIVDELNPGDALVMNDTRVLPARLYGEKPDTGGHLEVLLLTNQEGDTWETLIKPAKRAKVGTKISFGDGRLQAVVEEELEHGGRIITFTYEGIFLEILESLGEMPLPPYIKERLEDPERYQTVYAKENGSAAAPTAGLHFTKELLEKIQAKGVELVYLTLHVGLGTFRPVSVDNIADHQMHSEFYRLTEDAAAKLRAVKANGGRIVAVGTTSIRTLETIGTKFAGEIKADSGWTDIFITPGYTFKVVDAFSTNFHLPKSTLVMLVSAFAGREHVLNAYQHAIEEGYRFFSFGDAMFVK

SEQ ID NO: 66268 - protein, 343 aa, Enterococcus avium
  REGION 1..343: note = tr|S0S779|S0S779_ENTAV S-adenosylmethionine:tRNA ribosyltransferase-isomerase OS=Enterococcus avium ATCC 14025 OX=1140002 GN=queA PE=3 SV=1
MLTTEDFDFDLPEELIAQTPLEKRDSSRLLVLDRESGQIEDKHFDEIIEELNPGDALVMNDTRVLPARLYGEKPETGGHLEVLLLNNTQGDEWETLIKPARRAKVGTQIVFGDGRLRAEVKQELEHGGRIVEFSYEGIFLENLESLGEMPLPPYIKERLEDPERYQTVYAKENGSAAAPTAGLHFTPELLEKIAAKGVKLVYLTLHVGLGTFRPVSVENIAEHQMHSEFYRLTEEAAAQLNDVRDSGGKIIAVGTTSIRTLETIGTKFSGEIKADSGWTDIFITPGYEFKIVQAFSTNFHLPKSTLVMLVSAFAGREKTLAAYHHAIEERYRFFSFGDAMFVK

SEQ ID NO: 66269 - protein, 343 aa, Enterococcus avium; identical to SEQ ID NO: 66268
  REGION 1..343: note = tr|A0A2N8PZD7|A0A2N8PZD7_ENTAV S-adenosylmethionine:tRNA ribosyltransferase-isomerase; OS = Enterococcus avium OX=33945 GN=queA PE=3 SV=1

SEQ ID NO: 66270 - protein, 343 aa, Enterococcus caccae
  REGION 1..343: note = tr|R3U1D3|R3U1D3_9ENTE S-adenosylmethionine:tRNA ribosyltransferase-isomerase OS=Enterococcus caccae ATCC BAA-1240 OX=1158612 GN=queA PE=3 SV=1
MLSTEDFDFDLPEELIAQTPLKDRTSSRLLVLNRETKEIEDKHFHDIIDELNAGDALVMNDTRVLPARLYGEKPETGGHLEVLLLTNTQGDTWETLIKPAKRAKVGTKINFGDGRLSATVVEELEHGGRIVTFNYEGIFLEILESLGEMPLPPYIKERLEDPERYQTVYAKENGSAAAPTAGLHFTQELLERIQSKGVKLVYLTLHVGLGTFRPVSVENISEHEMHSEFYRLTEEAAEQLNKVRETGGKIVAVGTTSIRTLETIGTKFDGQIKADSGWTDIFITPGYEFKVVQAFSTNFHLPKSTLVMLVSAFAGRDLTLAAYQHAIDERYRFFSFGDAMFVK

SEQ ID NO: 66271 - protein, 343 aa, Enterococcus canintestini
  REGION 1..343: note = tr|A0A267HRT8|A0A267HRT8_9ENTE S-adenosylmethionine:tRNA ribosyltransferase-isomerase; OS = Enterococcus canintestini OX=317010 GN=queA PE=3 SV=1
MLTTEDFDFDLPEELIAQTPLEKRSSSRLLVVDRQTGEMEDRHFSDIIDELNPGDALVMNDTRVLPARLHGEKPDTGGHLEVLLLTNTTGDTWETLIKPAKRAKVGTEIVFGDGRLKAVVEEELDHGGRIITFKYDGIFLEILESLGEMPLPPYIKERLENPDRYQTVYAKENGSAAAPTAGLHFTPELLAAIEAKGVKLVYLTLHVGLGTFRPVSVDDISKHQMHSEFYRLTEEAAQELNAVRAAGGKIVAVGTTSIRTLETIGSKFDGEIKADSGWTDIFITPGYEFKIVQAFSTNFHLPKSTLVMLVSAFAGRELTLAAYQHAIEARYRFFSFGDAMFVK

SEQ ID NO: 66272 - protein, 343 aa, Enterococcus canintestini
  REGION 1..343: note = tr|A0A1L8R4H3|A0A1L8R4H3_9ENTE S-adenosylmethionine:tRNA ribosyltransferase-isomerase; OS = Enterococcus canintestini OX=317010 GN=queA PE=3 SV=1
MLTTEDFDFDLPEELIAQTPLEKRSSSRLLVVDRQTGEMEDRHFSDIIDELNPGDALVMNDTRVLPARLHGEKPDTGGHLEVLLLTNTTGDTWETLIKPAKRAKVGTEIVFGDGRLKAVVEEELEHGGRIITFKYDGIFLEILESLGEMPLPPYIKERLENPDRYQTVYAKENGSAAAPTAGLHFTPELLAAIEAKGVKLVYLTLHVGLGTFRPVSVDDISKHQMHSEFYRLTEEAAQELNAVRAAGGKIVAVGTTSIRTLETIGSKFDGEIKADSGWTDIFITPGYEFKIVQAFSTNFHLPKSTLVMLVSAFAGRELTLAAYQHAIEARYRFFSFGDAMFVK

SEQ ID NO: 66273 - protein, 343 aa, Enterococcus canis
  REGION 1..343: note = tr|A0A1L8REW8|A0A1L8REW8_9ENTE S-adenosylmethionine:tRNA ribosyltransferase-isomerase; OS = Enterococcus canis OX=214095 GN=queA PE=3 SV=1
MLTTEDFDFDLPEELIAQTPLKDRDQSRLLVLDHTAGTMEDKHFHDILDELAPGDALVMNDTRVLPARLYGEKPETGGHLEVLLLTNTEGDTWETLIKPARRAKVGTEISFGDGRLTAVVEKELEHGGRIVTFHYDGIFLEILESLGEMPLPPYIKERLEDPDRYQTVYAKENGSAAAPTAGLHFTKELLTAIEAKGVKLVYLTLHVGLGTFRPVSVDNIAEHEMHSEFYRLTEEAAQTLREVKAQGGRIVAVGTTSIRTLETIGTKFAGEIQADSGWTDIFITPGYQFKVVDAFSTNFHLPKSTLVMLVSAFAGRELVLAAYQHAIEEGYRFFSFGDAMFVK

SEQ ID NO: 66274 - protein, 343 aa, Enterococcus casseliflavus
  REGION 1..343: note = tr|F0EG21|F0EG21_ENTCA S-adenosylmethionine:tRNA ribosyltransferase-isomerase OS=Enterococcus casseliflavus ATCC 12755 OX=888066 GN=queA PE=3 SV=1
MLTTEDFDFELPEELIAQTPLSDRSSSRLLVVDRETGKFEDKHFYNIIDELEPGDALVMNDTRVLPARIYGEKQETGAHLEILLLNNIEGDTWETLIKPAKRAKVGTKITFGDGRLEAVVEEELDHGGRIIRFQYKGIFLEILESLGEMPLPPYIKERLEDPDRYQTVYAKENGSAAAPTAGLHFTPELLEQIAAKGVKLVYLTLHVGLGTFRPVSVDNIADHEMHSEFYRLTEEAAAQLNEVRANGGKIVAVGTTSIRTLETIGTKFDGQIKADSGWTSIFITPGYQFKIVEAFSTNFHLPKSTLVMLVSAFAGRDLTLSAYQHAIDERYRFFSFGDAMFLK

SEQ ID NO: 66275 - protein, 343 aa, Enterococcus casseliflavus
  REGION 1..343: note = tr|A0A1V3NLD3|A0A1V3NLD3_ENTCA S-adenosylmethionine:tRNA ribosyltransferase-isomerase; OS = Enterococcus casseliflavus OX=37734 GN=queA PE=3 SV=1
MLTTEDFDFDLPEELIAQTPLSDRSSSRLLVVDRETGKFEDKHFYNIIDELAPGDALVMNDTRVLPARIYGEKQETGAHLEILLLNNIEGDTWETLIKPAKRAKVGTKITFGDGRLEAVVEEELDHGGRIIRFQYKGIFLEILESLGEMPLPPYIKERLEDPDRYQTVYAKENGSAAAPTAGLHFTPELLEQIAAKGVKLVYLTLHVGLGTFRPVSVDNIADHEMHSEFYRLTEEAAAQLNEVRANGGKIVAVGTTSIRTLETIGTKFDGQIKADSGWTSIFITPGYQFKIVEAFSTNFHLPKSTLVMLVSAFAGRDLTLSAYQHAIDERYRFFSFGDAMFLK

SEQ ID NO: 66276 - protein, 343 aa, Enterococcus cecorum
  REGION 1..343: note = tr|S1RHE9|S1RHE9_9ENTE S-adenosylmethionine:tRNA ribosyltransferase-isomerase OS=Enterococcus cecorum DSM 20682 = ATCC 43198 OX=1121864 GN=queA PE=3 SV=1
MLTTEDFDFDLPEELIAQTPLKERTSSRLLVMNRQTGELTDKHFYDIIDYLNPGDALVMNNSRVLPARLHGEKVETGAHLEILLLNNTVNDEWEVLIKPAKRAKVGTEISFGDGRLKAVVKEELDHGGRIIDFKYDGIFLEILESLGEMPLPPYIKERLEDPDRYQTVYAKENGSAAAPTAGLHFTKDLLAKIEAKGVKLVYLTLHVGLGTFRPVSVDNIAEHEMHSEFYSLSPEAAQTLNDVKANGGRIVAVGTTSIRTLETIGSKFDGKIQADSGWTNIFITPGYEFKVVDAFSTNFHLPKSTLVMLVSAFAGREQVLAAYQHAIEEKYRFFSFGDAMFIF

SEQ ID NO: 66277 - protein, 343 aa, Enterococcus cecorum; identical to SEQ ID NO: 66276
  REGION 1..343: note = tr|A0A0H2QHE3|A0A0H2QHE3_9ENTE S-adenosylmethionine:tRNA ribosyltransferase-isomerase; OS = Enterococcus cecorum OX=44008 GN=queA PE=3 SV=1

SEQ ID NO: 66278 - protein, 343 aa, Enterococcus columbae
  REGION 1..343: note = tr|S0K7J3|S0K7J3_9ENTE S-adenosylmethionine:tRNA ribosyltransferase-isomerase OS=Enterococcus columbae DSM 7374 = ATCC 51263 OX=1121865 GN=queA PE=3 SV=1
MLTTEDFDFHLPEELIAQTPLADRTSSRLLVLNRQTGAVEDKHFYDIIDELQPGDALVMNDTRVLPARLHGEKVETGAHLELLLLKNTQNDEWETLIKPAKRAKVGTVIRFGDGRLQAVVKEELDHGGRIIEFQYEGIFLEILESLGEMPLPPYIKERLEDPDRYQTVYAKENGSAAAPTAGLHFTEELLAKIQEKGVELVYLTLHVGLGTFRPVSVENIADHEMHSEFYRLSEEAAQKLNEVKANGGRIVAVGTTSIRTLETIGTKFAGKIQADSGWTNIFITPGYEFKVVDAFSTNFHLPKSTLVMLVSAFAGREKVLAAYQHAIEQNYRFFSFGDAMFVK

SEQ ID NO: 66279 - protein, 343 aa, Enterococcus devriesei
  REGION 1..343: note = tr|A0A1L8SWS6|A0A1L8SWS6_9ENTE S-adenosylmethionine:tRNA ribosyltransferase-isomerase; OS = Enterococcus devriesei OX=319970 GN=queA PE=3 SV=1
MLTTEDFDFDLPEELIAQTPLEKRDSSRLLVLDHQTGKIEDKHFDAIIDELNAGDALVMNDTRVLPARLYGEKPETGGHLEVLLLNNTQGDEWETLIKPARRAKVGTQIVFGDGRLKAEVKQELEHGGRIVEFSYEGIFLENLESLGEMPLPPYIKERLEDPERYQTVYAKENGSAAAPTAGLHFTPELLEKIAAKGVKLVYLTLHVGLGTFRPVSVDNIAEHQMHSEFYRLTEEAAAQLNDVRNNVGKIVAVGTTSIRTLETIGTKFNGEIKADSGWTDIFITPGYEFKVVQAFSTNFHLPKSTLVMLVSAFAGREETLAAYHHAIEERYRFFSFGDAMFVK

SEQ ID NO: 66280 - protein, 343 aa, Enterococcus dispar
  REGION 1..343: note = tr|S1NJS1|S1NJS1_9ENTE S-adenosylmethionine:tRNA ribosyltransferase-isomerase OS=Enterococcus dispar ATCC 51266 OX=1139219 GN=queA PE=3 SV=1
MLTTEDFDFDLPEELIAQTPLEKRSSSRLLVVNRQTGEMEDKHFSDIIDELNPGDALVMNDTRVLPARLHGEKPDTGGHLEVLLLTNTTGDTWETLIKPAKRAKIGTEIVFGDGRLKAVVEEELEHGGRIITFKYDGIFLEILESLGEMPLPPYIKERLENPDRYQTVYAKENGSAAAPTAGLHFTPELLAAIEAKGVKLVYLTLHVGLGTFRPVSVDNIAEHHMHSEFYRLTEKAAQELNEVRVSGGKIVAVGTTSIRTLETIGTKFNGEIKADSGWTDIFITPGYEFKIVQAFSTNFHLPKSTLVMLVSAFAGRELTLAAYQHAIEARYRFFSFGDAMFVK

SEQ ID NO: 66281 - protein, 343 aa, Enterococcus durans
  REGION 1..343: note = tr|A0A377KKV9|A0A377KKV9_9ENTE S-adenosylmethionine:tRNA ribosyltransferase-isomerase; OS = Enterococcus durans OX=53345 GN=queA PE=3 SV=1
MLTTEDFDFDLPEELIAQTPLKDRDQSRLLVLDRTTGEMKDKHFHDIIEELNPGDALVMNNTRVLPARLYGEKPETGAHLEVLLLTNTEGDTWETLIKPAKRAKVGTRISFGDGRLQAVVKEELEHGGRIITFEYEGIFLEILESLGEMPLPPYIKERLEDPDRYQTVYAKENGSAAAPTAGLHFTKELLDEIEAKGVELVYLTLHVGLGTFRPVSVDKIEEHHMHSEFYRLTEEAAERLNQVRQNGGKIVAVGTTSIRTLETIGTKFDGEIKADSGWTDIFITPGYQFKIVEAFSTNFHLPKSTLVMLVSAFAGRELTLAAYQHAIDERYRFFSFGDAMFVK

SEQ ID NO: 66282 - protein, 343 aa, Enterococcus durans
  REGION 1..343: note = tr|A0A5B9A3B5|A0A5B9A3B5_9ENTE S-adenosylmethionine:tRNA ribosyltransferase-isomerase; OS = Enterococcus durans OX=53345 GN=queA PE=3 SV=1
MLTTEDFDFDLPEELIAQTPLKDRDQSRLLVLDRTTGEMKDKHFHDIIEELNPGDALVMNNTRVLPARLYGEKPETGAHLEVLLLTNTEGDTWETLIKPAKRAKVGTRISFGDGRLQAVVKEELEHGGRIITFEYEGIFLEILESLGEMPLPPYIKERLEDPDRYQTVYAKENGSAAAPTAGLHFTKELLAEIEAKGVELVYLTLHVGLGTFRPVSVDKIEEHHMHSEFYRLTEEAAERLNQVRQNGGKIVAVGTTSIRTLETIGTKFDGEIKADSGWTDIFITPGYQFKIVEAFSTNFHLPKSTLVMLVSAFAGRELTLAAYQHAIAERYRFFSFGDAMFVK

SEQ ID NO: 66283 - protein, 343 aa, Enterococcus faecalis
  REGION 1..343: note = sp|Q837H2|QUEA_ENTFA S-adenosylmethionine:tRNA ribosyltransferase-isomerase OS=Enterococcus faecalis (strain ATCC 700802 / V583) OX=226185 GN=queA PE=3 SV=1
MLSTEDFDFDLPEELIAQTPLKDRASSRLLVVNKETGDMEDKHFHDILDELQPGDALVMNNTRVLPARLYGEKPETGGHLEVLLLTNTEGDTWETLIKPAKRAKVGTEIQFGDGRLKAVVKEELEHGGRIIEFKYDGIFLEILESLGEMPLPPYIKERLDDPDRYQTVYAEENGSAAAPTAGLHFTKELLEEIKAKGVHLVYLTLHVGLGTFRPVSVDNIEEHHMHSEFYRLTEEAAKQLNEVRQAGGRIVAVGTTSIRTLETIGTKFNGEIQADSGWTDIFITPGYQFKVVEAFSTNFHLPKSTLVMLVSAFAGKDLTLAAYQHAIEEKYRFFSFGDAMFIK

SEQ ID NO: 66284 - protein, 343 aa, Enterococcus faecalis; identical to SEQ ID NO: 66283
  REGION 1..343: note = tr|J6EXI4|J6EXI4_ENTFL S-adenosylmethionine:tRNA ribosyltransferase-isomerase OS=Enterococcus faecalis ERV65 OX=1134794 GN=queA PE=3 SV=1

SEQ ID NO: 66285 - protein, 347 aa, Enterococcus faecium
  REGION 1..347: note = tr|I3TYI5|I3TYI5_ENTFD S-adenosylmethionine:tRNA ribosyltransferase-isomerase OS=Enterococcus faecium (strain ATCC BAA-472 / TX0016 / DO) OX=333849 GN=queA PE=3; SV = 1
MSDDMLTTEDFDFDLPEELIAQTPLKDRDHSRLLVLDRKTGEMEDKHFHEIIEELQPGDALVMNNTRVLPARLYGEKPDTGAHLEVLLLTNTQGDTWETLIKPAKRAKVGTRISFGDGRLQAVVKEELEHGGRIIDFEYEGIFLEILESLGEMPLPPYIKERLEDPDRYQTVYAKENGSAAAPTAGLHFTKELLDEIEAKGVELVYLTLHVGLGTFRPVSVDKIEEHHMHSEFYRLTEEAAERLNQVRKNGGKIVAVGTTSIRTLETIGTKFNGEIKADSGWTDIFITPGYEFKVVEAFSTNFHLPKSTLVMLVSAFAGRELTLSAYQHAIEERYRFFSFGDAMFVK

SEQ ID NO: 66286 - protein, 343 aa, Enterococcus faecium
  REGION 1..343: note = tr|A0A0M1XZA5|A0A0M1XZA5_ENTFC S-adenosylmethionine:tRNA ribosyltransferase-isomerase; OS = Enterococcus faecium EnGen0020 OX=1138897 GN=queA PE=3; SV = 1
MLTTEDFDFDLPEELIAQTPLKDRDHSRLLVLDRKTGEMEDKRFHEIIEELQPGDALVMNNTRVLPARLYGEKPDTGAHLEVLLLTNTQGDTWETLIKPAKRAKVGTRISFGDGRLQAVVKEELEHGGRIIDFEYEGIFLEILESLGEMPLPPYIKERLEDPDRYQTVYAKENGSAAAPTAGLHFTKELLDEIEAKGVELVYLTLHVGLGTFRPVSVDKIEEHHMHSEFYRLTEEAAERLNQVRKNGGKIVAVGTTSIRTLETIGTKFNGEIKADSGWTDIFITPGYEFKVVEAFSTNFHLPKSTLVMLVSAFAGRELTLSAYQHAIEERYRFFSFGDAMFVK

SEQ ID NO: 66287 - protein, 343 aa, unidentified
  source 1..343: note = Enterococcus florum
  REGION 1..343: note = tr|A0A4P5P7B3|A0A4P5P7B3_9ENTE S-adenosylmethionine:tRNA ribosyltransferase-isomerase; OS = Enterococcus florum OX=2480627 GN=queA PE=3 SV=1
MLTTEDFDFELPEELIAQTPLAQRDSSRLLVLDRKSGEIEDKHFNEIIDELTAGDALVMNDTRVLPARLYGVKPDTGGHLEVLLLNNTHDDEWETLIKPAKRAKVGTEIVFGDGRLKAEVKEELEHGGRIITFQYEGIFLENLESLGEMPLPPYIKERLEDPDRYQTVYAKENGSAAAPTAGLHFTPELLQAIEAKGVKLVYLTLHVGLGTFRPVSVDNISEHHMHSEFYRLSEEAAAQLNDVRANGGKIIAVGTTSIRTLETIGSKFDGAIKADSGWTDIFITPGYEFKVVQAFSTNFHLPKSTLVMLVSAFAGREQTLAAYHHAIEERYRFFSFGDAMFVK

SEQ ID NO: 66288 - protein, 343 aa, Enterococcus gallinarum
  REGION 1..343: note = tr|C9A2H3|C9A2H3_ENTGE S-adenosylmethionine:tRNA ribosyltransferase-isomerase OS=Enterococcus gallinarum (strain EG2) OX=565653 GN=queA PE=3 SV=1
MLTTEDFDFELPEELIAQTPLSDRSSSRLLVVDRESGAMEDKRFYDIIDELAPGDALVMNDTRVLPARIYGEKIETGAHLEILLLNNIEGDSWETLIKPAKRAKVGTKITFGDGRLEAVVEKELEHGGRIIRFSYDGIFLEILESLGEMPLPPYIKERLEDPDRYQTVYAKENGSAAAPTAGLHFTPELLKKIADKGVKLVYLTLHVGLGTFRPVSVDNIADHEMHSEFYRLTEEAAAQLNDVRANGGKIVAVGTTSIRTLETIGTKFDGDIKADSGWTSIFITPGYQFKVVQAFSTNFHLPKSTLVMLVSAFAGRDLTLEAYQHAIDERYRFFSFGDAMFLK

SEQ ID NO: 66289 - protein, 343 aa, Enterococcus gallinarum
  REGION 1..343: note = tr|A0A2K3QSW2|A0A2K3QSW2_ENTGA S-adenosylmethionine:tRNA ribosyltransferase-isomerase; OS = Enterococcus gallinarum OX=1353 GN=queA PE=3 SV=1
MLTTEDFDFELPEELIAQTPLSDRSSSRLLVVDRESGAMEDKHFYDIIDELAPGDALVMNDTRVLPARIYGEKIETGAHLEILLLNNIEGDSWETLIKPAKRAKVGTKITFGDGRLEAVVEKELEHGGRIIRFSYDGIFLEILESLGEMPLPPYIKERLEDPDRYQTVYAKENGSAAAPTAGLHFTPELLKKIADKGVKLVYLTLHVGLGTFRPVSVDNIADHEMHSEFYRLTEEAAAQLNDVRANGGKIVAVGTTSIRTLETIGTKFDGEIKADSGWTSIFITPGYQFKVVQAFSTNFHLPKSTLVMLVSAFAGRDLTLEAYQHAIDERYRFFSFGDAMFLK

SEQ ID NO: 66290 - protein, 343 aa, Enterococcus gilvus
  REGION 1..343: note = tr|R2XFR3|R2XFR3_9ENTE S-adenosylmethionine:tRNA ribosyltransferase-isomerase OS=Enterococcus gilvus ATCC BAA-350 OX=1158614 GN=queA PE=3 SV=1
MLTTEDFDFELPEELIAQTPLEKRDSSRLLILDRETGDIEDKHFDEIIEELNPGDALVMNDTRVLPARLYGEKPETGGHLEVLLLNNTQGDEWETLIKPARRAKVGTEIVFGDGRLRAEVKKELEHGGRIVEFSYEGIFLENLESLGEMPLPPYIKERLEDPERYQTVYAKENGSAAAPTAGLHFTPELLEKIAAKGVKLVYLTLHVGLGTFRPVSVDNIAEHQMHSEFYRLTEEAAVQLNDVRDSGGKIIAVGTTSIRTLETIGTKFNGEIKADSGWTDIFITPGYEFKIVQAFSTNFHLPKSTLVMLVSAFAGREKTLAAYHHAIEERYRFFSFGDAMFVK

SEQ ID NO: 66291 - protein, 343 aa, Enterococcus gilvus
  REGION 1..343: note = tr|A0A345FVE9|A0A345FVE9_9ENTE S-adenosylmethionine:tRNA ribosyltransferase-isomerase; OS = Enterococcus gilvus OX=160453 GN=queA PE=3 SV=1
MLTTEDFDFELPEELIAQTPLEKRDSSRLLILDRETGDIEDKHFDEIIEELNPGDALVMNDTRVLPARLYGEKPETGGHLEVLLLNNTQGDEWETLIKPARRAKVGTEIVFGDGRLRAEVKKELEHGGRIVEFSYEGIFLENLESLGEMPLPPYIKERLEDPERYQTVYAKENGSAAAPTAGLHFTPELLEKIAAKGVKLVYLTLHVGLGTFRPVSVDNIAEHQMHSEFYRLTEEAAAQLNDVRDSGGKIIAVGTTSIRTLETIGTKFNGEIKADSGWTDIFITPGYEFKVVQAFSTNFHLPKSTLVMLVSAFAGREKTLAAYHHAIEERYRFFSFGDAMFVK

SEQ ID NO: 66292 - protein, 343 aa, Enterococcus haemoperoxidus
  REGION 1..343: note = tr|R2QCA8|R2QCA8_9ENTE S-adenosylmethionine:tRNA ribosyltransferase-isomerase OS=Enterococcus haemoperoxidus ATCC BAA-382 OX=1158608 GN=queA PE=3 SV=1
MLSTEDFDFDLPEELIAQTPLKDRTSSKLLVLNRETKEIEDKHFHEIVDELNSGDALVMNDTRVLPARLYGEKPETGGHLEVLLLTNTEGDTWETLIKPAKRAKIGTKISFGDGRLTATVVEELEHGGRIVTFKYEGIFLEILESLGEMPLPPYIKERLEDPERYQTVYAKENGSAAAPTAGLHFTQELLTKIQSKGVKLVYLTLHVGLGTFRPVSVDNIAEHEMHSEFYRLTEEAAVQLNDVRENGGKIVAVGTTSIRTLETIGTKFDGQIKADSGWTDIFITPGYEFKVVQAFSTNFHLPKSTLVMLVSAFAGRDLTLSAYQHAIDERYRFFSFGDAMFVK

SEQ ID NO: 66293 - protein, 343 aa, Enterococcus hermanniensis
  REGION 1..343: note = tr|A0A1L8TNF2|A0A1L8TNF2_9ENTE S-adenosylmethionine:tRNA ribosyltransferase-isomerase; OS = Enterococcus hermanniensis OX=249189 GN=queA PE=3 SV=1
MLTTEDFDFELPEELIAQTPLEKRDSSRLLVLDHQSGKIEDKHFDAIIEELNAGDALVMNDTRVLPARLYGEKPETGGHLEVLLLNNTQGDEWETLIKPARRAKTGTQIVFGDGRLKAVVKEELEHGGRIVEFSYEGIFLENLESLGEMPLPPYIKERLDDPERYQTVYAKENGSAAAPTAGLHFTPELLEKIAAKGVKLVYLTLHVGLGTFRPVSVDNIAEHQMHSEFYRLTEEAAAQLNDVRSTGGKIVAVGTTSIRTLETIGTKFNGEIKADSGWTDIFITPGYEFKVVQAFSTNFHLPKSTLVMLVSAFAGREKTLAAYHHAIEARYRFFSFGDAMFVK

SEQ ID NO: 66294 - protein, 343 aa, Enterococcus hirae
  REGION 1..343: note = tr|A0A366UE56|A0A366UE56_ENTHR S-adenosylmethionine:tRNA ribosyltransferase-isomerase; OS = Enterococcus hirae OX=1354 GN=queA PE=3 SV=1
MLTTEDFDFDLPEELIAQTPLKDRDHSRLLVLDRTTGEMSDKHFHDILEELHPGDALVMNNTRVLPARLYGEKIETGAHLEVLLLTNTEGDTWETLIKPAKRAKVGTRITFGDGRLQAVVKEELEHGGRIIEFEYEGIFLETLESLGEMPLPPYIKERLEDSDRYQTVYAKENGSAAAPTAGLHFTKELLAEIEAKGVELVYLTLHVGLGTFRPVSVDKIEEHHMHSEFYRLTEEAASRLNQVRQNGGKIIAVGTTSIRTLETIGTKFDGEIKADSGWTDIFITPGYQFKVVEAFSTNFHLPKSTLVMLVSAFAGRELTLAAYQHAIDERYRFFSFGDAMFVK

SEQ ID NO: 66295 - protein, 343 aa, Enterococcus hirae
  REGION 1..343: note = tr|A0A1V8XBL3|A0A1V8XBL3_ENTHR S-adenosylmethionine:tRNA ribosyltransferase-isomerase; OS = Enterococcus hirae OX=1354 GN=queA PE=3 SV=1
MLTTEDFDFDLPEELIAQTPLKDRDHSRLLVLDRTTGEMSDKHFHDILEELHPGDALVMNNTRVLPARLYGEKTETGAHLEVLLLTNTEGDTWETLIKPAKRAKVGTRITFGDGRLQAVVKEELEHGGRIIEFEYEGIFLETLESLGEMPLPPYIKERLEDPDRYQTVYAKENGSAAAPTAGLHFTKELLAEIEAKGVELVYLTLHVGLGTFRPVSVDKIEEHHMHSEFYRLTEEAASRLNQVRQNGGKIIAVGTTSIRTLETIGTKFDGEIKADSGWTDIFITPGYQFKVVEAFSTNFHLPKSTLVMLVSAFAGRELTLAAYQHAIDERYRFFSFGDAMFVK

SEQ ID NO: 66296 - protein, 343 aa, Enterococcus italicus
  REGION 1..343: note = tr|E6LID5|E6LID5_ENTI1 S-adenosylmethionine:tRNA ribosyltransferase-isomerase OS=Enterococcus italicus (strain DSM 15952 / LMG 22039 / TP 1.5) OX=888064 GN=queA; PE = 3SV=1
MLTTEDFDFDLPEELIAQTPLTDRASSRLLVLDRKTKEMADKHFYEIIDELNAGDALVMNNTRVLPARLYGVKEETGAHLELLLLNNTEGDTWETLIKPAKRAKVGTEITFGDGRLKAIVEEELDHGGRMIRFVYEGIFLEILESLGEMPLPPYIKERLEDPERYQTVYAKENGSAAAPTAGLHFTKELLEKIQAKGVHLVYLTLHVGLGTFRPVSVDNIAEHEMHSEFYRLTQEAADELTAVRDAGGRIVAVGTTSIRTLETIGTKFDGAIQADSGWTNIFIKPGYQFKLVDAFSTNFHLPKSTLVMLVSAFAGREFVLEAYQHAIDEKYRFFSFGDAMFVK

SEQ ID NO: 66297 - protein, 343 aa, Enterococcus malodoratus
  REGION 1..343: note = tr|R2QVJ2|R2QVJ2_9ENTE S-adenosylmethionine:tRNA ribosyltransferase-isomerase OS=Enterococcus malodoratus ATCC 43197 OX=1158601 GN=queA PE=3 SV=1
MLTTEDFDFDLPEELIAQTPLEKRDSSRLLVLDRETGHISDKHFDEILEELNPGDALVMNDTRVLPARLYGEKPETGGHLEVLLLNNTQGDEWETLIKPARRAKVGTQIVFGDGRLRAEVMEELEHGGRIVEFTYEGIFLENLESLGEMPLPPYIKERLEDPERYQTVYAKENGSAAAPTAGLHFTPELLERIAAKGVKLVYLTLHVGLGTFRPVSVDNISEHQMHSEFYRLTEEAAAQLNDVRAAGGKIIAVGTTSIRTLETIGTKFDGEIKADSGWTDIFITPGYEFKIVQAFSTNFHLPKSTLVMLVSAFAGREETLAAYHHAIEERYRFFSFGDAMFVK

SEQ ID NO: 66298 - protein, 343 aa, Enterococcus moraviensis
  REGION 1..343: note = tr|R2RBN3|R2RBN3_9ENTE S-adenosylmethionine:tRNA ribosyltransferase-isomerase OS=Enterococcus moraviensis ATCC BAA-383 OX=1158609 GN=queA PE=3 SV=1
MLSTEDFDFDLPEELIAQTPLKDRTSSRLLVLNRETKEIEDKHFHDIIDELNAGDALVMNDTRVLPARLYGEKPETGGHLEVLLLTNTQGDTWETLIKPAKRAKVGTKISFGDGRLTATVIEELEHGGRIVTFEYEGIFLENLESLGEMPLPPYIKERLEDPERYQTVYAKENGSAAAPTAGLHFTQELLTKIQSKGVKLVYLTLHVGLGTFRPVSVENISEHEMHSEFYRLTEDAAAQLNEVRSSGGKIVAVGTTSIRTLETIGTKFDGQIKADSGWTDIFITPGYEFKIVQAFSTNFHLPKSTLVMLVSAFASRDLTLAAYHHAIEERYRFFSFGDAMFVK

SEQ ID NO: 66299 - protein, 343 aa, Enterococcus mundtii
  REGION 1..343: note = tr|A0A022N763|A0A022N763_ENTMU S-adenosylmethionine:tRNA ribosyltransferase-isomerase; OS = Enterococcus mundtii CRL35 OX=1450511 GN=queA PE=3 SV=1
MLTTEDFDFELPEELIAQTPLKDRDHSRLLVVDRKTGEMMDKHFHEIIEELNPGDALVMNNTRVLPARLYGEKVETGAHLEVLLLTNTEGDTWETLIKPAKRAKVGTKIIFGDGRLKAVVKEELDHGGRIIEFAYEGIFLENLEALGEMPLPPYIKERLEDPDRYQTVYAEENGSAAAPTAGLHFTTELLDEIKAKGVELVYLTLHVGLGTFRPVSVDKIEEHEMHSEFYRLTEEAAARLNQVRQNGGKIVAVGTTSIRTLETIGTKFAGEIKADSGWTDIFITPGYDFKIVEAFSTNFHLPKSTLVMLVSAFAGRELTLSAYQHAIEERYRFFSFGDAMFVK

SEQ ID NO: 66300 - protein, 343 aa, Enterococcus mundtii
  REGION 1..343: note = tr|V5XLJ8|V5XLJ8_ENTMU S-adenosylmethionine:tRNA ribosyltransferase-isomerase OS=Enterococcus mundtii QU 25; OX = 1300150 GN=queA PE=3 SV=1
MLTTEDFDFELPEELIAQTPLKDRDHSRLLVVDRKTGGMMDKHFHEIIEELNPGDALVMNNTRVLPARLYGEKVETGAHLEVLLLTNTEGDTWETLIKPAKRAKVGTEIIFGDGRLKAVVKEELDHGGRIIEFAYEGIFLENLEALGEMPLPPYIKERLEDPDRYQTVYAEENGSAAAPTAGLHFTTELLDEIKAKGVELVYLTLHVGLGTFRPVSVDKIEEHEMHSEFYRLTEEAATRLNQVRQNGGKIVAVGTTSIRTLETIGTKFDGEIKADSGWTDIFITPGYEFKVVEAFSTNFHLPKSTLVMLVSAFAGRELTLSAYQHAIDERYRFFSFGDAMFVK

SEQ ID NO: 66301 - protein, 343 aa, Enterococcus pallens
  REGION 1..343: note = tr|R2T5L7|R2T5L7_9ENTE S-adenosylmethionine:tRNA ribosyltransferase-isomerase OS=Enterococcus pallens ATCC BAA-351 OX=1158607 GN=queA PE=3 SV=1
MLTTEDFDFDLPEELIAQTPLSKRDSSRLLILDRQTGEVEDKHFHDIIDELAPGDALVMNDTRVLPARLYGEKPETGGHLEVLLLNNTQGDQWETLIKPARRAKVGTKIVFGDGRLRAEVKEELEHGGRIVEFQYEGIFLENLESLGEMPLPPYIKERLEDPDRYQTVYAKENGSAAAPTAGLHFTPELLQAIEAKGIKLVYLTLHVGLGTFRPVSVDNIAEHEMHSEFYRLTQEAADQLNAVRENGGKIVAVGTTSIRTLETIGTKFNGEIKADSGWTDIFITPGYEFKVVQAFSTNFHLPKSTLVMLVSAFAGRENTLAAYQHAIDERYRFFSFGDAMFVK

SEQ ID NO: 66302 - protein, 343 aa, Enterococcus phoeniculicola
  REGION 1..343: note = tr|R3W4Q0|R3W4Q0_9ENTE S-adenosylmethionine:tRNA ribosyltransferase-isomerase OS=Enterococcus phoeniculicola ATCC BAA-412 OX=1158610 GN=queA PE=3 SV=1
MLTTEDFDFDLPEELIAQTPLKDRASSRLLVLNRETNEMEDKHFYEIIDELHAGDALVMNDTRVLPARLYGEKPETGAHLEVLLLTNTQGDTWETLIKPAKRAKVGTEIVFGDGRLKAVVTEELDHGGRIITFSYEGIFLEILESLGEMPLPPYIKERLEDPDRYQTVYAKENGSAAAPTAGLHFTQDLLEKIKEKGVHLVYLTLHVGLGTFRPVSVENISEHEMHSEFYRLTEQAADQLNQVRANGGKIIAVGTTSIRTLETIGTKFDGEIRADSGWTDIFITPGYKFKVVEAFSTNFHLPKSTLVMLVSAFAGRDFTLSAYQHAIDERYRFFSFGDAMFVK

SEQ ID NO: 66303 - protein, 343 aa, unidentified
  source 1..343: note = Enterococcus plantarum
  REGION 1..343: note = tr|A0A2W3YSJ1|A0A2W3YSJ1_9ENTE S-adenosylmethionine:tRNA ribosyltransferase-isomerase; OS = Enterococcus plantarum OX=1077675 GN=queA PE=3 SV=1
MLSTEDFDFDLPEELIAQTPLKDRTSSRLLVLNRETKEIEDKHFHEIIDELTPGDALVMNDTRVLPARLYGEKTETGGHLEVLLLTNTDGDTWETLIKPAKRAKVGTKISFGDGRLTATVVEELEHGGRIVTFKYEGIFLEILESLGEMPLPPYIKERLEDPDRYQTVYAKENGSAAAPTAGLHFTQELLAKIQSKGVKLVYLTLHVGLGTFRPVSVDNISEHEMHSEFYRLTEAAAAQLNNVRKNGGKIVAVGTTSIRTLETIGTKFDGQIKADSGWTDIFITPGYEFKVVQAFSTNFHLPKSTLVMLVSAFAGKELTLAAYQHAIDERYRFFSFGDAMFVK

SEQ ID NO: 66304 - protein, 343 aa, Enterococcus pseudoavium
  REGION 1..343: note = tr|A0A3D9A0G5|A0A3D9A0G5_9ENTE S-adenosylmethionine:tRNA ribosyltransferase-isomerase; OS = Enterococcus pseudoavium OX=44007 GN=queA PE=3 SV=1
MLTTEDFDFDLPEELIAQTPLEKRDSSRLLVLDRETGQIEDKHFDAIIEELNAGDALVMNDTRVLPARLYGEKPETGGHLEVLLLNNTQGDEWETLIKPARRAKVGTQIVFGDGRLRAEVKEELEHGGRIVEFFYEGIFLENLESLGEMPLPPYIKERLEDPERYQTVYAKENGSAAAPTAGLHFTPELLEKIGAKGVKLVYLTLHVGLGTFRPVSVDNIAEHQMHSEFYRLTEEAAEQLNEVRANGGKIIAVGTTSIRTLETIGTKFAGEIKADSGWTDIFITPGYEFKIVQAFSTNFHLPKSTLVMLVSAFAGREKTLAAYHHAIEERYRFFSFGDAMFVK

SEQ ID NO: 66305 - protein, 343 aa, Enterococcus quebecensis
  REGION 1..343: note = tr|A0A1E5GWA3|A0A1E5GWA3_9ENTE S-adenosylmethionine:tRNA ribosyltransferase-isomerase; OS = Enterococcus quebecensis OX=903983 GN=queA PE=3 SV=1
MLSTEDFDFDLPEELIAQTPLKDRTSSRLLVLNRETKEIEDKHFHDIIDELNAGDALVMNDTRVLPARLYGEKPETGGHLEVLLLTNTEGDTWETLIKPAKRAKVGTQISFGDGRLTATVIEELEHGGRIVTFNYEGIFLEILESLGEMPLPPYIKERLEDPERYQTVYAKENGSAAAPTAGLHFTQELLGKIQSKGVKLVYLTLHVGLGTFRPVSVDNIAEHEMHSEFYRLTEDAAEQLNDVRKNGGKIIAVGTTSIRTLETIGTKFDGQIKADSGWTDIFITPGYEFKVVQAFSTNFHLPKSTLVMLVSAFAGKDLTLAAYQHAIDEKYRFFSFGDAMFVK

SEQ ID NO: 66306 - protein, 343 aa, Enterococcus raffinosus
  REGION 1..343: note = tr|R2R0K8|R2R0K8_9ENTE S-adenosylmethionine:tRNA ribosyltransferase-isomerase OS=Enterococcus raffinosus ATCC 49464 OX=1158602 GN=queA PE=3 SV=1
MLTTEDFDFDLPEELIAQTPLEKRDSSRLLILDRETGQIEDKHFEEIIEELAPGDALVMNDTRVLPARLYGEKPETGGHLEVLLLNNTQGDEWETLIKPARRAKVGTQIVFGDGRLRAEVKKELEHGGRIVEFSYEGIFLENLESLGEMPLPPYIKERLEDPERYQTVYAKENGSAAAPTAGLHFTPELLEKIAAKGVKLVYLTLHVGLGTFRPVSVDNIAEHQMHSEFYRLTEEAAAQLNEVRANGGKIIAVGTTSIRTLETIGTKFNGEIKADSGWTDIFITPGYEFKIVQAFSTNFHLPKSTLVMLVSAFAGREKTLAAYHHAIEERYRFFSFGDAMFVK

SEQ ID NO: 66307 - protein, 343 aa, Enterococcus raffinosus; identical to SEQ ID NO: 66306
  REGION 1..343: note = tr|A0A1L8X544|A0A1L8X544_9ENTE S-adenosylmethionine:tRNA ribosyltransferase-isomerase; OS = Enterococcus raffinosus OX=71452 GN=queA PE=3 SV=1

SEQ ID NO: 66308 - protein, 343 aa, Enterococcus ratti
  REGION 1..343: note = tr|A0A1L8WD09|A0A1L8WD09_9ENTE S-adenosylmethionine:tRNA ribosyltransferase-isomerase; OS = Enterococcus ratti OX=150033 GN=queA PE=3 SV=1
MLTTEDFDFDLPEELIAQTPLKTRDHSRLLVLNRTTGEMEDKHFHAILEELHPGDALVMNNTRVLPARLYGEKIETGAHLEVLLLTNTKGDTWETLIKPAKRAKTGTRISFGDGRLQAVVKEELEHGGRIIEFAYEGIFLEILESLGEMPLPPYIKERLEDPDRYQTVYAKENGSAAAPTAGLHFTQELLSEIRAKGVELVYLTLHVGLGTFRPVSVEKIEEHQMHSEFYRLTEEAAAKLNQVRRNGGKIVAVGTTSIRTLETIGTKFNGKIKADSGWTDIFITPGYQFKIVEAFSTNFHLPKSTLVMLVSAFAGRKLTLAAYQHAINERYRFFSFGDAMFVK

SEQ ID NO: 66309 - protein, 343 aa, unidentified
  source 1..343: note = Enterococcus rivorum
  REGION 1..343: note = tr|A0A1E5L1M4|A0A1E5L1M4_9ENTE S-adenosylmethionine:tRNA ribosyltransferase-isomerase; OS = Enterococcus rivorum OX=762845 GN=queA PE=3 SV=1
MLTTEDFDFDLPEELIAQTPLKDRSSSKLLVLNHETKEMEDKQFSEIIDELNAGDALVMNNTRVLPARLYGEKPDTGGHLEVLLLTNTDGDTWETLIKPAKRAKAGTEISFGDGRLKATVIEELEHGGRIITFNYEGIFLEIIESLGEMPLPPYIKERLEDPERYQTVYAKENGSAAAPTAGLHFTSELLEKIQAKGVKLVYLTLHVGLGTFRPVSVENLEEHAMHSEFYQLTEAAAEQLNEVRANGGRIIAVGTTSIRTLETIGTKFNGEIKADSGWTDIFITPGYEFKIVQAFSTNFHLPKSTLVMLVSAFAGRELTLAAYQHAIDEKYRFFSFGDAMFVR

SEQ ID NO: 66310 - protein, 343 aa, unidentified
  source 1..343: note = Enterococcus rotai
  REGION 1..343: note = tr|A0A0U2VV05|A0A0U2VV05_9ENTE S-adenosylmethionine:tRNA ribosyltransferase-isomerase; OS = Enterococcus rotai OX=118060 GN=queA PE=3 SV=1
MLSTEDFDFDLPEELIAQTPLKDRTSSRLLVLNRETKEIEDKHFHDIIDELNAGDALVMNDTRVLPARLYGEKPETGGHLEVLLLTNTEGDTWETLIKPAKRAKVGTKISFGDGRLSATVIEELEHGGRIVTFSYDGIFLEILESLGEMPLPPYIKERLEDPERYQTVYAKENGSAAAPTAGLHFTQELLGKIQSKGVKLVYLTLHVGLGTFRPVSVENISEHEMHSEFYRLTEEAAEQLNDVRQSGGKIIAVGTTSIRTLETIGTKFDGQIKADSGWTDIFITPGYEFKIVQAFSTNFHLPKSTLVMLVSAFAGRDLTLAAYQHAIDESYRFFSFGDAMFVK

SEQ ID NO: 66311 - protein, 343 aa, Enterococcus saccharolyticus
  REGION 1..343: note = tr|S0NV07|S0NV07_9ENTE S-adenosylmethionine:tRNA ribosyltransferase-isomerase OS=Enterococcus saccharolyticus subsp. saccharolyticus ATCC 43076; OX = 1139996 GN=queA PE =3 SV=1
MLTTEDFDFELPEELIAQTPLTDRTSSRLLVLDSKTGNMEDKHFYDIIDELNEGDALVMNDTRVLPARLYGEKVETGAHLEILLLNNTEGDTWETLIKPAKRAKIGTEISFGDGRLKATVKEELTHGGRIIEFSYDGIFLEILESLGEMPLPPYIKERLEDPDRYQTVYAKENGSAAAPTAGLHFTEELLEKIQAKGIELVFLTLHVGLGTFRPVSVDNIAEHEMHSEFYRLTEEAAEKLNQVKANGGRIVAVGTTSIRTLETIGTKFDGAIQADSGWTSIFITPGYEFKVVDAFSTNFHLPKSTLVMLVSAFAGREQTLAAYQHAVEERYRFFSFGDAMFVK

SEQ ID NO: 66312 - protein, 343 aa, Enterococcus saccharolyticus
  REGION 1..343: note = tr|A0A449EWM8|A0A449EWM8_9ENTE S-adenosylmethionine:tRNA ribosyltransferase-isomerase; OS = Enterococcus saccharolyticus OX=41997 GN=queA PE=3 SV=1
MLTTEDFDFELPEELIAQTPLSDRSSSRLLVVDRESGAMEDKHFYDIIDELAPGDALVMNDTRVLPARIYGEKIETGAHLEILLLNNIEGDSWETLIKPSKRAKVGTKITFGDGRLEAVVEKELEHGGRIIRFSYDGIFLEILESLGEMPLPPYIKERLEDPDRYQTVYAKENGSAAAPTAGLHFTPELLKKIADKGVKLVYLTLHVGLGTFRPVSVDNIADHEMHSEFYRLTEEAAAQLNDVRANGGKIVAVGTTSIRTLETIGTKFDGDIKADSGWTSIFITPGYQFKVVQAFSTNFHLPKSTLVMLVSAFAGRDLTLEAYQHAIDERYRFFSFGDAMFLK

SEQ ID NO: 66313 - protein, 343 aa, Enterococcus silesiacus
  REGION 1..343: note = tr|A0A0S3KF58|A0A0S3KF58_9ENTE S-adenosylmethionine:tRNA ribosyltransferase-isomerase; OS = Enterococcus silesiacus OX=332949 GN=queA PE=3 SV=1
MLSTEDFDFDLPEELIAQTPLKDRTSSRLLVLDRETKEIEDKHFHEIIDELNAGDALVMNDTRVLPARLYGEKPETGGHLEVLLLTNTEGDTWETLIKPAKRAKVGTQISFGDGRLTATVVEELEHGGRIVTFKYEGIFLEILESLGEMPLPPYIKERLEDPERYQTVYAKENGSAAAPTAGLHFTQELLGKIQSKGVKLVYLTLHVGLGTFRPVSVDNISEHEMHSEFYRLTEEAAAQLNDVRQNGGKIVAVGTTSIRTLETIGTKFDGQIKADSGWTDIFITPGYEFKIVQAFSTNFHLPKSTLVMLVSAFAGRDLTLTAYQHAIDERYRFFSFGDAMFVK

SEQ ID NO: 66314 - protein, 343 aa, Enterococcus sp.
  REGION 1..343: note = tr|A0A291DN61|A0A291DN61_9ENTE S-adenosylmethionine:tRNA ribosyltransferase-isomerase; OS = Enterococcus sp. FDAARGOS_375 OX=2060307 GN=queA PE=3; SV = 1
MLTTEDFDFELPEELIAQTPLSDRSSSRLLVVDRETGKFEDKHFYNIIDELAPGDALVMNDTRVLPARIYGEKQETGAHLEILLLNNIEGDTWETLIKPAKRAKVGTKITFGDGRLEAVVEEELDHGGRIIRFQYKGIFLEILESLGEMPLPPYIKERLEDPDRYQTVYAKENGSAAAPTAGLHFTPELLEQIAAKGVKLVYLTLHVGLGTFRPVSVDNIADHEMHSEFYRLTEEAAAQLNEVRANGGKIVAVGTTSIRTLETIGTKFDGQIKADSGWTSIFITPGYQFKIVEAFSTNFHLPKSTLVMLVSAFAGRDLTLSAYQHAIDERYRFFSFGDAMFLK

SEQ ID NO: 66315 - protein, 343 aa, Enterococcus sp.
  REGION 1..343: note = tr|A0A0N1LZV0|A0A0N1LZV0_9ENTE S-adenosylmethionine:tRNA ribosyltransferase-isomerase; OS = Enterococcus sp. RIT-PI-f OX=1690244 GN=queA PE=3 SV=1
MLTTEDFDFDLPEELIAQTPLSDRSSSRLLVVDRETGGFEDKHFYNIIDELNPGDALVMNDTRVLPARIYGEKQETGAHLEILLLNNIEGDSWETLIKPAKRAKVGTKITFGDGRLEAVVEEELDHGGRIIRFSYEGIFLEILESLGEMPLPPYIKERLEDPDRYQTVYAKENGSAAAPTAGLHFTPELLAEIAAKGVKLVYLTLHVGLGTFRPVSVDNIADHEMHSEFYRLTEESASQLNDVRSKGGKIVAVGTTSIRTLETIGTKFDGEIKADSGWTSIFITPGYEFKVVQAFSTNFHLPKSTLVMLVSAFAGRDLTLAAYQHAIDERYRFFSFGDAMFLK

SEQ ID NO: 66316 - protein, 343 aa, Enterococcus sulfureus
  REGION 1..343: note = tr|S0PG01|S0PG01_9ENTE S-adenosylmethionine:tRNA ribosyltransferase-isomerase OS=Enterococcus sulfureus ATCC 49903 OX=1140003 GN=queA PE=3 SV=1
MLTTEDFDFDLPEELIAQTPLEDRASSRLLVLNTKTKEMEDRHFHDIIDELNPGDALVMNNTRVLPARLYGEKTETGGHLEILLLKNTQGDSWETLIKPAKRAKVGTKITFGDGRLTAVVEEELEHGGRIIRFSYEGIFLEILESLGEMPLPPYIKERLEDPDRYQTVYAKENGSAAAPTAGLHFTEELLEKIQAKGVKLVYLTLHVGLGTFRPVSVDNIEEHDMHSEFYRLTKEAADQLNDVRDNGGKIVAVGTTSIRTLETIGSKFDGRLQEDSGWTSIFIKPGYQWKVVDAFSTNFHLPKSTLVMLVSAFAGREFTLEAYQHAIDERYRFFSFGDAMFVK

SEQ ID NO: 66317 - protein, 343 aa, Enterococcus termitis
  REGION 1..343: note = tr|A0A242LF08|A0A242LF08_9ENTE S-adenosylmethionine:tRNA ribosyltransferase-isomerase; OS = Enterococcus termitis OX=332950 GN=queA PE=3 SV=1
MLSTEDFDFDLPEELIAQTPLKDRTSSRLLVLNRETKEIEDKHFHEIIDELNAGDALVMNDTRVLPARLYGEKPETGGHLEVLLLTNTEGDTWETLIKPAKRAKVGTQISFGDGRLTATVIQELEHGGRIVTFKYDGIFLEILESLGEMPLPPYIKERLEDPDRYQTVYAKENGSAAAPTAGLHFTQELLSKIQSKGVKLVYLTLHVGLGTFRPVSVDNISEHEMHSEFYRLTEEAAAQLNDVRQNGGKIVAVGTTSIRTLETIGTKFDGQIKADSGWTDIFITPGYEFKIVQAFSTNFHLPKSTLVMLVSAFAGRDLTLTAYQHAIDERYRFFSFGDAMFVK

SEQ ID NO: 66318 - protein, 343 aa, Enterococcus termitis
  REGION 1..343: note = tr|A0A1E5GB55|A0A1E5GB55_9ENTE S-adenosylmethionine:tRNA ribosyltransferase-isomerase; OS = Enterococcus termitis OX=332950 GN=queA PE=3 SV=1
MLSTEDFDFELPEELIAQTPLKDRTSSRLLVLNRETEEMEDKHFHDIVDELQAGDALVMNDTRVLPARLYGEKPDTGGHLEVLLLTNTEGDTWETLIKPAKRAKVGTHIHFGDGRLTATVVEELDHGGRIVTFDYDGIFLEILESLGEMPLPPYIKERLEDPERYQTVYAKENGSAAAPTAGLHFTQELLDKIQEKGVKLVYLTLHVGLGTFRPVSVDNIAEHEMHSEFYRLTEAAAEQLNEVRKQGGKIVAVGTTSIRTLETIGTKFDGQIKADSGWTDIFITPGYEFKVVQAFSTNFHLPKSTLVMLVSAFAGRNLTLAAYQHAIDEHYRFFSFGDAMFVK

SEQ ID NO: 66319 - protein, 343 aa, Enterococcus thailandicus
  REGION 1..343: note = tr|A0A510WCV8|A0A510WCV8_ENTTH S-adenosylmethionine:tRNA ribosyltransferase-isomerase; OS = Enterococcus thailandicus OX=417368 GN=queA PE=3 SV=1
MLTTEDFDFDLPEELIAQTPLKDRDQSRLLVVNRTTGELEDKHFHDIIDELNPGDALVMNDTRVLPARLYGEKPDTGAHLEVLLLTNTEGDTWETLIKPAKRAKVGTTISFGDGRLKAVVEEELEHGGRIITFKYDGIFLEILESLGEMPLPPYIKERLEDPDRYQTVYAKENGSAAAPTAGLHFTTELLEEIEAKGIELVYLTLHVGLGTFRPVSVDKIEDHHMHSEFYRLTEDAAKRLNQVRENGGKIVAVGTTSIRTLETIGTKFNGEIKADSGWTEIFITPGYEFKVVQAFSTNFHLPKSTLVMLVSAFAGRELILSAYQHAIDERYRFFSFGDAMFVK

SEQ ID NO: 66320 - protein, 343 aa, Enterococcus thailandicus
  REGION 1..343: note = tr|A0A249SG45|A0A249SG45_ENTTH S-adenosylmethionine:tRNA ribosyltransferase-isomerase; OS = Enterococcus thailandicus OX=417368 GN=queA PE=3 SV=1
MLTTEDFDFDLPEELIAQTPLKDRDQSRLLVVNRTTGELEDKHFHDIIDELNPGDALVMNDTRVLPARLYGEKPDTGAHLEVLLLTNTEGDTWETLIKPAKRAKVGTTISFGDGRLKAVVEEELEHGGRIITFKYDGIFLEILESLGEMPLPPYIKERLEDPDRYQTVYAKENGSAAAPTAGLHFTKELLEEIEAKGIELIYLTLHVGLGTFRPVSVDKIEDHHMHSEFYRLTEDASKRLNQVRENGGKIVAVGTTSIRTLETIGTKFNGEIKADSGWTEIFITPGYEFKVVQAFSTNFHLPKSTLVMLVSAFAGRELILSAYQHAIDERYRFFSFGDAMFVK

SEQ ID NO: 66321 - protein, 343 aa, Enterococcus ureasiticus
  REGION 1..343: note = tr|A0A1E5GG16|A0A1E5GG16_9ENTE S-adenosylmethionine:tRNA ribosyltransferase-isomerase; OS = Enterococcus ureasiticus OX=903984 GN=queA PE=3 SV=1
MLSTEDFDFNLPEELIAQTPLKDRTSSRLLVLNRETKEIEDKHFHEIIDELNAGDALVMNDTRVLPARLYGEKPETGGHLEVLLLTNTDGDTWETLIKPAKRAKVGTKISFGDGRLTATVIEELEHGGRIVTFKYEGIFLEILESLGEMPLPPYIKERLEDPDRYQTVYAKENGSAAAPTAGLHFTQELLAKIKSKGVKLVYLTLHVGLGTFRPVSVDNISEHEMHSEFYRLTEEAAAQLNDVRENGGKIVAVGTTSIRTLETIGTKFDGQIKADSGWTDIFITPGYKFKVVQAFSTNFHLPKSTLVMLVSAFAGRDLTLAAYQHAIDERYRFFSFGDAMFVK

SEQ ID NO: 66322 - protein, 343 aa, unidentified
  source 1..343: note = Enterococcus ureilyticus
  REGION 1..343: note = tr|A0A1E5HFM0|A0A1E5HFM0_9ENTE S-adenosylmethionine:tRNA ribosyltransferase-isomerase; OS = Enterococcus ureilyticus OX=1131292 GN=queA PE=3 SV=1
MLSTEDFDFDLPEELIAQTPLKDRTSSRLLVLNHETKEIEDKHFHDIIDELKAGDALVMNDTRVLPARLYGEKPETGGHLEVLLLTNTVGDTWETLIKPAKRAKVGTKISFGDGRLTATVVEELEHGGRIVTFNYEGIFLEILESLGEMPLPPYIKERLEDPERYQTVYAKENGSAAAPTAGLHFTQELLAKIQSKGVKLVYLTLHVGLGTFRPVSVENIAEHEMHSEFYRLTEAAAEQLNEVRKMGGRIVAVGTTSIRTLETIGTKFDGQIKADSGWTDIFITPGYEFKIVQAFSTNFHLPKSTLVMLVSAFAGKDLTLTAYQHAIDERYRFFSFGDAMFVK

SEQ ID NO: 66323 - protein, 347 aa, Enterococcus villorum
  REGION 1..347: note = tr|A0A511J2U9|A0A511J2U9_9ENTE S-adenosylmethionine:tRNA ribosyltransferase-isomerase; OS = Enterococcus villorum OX=112904 GN=queA PE=3 SV=1
MSDDMLTTEDFDFNLPEELIAQTPLKDRDQSRLLVVDRTTGEMKDKHFHDILEELNPGDALVMNNTRVLPARLYGEKTETGAHLEVLLLTNTEGDTWETLIKPAKRAKVGTRISFGDGRLQAVVKEELDHGGRIIAFEYEGIFLEILESLGEMPLPPYIKERLEDPDRYQTVYAKENGSAAAPTAGLHFTKELLAEIEAKGVELVYLTLHVGLGTFRPVSVDKIEEHQMHSEFYRLTEEAATRLNQIRQNGGKIVAVGTTSIRTLETIGTKFNGEIKADSGWTDIFITPGYEFKVVEAFSTNFHLPKSTLVMLVSAFAGRELTLSAYQHAIEERYRFFSFGDAMFVK

SEQ ID NO: 66324 - protein, 343 aa, Enterococcus villorum
  REGION 1..343: note = tr|A0A1V8YX59|A0A1V8YX59_9ENTE S-adenosylmethionine:tRNA ribosyltransferase-isomerase; OS = Enterococcus villorum OX=112904 GN=queA PE=3 SV=1
MLTTEDFDFDLPEELIAQTPLKDRDQSRLLVVDRTTGEMKDKHFHDILEELHPGDALVMNNTRVLPARLYGEKTETGAHLEVLLLTNTEGDTWETLIKPAKRAKVGTRISFGDGRLQAVVKEELDHGGRIIAFEYEGIFLEILESLGEMPLPPYIKERLEDPDRYQTVYAKENGSAAAPTAGLHFTKELLAEIEAKGVELVYLTLHVGLGTFRPVSVDKIEEHQMHSEFYRLTEEAATRLNQIRQNGGKIVAVGTTSIRTLETIGTKFNGEIKADSGWTDIFITPGYEFKVVEAFSTNFHLPKSTLVMLVSAFAGRELTLSAYQHAIEERYRFFSFGDAMFVK

SEQ ID NO: 66325 - protein, 365 aa, Enterorhabdus caecimuris
  REGION 1..365: note = tr|A0A4S4G3Q9|A0A4S4G3Q9_9ACTN S-adenosylmethionine:tRNA ribosyltransferase-isomerase; OS = Enterorhabdus caecimuris OX=671266 GN=queA PE=3 SV=1
MRTDDFDYALPDELIAQEPAAERDRCRLLVMDRATGAVEDRVFRDIVDYLRPGDLLVANETRVMPARLLGAKRGTGGAAEVFLLRECAGPEPRTNRVAFWEVLVRPGKRLKPGAGAVVDFADGAGNVVLSAEIIDWARNGQRGERVARLITPLPSLDEALHAVGHTPLPPYIKDYAGDEELYQTVYSRRESSAAAPTAGLHFTSQLIERLREQGVGWATVELEVGLDTFRIVDEEDPEKHVIHTEFYTVPQATVDAVAAARAAGGRVIAVGTTSVRSLESAWDPAANGGAGALAPRDREATSLYILPGYRFHVVDALITNFHVPRSTLMMLVSAFSTRESVMAAYEHAVAERYRLLSFGDAMFLH

SEQ ID NO: 66326 - protein, 365 aa, Enterorhabdus caecimuris
  REGION 1..365: note = tr|R9L316|R9L316_9ACTN S-adenosylmethionine:tRNA ribosyltransferase-isomerase OS=Enterorhabdus caecimuris B7 OX=1235794 GN=queA PE=3 SV=1
MRTDDFDYALPDELIAQEPAAERDRCRLLVMDRATGEVEDRIFRDIVDYLRPGDLLVANETRVMPARLLGAKRGTGGAAEVFLLRECAGPEPRTNRVAFWEVLVRPGKRLKPGAGAVVDFADGAGNVVLSAEIIDWARNGQRGERVARLITPLPSLDEALHAVGHTPLPPYIKDYAGDEELYQTVYSRRESSAAAPTAGLHFTSQLIERLCDQGVGWATVELEVGLDTFRIVDEEDPEKHVIHTEFYTVPQATVDAVAAARAAGGRVIAVGTTSVRSLESAWDSAANGGAGALVPRDREATSLYILPGYRFHVVDALITNFHVPRSTLMMLVSAFSTRESVMAAYEHAVAERYRLLSFGDAMFLH

SEQ ID NO: 66327 - protein, 365 aa, Enterorhabdus sp.
  REGION 1..365: note = tr|A0A4S2FYE5|A0A4S2FYE5_9ACTN S-adenosylmethionine:tRNA ribosyltransferase-isomerase; OS = Enterorhabdus sp. NM05_H27 OX=2516956 GN=queA PE=3 SV=1
MRTDDFDYALPDELIAQEPAAERDRCRLLVMDRATGAVEDRIFRDIADYLRPGDLLVANETRVMPARLLGAKRGTGGAAEVFLLRECAGPEPRTNRVAFWEVLVRPGKRLKPGAGAVVDFADGAGNVVLSAEIIDWTRSGQRGERVARLTTPLPSLDEALHAVGHTPLPPYIKDYAGDEELYQTVYSRRESSAAAPTAGLHFTPQLIERLRDQGVGWATVELEVGLDTFRIVDEEDPEKHVIHTEFYTVPQATVDAVAAARAAGGRVIAVGTTSVRSLESAWDPAANGGAGALVSRDREATSLYILPGYRFHVVDALITNFHVPRSTLMMLVSAFSTRESVMAAYEHAVAERYRLLSFGDAMFLH

SEQ ID NO: 66328 - protein, 368 aa, unidentified
  source 1..368: note = Enteroscipio rubneri
  REGION 1..368: note = tr|A0A2K2UFD0|A0A2K2UFD0_9ACTN S-adenosylmethionine:tRNA ribosyltransferase-isomerase; OS = Enteroscipio rubneri OX=2070686 GN=queA PE=3 SV=1
MKTSDFDYDLPEELIAQKPAAERDGCRMLVMDRATGALEDRIFRDIADYLRPGDLLIANETRVMPARLLGAKRGTGGAAEVFLLRQHGTPLENRSALWEVLVRPGKRLKPGTGAVVDFTDAAGNVALSAEIVDWAAPSSQSASTDGAQKGERIARLTTQLPSLDEALHAVGHTPLPPYIKDYSGDEELYQTVYSRRESSAAAPTAGLHFTPELIASLRERHVRWETVELEVGLDTFRIVDEDDPERHVIHTEYYTVPQRTVDAVTETRERGGRVIAVGTTSVRSLESAWDAESGVLASREREATSLYILPGYQFHVVDALVTNFHVPRSTLMMLVSAFSTRERIMAAYRHAVEERYRMLSFGDAMFIR

SEQ ID NO: 66329 - protein, 351 aa, Enterovibrio nigricans
  REGION 1..351: note = tr|A0A1T4US91|A0A1T4US91_9GAMM S-adenosylmethionine:tRNA ribosyltransferase-isomerase; OS = Enterovibrio nigricans DSM 22720 OX=1121868 GN=queA; PE = 3 SV=1
MQVSDFDFDLPDALIARYPQPNRTASRLLQLTGNTGELHHKNFTDILDLVQPGDLMVFNNTRVIPARVYGRKASGGKIEVLVERMLDDKSILAHVRASKPPKPGTQLFLGENDEFEAEMVARHDALFEIHFSDEQAVLDILNQVGHMPLPPYIDRPDEDSDKERYQTVYNKKPGAVAAPTAGLHFDEGILATLKEKGVETAFVTLHVGAGTFQSVRVDDINDHVMHAEYAEVPQEVVDAVLAAKARGNRVIAVGTTSVRSLESAAQHAKQQGTELKPFFDDTQIFIYPGYEWQLVDALVTNFHLPESTLIMLVSSFAGYDNVMNAYKEAIENAYRFFSYGDAMFVTRKTEV

SEQ ID NO: 66330 - protein, 351 aa, Enterovibrio norvegicus
  REGION 1..351: note = tr|A0A2N7LHQ9|A0A2N7LHQ9_9GAMM S-adenosylmethionine:tRNA ribosyltransferase-isomerase; OS = Enterovibrio norvegicus OX=188144 GN=queA PE=3 SV=1
MQVSDFHFDLPDSLIARYPQPDRTSSRLLQLDGNSGELSHKQFTDVLDLVEPGDLMVFNNTRVIPARVYGRKASGGKIEMLVERMLDEKTILAHVRASKPPKPGTQLFLGENDEFEAEMVARHDALFEIRFSGEQAVLDILNQVGHMPLPPYIDRPDEDSDKERYQTVYNEKPGAVAAPTAGLHFDEKMLAALKAKGVEMAFVTLHVGAGTFQPVRVDSIDDHIMHAEYAEVSQEVVDAVNAAKARGNRVIAVGTTSVRSLESAAQSAKEQGTELKPFFQDTKIFIYPGYEWNLIDALVTNFHLPESTLIMLVSSFAGYDHVMNAYQQAVENDYRFFSYGDAMFVTRQTAL

SEQ ID NO: 66331 - protein, 351 aa, Enterovibrio norvegicus
  REGION 1..351: note = tr|A0A4U1XMG8|A0A4U1XMG8_9GAMM S-adenosylmethionine:tRNA ribosyltransferase-isomerase; OS = Enterovibrio norvegicus OX=188144 GN=queA PE=3 SV=1
MQVSDFHFDLPDSLIARYPQPDRTSSRLLQLDGNSGELSHKQFTDVLDLVEPGDLMVFNNTRVIPARVYGRKASGGKIEMLVERMLDEKTILAHVRASKPPKPGTQLFLGENDEFEAEMVARHDALFEIRFSGEQAVLDILNQVGHMPLPPYIDRPDEDSDKERYQTVYNEKPGAVAAPTAGLHFDENMLAALKAKGVEMAFVTLHVGAGTFQPVRVDSIDDHVMHAEYAEVSQEVVDAVNAAKARGNRVIAVGTTSVRSLESAAQSAKEQGSELKPFFQDTKIFIYPGYEWNLVDALVTNFHLPESTLIMLVSSFAGYDHVMNAYQQAVENEYRFFSYGDAMFVTRQTAL

SEQ ID NO: 66332 - protein, 350 aa, unidentified
  source 1..350: note = Enterovibrio pacificus
  REGION 1..350: note = tr|A0A1C3EGE8|A0A1C3EGE8_9GAMM S-adenosylmethionine:tRNA ribosyltransferase-isomerase; OS = Enterovibrio pacificus OX=1080227 GN=queA PE=3 SV=1
MQVTDFHFDLPDELIARYPQPDRTASRLLQLNGNSGALNHGQFTDILELVEPGDLMVFNNTRVIPARVFGRKASGGKLEVLVERVLDEHSILAHVRSSKAPKPGTTMFLGEKDDFEAEMVARHDALFEIRFKGDRAVLDILNEVGHMPLPPYIDRPDEDSDKERYQTVYNEKPGAVAAPTAGLHFDDAILTRLKEKGVETAFVTLHVGAGTFQPVRVDNILEHVMHAEYAEVSQEVVDTIAATRARGGRVIAVGTTSVRSLESAAQRAKEQGTELQPFFDDTQIFIYPGYEWQLVDCLVTNFHLPESTLIMLVSSFAGYDNVMKAYREAVDSQYRFFSYGDAMFVTRKNG

SEQ ID NO: 66333 - protein, 350 aa, Enterovibrio sp.
  REGION 1..350: note = tr|A0A4Q0YQ65|A0A4Q0YQ65_9GAMM S-adenosylmethionine:tRNA ribosyltransferase-isomerase; OS = Enterovibrio sp. CAIM 600 OX=1278244 GN=queA PE=3 SV=1
MQVSDFHFDLPDELIARYPQPDRTASRLLQLNGNDGTLNHGQFTDILELVQPGDLMVFNNTRVIPARVFGRKASGGKLEVLVERVLDERTILAHVRSSKAPKPGTELFLGENDEFAAEMVARHDALFEIRFKGDMAVLEILNEVGHMPLPPYIDRPDEDSDKERYQTVYNEKPGAVAAPTAGLHFDDSILAALKEKGIDTAFVTLHVGAGTFQPVRVDNILDHVMHAEYAEVPQDVVDAITATRARGGRVIAVGTTSVRSLESAAQKAKEQGTELQPFFDDTQIFIYPGYQWQLVDCLVTNFHLPESTLIMLVSSFAGYDHVMKAYKEAVSEQYRFFSYGDAMFVTRKDA

SEQ ID NO: 66334 - protein, 360 aa, unidentified
  source 1..360: note = Enterovirga rhinocerotis
  REGION 1..360: note = tr|A0A4R7BIY9|A0A4R7BIY9_9RHIZ S-adenosylmethionine:tRNA ribosyltransferase-isomerase; OS = Enterovirga rhinocerotis OX=1339210 GN=queA PE=3 SV=1
MRVDLFDFDLPEDRIALRPAVPREAARLLVVPPAGALGHRTIADLPGLLRAGDALVLNDTRVIPARLRGLRIRGENAARVEIMLHRRLAPDTWLAFARPAKKLAPGDRIRFGDERESTACLLASLDAEVEARGEGGEVRLRFAFQGPALDEAIAAHGEMPLPPYIAGKRPADERDLVDYQTVYAAEAGAVAAPTAGLHLSAGMLAGLAERGIAQHRVTLHVGAGTFLPVSADDTTDHRMHPEWGTVSAETAAALNETRARGGRVVAIGTTSLRLLESAADPDGTIRAFSDETSIFITPGYRFRAVDVLMTNFHLPRSTLFMLVSAFAGLDRMRAAYAEAIAQGYRFYSYGDACLLERAPA

SEQ ID NO: 66335 - protein, 367 aa, unidentified
  source 1..367: note = Eoetvoesia caeni
  REGION 1..367: note = tr|A0A366HCZ8|A0A366HCZ8_9BURK S-adenosylmethionine:tRNA ribosyltransferase-isomerase; OS = Eoetvoesia caeni OX=645616 GN=queA PE=3 SV=1
MAAPGAKAEYPDQPNNTLSLLRVNSSLLLSQFDYHLPAELIAQSPPERRGASRLLHLDSAGGLHDKLFADLPSLLNPGDLLVFNNTRVIKARLHGQKDTGGKVEILVERITQPNIALVHIRASKSPKTGSRIHIDDAFWVDMLGRDGELFELQFPGRVLDLLEKHGSTPLPPYIEHEAGQEDDERYQTVYAQAPGAVAAPTAGLHFDQPMLDALAAAGIQETFVTLHVGAGTFQPVRVEDLSEHHMHSERYSVSEQTLALIRATRAAGKRVIAVGTTSVRALESAAQQDGQPGPLEGDTRLFITPGYKFRYVDALITNFHLPKSTLLMLVSALAGMEPIQRAYAHAIQSRYRFFSYGDAMFIEPSRT

SEQ ID NO: 66336 - protein, 349 aa, unidentified
  source 1..349: note = Epibacterium mobile
  REGION 1..349: note = tr|A0A1B1A2H1|A0A1B1A2H1_9RHOB S-adenosylmethionine:tRNA ribosyltransferase-isomerase; OS = Epibacterium mobile F1926 OX=1265309 GN=queA PE=3 SV=1
MKLSDFDFDLPEDLIATRPAVPRSSARLLVAEQDRITDARVTDLLQWLNAGDRLVLNDTRVIPARLSGQRHRTSAQGPVSARIEVTLLEPQADGCWSGLLKPLKKIKIGETVRFSDVLSAELVDVVEGQGRLRFNLAGDDFDAALAEAGAMPLPPYIAAKRPADEQDKTDYQTVWARSSGAVAAPTASLHFDEPLLAALAAKGVEFTYVTLHVGAGTFLPVKVEDVTSHKMHAEWGQVTAKAAAEIAATKTAGKRVIPVGTTALRLIESAARDSGAIAPWEGETDIFIYPGFTFRVADALMTNFHLPKSTLMMLVSALMGQERMRSVYAHAVTERYRFFSYGDASLLIP

SEQ ID NO: 66337 - protein, 369 aa, unidentified
  source 1..369: note = Epibacterium mobile
  REGION 1..369: note = tr|A0A1H2ZTC1|A0A1H2ZTC1_9RHOB S-adenosylmethionine:tRNA ribosyltransferase-isomerase; OS = Epibacterium mobile OX=379347 GN=queA PE=3 SV=1
METRCDGPWTFAQARSIARAMKLSDFDFDLPEDLIATRPAVPRSSARLLVAEQDRITDARVTDLLQWLNAGDRLVLNDTRVIPARLSGQRHRTSAQGPVSARIEVTLLEPQADGCWSGLLKPLKKIKIGETVRFSDTLSAELVDVVEGQGRLRFNLAGDDFDSALAEAGAMPLPPYIAAKRPADEQDKTDYQTVWARSSGAVAAPTASLHFDEPLLAALAAKGVEFTYVTLHVGAGTFLPVKVEDVTSHKMHAEWGQVTAKAAAEIAATKTAGKRVIPVGTTALRLIESAARDSGAIAPWEGETDIFIYPGFIFRVADALMTNFHLPKSTLMMLVSALMGQERMRSVYAHAVTERYRFFSYGDASLLIP

SEQ ID NO: 66338 - protein, 350 aa, unidentified
  source 1..350: note = Epibacterium multivorans
  REGION 1..350: note = tr|A0A0P1GZ45|A0A0P1GZ45_9RHOB S-adenosylmethionine:tRNA ribosyltransferase-isomerase; OS = Epibacterium multivorans OX=928856 GN=queA PE=3 SV=1
MKLSDFDFDLPDTLIATRPAVPRTSARLLVAEGDAIHDARVGDLLDWLRPGDRLVLNDTKVIPARLSGQRHRDSAQGPVSAKIEVTLLEPQADGAWAALLKPLKKIKIGETVVFSDDLSAELVEIVDGQGRLQFNLSGDDFDAALNAAGAMPLPPYIAAKRAADEQDKTDYQTVWAKNSGAVAAPTASLHFDEPLLKALAEKGVDFTHVTLHVGAGTFLPVKVDDVTTHKMHAEWGRVSETAAAEIAATKAAGGRVIPVGTTALRLIESAARVGAIAPWEGETDIFIYPGFTFHVADALMTNFHLPKSTLLMLVSALMGQDEIRRVYDHAVRTGYRFFSYGDASLLLPKR

SEQ ID NO: 66339 - protein, 349 aa, unidentified
  source 1..349: note = Epibacterium scottomollicae
  REGION 1..349: note = tr|A0A2T1AGY0|A0A2T1AGY0_9RHOB S-adenosylmethionine:tRNA ribosyltransferase-isomerase; OS = Epibacterium scottomollicae OX=483013 GN=queA PE=3 SV=1
MKLSDFDFDLPDDLIATRPAVPRSSARLLVAEQDQITDARVTDLLQWLQPGDRLVLNDTRVIPARLSGQRHRDSAQGAVSARIEVTLLEPQADGCWGALLKPLKKIKVGETVVFSDQLSAELVEVVEGQGRLRFNLAGDDFDAALAEAGAMPLPPYIAAKRPADEQDKTDYQTVWARSTGAVAAPTASLHFDEALLAALAAKGVEFTYVTLHVGAGTFLPVKVEDVTSHKMHAEWGQVTVQAAAEIAATKAAGQRVIPVGTTALRLIESAARDSGAIAPWEGETDIFIYPGFTFRVADALMTNFHLPKSTLMMLVSALMGQERMRRVYDHAVTERYRFFSYGDASLLIP

SEQ ID NO: 66340 - protein, 351 aa, unidentified
  source 1..351: note = Epibacterium ulvae
  REGION 1..351: note = tr|A0A1G5RCY4|A0A1G5RCY4_9RHOB S-adenosylmethionine:tRNA ribosyltransferase-isomerase; OS = Epibacterium ulvae OX=1156985 GN=queA PE=3 SV=1
MKLSDFDFDLPETLIATRPATPRSSARLLVADGDVVHDESVQDLLSWLRPGDRLVLNDTKVIPARLSGFRHRNSAQGPVQARIEVTLLEPRADGCWTALLKPLKKIKTGEEIIFSEDLSAQLRGVEDGQGILQFNVTGADFDTALAEAGAMPLPPYIAAKRPADAQDKTDYQTVWAKNAGAVAAPTASLHFDQPLLDALAARGVGFTHVTLHVGAGTFLPVKVEDVTTHKMHAEWGRVSPEAAAEIAATKAAGGRVIPVGTTALRLIESAARNGTLTAWEGETDIFIYPGFTFHVTDALMTNFHLPKSTLLMLVSALMGQERMKAVYAHALSEEYRFFSYGDASLLIPETS

SEQ ID NO: 66341 - protein, 95 aa, unidentified
  source 1..95: note = Epsilonproteobacteria bacterium
  REGION 1..95: note = tr|A0A496XML3|A0A496XML3_9PROT S-adenosylmethionine:tRNA ribosyltransferase-isomerase (Fragment) OS=Epsilonproteobacteria bacterium OX=2026809; GN = DRQ89_10600 PE=3 SV =1
KNVFAVGTTSLRTLESSYQKEIDPDKVYETDIFLHPGKEVKSIKGLLTNFHLPKSSLLMLISCLIGRDEVLRIYKEAVDKKYRFFSYGDAMLILP

SEQ ID NO: 66342 - protein, 341 aa, unidentified
  source 1..341: note = Epsilonproteobacteria bacterium
  REGION 1..341: note = tr|A0A426W3P4|A0A426W3P4_9PROT S-adenosylmethionine:tRNA ribosyltransferase-isomerase; OS = Epsilonproteobacteria bacterium (ex Lamellibrachia satsuma) OX=2496635 GN=qu eA PE=3 SV=1
MPSSELLTQNYDYELPEGFIATAPVHPRDHAKLLVYDRKTDTVTHTTFKHLLDFLPKKCDIFLNDTRVIKARIFGKKKSGGKVELLFNKPIDAHHYLVLIRGKVQIGTELFFDDDLIATVTKLNIDGSREVSFKHKGKEIRFEELVLILDKIGHIPLPPYMQREDTKEDETDYQTLFAKNAGAVAAPTASLHFTPELFSALEQRHKTHKITLHVGAGTFKPVEVEKILDHPMHSEYFYISPEAARVLDSSMPILAIGTTVTRTVEYYTRTHKTEGECDLFLNPHNPPQRVTHLLTNFHLPKSTLIMLVSAFIGREKTLQLYKEAIEKKYRFFSYGDAMLIL

SEQ ID NO: 66343 - protein, 341 aa, unidentified
  source 1..341: note = Epulopiscium sp.
  REGION 1..341: note = tr|A0A1V2M088|A0A1V2M088_9FIRM S-adenosylmethionine:tRNA ribosyltransferase-isomerase; OS = Epulopiscium sp. SCG-B11WGA-EpuloA1 OX=1710701 GN=queA; PE = 3 SV=1
MKTTDFYFDLPQYLIAQTPLEDRTSSRLMVINKKNGEIEHERFFNIINYLNEGDCLVLNDTRVIPARLFGEKQDTGGKVELLLLNRFDKTRWEVLVKPGKKAREGDIIIFGNGILSGKIETIIDDGKRIINFEYDGIWEEILDKLGEMPLPPYIYEKLENKERYQTVYSKYSGSAAAPTAGLHFTEKLLEKIKEKGVKIAYVTLHVGLGTFRPVKVEDITMHKMHSEFYIMTQDNADIINNTKNSGGRIISVGTTSARTIECCADKNGYVVAGEGWTDIFIYPGYRFKCADGIITNFHLPESTLIMLVSAFCTKEITLNAYKTAIENEYRFFSFGDAMLII

SEQ ID NO: 66344 - protein, 340 aa, unidentified
  source 1..340: note = Epulopiscium sp.
  REGION 1..340: note = tr|A0A1V2M717|A0A1V2M717_9FIRM S-adenosylmethionine:tRNA ribosyltransferase-isomerase; OS = Epulopiscium sp. SCG-B10WGA-EpuloA2 OX=1712379 GN=queA; PE = 3 SV=1
MQTSDFYFKLPEDLIAQTPLKDRTSSKLMVLNRANNTIFHKHFCDIIDYLNEGDCLVLNDTKVIPARLFGTRQTGGKIEILLLKRLEDNCFEVLVKPGKNAKIGDILTFGNGILTGEVIDIIDDGKRILKFSYNGIWEQILDELGHMPLPPYITEKLEDKNRYQTVYAKNDGSAAAPTAGLHFSQDLLEKIEQKGVKIAYVTLHVGLGTFRPVKVENIAEHKMHSEFYQLDEQNANIINTAKENGKNIISVGTTSTRVLESIADKFGKVKSASGETDIFIAPGYKFKIVDKLITNFHLPESTLIMLVSALYNRDNILEAYKTAVEQEYRFFSFGDAMFIQ

SEQ ID NO: 66345 - protein, 365 aa, unidentified
  source 1..365: note = Ereboglobus luteus
  REGION 1..365: note = tr|A0A2U8E5S4|A0A2U8E5S4_9BACT S-adenosylmethionine:tRNA ribosyltransferase-isomerase; OS = Ereboglobus luteus OX=1796921 GN=queA PE=3 SV=1
MPLSTDLFDYQLPPRLIAQTPAGRRDASRLLVVDRTARTLTHATFADLPRFLRPTDTLFRNNAAVLPARLRAQRPTGGAVECFLLRPEPARGENIWWCLLRPGKKLPVGATFAHGTEFTGHILEKNSEGGALIRFETAGNESIIAVANRLGEIPLPPYINRDAAHNSPDTRAADRERYQTVYAARDRQVAVAAPTAGLHFTPELLARLGADGVAMRDITLHVGLGTFKPIETATIEEHPIHRELYEIPASTQSALLSPRGRRVAVGTTSVRTIEDFFRKHSAGTTAPTSAFADEAALYIYPPSTFAGVDALITNFHQPRSTLLCLVAAFLSPGTSDGIAWIREIYAEAIAKEYRFFSYGDAMLIV

SEQ ID NO: 66346 - protein, 344 aa, Eremococcus coleocola
  REGION 1..344: note = tr|E4KLX0|E4KLX0_9LACT S-adenosylmethionine:tRNA ribosyltransferase-isomerase OS=Eremococcus coleocola ACS-139-V-Col8 OX=908337 GN=queA PE=3 SV=1
MTLSTKDFDYELPEELIAQTPLKDRSSSRLLVIDRHTDQLMDTDFKHILDYLQAGDGLVVNETRVIPARIIGTKPETGGHLEVLLLHNREGNEWETLVKPARRAKVGTKISFGQGQLTAIVKEELDHGGRIIEFDYQGVFLEILEELGQMPLPPYIKEKLNDPDRYQTVYAKENGSAAAPTAGLHFTPELLEAAKAKGIEIIPLVLHVGLGTFRPVSVDNIEDHDMHAEFYQLSDQSAQAINRIKAAGGKITAVGTTSVRTLETISHKFEGKLVADSGWTSIFITPGFDYQVVDHLITNFHLPQSTLVMLVSAFYDREKILAAYDHAVKEKYRFFSFGDAMLLL

SEQ ID NO: 66347 - protein, 356 aa, Erwinia amylovora
  REGION 1..356: note = tr|D4HXY8|D4HXY8_ERWAC S-adenosylmethionine:tRNA ribosyltransferase-isomerase OS=Erwinia amylovora (strain CFBP1430) OX=665029 GN=queA PE=3 SV=1
MRVADFTFELPESLIAHYPQAQRSGCRLLSLNGPDGALTHGVFTDLLHQLNPGDLLVFNNTRVIPARIFGRKASGGKIEVLVERMLDEKRVLAHVRSSKAPKPGSELLLGDDESVQAIMVARHDTLFEIEFNDARPVLDILNSIGHMPLPPYIDRPDEDADRELYQTVYSQKPGAVAAPTAGLHFDEPLLEALREKGIETVFVTLHVGAGTFQPVRVDTIEDHIMHAEYAEVPQDVVDAVLACKARGKRVIAVGTTSVRSLESAAQAAENALIAPFFGDTKIFIYPGYHYQVIDALVTNFHLPESTLIMLVSAFAGYQHTMHAYQQAVAQRYRFFSYGDAMFITRNPQAFAEIPGR

SEQ ID NO: 66348 - protein, 356 aa, Erwinia amylovora; identical to SEQ ID NO: 66347
  REGION 1..356: note = tr|E5B2U3|E5B2U3_ERWAM S-adenosylmethionine:tRNA ribosyltransferase-isomerase OS=Erwinia amylovora ATCC BAA-2158 OX=889211 GN=queA PE=3 SV=1

SEQ ID NO: 66349 - protein, 356 aa, Erwinia aphidicola
  REGION 1..356: note = tr|A0A4R6PF31|A0A4R6PF31_ERWAP S-adenosylmethionine:tRNA ribosyltransferase-isomerase; OS = Erwinia aphidicola OX=68334 GN=queA PE=3 SV=1
MRVADFTFELPESLIAHYPQAQRSGCRLLSLNGPDGALSHGVFTDLLHKLNPGDLLVFNNTRVIPARIFGRKASGGKIEVLIERMLDDTRVLAHVRSSKAPKPGTALLLGDDESVQATMVARHDALFEIEFNDARPVLDILNAIGHMPLPPYIDRPDEDADRELYQTVYSQKPGAVAAPTAGLHFDEPLLEALREKGIETAFVTLHVGAGTFQPVRVDSIKDHIMHAEYAEVPQEVVDAVLACKARGNKVIAVGTTSVRSLESAAQAAEDALIAPFFGDTKIFIYPGYHYQVIDALVTNFHLPESTLIMLVSAFAGYRHTMHAYQQAVAEQYRFFSYGDAMFITRNPEAYAEIPGQ

SEQ ID NO: 66350 - protein, 356 aa, Erwinia billingiae
  REGION 1..356: note = tr|D8MNV0|D8MNV0_ERWBE S-adenosylmethionine:tRNA ribosyltransferase-isomerase OS=Erwinia billingiae (strain Eb661) OX=634500 GN=queA PE=3 SV=1
MRVADFSFELPESLIAHYPQAQRSGCRLLSLNGPDGELSHGIFTDLLDKLTPGDLLVFNNTRVIPARVFGRKVSGGKIEVLVERMLDDHRVLAHVRASKAPKPGAELLLGDDESVKATMVARHDALFELQFDDERAVLDILNAVGHMPLPPYIDRPDEDADRELYQTVYSQRPGAVAAPTAGLHFDQPMLDALREKGIETAFVTLHVGAGTFQPVRVDSIEDHIMHAEYAEVPQDVVDAVLACKARGNRVVAVGTTSVRSLESAAQAAQDALIAPFFDDTKIFIFPGYQYQVIDALVTNFHLPESTLIMLVSAFAGYRNTMHAYQQAVAEQYRFFSYGDAMFITRNPEAVTEQVGE

SEQ ID NO: 66351 - protein, 356 aa, Erwinia billingiae
  REGION 1..356: note = tr|A0A5J6LZ62|A0A5J6LZ62_9GAMM tRNA preQ1(34) S-adenosylmethionine ribosyltransferase-isomerase QueA; OS = Erwinia billingiae OX=182337 GN=queA PE=4 SV=1
MRVADFSFELPESLIAHYPQAQRSGCRLLSLNGPDGELSHGIFTDLLDKLTPGDLLVFNNTRVIPARVFGRKVSGGKIEVLVERMLDDHRVLAHVRASKAPKPGAELLLGDDESVKATMVARHDALFELQFDDERAVLDILNAVGHMPLPPYIDRPDEDADRELYQTVYSQRPGAVAAPTAGLHFDQPMLDALREKGIETAFVTLHVGAGTFQPVRVDSIEDHIMHAEYAEVPQDVVDAVLACKARGNRVVAVGTTSVRSLESAAQAAQDALIAPFFDDTKIFIFPGYQYQVIDALVTNFHLPESTLIMLVSAFAGYRNTMHAYQQAVAEQYRFFSYGDAMFITRNPEAVSEQVGE

SEQ ID NO: 66352 - protein, 356 aa, unidentified
  source 1..356: note = Erwinia citreus
  REGION 1..356: note = tr|A0A358L260|A0A358L260_ERWCI S-adenosylmethionine:tRNA ribosyltransferase-isomerase; OS = Erwinia citreus OX=558 GN=queA PE=3 SV=1
MRVADFSFELPESLIAHYPQAQRSGCRLLCLNGPDGELTHGVFTDLLDLLNPGDLLVFNNTRVIPARIFGRKASGGKIEVLVERMLDEHRVLAHIRASKAPKAGAELLLGDDESVKATMVARHDALFELHFDDERAVLDILDAVGHMPLPPYIDRPDEDADRELYQTVYSERPGAVAAPTAGLHFDEPMLEALRAKGIETAFVTLHVGAGTFQPVRVDSIEDHIMHAEYAEVPQEVVDAVLACKARGNRVVAVGTTSVRSLESAAAAAKDALIAPFFDDTKIFIYPGYEYQVIDALVTNFHLPESTLIMLVSAFAGYRHTMHAYQQAVAEQYRFFSYGDAMFITRNPQAINEQVGK

SEQ ID NO: 66353 - protein, 356 aa, unidentified
  source 1..356: note = Erwinia gerundensis
  REGION 1..356: note = tr|A0A0U5LLH4|A0A0U5LLH4_9GAMM S-adenosylmethionine:tRNA ribosyltransferase-isomerase; OS = Erwinia gerundensis OX=1619313 GN=queA PE=3 SV=1
MRVADFAFDLPDSLIARYPQTERSGCRLLSLDGPSGELTHGRFTDVLDKLNRGDLLVFNNTRVIPARVFGRKASGGKIEVLVERMLDDKRVLAHVRASKAPKPGAALLLGEDESVKATMVARHDALFEIVFEDDRAVLDILNAVGHMPLPPYIDRPDEASDRELYQTVYSERPGAVAAPTAGLHFDEPLLAALREKGVEMAFVTLHVGAGTFQPVRVDTIEEHIMHAEYAEVPQEVVDAVLACKARGNKVVAVGTTSVRSLESAAQASEQALIAPFFDDTKIFIYPGYRYQVIDALITNFHLPESTLIMLVSAFAGYRHTMHAYQQAVAEAYRFFSYGDAMYITMNPQAIDEKVGD

SEQ ID NO: 66354 - protein, 356 aa, unidentified
  source 1..356: note = Erwinia iniecta
  REGION 1..356: note = tr|A0A0L7T3N6|A0A0L7T3N6_9GAMM S-adenosylmethionine:tRNA ribosyltransferase-isomerase; OS = Erwinia iniecta OX=1560201 GN=queA PE=3 SV=1
MRVADFSFELPESLIAHYPQPQRSGCRLLSLDGPSGELTHGVFTDLLDKLEAGDLLVFNNTRVIPARVFGRKASGGKIEVLVERMLDETRVLAHVRSSKSPKPGAELLLGEDESVKATMVARHDALFEIEFHDERAVLDILNAVGHMPLPPYIDRPDEDADRELYQTVYSQRPGAVAAPTAGLHFDEPLLAALREKGIEMAFVTLHVGAGTFQPVRVETIEDHIMHAEYAEVPQDVVDAVLACKARGKRVVAVGTTSVRSLESAAKASQDALIAPFFDDTKIFIYPGYHYQVVDALVTNFHLPESTLIMLVSAFAGYRHTMQAYQQAVAEQYRFFSYGDAMFISRNPQAADEVVGA

SEQ ID NO: 66355 - protein, 361 aa, Erwinia mallotivora
  REGION 1..361: note = tr|A0A014NT52|A0A014NT52_9GAMM S-adenosylmethionine:tRNA ribosyltransferase-isomerase; OS = Erwinia mallotivora OX=69222 GN=queA PE=3 SV=1
MRVADFSFELPESLIAHYPQAQRSGCRLLSLNGPDGELTHGVFTDLLDKLNAGDLLVFNNTRVIPARVFGRKVSGGRIEVLVERMLDDHRVLAHVRASKAPKPGAELLLGDDESVRATMVARHDALFELRFDDERAVLDILNAVGHMPLPPYIDRPDEEADRELYQTVYSQRPGAVAAPTAGLHFDQPLLDALRDKGVETAFVTLHVGAGTFQPVRVESIEDHIMHAEYAEVPQEVVDAVLACKARGNRVVAVGTTSVRSLESAAQAAGDALIAPFFDDTKIFIYPGYQYQVIDALVTNFHLPESTLIMLVSAFAGYRHTLRAYQQAVAEQYRFFSYGDAMFITHNPQAVNEKVGVHNNGC

SEQ ID NO: 66356 - protein, 356 aa, Erwinia persicina
  REGION 1..356: note = tr|A0A3S7TGB6|A0A3S7TGB6_9GAMM S-adenosylmethionine:tRNA ribosyltransferase-isomerase; OS = Erwinia persicina OX=55211 GN=queA PE=3 SV=1
MRVADFNFELPESLIAHYPQAQRSGCRLLSLNGPDGELTHGVFTDLLDKLNPGDLLVFNNTRVIPARIFGRKASGGKIEVLIERMLDDKRVLAHVRASKAPKPGSELLLGDEENVSATMQARHDALFEIEFHDPRPVLDILNDIGHMPLPPYIDRPDEDADRELYQTVYSQKPGAVAAPTAGLHFDEPLLAALREKGVETAFVTLHVGAGTFQPVRVDTIEDHIMHAEYAEVPQDVVDAVLACKARGNRVIAVGTTSVRSLESAAQASRDALIAPFFGDTSIFIYPGYHYQIIDVLVTNFHLPESTLIMLVSAFAGYQHTMHAYQQAVAEKYRFFSYGDAMFITRNPQAVSEIPGQ

SEQ ID NO: 66357 - protein, 356 aa, Erwinia piriflorinigrans
  REGION 1..356: note = tr|V5Z635|V5Z635_9GAMM S-adenosylmethionine:tRNA ribosyltransferase-isomerase OS=Erwinia piriflorinigrans CFBP 5888 OX=1161919 GN=queA PE=3 SV=1
MRVADFAFELPESLIAHYPQAQRSGCRLLSLNGSDGTLTHGVFTDLLNKLNPGDLLVFNNTRVIPARIFGRKASGGKIEVLVERMLDEKRVLAHVRSSKAPKPGSDLLLGDDESVQATMLARHDTLFEIEFNDARPVLDILNSIGHMPLPPYIDRPDEDADRELYQTVYSQKPGAVAAPTAGLHFDEPLLEALREKGIETAFVTLHVGAGTFQPVRVDTIEEHIMHAEYAEVPEDVVDAVLACKARGNRVIAVGTTSVRSLESAAQAAENALIAPFFGDTKIFIYPGYHYQVIDALVTNFHLPESTLIMLVSAFAGYKHTMHAYQQAVAEQYRFFSYGDAMFITRNPQAFSEVPGQ

SEQ ID NO: 66358 - protein, 363 aa, Erwinia psidii
  REGION 1..363: note = tr|A0A3N6TWS8|A0A3N6TWS8_9GAMM S-adenosylmethionine:tRNA ribosyltransferase-isomerase; OS = Erwinia psidii OX=69224 GN=queA PE=3 SV=1
MRVADFSFELPESLIAHYPQAQRSGCRLLSLNGADGELTHGVFTDLLDFLTPGDLLVFNNTRVIPARVFGRKVSGGKIEVLVERVLDDCRVLAHVRASKAPKPGSELLLGDDESVKATMVARHDALFELRFDDQRAVLDILNAVGHMPLPPYIDRPDEASDRELYQTVYSQRPGAVAAPTAGLHFDQPLLDALRDKGIETAFVTLHVGAGTFQPVRVDSIEDHIMHAEYAEVPQDVVEAVLACKARGNRVVAVGTTSVRSLESAAQAAGEALIAPFFGDTKIFIYPGYRYQVIDALVTNFHLPESTLIMLVSAFAGYRNTMRAYRQAVAERYRFFSYGDAMFITRNPDAVNEPVGTSLSARHE

SEQ ID NO: 66359 - protein, 358 aa, Erwinia pyrifoliae
  REGION 1..358: note = tr|D2T4P0|D2T4P0_ERWP6 S-adenosylmethionine:tRNA ribosyltransferase-isomerase OS=Erwinia pyrifoliae (strain DSM 12163 / CIP 106111 / Ep16/96) OX=644651 GN=queA; PE = 3SV=1
MTMRVADFTFKLPESLIAHYPQTQRSGCRLLSLNGPDGALTHGVFTDLLHKLNPGDLLVFNNTRVIPARIFGRKVSGGKIEVLVERMLDEKRVLAHVRSSKAPRPGSELLLGDDENVQATMLARHDALFEIEFNDARPVLDILNSIGHMPLPPYIDRPDEDADRELYQTVYSQKPGAVAAPTAGLHFDEPLLEALREKGIETAFVTLHVGAGTFQPVRVDTIEEHIMHAEYAEVPQDVVDAVLACKARGNRVIAVGTTSVRSLESAAQVAGNDLIAPFFGDTKIFIYPGYHYQVIDALVTNFHLPESTLIMLVSAFAGYQNTMHAYQQAVAEQYRFFSYGDAMFITRNPQAFAEIPGQ

SEQ ID NO: 66360 - protein, 358 aa, Erwinia rhapontici
  REGION 1..358: note = tr|A0A4R7GI12|A0A4R7GI12_ERWRD S-adenosylmethionine:tRNA ribosyltransferase-isomerase; OS = Erwinia rhapontici OX=55212 GN=queA PE=3 SV=1
MTMRVADFTFELPESLIAHYPQAQRSGCRLLSLNGPDGELTHGVFTDLLDKLNPGDLLVFNNTRVIPARIFGRKASGGKIEVLIERMLDDKRVLAHVRSSKAPKPGTELLLGDAENVQATMVARHDALFEIEFHDERPVLDILNAIGHMPLPPYIDRPDEDADRELYQTVYSQKPGAVAAPTAGLHFDEPLLAALREKGIETAFVTLHVGAGTFQPVRVDTIEDHIMHAEYAEVSQDVVDAVLACKARGNRVIAVGTTSVRSLESAAQAAQDALIAPFFGDTKIFIYPGYHYQVIDVLVTNFHLPESTLIMLVSAFAGYQHTMQAYQQAVAEKYRFFSYGDAMFITRNPEAYAEIPGQ

SEQ ID NO: 66361 - protein, 356 aa, Erwinia sp.
  REGION 1..356: note = tr|A0A427KA90|A0A427KA90_9GAMM S-adenosylmethionine:tRNA ribosyltransferase-isomerase; OS = Erwinia sp. 198 OX=2022746 GN=queA PE=3 SV=1
MRVADFSFELPESLIAHYPQAQRSGCRLLCLNGPDGALTHGVFTDLLDLLNPGDLLVFNNTRVIPARIFGRKASGGKIEVLVERMLDEHRVLAHIRASKAPKAGAELLLGDDESVKATMVARHDALFELHFDDERAVLDILDAVGHMPLPPYIDRPDEDADRELYQTVYSERPGAVAAPTAGLHFDEPMLEALRAKGIETAFVTLHVGAGTFQPVRVDSIEDHIMHAEYAEVPQEVVDAVLACKARGNRVVAVGTTSVRSLESAAAAAKDALIAPFFDDTKIFIYPGYAYQVIDALVTNFHLPESTLIMLVSAFAGYRHTMHAYEQAVAEKYRFFSYGDAMFITRNPQAINEQVGK

SEQ ID NO: 66362 - protein, 359 aa, Erwinia sp.
  REGION 1..359: note = tr|A0A0Q4NHA1|A0A0Q4NHA1_9GAMM S-adenosylmethionine:tRNA ribosyltransferase-isomerase; OS = Erwinia sp. Leaf53 OX=1736225 GN=queA PE=3 SV=1
MRVADFAFELPESLIAHYPQAQRSGCRLLSLNGEDGALQHGVFTDLLDKLNPGDLLVFNNTRVIPARIFGRKASGGKIEVLVERMLDDKRVLAHVRSSKAPKPGSELLLGEDESVQATMTARHDALFEIEFNDNRPVLDILNAIGHMPLPPYIDRPDEDADRELYQTVYSQKPGAVAAPTAGLHFDEPLLAALREKGVESAFVTLHVGAGTFQPVRVDSIEDHIMHAEYAEVPQDVVDAVLACKARGNRVIAVGTTSVRSLESAAQAAGDALIAPFFGDTKIFIYPGYHYQVIDVLVTNFHLPESTLIMLVSAFAGYRNTMHAYRQAVAEQYRFFSYGDAMFITRNERAFSEIPGQPIS

SEQ ID NO: 66363 - protein, 355 aa, Erwinia tasmaniensis
  REGION 1..355: note = sp|B2VHQ4|QUEA_ERWT9 S-adenosylmethionine:tRNA ribosyltransferase-isomerase OS=Erwinia tasmaniensis (strain DSM 17950 / CIP 109463 / Et1/99) OX=465817 GN=queA; PE = 3 S V=1
MRVADFTFELPESLIAHYPQAERSGCRLLSLNGSDGALTHGVFTDLLHKLNPGDLLVFNNTRVIPARIFGRKASGGKIEVLVERMLDDTRVLAHVRSSKAPKPGSDLLLGDDESVQATMLARHDTLFEIEFNDARPVLDILNSIGHMPLPPYIDRPDEDADRELYQTVYSQKPGAVAAPTAGLHFDEPLLVALREKGIETAFVTLHVGAGTFQPVRVDTIEDHIMHAEYAEVPQDVVDAVLACKARGNRVIAVGTTSVRSLESAAQAAENTLIAPFFGDTKIFIYPGYHYQVIDALVTNFHLPESTLIMLVSAFAGYKHTMRAYQQAVAEQYRFFSYGDAMFITRNPQAFAEIPG

SEQ ID NO: 66364 - protein, 356 aa, Erwinia tracheiphila
  REGION 1..356: note = tr|A0A0M2KG04|A0A0M2KG04_9GAMM S-adenosylmethionine:tRNA ribosyltransferase-isomerase; OS = Erwinia tracheiphila OX=65700 GN=queA PE=3 SV=1
MRVADFSFELPDSLIAHYPQARRSACRLLSLNGPDGELTHGVFTDLLDFLNPGDLLVFNNTRVIPARVFGRKVSGGKIEVLVERVLDDHRVLAHARASRVPKPGAELLLGDDQSVKATMLARHDALFELCFDDKRSVLEILNAVGHMPLPPYIDRPDEEADRELYQTVYSQRPGAIAAPTAGLHFDQPLLDALRDKGIETAFVTLHVGAGTFQPVRVDSIEDHIMHAEYAEVPQEVVDAVLACKARGNRVVAVGTTSVRSLESAAQAAGSTLIAPFFDDTKIFIYPGYHYQVIDALVTNFHLPESTLIMLVSAFAGYRNTMRAYQQAVAEKYRFFSYGDAMFITRNPAAVNELGGK

SEQ ID NO: 66365 - protein, 356 aa, Erwinia tracheiphila
  REGION 1..356: note = tr|A0A345CZ03|A0A345CZ03_9GAMM S-adenosylmethionine:tRNA ribosyltransferase-isomerase; OS = Erwinia tracheiphila OX=65700 GN=queA PE=3 SV=1
MRVADFSFELPDSLIAHYPQARRSACRLLSLNGPDGELTHGVFTDLLDFLNPGDLLVFNNTRVIPARVFGRKVSGGKIEVLVERVLDDHRVLAHVRASRVPKPGAELLLGDDQSVKATMLARHDALFELCFDDKRSVLEILNAVGHMPLPPYIDRPDEEADRELYQTVYSQRPGAIAAPTAGLHFDQPLLDALRDKGIETAFVTLHVGAGTFQPVRVDSIEDHIMHAEYAEVPQEVVDAVLACKARGNRVVAVGTTSVRSLESAAQAAGSTLIAPFFDDTKIFIYPGYHYQVIDALVTNFHLPESTLIMLVSAFAGYRNTMRAYQQAVAEKYRFFSYGDAMFITRNPAAVNELGGN

SEQ ID NO: 66366 - protein, 356 aa, Erwinia typographi
  REGION 1..356: note = tr|A0A0A4AAT4|A0A0A4AAT4_9GAMM S-adenosylmethionine:tRNA ribosyltransferase-isomerase; OS = Erwinia typographi OX=371042 GN=queA PE=3 SV=1
MRVADFSFELPESLIAHYPQAQRSGCRLLSLNGPDGKLSHGIFTDLLDLLNPGDLLVFNNTRVIPARVFGRKVSGGKIEVLVERMLDDRRVLAHVRASKAPKPGAELLLGDDESVKATMVARHDALFELQFDDDRAVLDILNDVGHMPLPPYIDRPDEEADRELYQTVYSQRPGAVAAPTAGLHFDQPMLEALRAKGIESAFVTLHVGAGTFQPVRVENITDHIMHAEYAEVPQDVVDAVLACKARGNRVVAVGTTSVRSLESAAQAAQHALIAPFFDDTKIFIYPGYQYQVIDALVTNFHLPESTLIMLVSAFAGYRHTMQAYQQAVAAEYRFFSYGDAMFITLNPQAINEQVGK

SEQ ID NO: 66367 - protein, 356 aa, unidentified
  source 1..356: note = Erwiniaceae bacterium
  REGION 1..356: note = tr|A0A3D5MA53|A0A3D5MA53_9GAMM S-adenosylmethionine:tRNA ribosyltransferase-isomerase; OS = Erwiniaceae bacterium OX=2053552 GN=queA PE=3 SV=1
MRVADFSFELPESLIAHYPQPQRSGCRLLSLNGPDGALSHGVFTDVLDKLNPGDLLVFNNTRVIPARVYGRKASGGKIEMLVERMLDDKRVLAHVRASKAPKPGAALLFGDDESVRATMVARHDALFEIVFDDERSVLDILNAIGHMPLPPYIDRPDEEADRELYQTVYSQKPGAVAAPTAGLHFDEPLLAALREKGIEMAFVTLHVGAGTFQPVRVDSIEDHIMHSEYAEVPQEVVDAVLACKARGNRVVAVGTTSVRSLESAAQAAQDALIAPFFDDTQIFIYPGYHYQVIDALITNFHLPESTLIMLVSAFAGYRHTMNAYREAVAQQYRFFSYGDAMFITRNPQAPNEKVGV

SEQ ID NO: 66368 - protein, 341 aa, unidentified
  source 1..341: note = Erysipelatoclostridium ramosum
  REGION 1..341: note = tr|A0A3E3EG15|A0A3E3EG15_9FIRM S-adenosylmethionine:tRNA ribosyltransferase-isomerase; OS = Erysipelatoclostridium ramosum OX=1547 GN=queA PE=3 SV=1
MKISEFDFNLPEELIAQTPLDKRDTSRLMILNRNQQTIEHKHFYDIIDYLKPGDILVRNNTKVIPARLFGIKEETNGHVEVLLLKDQGNDMWECLVGNARIVKIDTIITFGDGLLKAQCVEIKEEGIRVFKMIYEGIFYEILDQLGTMPLPPYIKEKLDDQNRYQTVYAKIEGSAAAPTAGLHFTDEIIEKIKAKGIEILDVTLHVGLGTFRPVKVDDVLEHHMHSEYYMIEPDVADKLNQAKQNGQRIIAVGTTSTRTLEANMKKYGKFTSVHENTDIFIYPGYKYEAIDCLITNFHLPKSTLLMLISAFASKEFIFKAYQEAIDEKYRFFSFGDSMFIM

SEQ ID NO: 66369 - protein, 350 aa, unidentified
  source 1..350: note = Erysipelatoclostridium ramosum
  REGION 1..350: note = tr|B0N4F7|B0N4F7_9FIRM S-adenosylmethionine:tRNA ribosyltransferase-isomerase OS=Erysipelatoclostridium ramosum DSM 1402 OX=445974 GN=queA PE=3 SV=1
MTYIRGLFKMKISEFDFNLPEELIAQTPLDKRDTSRLMVLNRNQQTIEHKHFYDIIDYLKPGDILVRNNTKVIPARLFGIKEETNGHVEVLLLKDQGNDMWECLVGNARIVKIDTIITFGDGLLKAQCVEIKEEGIRVFKMIYEGIFYEILDQLGTMPLPPYIKEKLDDQNRYQTVYAKIEGSAAAPTAGLHFTDEIIEKIKAKGIEILDVTLHVGLGTFRPVKVDDVLEHHMHSEYYMIEPDVADKLNQAKQNGQRIIAVGTTSTRTLEANMKKYGKFTSVHENTDIFIYPGYKYEAIDCLITNFHLPKSTLLMLISAFASKEFIFKAYQEAIDEKYRFFSFGDSMFIM

SEQ ID NO: 66370 - protein, 341 aa, unidentified
  source 1..341: note = Erysipelatoclostridium sp.
  REGION 1..341: note = tr|A0A417C866|A0A417C866_9FIRM S-adenosylmethionine:tRNA ribosyltransferase-isomerase; OS = Erysipelatoclostridium sp. AM42-17 OX=2293102 GN=queA; PE = 3 SV=1
MKLSEFDFDLPEELIAQHPVKKRDTSRLMVVDRETGSIEHKHFYDIVDYLKPGDVLVRNNTKVIPARLFGIKEETNGHVEVLLLKELKKDTWECLCGNARIVKMNTVISFGEGLLKAKCIEIKDEGIRVFEMIYDGIFYEILDQLGTMPLPPYIKEKLADKDRYQTVYAKIEGSAAAPTAGLHFTDEINQKIIDKGVTILEVTLHVGLGTFRPVKVDNVLEHHMHSEYYMIEPDVADALNKAKAEGRRIIAVGTTSTRTLEANMQKYGKFTATHENTDIFIYPGYQYKAIDCLITNFHLPKSTLLMLISAFASKELIFKAYHEAIQEKYRFFSFGDSMFIK

SEQ ID NO: 66371 - protein, 341 aa, unidentified
  source 1..341: note = Erysipelatoclostridium sp.
  REGION 1..341: note = tr|A0A1Y4QP14|A0A1Y4QP14_9FIRM S-adenosylmethionine:tRNA ribosyltransferase-isomerase; OS = Erysipelatoclostridium sp. An15 OX=1965566 GN=queA PE=3; SV = 1
MKLSEFDFNLPEELIAQRPLDKRDTSRLMVLNREKQTIEHKHFYDIIDYLQPGDILVRNNTKVIPARLFGIKEETNGHVEVLLLKDLGDDTWECLVGNARIVKIDTVITFGEGLLKAKCIKIKDEGIRVFKMIYTGIFFEILDQLGTMPLPPYIKEKLNDQNRYQTVYAKIEGSAAAPTAGLHFTDEIIEKIKAKGIEILDVTLHVGLGTFRPVKVDDILDHHMHSEFYMIEPDVAKKLNQAKANGQRIIAVGTTSTRTLEANIKKYGKFTATHENTDIFIYPGYQYEAIDCLITNFHLPKSTLLMLISAFASKEFIFKAYQEAIDKKYRFFSFGDSMFII

SEQ ID NO: 66372 - protein, 350 aa, unidentified
  source 1..350: note = Erysipelothrix larvae
  REGION 1..350: note = tr|A0A120JTF6|A0A120JTF6_9FIRM S-adenosylmethionine:tRNA ribosyltransferase-isomerase; OS = Erysipelothrix larvae OX=1514105 GN=queA PE=3 SV=1
MNVNDFDFNLPEELIAQVPLKNRETSRLLVVAQDHLEDRHFYDIVDYLKSGDVLVVNNTKVIAARLFGIKEETGAHVELLILKFEGNRVECLVGNAKVVKLGTRLSFGEGRLIAVCTKIGEEGIRFFDLEYDGIFLEVLDELGQMPLPPYIHERLEDPNRYQTVYAKVDGSAAAPTAGLHFTPDLMDRIKDLGVSIAEVTLHVGLGTFRPVKVETVETHKMHEEHYMMSQETADLLNEAKAKGRRIIAVGTTSVRTLETILKKYGAFKACEGDSDIFIYPGYTFEGVDAIITNFHLPKSTLVMLVSAFAGKSVIEHAYQHAIDEKYRFFSFGDSMFLQEPAKGVCRKTIK

SEQ ID NO: 66373 - protein, 343 aa, Erysipelothrix rhusiopathiae
  REGION 1..343: note = tr|E7FYA4|E7FYA4_ERYRH S-adenosylmethionine:tRNA ribosyltransferase-isomerase OS=Erysipelothrix rhusiopathiae ATCC 19414 OX=525280 GN=queA PE=3 SV=1
MNVNDFDFDLPEELIAQTPAEKRSESRLLVVDGMNLEDKRFYNIIDYLNEGDVLVLNDTRVIAARLFGEKPETGAHVELLILKFEGKTAECLVGNAKVVKLGTELSFGDGQLKAICTHVGDEGLRNFDLIFDGIFLEILDELGQMPLPPYIHERLEDKERYQTVYSRVEGSAAAPTAGLHFTPELLDAIQAKGITIAPVTLHVGLGTFRPVKVDNVLEHKMHSEAYTMTQDTADILNTAKREGRRIIAVGTTSVRTLETVMSKYGTFKECQGNSEIFIYPGYEWKAVDAIITNFHLPKSTLIMLVSAFMGKEEIDHAYKHAVDSKYRFFSFGDSMFLKARNIK

SEQ ID NO: 66374 - protein, 343 aa, Erysipelothrix sp.
  REGION 1..343: note = tr|A0A3S5HK02|A0A3S5HK02_9FIRM S-adenosylmethionine:tRNA ribosyltransferase-isomerase; OS = Erysipelothrix sp. 15TAL0474 OX=2485784 GN=queA PE=3; SV = 1
MNVNDFDFDLPEELIAQTPAEKRSESRLLVVDGMNLEDKHFYNIIDYLNEGDVLVLNDTRVIAARLFGEKPETGAHVELLILKFEGKTAECLVGNAKVVKLGTELSFGNGKLKAVCTHVGEEGLRNFDLVFDGIFLEILDELGQMPLPPYIHERLEDKERYQTVYSRVQGSAAAPTAGLHFTPELLEAIEAKGITIAPVTLHVGLGTFRPVKVDNVLEHKMHSEAYTMSQETAEILNDAKQDGRRIIAVGTNSVRTLETVMSKYGTFKECQGNSEIFIYPDYEWKAVDAIITNFHLPKSTLIMLVSAFMGKEAIDHAYKHAVDSKYRFFSFGDSMFLKARNTK

SEQ ID NO: 66375 - protein, 551 aa, unidentified
  source 1..551: note = Erysipelotrichaceae bacterium
  REGION 1..551: note = tr|A0A3P1S975|A0A3P1S975_9FIRM Multifunctional fusion protein OS=Erysipelotrichaceae bacterium OH741_COT-311 OX=2491058 GN=queA PE=3 SV=1
MRTDEFDFHLPEELIAQTPVKNRKTSRLLVVNKKNKKLADKHFYNIVDYFKKGDVLVRNNTRVIPARLFGIKEETNAHVELLLLKQDGDIWQCLVGNAKVVKLNTIVSFGDGRLKAQCVEVLEKGLRRFKMIYEGIFFEILNELGNIPLPPYIHEKLEDKERYQTVYSKVLGSAAAPTAGLHFTDDIFDALKRKGVQIVDVTLHVGLGTFKPIDVEMVEEHIMHSEFYMMDQASADILNHALKKKQRIITVGTTSTRTIEAIYKQYHTFKECSGYTDIFIYPGYKWQVVDAIITNFHLPKSTLIMMISSFAGKDLIFKAYQHAIKQKYRFFSFGDCMFITNEDPLPSQPKINYYQKCIDEMEGFEGKKNLLLHACCAPCISFPLEFLIKKFNITIYYNNSNIYPENEYIKRLEELRYYVDEFNKQYQCDIPILAPDYDNVAYTKKLEPLKDEKEGGKRCFHCYAMRMDEAYNYATKHNFDYFTTVMTISRQKDSQKLNQIGANLEKKYSKVKYLYSDFKKNKGIDRRNELVKEKNLYAQHYCGCIYSMNNE

SEQ ID NO: 66376 - protein, 346 aa, unidentified
  source 1..346: note = Erysipelotrichaceae bacterium
  REGION 1..346: note = tr|A0A3C1MZZ4|A0A3C1MZZ4_9FIRM S-adenosylmethionine:tRNA ribosyltransferase-isomerase; OS = Erysipelotrichaceae bacterium OX=2049044 GN=queA PE=3; SV = 1
MDIELFDYDLPHELIAQTPLEKRDTSRLMVLNKNTGEVTHKHFYDIIDYLKPGDVLVRNNTKVIPARLFGTKEETHAHVEVLLLKNTHDDVWECLCGNARTIKVGTVISFGDGRLKAKCLEVREEGIRILEMIYEGIFFEVLDQLGIMPLPPYIKEKLDDPDRYNTVYAKIEGSAAAPTAGLHFTPELFQKLRDKGIEVEDVTLHVGLGTFRPVKVENVLEHHMHSEYYEISEDVAERLNKAKAEGRRIIAIGTTSCRTLEANVSKYGKFTAAHENTNIFIYPGYTFKAIDCLITNFHLPKSTLIMLVSALASREKILHAYNIAVKEKYRFFSFGDAMFITNETEL

SEQ ID NO: 66377 - protein, 340 aa, unidentified
  source 1..340: note = Erysipelotrichales bacterium
  REGION 1..340: note = tr|A0A524KAW4|A0A524KAW4_9FIRM S-adenosylmethionine:tRNA ribosyltransferase-isomerase; OS = Erysipelotrichales bacterium OX=2478483 GN=queA PE=3; SV = 1
MKTDDFDFQLPPHLIAQTPLKDRSASRLLVVDRKTGKITHQHFYNIGAYLRAGDVLVLNETKVLPARLFGIKEGTGAHVELLILKIEQDAAECLVGNAKVVKVGTMISFGDGELKAQCLEVLPEGLRKFKFIHDGIFYEILDRLGVMPLPPYIKEKLADPDRYQTVYAREKGSAAAPTAGLHFTPELLASLSEQGVEIVKITLHVGLGTFRPVDVQDVMQHKMHEESYYVSEEAAAHLNIAKKEGRRIVSVGTTSTRTLETQMKKFGAFRAESSSTEIFIYPGFKFEAVDVQITNFHLPKSTLMMLVSAFASKDLIFKAYDEAIKEEYRFFSFGDSMLIL

SEQ ID NO: 66378 - protein, 342 aa, unidentified
  source 1..342: note = Erythrobacter aquimixticola
  REGION 1..342: note = tr|A0A419RRI7|A0A419RRI7_9SPHN S-adenosylmethionine:tRNA ribosyltransferase-isomerase; OS = Erythrobacter aquimixticola OX=1958945 GN=queA PE=3 SV=1
MKVDLFDFELPQELIALRPVRPRDAARLLVARGDASLEDRGVLDLPGLLEPGDLLVFNDTRVIPAQLEGRRGEAKIGATLHKRIDLRRWQAFIRNAKRLREGDTIAFGGDVEAVAEQRHADGSFTLGFAGDEPVEVMLERAGRMPLPPYIAGKRTTDERDREDYQTMFAREDGAVAAPTAALHFTPRLIEALEARGVKRETLTLHVGAGTFLPVKAEDTDDHAMHAEFGRIEADTAKRLNAAREAGGRLIAVGTTSLRLLESAADADGVIQPFAADTDIFITPGYRFRAADGLMTNFHLPKSTLMMLVSALMGRERMMTVYAHAIAERYRFYSYGDSSLLIP

SEQ ID NO: 66379 - protein, 343 aa, unidentified
  source 1..343: note = Erythrobacter atlanticus
  REGION 1..343: note = tr|A0A0H4VHK6|A0A0H4VHK6_9SPHN S-adenosylmethionine:tRNA ribosyltransferase-isomerase; OS = Erythrobacter atlanticus OX=1648404 GN=queA PE=3 SV=1
MRVDLFDFDLPQELIALRPVAPRDSARMLVACGESGLEDRHVYDLASLLQPGDVLVFNDTRVIPAQLEGRRREARIGATLHKRLDLRRWQAFIRNAKRLREGDTVEFPAGVSAVAEQRHGDGSFTLAFAGDEPVEVLLERAGRMPLPPYIAGKRSTDERDKVDYQTMFARKDGAVAAPTAALHFTPELIKTLDARGISRETLTLHVGAGTFLPVKADNTDDHAMHSEWGLIESATADRLNAARASGGRIIAVGTTSLRLLESATGEDGVIRAFAGDTAIFITPGYIFRAVDGLMTNFHLPKSTLMMLVSALMGRERMLGVYAHAIAQKYRFYSYGDSSLLLPR

SEQ ID NO: 66380 - protein, 344 aa, Erythrobacter citreus
  REGION 1..344: note = tr|A0A0L1KDM3|A0A0L1KDM3_9SPHN S-adenosylmethionine:tRNA ribosyltransferase-isomerase; OS = Erythrobacter citreus LAMA 915 OX=1306953 GN=queA PE=3; SV = 1
MKVDLFDFELPPERIALRPARPRDAARMLVVRSAGPFEDRGVRDLPEMLRAGDVLVFNDTRVIPAQLEGRRGEARIGATLHKRIDLRRWQAFVRNAKRLRIGDAVEFGGGVAATAEERLEDGSFVLAFAGKEPVEILLERAGRMPLPPYIAGKRATDAQDREDYQTMFAAEDGAVAAPTAALHFTPELIGALDAAGIGRETLTLHVGAGTFLPVKAHDTSDHAMHSEWGRIEPEAAARLNAVRAAGGRVIAVGTTSLRLLESATGEDGIIGAFAGDTDIFITPGYRFRAVDGLMTNFHLPKSTLMMLVSALMGRERMMDAYAHAIDSEYRFYSYGDSSLLLPHD

SEQ ID NO: 66381 - protein, 342 aa, Erythrobacter flavus
  REGION 1..342: note = tr|A0A3T1CIH8|A0A3T1CIH8_9SPHN S-adenosylmethionine:tRNA ribosyltransferase-isomerase; OS = Erythrobacter flavus OX=192812 GN=queA PE=3 SV=1
MKVDLFDFELPPERIALRPARPRDAARMLVVRNDGAFEDRGVRDLPGLLRAGDVLVFNDTRVIPAQLEGRRGEARIGATLHKRIDLRRWQAFVRNAKRLRVGDIAEFGGGVTAVAEDRLADGSFVLAFEGEEPVEVLLERAGRMPLPPYIAGKRETDARDREDYQTMFAAEDGAVAAPTAALHFTPDLIAALDAAGVARETLTLHVGAGTFLPVKAEDTDDHAMHSEWGRIEADTARRLNAARAAGGRIIAVGTTSLRLLESATGDDDVIREFAGDTDIFITPGYRFRAVDGLMTNFHLPKSTLMMLVSALMGRDRMMAAYAHAIAREYRFYSYGDSSLLLP

SEQ ID NO: 66382 - protein, 342 aa, Erythrobacter flavus
  REGION 1..342: note = tr|A0A222EUS6|A0A222EUS6_9SPHN S-adenosylmethionine:tRNA ribosyltransferase-isomerase; OS = Erythrobacter flavus OX=192812 GN=queA PE=3 SV=1
MKVDLFDFELPPERIALRPARPRDAARMLVVRNDGAFEDRGVRDLPGLLRAGDVLVFNDTRVIPAQLEGRRGEARIGATLHKRIDLRRWQAFVRNAKRLRVGDIAEFGGGVTALAEDRLADGSFVLAFEGEEPVEVLLERAGQMPLPPYIAGKRETDARDREDYQTMFAAEDGAVAAPTAALHFTPDLIAALDAAGVVRETLTLHVGAGTFLPVKAEDTDDHAMHSEWGRIEADTARRLNAARAAGGRIIAVGTTSLRLLESATGDDDVIREFAGDTDIFITPGYRFRAVDGLMTNFHLPKSTLMMLVSALMGRDRMMAAYAYAIAQEYRFYSYGDSSLLLP

SEQ ID NO: 66383 - protein, 345 aa, Erythrobacter gangjinensis
  REGION 1..345: note = tr|A0A0G9MU08|A0A0G9MU08_9SPHN S-adenosylmethionine:tRNA ribosyltransferase-isomerase; OS = Erythrobacter gangjinensis OX=502682 GN=queA PE=3 SV=1
MRVDLFDFDLPQELIALRPARPRDTARMLVVEGDAPFADCGVLDLPQILREGDVLVFNDTRVIPAQLEGRRGEAKIGATLHKRLDLRRWQAFIRNAKRLKEGDTVEFGANVTATAEERHADGSFTLAFHGDEPVEVLLERAGRMPLPPYIAGKRDTDAQDREDYQTMFAEKDGAVAAPTAALHFTDRLIAALDEAGVKRETLTLHVGAGTFLPVKADDTDDHQMHSEWGTIDAATAERLNGARAAGGRLIAVGTTSLRLLESAAGEDGTIRPFADDTDIFITPGYRFRAVDGLMTNFHLPKSTLMMLVSALMGRERMQAVYAHAIAQKYRFYSYGDSSLLLPARD

SEQ ID NO: 66384 - protein, 347 aa, Erythrobacter litoralis
  REGION 1..347: note = sp|Q2NAT1|QUEA_ERYLH S-adenosylmethionine:tRNA ribosyltransferase-isomerase OS=Erythrobacter litoralis (strain HTCC2594) OX=314225 GN=queA PE=3 SV=1
MRVDLFDFELPQELIALRPAVPRDSARLLVAAGAGAIDDRIVRDLPQLLMPGDVLVFNDTRVIPAQLTGKRGEATVGVTLHKRLDLRRWQAFVRNAKRLAPGDTVDFGNDVSADVEDRADDGSFTFAFRGDEPVEVLLDRAGTMPLPPYIAGKRATDERDRDDYQTMFAREDGAVAAPTAALHFTSELIAALDERGVARQTLTLHVGAGTFLPVKADDTDDHRMHSEWGRIEHDTADRLNAAKSRGGRIIAVGTTSLRLLESATGEDGVIRTFAGDTDIFITPGYRFRAVDGLMTNFHLPKSTLMMLVSALMGRERMMDIYAHAIAQRYRFYSYGDSSLLIPEGNTK

SEQ ID NO: 66385 - protein, 349 aa, Erythrobacter litoralis
  REGION 1..349: note = tr|A0A074MV14|A0A074MV14_9SPHN S-adenosylmethionine:tRNA ribosyltransferase-isomerase; OS = Erythrobacter litoralis OX=39960 GN=queA PE=3 SV=1
MRVDLFDFELPPELIALRPVRPRDAARMLLVRGTDPSAPIEDRGVRDLPDLLNPGDVLVFNDTRVIPAQLEGRRRDGEAKVGATLHKRIDLRRWQAFLRNAKRVKEGDALVFGGGVTAIAEERHGDGSMTLLFEGEEPVEVLLDRAGTMPLPPYIASKRAIDEADREDYQTMFAAKDGAVAAPTASLHFTQRLVDALDERGILRETLTLHVGAGTFLPVKAEDTEDHRMHAEFGIIRTEVADRLNAVRAAGNRIVAVGTTSLRLLESAAQPDRTIAPFEGDTDIFITPGYAFNAVDGLMTNFHLPKSTLMMLVSALMTRERMMAAYAHAIANRYRFYSYGDSSLLLPGG

SEQ ID NO: 66386 - protein, 345 aa, Erythrobacter longus
  REGION 1..345: note = tr|A0A074MEX6|A0A074MEX6_ERYLO S-adenosylmethionine:tRNA ribosyltransferase-isomerase; OS = Erythrobacter longus OX=1044 GN=queA PE=3 SV=1
MRVDLFNFELPQDRIALRPVRPRDAARMLVVRGQDAPFVDAGVLDLPKMLRPGDVLVFNDTRVLPAQLEGRRVGGEARIGATLHKRLDLRRWQAFVRNAKRVKEGDQLIFGGGVTAIAQDRFKDGSITLFFEGDEPVEVLLDRAGTMPLPPYIALRRGVDEQDLSDYQTMFAAEDGAVAAPTASLHFTQRLVEALDARGIGRETLTLHVGAGTFLPVKADDTDDHQMHSEFGRISAATAQRLNEAREAGGRVIAVGTTSLRTLESAAGEDGKLREFADDTDIFITPGYRFRVVDGLMTNFHLPKSTLMMLVSALMGRERMMDAYTHAIQNDYRFYSYGDSSLLLP

SEQ ID NO: 66387 - protein, 342 aa, unidentified
  source 1..342: note = Erythrobacter luteus
  REGION 1..342: note = tr|A0A0G9MY57|A0A0G9MY57_9SPHN S-adenosylmethionine:tRNA ribosyltransferase-isomerase; OS = Erythrobacter luteus OX=1581420 GN=queA PE=3 SV=1
MKVDLFDFDLPQELIALRPVAPRDSARMLVVRDDAPFTDATVRDLPGLLAPGDVLVFNDTRVIPAQLEGRRGEAKIGATLHKRIDMRRWQAFVRNAKRLSEGDTIDFGAGVSAVAEARHADGSFTLAFAGEEPVEVLLERAGRMPLPPYIAGKRPTDERDRADYQTMFAQHDGAVAAPTAALHFTPGLMAALADRDVGAETLTLHVGAGTFLPVKAEDTDDHAMHAEWGTVSAETAARLNAARAAGGRLIAVGTTSLRLLESAAGEDGQVRAFAGDTAIFITPGYAFRAVDGLMTNFHLPRSTLMMLVSALMGRERMMDAYAHAIARGYRFYSYGDSSLLLP

SEQ ID NO: 66388 - protein, 349 aa, unidentified
  source 1..349: note = Erythrobacter lutimaris
  REGION 1..349: note = tr|A0A395LME4|A0A395LME4_9SPHN S-adenosylmethionine:tRNA ribosyltransferase-isomerase; OS = Erythrobacter lutimaris OX=1538146 GN=queA PE=3 SV=1
MKVDLFDFELPPERIALRPVSPRDSAKMLVVGGDAPFDDRQVCDLPDVLRAGDVLVFNDTRVIPAQLEGERIREGASGAAIGATLHKRIDARRWQAFVRNAKRLRAGERIAFPDGVAAIAEARAEDGSWTLAFEGDEPVEVLLERAGAMPLPPYIAQRRAADERDAQDYQTLFAQKAGAVAAPTAALHFTPDLMARLEAAGIATETLTLHVGAGTFLPVKAQDTADHRMHAEWGSITPEVADRLNTARAEGRRVIAVGTTSLRLLESAADETGTIRPFADDTAIFITPGYRFRAIDGLMTNFHLPKSTLFMLVSALMGRERMLDVYAHAIDNEYRFYSYGDSSLLLPRS

SEQ ID NO: 66389 - protein, 342 aa, unidentified
  source 1..342: note = Erythrobacter marinus
  REGION 1..342: note = tr|A0A0H0XML9|A0A0H0XML9_9SPHN S-adenosylmethionine:tRNA ribosyltransferase-isomerase; OS = Erythrobacter marinus OX=874156 GN=queA PE=3 SV=1
MRVDLFDFELPQALIALRPVAPRDSARMLLARGSAPLADRIVRDLPDMLEPGDVLVFNDTRVIPAQLEGERGEARIGATLHKRIDLRRWQAFIRNAKRLREGDLVEFGANVTAIAEARHKDGSFTLAFEGDEPVEVLLERAGRMPLPPYIAGKRPTDERDQSDYQTMFAQKDGAVAAPTAALHFTPELISALDARGIKRETLTLHVGAGTFLPVKAKDTDDHAMHSEWGQIDGETAARLNAARAAGGRLIAVGTTSLRLLESAADDSGLVQPFSADTDIFITPGYRFRVVDGLMTNFHLPKSTLMMLVSALMGMERMKEVYAHAIANEYRFYSYGDSSLLLP

SEQ ID NO: 66390 - protein, 343 aa, Erythrobacter nanhaisediminis
  REGION 1..343: note = tr|A0A1I5MZF0|A0A1I5MZF0_9SPHN S-adenosylmethionine:tRNA ribosyltransferase-isomerase; OS = Erythrobacter nanhaisediminis OX=604088 GN=queA PE=3; SV = 1
MKVDLFDFDLPPERIALRPARPRDAARMLVVEGAEGAMRDCGVRDLPSLLKAGDVLVFNDTRVIPAQLEGRRGEAKIGATLHKRVDLRRWQAFIRNAKRVRAGDLIEFGGGVSAIAEERLPDGSFILAFQGDEPVEVLLERAGRMPLPPYIARKRETDAQDREDYQTMFAAEDGAVAAPTASLHFTPELVAALDDAGVGRETLTLHVGAGTFLPVKADDTDDHAMHSEWGRIEPEVADRLNAARASGGRIIAVGTTSLRLLESATQDDGVIRAFAGDTDIFITPGYQFRAVDGLMTNFHLPKSTLMMLVSALMGRDRMMAAYAHAIANEYRFYSYGDSSLLIP

SEQ ID NO: 66391 - protein, 345 aa, Erythrobacter sp.
  REGION 1..345: note = tr|A0A1E4B0A6|A0A1E4B0A6_9SPHN S-adenosylmethionine:tRNA ribosyltransferase-isomerase; OS = Erythrobacter sp. SCN 62-14 OX=1660099 GN=queA PE=3 SV=1
MKVDLFDFELPQERIALRPVRPRDAARMLVVRGNNAPFEDRGVRDLPQLLNPGDVLVFNDTRVIPAQLEGRRADGEAKIGATLHKRMDLRRWQAFVRNAKRVKEGDSLVFGGGVTAIAEARHGDGSITLFFEGTEPVEVLLDRAGTMPLPPYIAQKRGVDAQDLEDYQTMFAAQDGAVAAPTASLHFTPRLVDAIDAAGIGRAMLTLHVGAGTFLPVKAEDTEDHQMHAEFGRISQTTADQLNAARAAGGRIIAVGTTSLRLLESAVDEDGVIHPFAGDTSIFITPGYTLRGVDGLMTNFHLPKSTLMMLVSALMGRERMMAAYAHAIANEYRFYSYGDSSLLLP

SEQ ID NO: 66392 - protein, 344 aa, Erythrobacter sp.
  REGION 1..344: note = tr|A0A1A7QEC1|A0A1A7QEC1_9SPHN S-adenosylmethionine:tRNA ribosyltransferase-isomerase; OS = Erythrobacter sp. QSSC1-22B OX=1860125 GN=queA PE=3 SV=1
MNIDLFDFALPPERIALRPARPRDAARMLVVRGTGTRPFEDRGVGDLPQLLRAGDVLVFNDTRVIPAQLEGRRGEAKIGATLHKRIDLRRWQAFIRNAKRLKEGDLITFGGGVSAQAETRHEDGSFTLCFGGDEPVELLLERAGTMPLPPYIAGKRGTDAQDREDYQTMFAREDGAVAAPTASLHFTDALVAALDEAGIGREMLTLHVGAGTFLPVKAQDTADHKMHSEWGRIEPAVADRLNAARAAGGRIIAVGTTSLRLLESATGEDGVIAPFAGDTDIFITPGYAFRAVDGLMTNFHLPKSTLFMLVSAMMGRERMQDAYAHAIAAEYRFYSYGDSSLLLP

SEQ ID NO: 66393 - protein, 349 aa, unidentified
  source 1..349: note = Erythrobacter xanthus
  REGION 1..349: note = tr|A0A3A1NYU7|A0A3A1NYU7_9SPHN S-adenosylmethionine:tRNA ribosyltransferase-isomerase; OS = Erythrobacter xanthus OX=1784712 GN=queA PE=3 SV=1
MKVDLFDFDLPPERIALRPARPRDAARMLVVKGGEPLADAGVRDLPGLLAPGDVLVFNDTRVIPAQLEGRRGEARIGATLHKRLDLRRWQAFIRNAKRLREGDVIDFGADVYATTEQRHADGSFTLAFAGEEPVELLLERAGTMPLPPYIAQKRGTDEADRSDYQTMFAREDGAVAAPTASLHFTDALVAAIDAAGVSRETLTLHVGAGTFLPVKAEDTAEHKMHSEWGRIDAATAARLNAARAAGGRLIAVGTTSLRLLESAAGEDRLIREFAGDTDIFITPGYRFRAVDGLMTNFHLPKSTLFMLVSALMGRETMQAAYAHAIASEYRFYSYGDSSLLLPHKAAAEE

SEQ ID NO: 66394 - protein, 344 aa, unidentified
  source 1..344: note = Erythrobacter zhengii
  REGION 1..344: note = tr|A0A418NXL7|A0A418NXL7_9SPHN S-adenosylmethionine:tRNA ribosyltransferase-isomerase; OS = Erythrobacter zhengii OX=2307003 GN=queA PE=3 SV=1
MRVDLFDFDLPQELIALRPARPRDAARMLVVRGNAPFADCGVLDLPDMLRAGDVLVFNDTRVIPAQLEGRRGEARIGATLHKRLDLRRWQAFIRNAKRLKPGDRVEFGAEVFAIAEERHDDGSFTLAFEGDEPVEVLLERAGRMPLPPYIAGKRETDAQDREDYQTMFAQKDGAVAAPTAALHFTDRLIASLDDAGIGRETLTLHVGAGTFLPVKAEDTDDHRMHAEFGIIDAATADRLNTARAAGGRIIAVGTTSLRLLESAADEEGVIHPFSADTDIFITPGYRFRAVEGLMTNFHLPKSTLMMLVSALMGRERMQAVYAHAIAQGYRFYSYGDSSLLLPEG

SEQ ID NO: 66395 - protein, 348 aa, unidentified
  source 1..348: note = Erythrobacteraceae bacterium
  REGION 1..348: note = tr|A0A4R0NXQ3|A0A4R0NXQ3_9SPHN S-adenosylmethionine:tRNA ribosyltransferase-isomerase; OS = Erythrobacteraceae bacterium CFH 75059 OX=2528174; GN = queA PE=3 SV=1
MKTDLFDFDLPEDRIALRPAVPRDAARLLVATREGPFGDHVFRELPRLLRAGDLLVFNDTRVIPAQLEGVRRARDGGAGAKIGVTLHQRLGARRWHAFVRNGRRLAPGDRIDFGHDVAAEVEDRLPDGSFHLSFLGAEPAEDLLARAGTVPLPPYIASRRRADARDRADYQTVFAREDGAVAAPTAALHFTDAVLGELAGAGIRSTTVTLHVGAGTFLPVKAADTRDHAMHSEWGRITPEAARALNEAKAQGGRIIAVGTTSLRLLESAADDNGSVVPFTGSTDIFITPGYRFRAIDGLVTNFHLPRSTLFMLVSALMGRERMLEAYAHAIENQYRFYSYGDSSLLLP

SEQ ID NO: 66396 - protein, 349 aa, unidentified
  source 1..349: note = Erythrobacteraceae bacterium
  REGION 1..349: note = tr|A0A0P7W093|A0A0P7W093_9SPHN S-adenosylmethionine:tRNA ribosyltransferase-isomerase; OS = Erythrobacteraceae bacterium HL-111 OX=1666908 GN=queA; PE = 3 SV=1
MRVDLFDFELPQDLIALRPVRPRDAARMLLVRGTDPAAPLEDRGVRDLPDLLDPGDVLVFNDTRVIPAQLEGRRKDGEARIGATLHKRIDLRRWQAFLRNARRVKEGDALIFGGGVTAIAEERHGDGSMTLFFEGEEPVEVLLDRAGTMPLPPYIASRRAIDEADREDYQTMFAAKDGAVAAPTASLHFTQRLVDALDERGILRETLTLHVGAGTFLPVKAEDTEDHRMHAEFGVIRPEVAERLNAVRAQGRRIVAVGTTSLRLLESAAREDRAIAAFEGDTDIFITPGYAFRAVDGLMTNFHLPKSTLMMLVSALMTRERMMAAYAHAIANRYRFYSYGDSSLLLPGG

SEQ ID NO: 66397 - protein, 356 aa, Escherichia albertii; identical to SEQ ID NO: 62661
  REGION 1..356: note = tr|W0ARX8|W0ARX8_9ESCH S-adenosylmethionine:tRNA ribosyltransferase-isomerase OS=Escherichia albertii KF1; OX = 1440052 GN=queA PE=3 SV=1

SEQ ID NO: 66398 - protein, 356 aa, Escherichia albertii
  REGION 1..356: note = tr|A0A3W6DNR1|A0A3W6DNR1_9ESCH S-adenosylmethionine:tRNA ribosyltransferase-isomerase; OS = Escherichia albertii OX=208962 GN=queA PE=3 SV=1
MRVTDFSFELPESLIAHYPMPERSSCRLLSLDGPTGALTHGTFTDLLDKLNPGDLLVFNNTRVIPARLFGRKASGGKIEVLVERMLDDKRILAHIRASKAPKPGAELLLGDDESINATMTARHGALFEVEFNDERSVLDILNSIGHMPLPPYIDRPDEDADRELYQTVYSEKPGAVAAPTAGLHFDEPLLEKLRAKGVEMAFVTLHVGAGTFQPVRVDTIEDHIMHSEYAEVPQDVVDAVLAAKVRGNRVIAVGTTSVRSLESAAQAAKNDLIEPFFDDTQIFIYPGFQYKVVDALVTNFHLPESTLIMLVSAFAGYQHTMNAYKAAVEEKYRFFSYGDAMFITYNPQAINERVGE

SEQ ID NO: 66399 - protein, 356 aa, Escherichia fergusonii
  REGION 1..356: note = tr|F0JMX1|F0JMX1_ESCFE S-adenosylmethionine:tRNA ribosyltransferase-isomerase OS=Escherichia fergusonii ECD227 OX=981367 GN=queA PE=3 SV=1
MRVTDFSFELPESLIAHYPMPERSSCRLLSLDGPTGALTHGTFTDLLDKLNPGDLLVFNNTRVIPARLFGRKASGGKIEVLVERMLDDKRILAHIRASKAPKPGAELLLGDDESINATMTARHGALFEVEFNDERSVLDILNSIGHMPLPPYIDRPDEDADRELYQTVYSEKPGAVAAPTAGLHFDEPLLEKLRAKGVEMAFVTLHVGAGTFQPVRVDTIEDHIMHSEYAEVPQDVVDAVLATKARGNRVIAVGTTSVRSLESAAQAAKNDLIEPFFDDTQIFIYPGFQYKVVDALVTNFHLPESTLIMLVSAFAGYQHTMNAYKAAVEEKYRFFSYGDAMFITYNPQAINERVGE

SEQ ID NO: 66400 - protein, 356 aa, Escherichia fergusonii
  REGION 1..356: note = tr|A0A564SNX1|A0A564SNX1_ESCFE S-adenosylmethionine:tRNA ribosyltransferase-isomerase; OS = Escherichia fergusonii OX=564 GN=queA PE=3 SV=1
MRVTDFSFELPESLIAHYPMPERSSCRLLSLDGPTGALTHGTFTDLLDKLNPGDLLVFNNTRVIPARLFGRKASGGKIEVLVERMLDDKRILAHIRASKAPKPGAELLLGDDESINATMTARHGALFEVEFNDDRSVLDILNSIGHMPLPPYIDRPDEDADRELYQTVYSEKPGAVAAPTAGLHFDEPLLEKLRAKGVEMAFVTLHVGAGTFQPVRVDTIEDHIMHSEYAEVPQDVVDAVLAAKARGNRVIAVGTTSVRSLESAAQAAKNDLIEPFFDDTQIFIYPGFQYKVVDALVTNFHLPESTLIMLVSAFAGYQHTMNAYKAAVEEKYRFFSYGDAMFITYNPQAINERVGE

SEQ ID NO: 66401 - protein, 356 aa, unidentified
  source 1..356: note = Escherichia marmotae
  REGION 1..356: note = tr|A0A2B7LX14|A0A2B7LX14_9ESCH S-adenosylmethionine:tRNA ribosyltransferase-isomerase; OS = Escherichia marmotae OX=1499973 GN=queA PE=3 SV=1
MRVTDFSFELPESLIAHYPMPERSSCRLLSLDGPTGALTHGTFTDLLDKLNPGDLLVFNNTRVIPARLFGRKASGGKIEVLVERMLDDKRILAHIRASKAPKPGAELLLGDDESIKATMTARHGALFEVEFNDQRSVLDILNSIGHMPLPPYIDRPDEDADRELYQTVYSEKPGAVAAPTAGLHFDEPLLEKLRAKGVEMAFVTLHVGAGTFQPVRVDTIEDHIMHSEYAEVPQDVVDAVLAAKARGNRVIAVGTTSVRSLESAAQAAKNALIEPFFDDTQIFIYPGFQYKVVDALVTNFHLPESTLIMLVSAFAGYQHTMNAYKAAVEEKYRFFSYGDAMFITYNPQAINERVGE

SEQ ID NO: 66402 - protein, 356 aa, Escherichia sp.
  REGION 1..356: note = tr|A0A4U6CKP4|A0A4U6CKP4_9ESCH S-adenosylmethionine:tRNA ribosyltransferase-isomerase; OS = Escherichia sp. MR OX=2575922 GN=queA PE=3 SV=1
MRVTDFSFELPESLIAHYPMPERSSCRLLSLDGPTGALTHGTFTDLLDKLNPGDLLVFNNTRVIPARLFGRKASGGKIEVLVERMLDDKRILAHIRASKAPKPGAELLLGDDESIKATMTARHGALFEVEFNDDRSVLDILNSIGHMPLPPYIDRPDEDADRELYQTVYSEKPGAVAAPTAGLHFDEPLLEKLRAKGVEMAFVTLHVGAGTFQPVRVDTIEDHIMHSEYAEVPQEVVDAVLAAKARGNRVIAVGTTSVRSLESAAQAAKNDLIEPFFDDTQIFIYPGFQYKVVDALVTNFHLPESTLIMLVSAFAGYQHTMNAYKAAVEEKYRFFSYGDAMFITYNPQAINERVGE

SEQ ID NO: 66403 - protein, 356 aa, Escherichia sp.
  REGION 1..356: note = tr|A0A4Q9JR62|A0A4Q9JR62_9ESCH S-adenosylmethionine:tRNA ribosyltransferase-isomerase; OS = Escherichia sp. E10V4 OX=2478971 GN=queA PE=3 SV=1
MRVTDFSFELPESLIAHYPMPERSSCRLLSLDGPTGALTHGTFTDLLDKLNPGDLLVFNNTRVIPARLFGRKASGGKIEVLVERMLDDKRILAHIRASKAPKPGAELLLGDDESIKATMTARHGALFEVEFNDERSVLDILNSIGHMPLPPYIDRPDEDADRELYQTVYSEKPGAVAAPTAGLHFDEPLLEKLRAKGVEMAFVTLHVGAGTFQPVRVDTIEDHIMHSEYAEVPQDVVDAVLAAKARGNRVIAVGTTSVRSLESAAQAAKNDLIEPFFDDTQIFIYPGFQYKVVDALVTNFHLPESTLIMLVSAFAGYQHTMNAYKAAVEEKYRFFSYGDAMFITYNPQAINERVGE

SEQ ID NO: 66404 - protein, 427 aa, unidentified
  source 1..427: note = Estrella lausannensis
  REGION 1..427: note = tr|A0A0H5DSC1|A0A0H5DSC1_9BACT S-adenosylmethionine:tRNA ribosyltransferase-isomerase; OS = Estrella lausannensis OX=483423 GN=queA PE=3 SV=1
MEKTQILGGYTRCGKQIIRFKFVEGLQKLAKARLDENVSKIRFARDSIHHNHLIQSFKRNIFFVDVSYRFRYDDSEKFNEKSAMDPTLLKSYSYHLPEELIAKKPASPRDSSRLMVIERSSGTIRIGIFRDLLSLVGPHDRFVVNNTKVFKARLLGMKPGTGGKCEVFLLKEISKGRWQALVRPGKKMPHGTVVEFSPHFYCQILDTLPDGSRIVQFPQEVDVLQQTSLLGHIPLPHYIQRDADDPQDEKDYQTSFASRVGANAAPTAGLHFTDELVSALKNKGNAFFEVTLHVGLGTFRPVQVEDIREHKMHSEWCEITSETASALNQACRGREIAVGTTSCRTLESFADERGQLSSGCHETDIFIYPGYRFKRTNALLTNFHLPESSLLMLVSAFAGPELIKEAYSKAIEERMRFYSYGDAMLIL

SEQ ID NO: 66405 - protein, 341 aa, Ethanoligenens harbinense
  REGION 1..341: note = tr|E6U6Z3|E6U6Z3_ETHHY S-adenosylmethionine:tRNA ribosyltransferase-isomerase OS=Ethanoligenens harbinense (strain DSM 18485 / JCM 12961 / CGMCC 1.5033 / YUAN-3) OX= 663278 GN=queA PE=3 SV=1
MKKSDFYYDLPPERIAQEPLAQRDQSRLMTLDRATGAVGHRHFYDLPDLLLPGDCLILNNSRVLPARLYGNREKTGGRVEFVLLNEKKRDEWEVILRPGRTARVGARYVFGGGLLKAEVLEIIEDGNRIVRFEHEGDFYRLIEQIGEMPLPHYITHRLKDKERYQTVYAKESGSAAAPTAGLHFTPELLEHLRQKGVRIGYVTLHVGLGTFRPVKADTIEKHVMHSEHYELPEETAALIRETKASGGRVVGVGTTSCRTLESVAQRYGEIRAAEGWTDIFIYPGFQFQVLDALITNFHLPESTLIMLVSAFAGREHVLHAYQEAIAEQYRFYSFGDAMLLY

SEQ ID NO: 66406 - protein, 341 aa, Ethanoligenens harbinense; identical to SEQ ID NO: 66405
  REGION 1..341: note = tr|A0A386XQP5|A0A386XQP5_9FIRM S-adenosylmethionine:tRNA ribosyltransferase-isomerase; OS = Ethanoligenens harbinense OX=253239 GN=queA PE=3 SV=1

SEQ ID NO: 66407 - protein, 341 aa, unidentified
  source 1..341: note = Eubacteriaceae bacterium
  REGION 1..341: note = tr|A0A143XZF4|A0A143XZF4_9FIRM S-adenosylmethionine:tRNA ribosyltransferase-isomerase; OS = Eubacteriaceae bacterium CHKCI004 OX=1780380 GN=queA; PE = 3 SV=1
MKTSDFYYDLPEELIAQDPLENRSDSRLMVLDKETGAVSHHVFREIVDYLNPGDCLVINDTKVIPARLIGEREGTGAKIEVLLLKRKTGDVWETLVKPGRKAKPGTRIQFGGGLLVGEVMDIVDEGNRLIRFEFEGIFEEILDQLGQMPLPPYITHQLKDKDRYNTVYATHSGSAAAPTAGLHFTPELLKTIEEKGIDIARVTLHVGLGTFRPVKVDDVENHHMHSEFYMIDEEAAEKINRAKENGKRVICVGTTSCRTIESAADENGRLKPCSGWTEIFIYPGYQFKILDCLITNFHLPESTLIMLVSALAGKEHVLAAYEEAVKERYRFFSFGDAMFIC

SEQ ID NO: 66408 - protein, 341 aa, unidentified
  source 1..341: note = Eubacteriaceae bacterium
  REGION 1..341: note = tr|A0A143ZNN6|A0A143ZNN6_9FIRM S-adenosylmethionine:tRNA ribosyltransferase-isomerase; OS = Eubacteriaceae bacterium CHKCI005 OX=1780381 GN=queA; PE = 3 SV=1
MKKSDFYYDLPEELIAQTPIEPRDHSRLMVLDRSKEGVEHKHFYDLVDYLNPGDCLILNDSRVLPARLYGAREDTGAVVEFLLLADKGNGVWETLCGPGKKARPGHRFSFGEGLMTGEVLDIIEGGNRLVKLSCEGPIYPMLERIGEMPLPHYITQKLENQERYQTVYSKEPGSAAAPTAGLHFTPELLEKLKAKGIKIGFVTLHVGLGTFRPVKEDEIEHHTMHSEHYTLPEETAQLILDTKKNGGRVIAVGTTSCRTLESVATYHGKIEAAEGDTSIFIYPGYTFKVLDGLVTNFHLPESTLVMLVSALAGRERILEAYRIAVEEKYRFFSFGDAMYIR

SEQ ID NO: 66409 - protein, 345 aa, Eubacterium aggregans
  REGION 1..345: note = tr|A0A1H4BSN2|A0A1H4BSN2_9FIRM S-adenosylmethionine:tRNA ribosyltransferase-isomerase; OS = Eubacterium aggregans OX=81409 GN=queA PE=3 SV=1
MTTTLSTTDFYYDLPESSIAQTPLDQRDTSKLLAINRATGEMADRHFHDILEYLKPGDLLVMNDTKVLPARIYGKRKETGGKVELLLLKRLDDHRWETMVKPGKKAKPGTELVFGRGLTGTIEETIPGGLRIIRFEYQGVFEEILSEIGTMPLPPYIHETLKDQSRYQTVYAEHDGSAAAPTAGLHFTPELLKEIADRGVGIARVTLHVGIGTFRPVKVENLLEHQMHSERYVLPEETARAIAETKKQGGRIIAVGTTSVRTLESVASRHDGQVVSEAGTTDIFIYPGYHWQVVDALITNFHLPESTLLMLVSSFYNREKILEAYRHAVAADYRFFSFGDAMFLY

SEQ ID NO: 66410 - protein, 345 aa, Eubacterium barkeri
  REGION 1..345: note = tr|A0A1H3CAB3|A0A1H3CAB3_EUBBA S-adenosylmethionine:tRNA ribosyltransferase-isomerase; OS = Eubacterium barkeri OX=1528 GN=queA PE=3 SV=1
MTTTLSTADFYYDLPETSIAQTPLSKRDTSKLLAIDRTTGEMADRHFHDILEYLKPGDLLVMNDTKVLPARIYGQRKETGGKVELLLLKRLDDHRWETMVKPGKKAKPGTELVFGKGLTGTIEETIPGGLRIIRFEYQGVFEEILSEIGTMPLPPYIHETLKDQSRYQTVYAEHDGSAAAPTAGLHFTPELLKEIEDRGVGIAWVTLHVGIGTFRPVKVENLLEHQMHSERYVLPEETARAIAKTKEGGGRVIAVGTTSVRTLESVASRHDGHVVCDAGTTDIFIYPGYQWQVVDALITNFHLPESTLLMLVSSFYNREKILEAYRHAVAADYRFFSFGDAMFLY

SEQ ID NO: 66411 - protein, 347 aa, Eubacterium brachy
  REGION 1..347: note = tr|V1CHV4|V1CHV4_9FIRM S-adenosylmethionine:tRNA ribosyltransferase-isomerase OS=Eubacterium brachy ATCC 33089 OX=1321814 GN=queA PE=3 SV=1
MKVSDFDYNLPERFIAQTPASKRDKSKLMVVNRHTGTIEHRIFSDVLEYLNEGDCLVLNNSKVIPARIFGKKRETGANAEFLLIKPIENDLWQVMVKPGRKLKKGNIIDFADNFTAEIIDYGEDGTRIVKFQYEGVFMERLDEIGSMPLPPYIERNSTEFDKDRYQTVYSLNEGSVAAPTAGLHFTRELLKKIREKGVEIAYVTLHVGIGTFRPVKVEDIRFHTMHKENLFITEDNARKINEAILRGNMVIAVGTTSTRTLESSSYYDEKEKKYLVRSGNAETDIFIYPGYDFKIVNSQITNFHLPKSTLLMLISAFYDRGKVMECYDVAKREGYRFFSYGDSMLLI

SEQ ID NO: 66412 - protein, 344 aa, Eubacterium callanderi; identical to SEQ ID NO: 64533
  REGION 1..344: note = tr|E3GG71|E3GG71_9FIRM S-adenosylmethionine:tRNA ribosyltransferase-isomerase OS=Eubacterium callanderi; OX = 53442 GN=queA PE=3 SV=1

SEQ ID NO: 66413 - protein, 344 aa, Eubacterium callanderi
  REGION 1..344: note = tr|A0A1I5KGU5|A0A1I5KGU5_9FIRM S-adenosylmethionine:tRNA ribosyltransferase-isomerase; OS = Eubacterium callanderi OX=53442 GN=queA PE=3 SV=1
METLTTKDFYYDLPEELIAQTPEKKRDASRLMVLNRMKGSIQDRHFHDIIDYLNEDDLLVMNNTKVLPARIFGKKEETGGKVELLLLKRLDDKTWETMVKPGKKAMPGTRLVFGDKLKGEIKDKIESGLRIIEFEYDGIFEEIIGELGTMPLPPYIHEVLEDQDRYQTVYAKYTGSAAAPTAGLHFTEELLDALRRKGIRTAEVTLHVGIGTFRPVKCDNILDHHMHEETYQVPKETEKLIEETRKKGGRVIAVGTTSVRTLESAAARFGGKVQACEGSTDIFIYPGYKWQVIDALITNFHLPESTLLMLVSSFYNREAVLKAYQHAIDARYRFFSFGDAMFIY

SEQ ID NO: 66414 - protein, 345 aa, Eubacterium coprostanoligenes
  REGION 1..345: note = tr|A0A1T4LTC4|A0A1T4LTC4_9FIRM S-adenosylmethionine:tRNA ribosyltransferase-isomerase; OS = Eubacterium coprostanoligenes OX=290054 GN=queA PE=3; SV = 1
MKTSDFYYDLPQELIAQTPMEPRDMSRLMVIDKNTGEIEHKIFKDLIDYLRPGDCLILNDTRVIPARIYGVKKETGAVVEFLLLKQSENNVWECLCKPGKRAKVGTSFVFGDGIVECEVVDVTDDGNRKVQFKCDSKEIYTILDKIGKMPLPPYITEELKNGELYQTVYSKELGSAAAPTAGLHFTEEMLKKIEEKGIKIGYVTLHVGLGTFRPVKVDDVKNHKMHSEHYHISKETADLINDTKKNGGRVIAVGTTSTRTLESVATKNGCICEDEDDTSIFIYPGYEFKCIDGLVTNFHLPESTLIMLISAFAGYDNVMNAYKIAVDEKYRFFSFGDACFFTDIK

SEQ ID NO: 66415 - protein, 343 aa, Eubacterium eligens
  REGION 1..343: note = tr|C4Z1H5|C4Z1H5_EUBE2 S-adenosylmethionine:tRNA ribosyltransferase-isomerase OS=Eubacterium eligens (strain ATCC 27750 / VPI C15-48) OX=515620 GN=queA PE=3; SV = 1
MDLHDFYYDLPEELIAQDPLSDRSSSRLMVLDKETGEIEHKIFRDIVDYLKPGDCLVVNDTKVIPARLIGTKADTGATIEVLLLKRLEDRQDTWEVLVKPGKKAKVGAKISFGEGKLIGEIIDIVEEGNRLIQFTYDGIFEEILDELGQMPLPPYITHKLEDKNRYQTVYAKHEGSAAAPTAGLHFTTELLEKIKAMGVNIARVTLHVGLGTFRPVKVENILDHHMHSEFYVVTQEAADMINNTRKNGGRVIAVGTTSTRTLESVALEDGTIPAKSGWTEIFIYPGYKFKAIDCLITNFHLPESTLVMLVSALAGREHVLHAYEVAVQEKYRFFSFGDAMFIK

SEQ ID NO: 66416 - protein, 343 aa, Eubacterium eligens; identical to SEQ ID NO: 62550
  REGION 1..343: note = tr|R5ZP72|R5ZP72_9FIRM S-adenosylmethionine:tRNA ribosyltransferase-isomerase OS=Eubacterium eligens CAG:72; OX = 1263077 GN=queA PE=3 SV=1

SEQ ID NO: 66417 - protein, 351 aa, Eubacterium infirmum
  REGION 1..351: note = tr|H1PM18|H1PM18_9FIRM S-adenosylmethionine:tRNA ribosyltransferase-isomerase OS=Eubacterium infirmum F0142; OX = 883109 GN=queA PE=3 SV=1
MHINDFDYELPEELIAQKPQKDRDKCRLMVLRRKENSIEHRHFFDILEYLKEGDCLLLNDSKVIPARLYGIKEETGARVEFLLIKRVDGDIWETMVRPGKRLKPGDSVLFSDEDGKKLRAEILDYGEDGTRIVKMEYDGILMERLEEIGSMPLPPYISRPGNEEDKDDYQTVYCHEEGSVAAPTAGLHFTTELLEKAKEKGVKIAFVTLHVGIGTFRPVKCETIEEHHMHFEEYSISEEAAEIVNRTVLEGGRIISVGTTSTRTAESAAYFDEKSGKYLIAAGSGSTDIFIYPGYKFKIIGSLITNFHLPKSTLMMLVSALYDREHILKAYGKAVEEKYRFFSYGDAMFIE

SEQ ID NO: 66418 - protein, 344 aa, Eubacterium limosum
  REGION 1..344: note = tr|A0A317RUM8|A0A317RUM8_EUBLI S-adenosylmethionine:tRNA ribosyltransferase-isomerase; OS = Eubacterium limosum OX=1736 GN=queA PE=3 SV=1
METLTTKDFYYDLPEELIAQTPEKKRDASRLMVLNRMEGSIQDRHFHDIIDYLAEDDLLVMNNTKVLPARIFGKKEETGGKVELLLLKRLDDKTWETMVKPGKKAMPGTRLVFGDKLKGEIKDKIEGGLRIIEFEYNGIFEEIIGELGTMPLPPYIHEVLEDQERYQTVYAKYTGSAAAPTAGLHFTEELLDELHRKGVRTAEVTLHVGIGTFRPVKCDNILDHHMHEETYQVPEETAKLIEETRKKGGRVVAVGTTSVRTLESAAARFDGKVQACEGSTDIFIYPGYKWQVVDALITNFHLPESTLLMLVSSFYNREAVLKAYQHAIDARYRFFSFGDAMFIY

SEQ ID NO: 66419 - protein, 344 aa, Eubacterium limosum
  REGION 1..344: note = tr|A0A0U3EKC0|A0A0U3EKC0_EUBLI S-adenosylmethionine:tRNA ribosyltransferase-isomerase; OS = Eubacterium limosum OX=1736 GN=queA PE=3 SV=1
METLTTKDFYYDLPEELIAQTPEKKRDASRLMVLNRMEGTVQDRHFHDIIDYLTEGDLLVMNNTKVLPARIFGKKEETGGKVELLLLKRLDDKTWETMVKPGKKAMPGTRLVFGDKLRGEIKDKVEGGLRTIEFEYDGIFEEIIGELGTMPLPPYIHEVLEDQDRYQTVYAKYTGSAAAPTAGLHFTEELLNALRQKGVRTAEVTLHVGIGTFRPVKCDNILDHHMHEETYQVPEETAKLIEETRKKGGRVIAVGTTSVRTLESAAARFDGEVQACEGSTDIFIYPGYKWQVVDALITNFHLPESTLLMLVSSFYNREAVLEAYQHAIDARYRFFSFGDAMFIY

SEQ ID NO: 66420 - protein, 346 aa, unidentified
  source 1..346: note = Eubacterium maltosivorans
  REGION 1..346: note = tr|A0A4V1GMG6|A0A4V1GMG6_9FIRM S-adenosylmethionine:tRNA ribosyltransferase-isomerase; OS = Eubacterium maltosivorans OX=2041044 GN=queA PE=3 SV=1
MNLETLTTKDFYYDLPEELIAQTPEKKRDASRLMVLNRMEGTVQDRHFHDIIDYLTEGDLLVMNNTKVLPARIFGKKEETGGKVELLLLKRLDDKTWETMVKPGKKAMPGTRLVFGDKLRGEIKDKVEGGLRTIEFEYDGIFEEIIGELGTMPLPPYIHEVLEDQDRYQTVYAKYTGSAAAPTAGLHFTEELLNALRQKGVRTAEVTLHVGIGTFRPVKCDNILDHHMHEETYQVPEETAKLIEETRKKGGRVIAVGTTSVRTLESAAARFDGEVQACEGSTDIFIYPGYKWQVVDALITNFHLPESTLLMLVSSFYNREAVLEAYQHAIDARYRFFSFGDAMFIY

SEQ ID NO: 66421 - protein, 348 aa, Eubacterium minutum
  REGION 1..348: note = tr|A0A223B0C6|A0A223B0C6_9FIRM S-adenosylmethionine:tRNA ribosyltransferase-isomerase; OS = Eubacterium minutum ATCC 700079 OX=888721 GN=queA PE=3; SV = 1
MRIEDFDYDLPERLIAQTPSGERDRCRLMVLNRADDTIEHKSFRDVLKHLRPGDCMVLNDSRVIPARLFGKKEKTGAGVEFLLSRRLEGDIWETLVRPGKRLKPGDVVNFGDGKLKAEIIDYGDDGTRHVRFFYDGIFMERLEELGRMPLPPYITRESTEKDREMYQTVYARTDGSVAAPTAGLHFTEELLKEVESKGVKIAYVTLHVGIGTFRPVKCDNIEDHEMHFEEYSISGSAADTINSAIERGDRIISVGTTSARTLESAAYSDRSSGKNFVHAGTGNTGIFIYPGYEYKIVKALITNFHLPKSTLIMLVSALYDREKILKAYDEAVGEEYRFFSYGDAMLIE

SEQ ID NO: 66422 - protein, 348 aa, Eubacterium nodatum
  REGION 1..348: note = tr|W2BYX9|W2BYX9_9FIRM S-adenosylmethionine:tRNA ribosyltransferase-isomerase OS=Eubacterium nodatum ATCC 33099 OX=1161902 GN=queA PE=3 SV=1
MKIEDFDYELPKGLIAQTPDKSRDHCRLMVLNRDKRSIEHRRFCDILDYLNSGDCLVMNDSRVIPARLFGEKAETGAKVEFLLSKRIEDDVWESLVRPGRRLKPGDKVSFGEGRLVAEILEYGSGGTRKVRFHYDGIFMERLEELGKMPLPPYIERESSEEDKEMYQTVYSKVDGSVAAPTAGLHFTEELLEKVKKKGIKLAYVTLHVGIGTFRPVKCNDIEDHEMHFEEYFIEEETANVINDTILSGGRIVSVGTTSTRTLESAAYFDENKGKFLVKTGRDNTGIFIYPGYEYRIVKALITNFHLPKSTLIMLISALYDRKEILRAYDEAVREKYRFFSYGDAMMIE

SEQ ID NO: 66423 - protein, 350 aa, Eubacterium oxidoreducens
  REGION 1..350: note = tr|A0A1G6AKH1|A0A1G6AKH1_EUBOX S-adenosylmethionine:tRNA ribosyltransferase-isomerase; OS = Eubacterium oxidoreducens OX=1732 GN=queA PE=3 SV=1
MLVKDFDFYLPQEQIAQDPLEDRSSSKLLLLDKETGKLKHEIFKNITQYLKPGDCLVLNNTKVIPARLYGEKEDTGAQIEVLLLKRKENDIWECLVKPGKKMKVGARVSFGEGLLKGEVVDIVEEGNRLIRFSYEGIFEEILDRLGQMPLPPYITHKLKDKNRYQTVYAKYDGSAAAPTAGLHFTKELLEEVRRMGVEIAEVTLHVGLGTFRPVKVEDVLDHHMHSEFYQIDQEAADIINNTKKKGGRVICVGTTSCRTIESAAKDGQLSAKSGWTDIFIYPGYQFKILDCLITNFHLPQSTLLMLVSALAGREHVLAAYEEAVKEQYRFFSFGDAMFITDNIENLDKKL

SEQ ID NO: 66424 - protein, 341 aa, Eubacterium plexicaudatum
  REGION 1..341: note = tr|N2BEU8|N2BEU8_9FIRM S-adenosylmethionine:tRNA ribosyltransferase-isomerase OS=Eubacterium plexicaudatum ASF492 OX=1235802 GN=queA PE=3 SV=1
MDVKDFFYELPQELIAQDPLEDRSASRLMVLGREDGSVEHHVFRDIVNYLHPGDCLVLNNTKVLPARLYGTKEGTQAGIELLLLRRMEGDRWETLVKPGKKAKIGTKIRFGGGLLTGEIVDIAEEGNRIIRFSYSGIFEEILDELGEMPLPPYITHKLEDKQRYQTVYAKQEGSAAAPTAGLHFTPQLLEQIRNAGVDIAEVTLHVGLGTFRPVKTANVLEHHMHSEYYSLEQEQADKINRAKADGHRVIAVGTTSTRTLESIADEQGFVKAASGWTEIFIYPGYRFRCIDGLITNFHLPESTLIMLVSALAGREHVLNAYAQAVREKYRFFSFGDAMYIG

SEQ ID NO: 66425 - protein, 348 aa, Eubacterium pyruvativorans
  REGION 1..348: note = tr|A0A1I7GZT1|A0A1I7GZT1_9FIRM S-adenosylmethionine:tRNA ribosyltransferase-isomerase; OS = Eubacterium pyruvativorans OX=155865 GN=queA PE=3 SV=1
MNIEEFDYELPKELIAQKPEEQRDSCRLMVLNREKGTIEHKHFYDILDYLGPGDCLVMNDSRVIPARLFGTKAGTGAHIEFLLSKRMHDDTWETLVRPGRRLKPGDRVVFGEGALEATIDGYGKDGTRIVTFHYDGIFMERLEELGKMPLPPYIERESTKEDADMYQTVYAHHNGSVAAPTAGLHFTKELLAKAQEKGVKLVYVTLHVGIGTFRPVKCENIEEHHMHFEEYTISEEAAETINRTIREGGRIISVGTTSTRTLESAAYWDEECGEYRVKAGHDSTGIFIYPGYEWKIVNALITNFHLPKSTLIMLVSSLYNREKILEAYNEAVKEKYRFFSYGDAMAIF

SEQ ID NO: 66426 - protein, 341 aa, Eubacterium ramulus
  REGION 1..341: note = tr|A0A2V1JU89|A0A2V1JU89_EUBRA S-adenosylmethionine:tRNA ribosyltransferase-isomerase; OS = Eubacterium ramulus OX=39490 GN=queA PE=3 SV=1
MKVTDYYFDLPQEQIAQDPLEDRSSSRLLVLDKETGEYSHHVFREITEFLKPGDCLVLNNTKVIPARLFGEKEGTQAKIEILLLKRKENDVWETLVKPGKKAKVGTKIIFGGGLLVGEVIDIVEEGNRLIKFTYEGIFEEILDQLGQMPLPPYITHQLKDKNRYQTVYAKYDGSAAAPTAGLHFTPELLQQVKDMGVDIAEVTLHVGLGTFRPVKVDNILEHHMHSEFYMVTQEAADKINNAKKNGHRVICVGTTSCRTIESAADENGMLRESSGWTEIFIYPGYQFKVLDCLITNFHLPESTLLMLVSALAGREHVLAAYEEAVKEGYRFFSFGDAMFIQ

SEQ ID NO: 66427 - protein, 341 aa, Eubacterium ramulus
  REGION 1..341: note = tr|U2NYZ2|U2NYZ2_EUBRA S-adenosylmethionine:tRNA ribosyltransferase-isomerase OS=Eubacterium ramulus ATCC 29099 OX=1256908 GN=queA PE=3 SV=1
MKVTDYYFDLPQEQIAQDPLEDRSSSRLLVLDKETGEYSHHVFREITEFLKPGDCLVLNNTKVIPARLFGEKEGTQAKIEILLLKRKENDVWETLVKPGKKAKVGTKIIFGGGLLVGEVIDIVEEGNRLIKFTYEGIFEEILDQLGQMPLPPYITHQLKDKNRYQTVYAKYDGSAAAPTAGLHFTPELLQQVKDMGVDIAEVTLHVGLGTFRPVKVDNILEHHMHSEFYMVTQEAADKINNAKKNGHRVICVGTTSCRTIESAADENGMLKESSGWTEIFIYPGYQFKVLDCLITNFHLPESTLLMLVSALAGREHVLAAYEEAVKEGYRFFSFGDAMFIQ

SEQ ID NO: 66428 - protein, 352 aa, Eubacterium rectale; identical to SEQ ID NO: 62553
  REGION 1..352: note = tr|R6TGF2|R6TGF2_9FIRM S-adenosylmethionine:tRNA ribosyltransferase-isomerase OS=Eubacterium rectale CAG:36; OX = 1263079 GN=queA PE=3 SV=1

SEQ ID NO: 66429 - protein, 341 aa, Eubacterium ruminantium
  REGION 1..341: note = tr|A0A1H5WH54|A0A1H5WH54_9FIRM S-adenosylmethionine:tRNA ribosyltransferase-isomerase; OS = Eubacterium ruminantium OX=42322 GN=queA PE=3 SV=1
MNVSDFNYELPQELIAQDPLLKRSDSRLMVVHRDTGEIEHKHFSDVIDYLNPGDCLVINETKVIPARLMGVKEETGAVIEVLLLKNKGDNVWETLVKPGKKMKPGAVVSFGNGILKGEVQEVVEDGNRLIKFHYEGIWEEILDSLGEMPLPPYITHKLEDKNRYQTVYAKNSGSAAAPTAGLHFTEELLQKIEKKGVKIARLTLHVGLGTFRPVKVTTIEEHHMHSEFYMISEECAELVNETKKQGGRIIAVGTTSTRTLESAADDEGYLKACSGWTDIFIYPGYKFKCVNSLITNFHLPESTLIMLVSAFYDREKVLDAYKEAVKEKYRFFSFGDASMFI

SEQ ID NO: 66430 - protein, 341 aa, Eubacterium ruminantium
  REGION 1..341: note = tr|A0A1T4PG74|A0A1T4PG74_9FIRM S-adenosylmethionine:tRNA ribosyltransferase-isomerase; OS = Eubacterium ruminantium OX=42322 GN=queA PE=3 SV=1
MNVSDFNYELPEELIAQDPLLKRSDSRLMVVHRDTGEIEHKIFSDVIDYLNPGDCLVINDTKVIPARLMGVKEDTGAVIEILLLKNKGDNVWETLVKPGKKMKPGAVVTFGDGILKGEVLEVVEDGNRLIKFTYDGIWEEILDSLGEMPLPPYITHKLLDKDRYQTVYAKNSGSAAAPTAGLHFTEELLKKIEDKGVKIARLTLHVGLGTFRPVKVETIEEHHMHSEFYMISDECAEIVNETKKNGGRIISVGTTSTRTLESAANDDGTLKPCSGWTNIFIYPGYKFKCVDSLITNFHLPESTLIMLVSAFYDREKVLEAYKIAVEEKYRFFSFGDASMFI

SEQ ID NO: 66431 - protein, 365 aa, Eubacterium saphenum
  REGION 1..365: note = tr|C7GZ11|C7GZ11_9FIRM S-adenosylmethionine:tRNA ribosyltransferase-isomerase OS=Eubacterium saphenum ATCC 49989 OX=592031 GN=queA PE=3 SV=1
MNNRIKTDDFNYDLPPQKIASYPVSKRDESKLMVVKRRSFESPEISHAKFLDIIDYLNEGDCLVINQTKVIKARFIGFKDTGARIEVLLLKPLGENLFEAMIKPAKRVSEGTIISVLPKDDETGEPLKIQVVKSDDDIIKQVRILNADSLDYIEEFGKIPLPPYIEREAELSDEKRYQTVYSKIKGSVAAPTAGLHFTEELISKIQNKGIKVARILLHVGVGTFRPVNCDDISDHIMHSEYFEIPEEAADIINSTKNSGGRVICVGTTSVRTLEGAKCIQNASSDASGHKTSDLKVCSGETNIFIYPGYEFKLTDGIITNFHLPKSTLLMLVSAFLGLDNTLNAYDIALKSDYRFFSYGDAMLII

SEQ ID NO: 66432 - protein, 343 aa, Eubacterium siraeum; identical to SEQ ID NO: 62556
  REGION 1..343: note = tr|R6RUC9|R6RUC9_9FIRM S-adenosylmethionine:tRNA ribosyltransferase-isomerase OS=Eubacterium siraeum CAG:80; OX = 1263080 GN=queA PE=3 SV=1

SEQ ID NO: 66433 - protein, 341 aa, Eubacterium sp.
  REGION 1..341: note = tr|A0A416WCZ3|A0A416WCZ3_9FIRM S-adenosylmethionine:tRNA ribosyltransferase-isomerase; OS = Eubacterium sp. AF15-50 OX=2293103 GN=queA PE=3 SV=1
MSLHDYYYDLPEELIAQDPLEDRSSSRLMVLDKETGNVEHHVFKEIIDYLNPGDCLVINDTKVLPARLYGNKVGTDAKIEVLLLKRREKDVWETLVKPGKKCKPGTVINFGDGILTGEVIDVVEEGNRLIKFNYEGIFEEVLDRLGEMPLPPYITHKLKDKSRYQTVYAKYEGSAAAPTAGLHFTKELLEKIREKGVKIAHVTLHVGLGTFRPVKVDNILEHHMHSEFYMVDEEDANLINTCKENGGRIISVGTTSTRTLETVTDENGVVHEGSGWTQIFIYPGYKFKAIDCLITNFHLPESTLIMLVSALAGREKVLNAYEIAVKEKYRFFSFGDAMFIK

SEQ ID NO: 66434 - protein, 341 aa, Eubacterium sp.
  REGION 1..341: note = tr|A0A374ULU3|A0A374ULU3_9FIRM S-adenosylmethionine:tRNA ribosyltransferase-isomerase; OS = Eubacterium sp. OM08-24 OX=2292352 GN=queA PE=3 SV=1
MKTSDFYYDLPKELIAQTPVEPRDSSRLMLLNRNTGEIDHKHFYDIIDSLNPGDLLVANDSRVLPARIYGIKDETGARVEFLLLRQITGNRWEALCKPGKKAKEGTSFTFGDGLLRATVAEVKDDGNRIVDFECDENFFSTLDKIGQMPLPPYITEELKDKERYQTVYSHELGSAAAPTAGLHFTKELMQRIKDKGVNITYVTLHVGLGTFRPVKVDDVTNHKMHSEHYEIPEETARLINETKKSGGRVIAVGTTSCRTLESVATFYGEIKPCEGFTDIFIYPGYEFKVLDGLITNFHLPESTLIMLVSAFAGYDNVMNAYKTAVEEKYRFFSFGDAMFIS

SEQ ID NO: 66435 - protein, 351 aa, Eubacterium sulci
  REGION 1..351: note = tr|X8K2Q2|X8K2Q2_9FIRM S-adenosylmethionine:tRNA ribosyltransferase-isomerase OS=Eubacterium sulci ATCC 35585 OX=888727 GN=queA PE=3 SV=1
MHINDFDYELPEELIAQKPQKDRDKCRLMVLRRSDNSIEHRHFFDILEYLKEGDCLLLNDSKVIPARLYGIKEGTGARVEFLLIKRIEGDTWETMVRPGKRLKPGDSVLFSDEEGKKLRAEILDYGEDGTRIVKMEYDGILMERLEEIGSMPLPPYISRPSNDEDKDDYQTVYCHEEGSVAAPTAGLHFTTELLEKAREKGVKIAFVTLHVGIGTFRPVKCETIENHHMHFEEYSVSEETAEIVNQTILSGGRVISVGTTSTRTAESAACFNEKSGKYLLKAGSGSTDIFIYPGYEFKIIESLITNFHLPKSTLMMLVSALYDREHILKAYDEAVREEYRFFSYGDAMFIE

SEQ ID NO: 66436 - protein, 358 aa, Eubacterium uniforme
  REGION 1..358: note = tr|A0A1T4VST6|A0A1T4VST6_9FIRM S-adenosylmethionine:tRNA ribosyltransferase-isomerase; OS = Eubacterium uniforme OX=39495 GN=queA PE=3 SV=1
MSKEVLDSSEKQLSENSMSVHDYYYDLPERLIAQDPLEDRSSSRLLVLDRNTGDYEDKHFSDIIDYLNEGDCLVINNTKVIPARLLGQKKETGAAIEVLLLKRKTADEWECIVKPGKKLRPGAEVTFGDGLLEGEILEVVDEGNRIIKFKYEGIFEEILDKLGKMPLPPYITHELKDKDRYQTVYAKYDGSAAAPTAGLHFTKELLKKIEDKGIIIANVTLHVGLGTFRPVKVDNILEHHMHSEYYVVEKEEADKINNARANGGRIIAVGTTSSRTLETVTNDDGIVIPGSGDTSIFIYPGYRFKAVDCLITNFHLPESTLVMLVSALAGRDNVLNAYKHAVEEEYRFFSFGDAMFIK

SEQ ID NO: 66437 - protein, 342 aa, Eubacterium ventriosum
  REGION 1..342: note = tr|A0A413S1V0|A0A413S1V0_9FIRM S-adenosylmethionine:tRNA ribosyltransferase-isomerase; OS = Eubacterium ventriosum OX=39496 GN=queA PE=3 SV=1
MSLHDYYYDLPEELIAQDPLEDRSSSRLMVLDKNTGEIEHHIFKDIIDYLNPNDCLVINDTKVIPARLYGSKVGTDAKIEVLLLKRKENDVWETLVKPGKKCKPGTVISFGDGILTGEVIDVVEEGNRLIKFTYEGIFEEVLDKLGEMPLPPYITHKLEDKNRYQTVYAKYEGSAAAPTAGLHFTKELLEKIKEKGIKIAHVTLHVGLGTFRPVKVENILEHHMHSEFYMVDEEDANMINECRANGGRVIAVGTTSTRTLETVTDENGIVHPGSGWTQIFIYPGYQFKAIDCLITNFHLPESTLLMLVSALAGRENVLNAYNKAVEEKYRFFSFGDAMFIKE

SEQ ID NO: 66438 - protein, 342 aa, Eubacterium ventriosum
  REGION 1..342: note = tr|A0A413R727|A0A413R727_9FIRM S-adenosylmethionine:tRNA ribosyltransferase-isomerase; OS = Eubacterium ventriosum OX=39496 GN=queA PE=3 SV=1
MSLHDYYYDLPEELIAQDPLEDRSSSRLMVLDKNTGEIEHHIFKDIIDYLNPNDCLVINDTKVIPARLYGSKVGTDAKIEVLLLKRKENDVWETLVKPGKKCKPGTVISFGDGILTGEVIDVVEEGNRLIKFTYEGIFEEVLDKLGEMPLPPYITHKLEDKNRYQTVYAKYEGSAAAPTAGLHFTKELLEKIKEKGIKIAHVTLHVGLGTFRPVKVENILEHHMHSEFYMVDEEDANMINECRANGGRVIAVGTTSTRTLETVTDENGIVHPGSGWTQIFIYPGYQFKAIDCLITNFHLPESTLLMLVSALAGRENILNAYNKAVEEKYRFFSFGDAMFIKE

SEQ ID NO: 66439 - protein, 359 aa, unidentified
  source 1..359: note = Euhalothece natronophila
  REGION 1..359: note = tr|A0A5B8NPE3|A0A5B8NPE3_9CHRO S-adenosylmethionine:tRNA ribosyltransferase-isomerase; OS = Euhalothece natronophila Z-M001 OX=522448 GN=queA PE=3; SV = 1
MNTNSSSLDKNVNSYDYHLPESYIAQTPVTPRDHSRLLVVDSPTTHQHQHFYDLPQWLNSGDLLILNNTKVIPARLYGHKTTGAAVEVLLLEEKEQNCWLALVKPGKRLQVGAKIQFSSRFSENELLQATIIEKDETRGGRLLKFDLPEDTPLMSILDKYGEIPFPPYVTDTEANPEQYQTVFAEKSGAVAAPTAGLHFTDELLGRLAEKGINQAQVTLHVGMGTFRPVEVETITDHKMHEEWIDVSEETMAKIRETKAQGGRVIAVGTTVVRALEGAVAAQGDLKGFCGKTDLFICPGYSLQVVDGLITNFHLPRSSLLMLVSAFVGRERLLSLYESAIAHQYRFYSFGDAMLILDNT

SEQ ID NO: 66440 - protein, 358 aa, unidentified
  source 1..358: note = Euhalothece sp.
  REGION 1..358: note = tr|A0A2K3BDK8|A0A2K3BDK8_9CHRO S-adenosylmethionine:tRNA ribosyltransferase-isomerase; OS = Euhalothece sp. KZN 001 OX=1884791 GN=queA PE=3 SV=1
MKPDSSPFDRKLSSYDYDLPESYIAQTPVTPRDHSRLLVVDSPTDHQHQHFYDLPQWLQAGDLLVVNNTKVIPARMYGYKTTGATVEVLLLEEKSPNCWLALVKPGKRLQIGAKIQFYPRQDEQLPILEATVMAKDTATGGRLLAFDFGETSLVSVLDAYGEIPFPPYVTEKKAQPEQYQTVYAEELGAVAAPTAGLHFTDRLLRELQEKGVNQTEVTLHVGVGTFRPVETETITDHQMHEEWINVPSEAVKRVQETKAQGGRVVAVGTTVVRALEGAVAAQGHLKAYCGKTDLFIYPGYELQVVDGLITNFHLPRSSLLMLVSAFIGRERLLSLYQSAIEHQYRFYSFGDAMLIINN

SEQ ID NO: 66441 - protein, 359 aa, Euzebya sp.
  REGION 1..359: note = tr|A0A346XSX0|A0A346XSX0_9ACTN S-adenosylmethionine:tRNA ribosyltransferase-isomerase; OS = Euzebya sp. DY32-46 OX=1608957 GN=DVS28_a0615 PE=3 SV=1
MSALEPRLAFDVPAERIPTSPPERRGLARDGVRLLVADGTAVIHARFHELGRFLRPTDLLVVNTSTTRPAALPGHTVSGDADGRPITRHAVVHFSTRTDEGDWVVELRQPDGSGPILDAASGAVVHLAGGGHLTLGTPASAGPDGDGTRLWSARVDVPGGRVTTHLAEHGRPITYGGAPTWPLEDYQTVFARHPGSAEMPSAARPFSLTLVADLVSRGVVLAPLQLHAGVSSQEAGEAPGAERLRVGERTAALVNHTRASGGRVIAVGTTVTRALETAADATGTVRPIRGWTDLVITPSRGVWVVDGIISGWHEADASHLQLLEAVVGPRVLAAAYRQAIDVGYDWHELGDSALLLPER

SEQ ID NO: 66442 - protein, 349 aa, unidentified
  source 1..349: note = Euzebyella marina
  REGION 1..349: note = tr|A0A3G2L3U4|A0A3G2L3U4_9FLAO S-adenosylmethionine:tRNA ribosyltransferase-isomerase; OS = Euzebyella marina OX=1761453 GN=queA PE=3 SV=1
MKLSNFNFELPNNLLAEYPAENRDESKLMVIHRETGKIEHKMFKDLINYFDEGDVMVLNNTKVFPARLYGNKEKTGARIEVFLLRELNEEQRLWDVLVDPARKIRIGNKLYFGDDETLVAEVIDNTTSRGRTLRFLYDGSYLDFRRKLRDLGQTPLPKYIKRDVEPEDEERYQTIYAKYEGAVAAPTAGLHFSKHLLKRLEIKGIDFAEVTLHVGLGTFNPVEVEDLSKHKMDSEELVIDEKAIETVNKAKSGKKKVCAVGTTVMRGLESAVSSEQTLNTFDGWTNKFIFPPYDFSIANCMITNFHLPKSTLLMMVSAFMGHDLMKKAYKEAILEQYKFYSYGDAMLII

SEQ ID NO: 66443 - protein, 341 aa, unidentified
  source 1..341: note = Evtepia gabavorous
  REGION 1..341: note = tr|A0A3E2B765|A0A3E2B765_9FIRM S-adenosylmethionine:tRNA ribosyltransferase-isomerase; OS = Evtepia gabavorous OX=2211183 GN=queA PE=3 SV=1
MKTHDFYYELPPELIAQTPIQRRDASRLLTLDKRTGEIGHHHFYDLPQFLRPGDCLVLNDSRVLPARLLGRREPTGGACEVVLLIDRGENVWECLVRPGKKLREGAKLSFGDGALTAEVTAVLEGGNRLIRFTYEGIFLELLERLGKMPLPPYIKEELQDAERYQTVYSREVGSAAAPTAGLHFTKDLLDSIEKMGVKICYVTLHVGLGTFRPVKAEEITDHAMHSEYCVISAETAETINQTKRDGGRVICVGTTSCRTIESWAEEDGTLRESAGWTNIFIYPGYRFKVLDGLITNFHLPESTLIMLVSALAGREPILAAYEEAVRERYRFFSFGDAMLIV

SEQ ID NO: 66444 - protein, 356 aa, Ewingella americana
  REGION 1..356: note = tr|A0A085G7C0|A0A085G7C0_9GAMM S-adenosylmethionine:tRNA ribosyltransferase-isomerase; OS = Ewingella americana ATCC 33852 OX=910964 GN=queA PE=3; SV = 1
MRVADFSFELPESLIARYPQTQRSGCRLLSLDGPSGELTHGIFTDLLDKLDAGDLLVFNNTRVIPARVFGRKVSGGKIEVLVERVLDSKRILAHVRASKSPKPGAELLLGDNENIKATMVARHDTLFELEFNEDRDVFTLLEEIGHMPLPPYIDRPDEDADRELYQTVYSERLGAVAAPTAGLHFDQPLMDALKEKGVEFAFVTLHVGAGTFQPVRVDTIEDHVMHAEYAEVPQEVVDAVLACKARGKRVIAVGTTSVRSLESAAKAAEDALIAPFFGDTKIFIYPGYHYQVIDALVTNFHLPESTLIMLVSAFAGYKNTMNAYHQAVAEQYRFFSYGDAMFINRNPLAPQEAVGQ

SEQ ID NO: 66445 - protein, 356 aa, Ewingella americana; identical to SEQ ID NO: 66444
  REGION 1..356: note = tr|A0A2N0MZA0|A0A2N0MZA0_9GAMM S-adenosylmethionine:tRNA ribosyltransferase-isomerase; OS = Ewingella americana OX=41202 GN=queA PE=3 SV=1

SEQ ID NO: 66446 - protein, 347 aa, Exiguobacterium antarcticum
  REGION 1..347: note = tr|K0AEU2|K0AEU2_EXIAB S-adenosylmethionine:tRNA ribosyltransferase-isomerase OS=Exiguobacterium antarcticum (strain B7) OX=1087448 GN=queA PE=3 SV=1
MDVNLFDFHLPEEQIAQVPLLDRTSSKMMVVNRETGALRHETFHDIVSYFNAGDTLVINDTKVLPARLFGVKEETGGKIELLLLKQTSEDVWETLAKPAKRVKPGTKLSFGDGLLQAECLEALEDGGRILKFSYTGIFYEVLDQLGTMPLPPYIHEQLEDQDRYQTVYARERGSAAAPTAGLHFTPELLKALTDKGVHLAPLTLHVGLGTFRPVSVDDVDSHKMHSEYYELPESSAQILRETRKNGGRIIAVGTTSTRTLETVIRDHGDFVEASGWTDIFIYPGQEIKGIDGLITNFHLPKSTLIMLVSALSTREHILHAYEEAVAQGYRFFSFGDAMFLTREELNR

SEQ ID NO: 66447 - protein, 352 aa, Exiguobacterium aurantiacum
  REGION 1..352: note = tr|A0A377FV72|A0A377FV72_9BACL S-adenosylmethionine:tRNA ribosyltransferase-isomerase; OS = Exiguobacterium aurantiacum OX=33987 GN=queA PE=3 SV=1
MQDIQLNVNDYDFELPEELIAQVPLLDRTSSRLLVLDRDTGDIEHRHFRDVLDYLHAGDALVVNDSRVLPARLFGAKQETGGKVELLLLKQTEDDVWEALVKPAKKVRVGAIVEFGDGLLRAECVEELPEGGRRFKFDYDGIFYEILDELGTMPLPPYIREQLDDQDRYQTVYAKERGSAAAPTAGLHFTEELLEAAQAKGVKLIPLTLHVGLGTFRPVTADSIEEHTMHSEYFELSAASAEALRDVRANGGRVFAVGTTSTRTLETIVRDHGDFVESSGWTDIFIYPGVELKAIDGLITNFHLPKSTLVMLVSAFASRDIILNAYRTAVQERYRFFSFGDAMLITRKEENK

SEQ ID NO: 66448 - protein, 352 aa, unidentified
  source 1..352: note = Exiguobacterium chiriqhucha
  REGION 1..352: note = tr|U1N0R7|U1N0R7_9BACL S-adenosylmethionine:tRNA ribosyltransferase-isomerase OS=Exiguobacterium chiriqhucha RW-2 OX=1345023 GN=queA PE=3 SV=1
MQDIQLNVNDYDFDLPEELIAQVPLLDRTSSRLLVLDRDTGDIEHRHFRDVLDYLQAGDALVVNDSRVLPARLFGAKQETGGKVELLLLKQTEDDVWEALVKPAKKVRVGAIVEFGNGLLRAECVEELPEGGRRFKFDYDGIFYEILDELGTMPLPPYIREQLDDQDRYQTVYARERGSAAAPTAGLHFTEELLAAAEAKGVKLIPLTLHVGLGTFRPVTADTIEEHTMHSEYFELSAASAEALRDIRANNGRVFAVGTTSTRTLETIVRDHGDFVESSGWTDIFIYPGVELKAIDGLITNFHLPKSTLVMLVSAFASRDIILNAYRTAVQERYRFFSFGDAMLITRKEENK

SEQ ID NO: 66449 - protein, 346 aa, unidentified
  source 1..346: note = Exiguobacterium enclense
  REGION 1..346: note = tr|A0A0V8GJH4|A0A0V8GJH4_9BACL S-adenosylmethionine:tRNA ribosyltransferase-isomerase; OS = Exiguobacterium enclense OX=1017277 GN=queA PE=3 SV=1
MDVNLFDFHLPEEQIAQVPLLDRTSSKLMVLDRETGAIQHQHFHDIVDHFREGDTLVINDTKVLPARLFGVKEETGGKIELLLLKQTSDDVWETLAKPAKRVKPGTILSFGDGLLRAECVEALEDGGRILKFFYDGIFYEVLDQLGTMPLPPYIHEQLEDQDRYQTVYARERGSAAAPTAGLHFTPELLEALKAKGVRIAPLTLHVGLGTFRPVSVDDVDSHKMHSEYYELPESSAALLRETRKQGGRIIAVGTTSTRTLETVIRDHGDFVEATGWTDIFIFPGQEVKGIDGLITNFHLPKSTLIMLVSALSTREHILHAYEEAVANGYRFFSFGDAMFLTREERN

SEQ ID NO: 66450 - protein, 358 aa, Exiguobacterium mexicanum
  REGION 1..358: note = tr|A0A099DGG1|A0A099DGG1_9BACL S-adenosylmethionine:tRNA ribosyltransferase-isomerase; OS = Exiguobacterium mexicanum OX=340146 GN=queA PE=3 SV=1
MKRSNDMQDIQLNVNDYDFDLPEELIAQVPLLDRTSSRLLVLDRDTGDIEHRHFRDVLDYLQAGDALVVNDSRVLPARLFGAKQETGGKVELLLLKQTEDDVWEALVKPAKKVRVGAIVEFGNGLLRAECVEELPEGGRRFKFDYDGIFYEILDELGTMPLPPYIREQLDDQDRYQTVYARERGSAAAPTAGLHFTEELLAAAEAKGVKLIPLTLHVGLGTFRPVTADTIEEHTMHSEYFELSATSAEALRDVRASGGRVFAVGTTSTRTLETIVRDHGNFVESSGWTDIFIYPGVELKAIDGLITNFHLPKSTLVMLVSAFASRDIILNAYRTAVQERYRFFSFGDAMLITRKEENK

SEQ ID NO: 66451 - protein, 347 aa, Exiguobacterium sibiricum
  REGION 1..347: note = sp|B1YJR0|QUEA_EXIS2 S-adenosylmethionine:tRNA ribosyltransferase-isomerase OS=Exiguobacterium sibiricum (strain DSM 17290 / JCM 13490 / 255-15) OX=262543 GN=queA; PE = 3 SV=1
MDVNLFDFHLPEEQIAQVPLLDRTSSKLMVVNRETGALRHEKFHDIVSYFNAGDTLVINDTKVLPARLFGVKEETGGKIELLLLKQTSDDVWETLAKPAKRVKPGTVLSFGDGLLRAECVEALDDGGRILKFSYTGIFYEVLDQLGTMPLPPYIHEQLEDQDRYQTVYARERGSAAAPTAGLHFTPELLQALTDKGVQLAPLTLHVGLGTFRPVSVDDVDSHKMHSEYYELPESSAKILRETRKNGGRIIAVGTTSTRTLETVIRDHGDFVEASGWTDIFIYPGQEIKGIDGLITNFHLPKSTLIMLVSALSTREHILHAYEEAVAQNYRFFSFGDAMFLTREELNR

SEQ ID NO: 66452 - protein, 346 aa, Exiguobacterium sp.
  REGION 1..346: note = tr|A0A031IGF9|A0A031IGF9_9BACL S-adenosylmethionine:tRNA ribosyltransferase-isomerase; OS = Exiguobacterium sp. RIT341 OX=1470592 GN=queA PE=3 SV=1
MDVNLFDFHLPEEQIAQVPLLDRTSSKLMVLDRETGAIQHQHFHDIVDHFREGDTLVINDTKVLPARLFGVKGETGGKIELLLLKQTSDDVWETLAKPAKRVKPGTILSFGDGLLRAECVEALEDGGRILKFFYDGIFYEVLDQLGTMPLPPYIHEQLEDQDRYQTVYARERGSAAAPTAGLHFTPELLEALQAKGVRIAPLTLHVGLGTFRPVSVDDVDSHKMHSEYYELPESSAALLRETRKQGGRIIAVGTTSTRTLETVIRDHGDFVEATGWTDIFIFPGQEVKGIDGLITNFHLPKSTLIMLVSALSTREHILHAYEEAVANGYRFFSFGDAMFLTREERN

SEQ ID NO: 66453 - protein, 347 aa, Exiguobacterium sp.
  REGION 1..347: note = tr|A0A419DPM7|A0A419DPM7_9BACL S-adenosylmethionine:tRNA ribosyltransferase-isomerase; OS = Exiguobacterium sp. RIT452 OX=2315552 GN=queA PE=3 SV=1
MDVNLFDFHLPEEQIAQVPLLDRTSSKLMVINRETGALRHEKFHDIVSHFNAGDTLVINDTKVLPARLFGVKEETGGKIELLLLKQTSDDVWETLAKPAKRVKPGTVLSFGDGLLRAECMEALEDGGRILKFSYTGIFYEVLDQLGTMPLPPYIHEQLEDQDRYQTVYARERGSAAAPTAGLHFTPELLQALTDKGVKLAPLTLHVGLGTFRPVSVDDVDSHKMHSEYYELPESSAQILRDTRKNGGRIIAVGTTSTRTLETVIRDHGDFVEASGWTDIFIYPGQEIKGIDGLITNFHLPKSTLIMLVSALSTREHILHAYEEAVAQGYRFFSFGDAMFLTREELNR

SEQ ID NO: 66454 - protein, 379 aa, unidentified
  source 1..379: note = Extensimonas vulgaris
  REGION 1..379: note = tr|A0A369AIT0|A0A369AIT0_9BURK S-adenosylmethionine:tRNA ribosyltransferase-isomerase; OS = Extensimonas vulgaris OX=1031594 GN=queA PE=3 SV=1
MPFPAPTDPGAPRHFTLQDFDFALPPELIAQHPAAERSAARLLDGRGAQPVDRVFRDLPALLQPGDLLVFNDTRVLKARLFGEKASGGKLELLIERVLAGNEVVAHMKVSKKPRVGSTLLLAGGPQRGGFTATLLGRWPDADGPLFRLALHGPADAPDATPYALMERYGHMPLPPYIARAQQSADAAQAAQEAQDAERYQTVFARQPGAVAAPTAALHFDAGVLAALAARGVERANVTLHVGAGTFQPVKTENLAEHRMHSEWYDIPAATLEALARCRARGGRVVAVGTTTVRTLESWARSGHTRGETDIFITPGFAFQVVDLLVTNFHLPKSTLMMLVSAFAGWAHTMALYRHAITQRYRFFSYGDAMLLARCTPQAA

SEQ ID NO: 66455 - protein, 341 aa, unidentified
  source 1..341: note = Extibacter muris
  REGION 1..341: note = tr|A0A4R4FCS3|A0A4R4FCS3_9FIRM S-adenosylmethionine:tRNA ribosyltransferase-isomerase; OS = Extibacter muris OX=1796622 GN=queA PE=3 SV=1
MKRQDFYYELPEELIAQDPLEDRSSSRLLVLGKESGLVSHRVFKDITDYLHRGDCLVINDTKVIPARLIGSKIGTDAKIEVLLLKRKEDNVWETLVKPGKKAKVGTRIRFGDGILIGEVIGVVEEGNRLIQFSYEGIFEEILDRLGQMPLPPYITHQLEDKNRYQTVYAAHSGSAAAPTAGLHFTPELLEEIRQKGIDIAKVTLHVGLGTFRPVKVDDIMEHHMHSEFFQIDEAAAMKINKAKDTGGRVVCVGTTSCRTIESAAGADGHIKAGSGWTDIFIYPGYRFKFLDCLITNFHLPESTLIMLVSALAGRENVLAAYEEAVKERYRFFSFGDAMLIV

SEQ ID NO: 66456 - protein, 348 aa, unidentified
  source 1..348: note = Fabibacter misakiensis
  REGION 1..348: note = tr|A0A1E5SYJ3|A0A1E5SYJ3_9BACT S-adenosylmethionine:tRNA ribosyltransferase-isomerase; OS = Fabibacter misakiensis OX=1563681 GN=queA PE=3 SV=1
MKLSAFKLELPEDRIAKYPVENRDESRLMVLHRDTGEIEHKIFKDIVGYFDEGDVMVNNDTKVFPARLYGQKEKTGAQIEVFLLRELNAEMHLWDVLVDPARKIRVGNKLYFGEGELVAEVIDNTTSRGRTIRFLYDGTDEEFYKTIDTLGETPLPRTIPRETEPEDRERFQTIYAKNVGAVAAPVAGLHFTQQVLKRLEIKGVDVSPITLHIGLGTFRPVDVEDLTKHKMDSENYIIEESTAQIVNRALDNKKRVCSIGTTSMRALESSVSASDRLKANSAWTDKFIFPPYEFKICNALLTNFHLPESTLLMQAAAFGGYDFMMEAYQVAIKENYRFYSYGDAMLIL

SEQ ID NO: 66457 - protein, 401 aa, unidentified
  source 1..401: note = Fabibacter misakiensis
  REGION 1..401: note = tr|A0A1E5T1F4|A0A1E5T1F4_9BACT S-adenosylmethionine:tRNA ribosyltransferase-isomerase; OS = Fabibacter misakiensis OX=1563681 GN=queA PE=3 SV=1
MKLPDSPDLDLINYELPDHKIAKRPLAKRSDAKLLAYRQGNISDNSFEEIEDFLDRKTTLCFNNTKVIPARLYFHKETGAQIEIFLLNPITPSTIMSSVMEETKRVSWQCMIGNFKRWKEDQTLISKLSCNGDTIHLKATIIDRDEKHIAFEWDNSDYSFAEIVELAGEVPLPPYLNRAPEAEDKPRYQTVYSEEEGAVAAPTAGLHFTADILKNLKDKGITESFLTLHVSAGTFQPIKVSDAREHPMHSEQVEITKETVDQIIAAEQVVAVGTTSMRSLESLYWFGVRLINGNDAFAIDKLEIYQEASSLPSRKLAFETIAEWMDRQNLVRIHGTTEIFIMPGYKFKVCDGLITNFHQPGSTLLLLIAAFIGEDWQKVYDHALKNNYRFLSYGDSSILLP

SEQ ID NO: 66458 - protein, 402 aa, unidentified
  source 1..402: note = Fabibacter pacificus
  REGION 1..402: note = tr|A0A1I0QYH7|A0A1I0QYH7_9BACT S-adenosylmethionine:tRNA ribosyltransferase-isomerase; OS = Fabibacter pacificus OX=1267423 GN=queA PE=3 SV=1
MNQENAPDNLSLLVYDLPEERIAKHPLDQRDSSQLLVYRDGEIKDSTFSKIGSELPANTTLFFNNTKVIPARLFFHKDTGALIEIFLLKPLQPSEVISQVMEATDAVTWECMVGNFKKWKDGQTLKLSLNDGTVDITLTASIENRSEMCISFTWDNTNYSFAEIVELAGKVPLPPYLNREAIDADKERYQTVYSEKEGAVAAPTAGLHFTDKVLEELANNGVKESFLTLHVSAGTFQPIKVKNPKDHPMHSEQMAVEKQAIEDVINSEFVIPVGTTSMRTLESLYWFGVRLLNGNESFDIQKLEIYNNSENLPARKESFQAILNWMNKGDISQLIGKTEIFIMPGYQFRVCNGLITNFHQPGSTLLLLVSAFLKGNWKKVYNHALENNYRFLSYGDSSLLLP

SEQ ID NO: 66459 - protein, 348 aa, unidentified
  source 1..348: note = Fabibacter pacificus
  REGION 1..348: note = tr|A0A1I0NUZ7|A0A1I0NUZ7_9BACT S-adenosylmethionine:tRNA ribosyltransferase-isomerase; OS = Fabibacter pacificus OX=1267423 GN=queA PE=3 SV=1
MKLSAFKFELPEDRIAKYPTENRDDSRLMVLHRDTGEIEHKQFKDIVEYFEEGDVMVNNDTKVFPARLYGQKEKTGAKIEVFLLRELNPEMHLWDVLVDPARKIRVGNKLYFGEGELVAEVIDNTTSRGRTIRFLYDGTDEEFYNTIDQLGETPLPRTIPRETEPEDRERFQTIYAKNVGAVAAPVAGLHFTLQVLKRLEIIGVDVSPITLHIGLGTFRPVDVEDLTKHKMDSENYTITQETADFVNRALDNKKRVCSIGTTSMRALESSVSANGRLKANEAWTDKFIFPPYEFKICNSLVTNFHLPESTLLMQAAAFGGYDLVMEAYQVAIKEKYRFFSYGDAMLIL

SEQ ID NO: 66460 - protein, 400 aa, Fabibacter sp.
  REGION 1..400: note = tr|A0A1E5SR80|A0A1E5SR80_9BACT S-adenosylmethionine:tRNA ribosyltransferase-isomerase; OS = Fabibacter sp. 4D4 OX=1889784 GN=queA PE=3 SV=1
MSIPESPDLSVFNYHLPDEKIAKRPLANRHDSKLLLYEKGYISDKVFREAPEFLDERTTLFFNNTKVIPARLHFQKDTGAQIEIFLLKPVSPTPIISTVMESTDEVIWECMVGNLKRWKEETVLRRTLNDGNQEVQLKATLVNRDERLVSFKWDNKDYAFAEIVELAGQVPLPPYLNRAAEPEDKPRYQTVYSKEEGAVAAPTAGLHFTDQILEQLKQNGVKESFLTLHVSAGTFQPIKVDDAREHPMHSEQIEVTIDTIKDIVEAKRVVAVGTTSMRSLESLYWFGVRLANGNEQFNIEKLELYQAGDLPSRTEAFQYIHDWMIDKGIDKLSGSTEIFIMPGYQFKVCDGLFTNFHQPGSTLMLLVAAFIGEHWQKVYDHALQNEYRFLSYGDSSLLLP

SEQ ID NO: 66461 - protein, 348 aa, Fabibacter sp.
  REGION 1..348: note = tr|A0A1E5SSB8|A0A1E5SSB8_9BACT S-adenosylmethionine:tRNA ribosyltransferase-isomerase; OS = Fabibacter sp. 4D4 OX=1889784 GN=queA PE=3 SV=1
MKLSAFKLELPEDKIAKYPVENRDESKLMVLHKDTGEIEHKVFKDIVDYFDEGDVMVNNDTKVFPARLYGQKEKTGAQIEVFLLRELNSEMHLWDVLVDPARKIRVGNKLYFGEGELVAEVIDNTTSRGRTIRFLYDGSDEEFYKTIDTLGETPLPRTIPRETEPEDRERFQTIYAKHVGAVAAPVAGLHFTHQVLKRLEIKGVDVTPITLHIGLGTFRPVDVEDLTKHKMDSENYTILDPTAEIVNRALDNKKRVCSIGTTSMRALESSVSASDRLKANSAWTDKFIFPPYEFKICNALVTNFHLPESTLLMQAAAFAGYDLMMEAYQTAIKEDYRFFSYGDAMLII

SEQ ID NO: 66462 - protein, 345 aa, Facklamia hominis
  REGION 1..345: note = tr|K1M1I1|K1M1I1_9LACT S-adenosylmethionine:tRNA ribosyltransferase-isomerase OS=Facklamia hominis CCUG 36813 OX=883111 GN=queA PE=3 SV=1
MTYTTKDFDYDLPEELIAQTPLKDRSSSRLLVLDRQTNEIQDTDFKHLLDFLEPGDALVINETRVIPARLFGIKADTGGHIEVLLLNNIEGNRWECLVKPGKRAHKGTRLVFGDENLLTAEILEDLEHGGRIIEFSYQGVFLEILEQLGEMPLPPYIKEKLEDPDRYQTVYAKENGSAAAPTAGLHFTQELFDQASQKGIEIIPILLHVGLGTFRPVSVDNIADHHMHSEFYRVSPEAADRIQKVKDNGGKIIAVGTTSVRTLETVAKNHQGNIVAASGWTDIFITPGFKFQVVDHLITNFHLPQSTLVMLVSAFYDRESILKAYQHAVEEHYRFFSFGDAMLIL

SEQ ID NO: 66463 - protein, 344 aa, Facklamia ignava
  REGION 1..344: note = tr|A0A2I1JXV9|A0A2I1JXV9_9LACT S-adenosylmethionine:tRNA ribosyltransferase-isomerase; OS = Facklamia ignava OX=137730 GN=queA PE=3 SV=1
MITTKDFDYHLPEELIAQTPLIDRSASRLMVLNRTQHTIEDTDFKHVIDYLNPGDALVINETRVLPARLMGVKPDTGGHLEVLLLTNIEGNRWETLVKPARRAKIGTRIEFGDQQQITGIVIEELEHGGRIVEFEYEGIFIERLEELGQMPLPPYIKERLDNPERYQTVYAKENGSAAAPTAGLHFTKDLMDQIKAKGIQIIPLTLHVGLGTFRPVSVDNIEDHQMHAEFYSLSEMSAQQINKVQADGGNIIAVGTTSVRTLETIAHRNQGKIVSESGWTDIFITPGFEFKAVDHLITNFHLPQSTLMMLVSAFYSRDAIMEAYQHAVDQEYRFFSFGDAMLIL

SEQ ID NO: 66464 - protein, 344 aa, Facklamia ignava; identical to SEQ ID NO: 66463
  REGION 1..344: note = tr|K1LYS4|K1LYS4_9LACT S-adenosylmethionine:tRNA ribosyltransferase-isomerase OS=Facklamia ignava CCUG 37419 OX=883112 GN=queA PE=3 SV=1

SEQ ID NO: 66465 - protein, 345 aa, Facklamia languida
  REGION 1..345: note = tr|H3NGN0|H3NGN0_9LACT S-adenosylmethionine:tRNA ribosyltransferase-isomerase OS=Facklamia languida CCUG 37842 OX=883113 GN=queA PE=3 SV=1
MTLSTKDFDYELPEDLIAQTPLKDRSSSRLLVLDRQAHTQEDTDFKHILDYLQPGDALVVNETRVIPARLFGVKEDTGGHIEVLLLKNIEGNQWECLVKPGKRARVGTRLTFGQGGPLKGEIIASMDHGGRIIEFSYEGVFLEVLESLGEMPLPPYIKERLDDPDRYQTVYAKENGSAAAPTAGLHFTPELLDQARAKGIQVIPILLHVGLGTFRPVSVDQVEDHQMHAEFYQVSQDAADQIQAVKQGGGKIVAVGTTTVRTLETVAQQHDGQIVAASGWTDIFITPGFEFKLVDHLITNFHLPQSTLVMLVSAFYDRQAILAAYQHAVQAKYRFFSFGDAMLIL

SEQ ID NO: 66466 - protein, 345 aa, Facklamia miroungae
  REGION 1..345: note = tr|A0A1G7PN04|A0A1G7PN04_9LACT S-adenosylmethionine:tRNA ribosyltransferase-isomerase; OS = Facklamia miroungae OX=120956 GN=queA PE=3 SV=1
MTYTTKDFDYHLPEELIAQTPLKDRSSSRLLVLDRQSHQKTDTDFKHILDYLQKGDALVVNETRVIPARLFGVKPDTGGHIEVLLLNNTQGNQWECLVKPGKRAKVGTVLHFGDQAQLVGTIVEHKADGGRIIEFSYQGVFLEVLESLGQMPLPPYIKEKLDDPDRYQTVYAKQNGSAAAPTAGLHFTQDLLQEARDRGIEIIPIVLHVGLGTFRPVSVEAIDQHQMHAEYYQVSPESAQRIQRVRQKGGKITAVGTTSVRTLETIARDHQGQIVAASGWTDIFITPGFKFCAVDHLITNFHLPQSTLMMLVSAFYDRNKILDAYQHAVAEKYRFFSFGDAMFIL

SEQ ID NO: 66467 - protein, 342 aa, unidentified
  source 1..342: note = Faecalibacterium cf.
  REGION 1..342: note = tr|E2ZIS1|E2ZIS1_9FIRM S-adenosylmethionine:tRNA ribosyltransferase-isomerase OS=Faecalibacterium cf. prausnitzii KLE1255 OX=748224 GN=queA PE=3 SV=1
MLKKDFWYDLPKELIAQEPADPRDSARLMVLSQKDDSIQHKIFHDLPEFLEPGDLLVVNNSKVLPARIVGVKQPTGAVCELLLLRQVKGDQWECLAKPGKRMQPGTKVSFGDGSLTAVVDETMEDGNKYVTFYYDTETLYEKLDEFGKMPLPPYITKQLEDQSQYQTVYAKELGSAAAPTAGLHFTPELMDTIRAKGVNIAEVTLHVGLGTFRPVQEDEIADHKMHSEWYCIDEKTAQMIRDTKAAGHRVIAVGTTSCRTLEAVAAKYGEIRACSGNTSIFLYPGVKFNCIDGLITNFHLPESTLIMLVSALYGYEKTMAAYKVAVEERYRFFSFGDAMLIL

SEQ ID NO: 66468 - protein, 345 aa, Faecalibacterium prausnitzii
  REGION 1..345: note = tr|A8SFA3|A8SFA3_9FIRM S-adenosylmethionine:tRNA ribosyltransferase-isomerase OS=Faecalibacterium prausnitzii M21/2 OX=411485 GN=queA PE=3 SV=1
MHSMLKKDFWYDLPKELIAQEPASPRDAARLMVLSQKDDSIQHKVFRDLPEFLEPGDLLVVNNSKVLPARIVGVKQPTGAVCELLLLRQVKGDQWECLAKPGKRMQPGTKVSFGDGSLTAVVDETMEDGNKYVTFYYDTETLYEKLDEFGKMPLPPYITKQLEDQSQYQTVYAKELGSAAAPTAGLHFTPELMDTIRAMGVGIAEVTLHVGLGTFRPVQEDEISDHKMHSEWYSISEETARRIRETKAAGHRVIAVGTTSCRTLEAAAAKYGEIKACSGNTSIFLYPGVKFNCIDGLITNFHLPESTLIMLVSALYGYEKTMHAYEVAVAEKYRFFSFGDAMLIV

SEQ ID NO: 66469 - protein, 342 aa, Faecalibacterium prausnitzii; identical to SEQ ID NO: 66467
  REGION 1..342: note = tr|A0A2J4JRV6|A0A2J4JRV6_9FIRM S-adenosylmethionine:tRNA ribosyltransferase-isomerase; OS = Faecalibacterium prausnitzii OX=853 GN=queA PE=3 SV=1

SEQ ID NO: 66470 - protein, 371 aa, Faecalibacterium sp.
  REGION 1..371: note = tr|R6R0N5|R6R0N5_9FIRM S-adenosylmethionine:tRNA ribosyltransferase-isomerase OS=Faecalibacterium sp. CAG:82 OX=1262898 GN=queA PE=3 SV=1
MQYNKDCLYRFYDNIDTAFVSIIGKANAFMLKKDFWYDLPKELIAQEPADPRDSARLMVLSQKDDSIQHRIFHDLPEYLEPGDLLVVNNSKVLPARIVGVKQPTGAVCELLLLRQVKGDQWECLAKPGKRMQPGTKVSFGDGTLTAVVDETMEDGNKYVTFYYDTETLYEKLDEFGKMPLPPYITKQLEDQSQYQTVYAKELGSAAAPTAGLHFTPELMDTIRAKGVGIAEVTLHVGLGTFRPVMEDEIADHKMHSEWYSISEETAQRIRETKAAGHRVIAVGTTSCRTLEAVAAKYGEIKACSGNTSIFLYPGVKFNCIDGLITNFHLPESTLIMLVSALYGYEKTMAAYKVAVEEKYRFFSFGDAMLIL

SEQ ID NO: 66471 - protein, 357 aa, Faecalibacterium sp.
  REGION 1..357: note = tr|R5FHX4|R5FHX4_9FIRM S-adenosylmethionine:tRNA ribosyltransferase-isomerase OS=Faecalibacterium sp. CAG:1138 OX=1262896 GN=queA PE=3 SV=1
MKRSDFYYDLPEELIAQHPAEPRDSSRLLVLDAESGEIEHTVFREIGKFLKKGDLLVVNNTKVIPARLYGYKEGRKVPEGEKSVPPTRFEFLLLKRLSYTDWECIARPAKKVTVGSKFTFGEGLCCTVKAIGESGIRIVGFEFEGVFEDVLERVGNVPLPPYITEKLEDKNRYQTVYAKTDGSAAAPTAGLHFTTRLIDELKANGVEFVEVLLHVGLGTFRPVKEDDVLDHKMHSEYYEISSEAAEIINRANAEGRRIIAVGTTSGRVLETVADENGFVRPCHGETEIFIYPGYKFKILDGMITNFHLPESTLIMYVSAFCGREQTLKMYETAVKEKYRFFSFGDATFLYNGGRGRK

SEQ ID NO: 66472 - protein, 341 aa, unidentified
  source 1..341: note = Faecalicatena contorta
  REGION 1..341: note = tr|A0A316A2P2|A0A316A2P2_9FIRM S-adenosylmethionine:tRNA ribosyltransferase-isomerase; OS = Faecalicatena contorta OX=39482 GN=queA PE=3 SV=1
MKTSDFYYDLPQELIAQDPLEDRAGSRLLVLDKKTGKIEHHAFRDIAEYLESGDCLVINDTKVIPARLIGSKEGTGAKIEVLLLKRKENDVWETLVKPGKKAKPGTRISFGDGLLVGEVMDVVEEGNRLIHFEYEGIFEEILDQLGQMPLPPYITHQLKDKNRYNTVYASHAGSAAAPTAGLHFTPELMEKIREKGIEIARVTLHVGLGTFRPVKVEDVTAHHMHSEFYIIDEEAAEKINSAKKNHKRVICVGTTSCRTIESAADENGHLKACSGWTEIFIYPGYEFKILDCLITNFHLPESTLIMLVSALAGKEHVLNAYEEAVKEKYRFFSFGDAMLIL

SEQ ID NO: 66473 - protein, 341 aa, unidentified
  source 1..341: note = Faecalicatena contorta
  REGION 1..341: note = tr|A0A173Z5W0|A0A173Z5W0_9FIRM S-adenosylmethionine:tRNA ribosyltransferase-isomerase; OS = Faecalicatena contorta OX=39482 GN=queA PE=3 SV=1
MKTSDFYYELPQELIAQDPLEDRSGSRLLVLDKETGETKHRHFKDIIEYLNPGDCLVINDTKVIPARLIGSKVGTDAKIEVLLLKRKENDVWETLVKPGRKAKPGTKISFGDGILMGEVVDVVDEGNRLIHFAYEGIFEEILDRLGQMPLPPYITHQLQDKDRYNTVYAVHEGSAAAPTAGLHFTPQLLEDIGKKGVDIARVTLHVGLGTFRPVKVEEVTDHHMHSEFYLIDEDAADKINRAKEQKKRVICVGTTSCRTIESAAGEDGRLKACSGWTEIFIYPGYRFQVLDGLITNFHLPESTLIMLVSALAGREHVLAAYEEAVREEYRFFSFGDAMLIL

SEQ ID NO: 66474 - protein, 341 aa, unidentified
  source 1..341: note = Faecalicatena orotica
  REGION 1..341: note = tr|A0A2Y9BH56|A0A2Y9BH56_9FIRM S-adenosylmethionine:tRNA ribosyltransferase-isomerase; OS = Faecalicatena orotica OX=1544 GN=queA PE=3 SV=1
MKTSDFYYDLPEELIAQDPLEDRSGSRLLVLDKETGEIKHRMFRDITEYLRAGDCMVINDTKVIPARLIGSKIGTDAKIEVLLLKRKENDVWETLVKPGRKAKPGTRISFGDGLLVGEVIDVVEEGNRLIHFEYEGIFEEILDRLGQMPLPPYITHQLQDRDRYNTVYAVHEGSAAAPTAGLHFTPELLEEIQEKGIEIARVTLHVGLGTFRPVKVDDVTEHHMHSEFYQIDEEAAGKINRAKDNGGRVVCVGTTSCRTIESAADENGRLKACSGWTEIFIYPGYQFKILDCLITNFHLPESTLIMLVSALAGKEPVLAAYEEAVKERYRFFSFGDAMLIV

SEQ ID NO: 66475 - protein, 341 aa, unidentified
  source 1..341: note = Faecalimonas umbilicata
  REGION 1..341: note = tr|A0A4V2UQ30|A0A4V2UQ30_9FIRM S-adenosylmethionine:tRNA ribosyltransferase-isomerase; OS = Faecalimonas umbilicata OX=1912855 GN=queA PE=3 SV=1
MRKEDFNFDLPEELIAQDPLEDRSSSRLLVLDKETGKTEHHVFREIIDYLEAGDCLVINDTKVIPARLIGSKIGTDAKIEVLLLKRKENDVWETLVKPGKKAKMGTRISFGDGLLVGEVVDIVEEGNRLIHFEYEGIFEEILDRLGQMPLPPYITHQLEDKNRYQTVYAKHSGSAAAPTAGLHFTPELLKKIEEKGVQIARVTLHVGLGTFRPVKVDNILEHHMHSEFYQIEEEAAEKINTAKANGKRVIAVGTTSCRTIESAAKEDGTIAPVSGWTDIFIYPGYQFKVLDCLITNFHLPESTLVMLVSALAGREHVLNAYEEAIKERYRFFSFGDAMFIR

SEQ ID NO: 66476 - protein, 342 aa, Falsibacillus pallidus
  REGION 1..342: note = tr|A0A370GQ80|A0A370GQ80_9BACI S-adenosylmethionine:tRNA ribosyltransferase-isomerase; OS = Falsibacillus pallidus OX=493781 GN=queA PE=3 SV=1
MKVDLFDFHLPEELIAQTPLEERTASRLMVLNKEDGSLSHSHFRDITKYLKPGDCLVLNDTRVLPARLFGEKEDTGAAIEILLLKQEEGDAWETLVKPAKRVKEGTIITFGDGRLTAECVGIKDHGGRILEFKYDGIFYEILESLGDMPLPPYIKERLDDSERYQTVFAKERGSAAAPTAGLHFTQELLKEIEDMGVHIAFITLHVGLGTFRPVSVEDLQEHEMHAEFYQISEGTARLLNEVREAGGRIISVGTTSTRTLETVATANDGRFTASSGWTNIFIYPGYEFKAIDGMITNFHLPKSTLIMLVSALAGREHVLHAYETAVKERYRFFSFGDAMFIL

SEQ ID NO: 66477 - protein, 347 aa, Falsibacillus pallidus
  REGION 1..347: note = tr|A0A370GF72|A0A370GF72_9BACI S-adenosylmethionine:tRNA ribosyltransferase-isomerase; OS = Falsibacillus pallidus OX=493781 GN=DFR59_105152 PE=3; SV = 1
MMTVLSHKNFQVPEYLNASVPAEYRGLTRDGVNLMVIDSNSGNTHHNSFHEIGSYLEPGDVLVLNNSRTIPSVLKGRQDGMEVEVRLSRSISDHEWDVLVVQQDADLSKPIYFEDGIEGSVVGSGSEFPLVTMSFSVGGSELFDFFYRYGKPIRYEYIENPWPLQAFQTVYGSVPGSVEMPSAGRAFSWKILNQLREEGIELAFIQLHAGLSYYGNDLWPNPDGHPEAYEIPEETARLVNEAKERGGKVIAVGTTVVRTLETAADENGNIEAGKGITNLYIKKGTNLKAVDGLLTGFHEPEASHLDMLTAFLPEDILMAAYQEALEHGYLWHEFGDMNLILPLGGKA

SEQ ID NO: 66478 - protein, 347 aa, Falsibacillus sp.
  REGION 1..347: note = tr|A0A3L7JSV8|A0A3L7JSV8_9BACI S-adenosylmethionine:tRNA ribosyltransferase-isomerase; OS = Falsibacillus sp. GY 10110 OX=2478915 GN=D9X91_18705; PE = 3 SV=1
MNATPQKSFQVPDYLNASVPAEYRGLTRDSVNLMVIDSASGQSYHRRFDEIGKFLMPGDLLVLNKSRTIPAVIIGEQDGKKVEVRLSHAHSGNQWEALIASNDFDQQKEISFPDGVNAKVIGTGSEMPLVILAFSVGGAELFNFFYLHGNPIRYEYIHTDWPLDAYQTVYASAPGSVEMASAGRAFTWRLLQELRQKGVKLGFIQLHAGLSYYGNDQWPNPSNHPEAFEIPEQTASHINEAKRNGHRVIAVGTTVVRTLESAATEKGMVKAAKGITNMYITKDTELQIADGLLTGFHEPEASHMDMLTAFLQEGTLLKSYQEAIDHGYLWHEFGDMNLILPMGGVLA

SEQ ID NO: 66479 - protein, 342 aa, Falsibacillus sp.
  REGION 1..342: note = tr|A0A3L7K4S2|A0A3L7K4S2_9BACI S-adenosylmethionine:tRNA ribosyltransferase-isomerase; OS = Falsibacillus sp. GY 10110 OX=2478915 GN=queA PE=3 SV=1
MKVDLFDFDLPEELIAQTPLEDRTSSRLMVLDKKDGSLTHDHFHGITKYLQEGDCLVLNDTRVLPARLFGEKSDTGASIEILLLKQESGDVWETLVKPAKRVKIGTVITFGDGRLRAECVGLKEHGGRLMEFQYEGIFYEILESLGDMPLPPYIKEKLDDRERYQTVYARERGSAAAPTAGLHFTQELLKEIESMGVHIAFITLHVGLGTFRPVSVEDLQEHEMHAEFYQVTEGTARLLNEVHESGGRIISVGTTSTRTLETIAAANDGKFAADSGWTNIFIYPGYEFKAIDGMITNFHLPKSTLIMLVSALAGRENVLHAYNTAVKERYRFFSFGDAMLIK

SEQ ID NO: 66480 - protein, 356 aa, unidentified
  source 1..356: note = Falsochrobactrum ovis
  REGION 1..356: note = tr|A0A364JYM1|A0A364JYM1_9RHIZ S-adenosylmethionine:tRNA ribosyltransferase-isomerase; OS = Falsochrobactrum ovis OX=1293442 GN=queA PE=3 SV=1
MRVDLFDFDLPEEHIALRPVEPRDHAKLLIVNPGMKFEDRQVFELPDLLQPGDALVFNDTKVIPAQLEGMREREGNIAQVNATLHMRVGPYQWKAFLRPAKRIKQGDRIRFGHSGTSCFMGTLDATVVEKSDGGEALLSFDLSGAMLDEAIAAVGHIPLPPYIASKRADDERDRKDYQTVYAREEGAVAAPTAGLHFTPELLKEIRARGIEEHFVTLHVGAGTFLPVKAEDTADHKMHSEVGYVSQQTADALNAVHKRGGRIVCVGTTSLRLIESASSEDGVIHPWSGATDIFITPGYKFRAVDLLMTNFHLPRSTLFMLVAAFSGLETMREAYQYAIENDYRFYSYGDASLLTRA

SEQ ID NO: 66481 - protein, 356 aa, unidentified
  source 1..356: note = Falsochrobactrum sp.
  REGION 1..356: note = tr|A0A316J8N7|A0A316J8N7_9RHIZ S-adenosylmethionine:tRNA ribosyltransferase-isomerase; OS = Falsochrobactrum sp. HN4 OX=2201899 GN=queA PE=3 SV=1
MRVDLFDFDLPEERIALRPVEPRDHARLLRIRSGQPFEDRQVYELPDLLQPGDALVFNDTKVIPAQLEGLREREGAIAQIGATLHMRMGPNRWKAFLRPGKRVKEGDRIRFGHSGSSCFLGTLDATVEEKGEAGEALLVFDLSGAILDEAIAAVGHIPLPPYIASKRAEDERDRKDYQTVFAREEGAVAAPTAGLHFTSELLEKIKKRGIEEHFVTLHVGAGTFLPVKADDTGDHKMHSEIGHVSQRTADALNAVHERGGRIVCVGTTSLRLIESATGEDGIVRPWSGATDIFITPGYRFRAVDLLMTNFHLPRSTLFMLVSAFSGLDTMREAYKHAISSNYRFYSYGDASLLERA

SEQ ID NO: 66482 - protein, 357 aa, Fastidiosipila sanguinis
  REGION 1..357: note = tr|A0A2S0KML7|A0A2S0KML7_9FIRM S-adenosylmethionine:tRNA ribosyltransferase-isomerase; OS = Fastidiosipila sanguinis OX=236753 GN=queA PE=3 SV=1
MKKSDFYYDLPEELIAQHPVEHRDESRLLHLNSETNEIEHLHFRDILDQLNRGDTLVLNDSRVIPARLFGTKASLQNPVEVLLLKRLNETDWETIVNPGRRLKTGAHIVFKEDVLEADIIDVLPDGNRVLRFEFTGIWEEVLDELGEMPLPPYIHERLIDKERYQTVYSKVSGSAAAPTAGLHFTEELLEEIRSKGVNIAFLTLHVGLGTFRPVKEDEIEDHLMHTEEYVISSETCDLINKTRHEGNKVIAVGTTSCRVLESLKQDENYNILPEKSSTDIFIYPGYKFKVIDNLITNFHLPESTLVMLVSALAGKDEILNAYKIAVEEKYRFFSFGDAMYIEGNKDNYTGLHQGKVF

SEQ ID NO: 66483 - protein, 416 aa, unidentified
  source 1..416: note = Fermentimonas caenicola
  REGION 1..416: note = tr|A0A098BZH9|A0A098BZH9_9PORP S-adenosylmethionine:tRNA ribosyltransferase-isomerase; OS = Fermentimonas caenicola OX=1562970 GN=ING2E5B_1346 PE=3; SV = 1
MKKGDVQNIKISDFNYTLPDEKIAKYPLPQRDSSKLLIYKDSQLSSSNFSSLPDQLPGNSLLIFNNTRVIHARLHFMKATGANIEIFCLSPFSPKDYIMNFQQKGECSWICMIGNAKKWKEDLLSMEIDIKGLRVVLNAQKIDMAEMSNRNGSDVIVRFTWDNSDVTFSELLEVAGKLPIPPYLNRPAEEKDDETYQTLYSHVEGSVAAPTAGLHFTPAVMEGLAAKGVKTAEVTLHVGAGTFKPVKSDNLAGHEMHTEFISVPRETIEKIINHTGDIIVVGTTSMRTVESLYYIGKKLRTNPDTEPYKLSVNQWESYEEDENEDPYIVLRAILDYLENTEQDQLISATRLLIAPGYNFHYPDALITNFHQPQSTLLLLVSAFVGGYWTTIYEYALQNNFRFLSYGDSSLLWKNLK

SEQ ID NO: 66484 - protein, 350 aa, unidentified
  source 1..350: note = Fermentimonas caenicola
  REGION 1..350: note = tr|A0A098C010|A0A098C010_9PORP S-adenosylmethionine:tRNA ribosyltransferase-isomerase; OS = Fermentimonas caenicola OX=1562970 GN=queA PE=3 SV=1
MKLSQFKFNLPEELIAKYPSHHRDESRLLVVHKKSNELEHKVFKDVLDYFNPKDFFIFNNTKVFPAKLFGNKEKTGAKIEVFLLRELNPEQHLWDVLVNPARKIRIGNKLYFGDNEELVAEVIDNTTSRGRTLRFLYDGPYDEFKKQLFQIGETPIPEYMERGAEPEDFERYQNIFAEKEGAVVAPAAGLHFSRELMKRMQLKDIEYGFLTLHNGLGAYRMIDVEDLSKHKMESEQIIITEELCERVNKAYDEGHNICAVGTSVLRTIETTVSTDGHLKPREGWTNKFIFPPYDFTLTKSLITNFHLPYSTLLMMTCAFGGYEKIMEVYDIAVKEKYRFGAYGDAMLIID

SEQ ID NO: 66485 - protein, 354 aa, Ferrimicrobium acidiphilum
  REGION 1..354: note = tr|A0A0D8FXP3|A0A0D8FXP3_9ACTN S-adenosylmethionine:tRNA ribosyltransferase-isomerase; OS = Ferrimicrobium acidiphilum DSM 19497 OX=1121877 GN=queA; PE = 3 SV=1
MVAQSDDWSVIDSYDYELPSDRIARVPAEPRSSAKLLVGLDDPPSVTTVADLGSLLKEGDVVVVNDSKVVPARFHVRRDTGGQVEVLLLSPHGAMFEALVRPNARVRNGELLYIDGRPVFRVSGIGEQSSGLRTRYVEVLGDAVFALGEIPLPPYLEGVTVDPDRYQTIYANRPGSVAAPTAGLHFDARLLGDLARRGIEVVRVELEVGLGTFAPVKERELANHVMHAERYRVSEDAFERISSARRVVAIGTTVVRTLETISHGGALTGSSELFIVPGFDFRCVDLLLTNFHVPKSTLLALVAAAIGSRWRVLYEYALANDFRLLSLGDAMLIPTGRVDDPSLARFPSHSRGDH

SEQ ID NO: 66486 - protein, 352 aa, Ferrimonas balearica
  REGION 1..352: note = tr|E1SRQ9|E1SRQ9_FERBD S-adenosylmethionine:tRNA ribosyltransferase-isomerase OS=Ferrimonas balearica (strain DSM 9799 / CCM 4581 / PAT) OX=550540 GN=queA PE=3; SV = 1
MQVADFDFDLPDELIARYPTQERTASRLLHLDGDTGALHDGQFPDLLELVRPGDLMVFNNTRVIPARLHGQKASGGKIEVLVERVLDSERVLAHVRSSKSPKPGTELQFDDGVTATMVARHDALFELAFHGNDTVLNILDRIGHMPLPPYIDRPDENSDRERYQTVYNQRPGAVAAPTAGLHFDESMLARLKEKGVETAYVTLHVGAGTFQPVRVDKVEDHHMHSEFAEVGSDVVEAVKRTRARGGRVIAVGTTSVRSLESAARAAREHGEVLAPYAQETDIFLYPGCEFLLVDAMITNFHLPESTLIMLVSAFAGQDHVMNAYQHAVAQKYRFFSYGDAMFVTRQEQNTTA

SEQ ID NO: 66487 - protein, 353 aa, Ferrimonas marina
  REGION 1..353: note = tr|A0A1M5S6L9|A0A1M5S6L9_9GAMM S-adenosylmethionine:tRNA ribosyltransferase-isomerase; OS = Ferrimonas marina OX=299255 GN=queA PE=3 SV=1
MQVADFQFDLPDELIARYPTEERRASRLLHLDGNSGHLVDGQFPDLLDLVQPGDLMVFNNTRVIPARLHGQKASGGKLEVLVERVLDSRRVLAHVRCSKSPKPGTELQFDQGVTAQMVARHDALFELAFDGGETVLSLLERIGHMPLPPYIDRPDENSDRERYQTVYNQRPGAVAAPTAGLHFDDAMLAALKQKGVETAFVTLHVGAGTFQPVRVDTVEAHKMHSEFAEVDSQVVEAVKRTRARGGRVIAVGTTSVRSLESAALAAREHGEALMPYAAETDIFLYPGKTFHLVDAMVTNFHLPESTLIMLVSAFAGQDNVMNAYRHAVEQRYRFFSYGDAMFITRRDIEQESR

SEQ ID NO: 66488 - protein, 357 aa, unidentified
  source 1..357: note = Ferrimonas sediminum
  REGION 1..357: note = tr|A0A1G8QDP3|A0A1G8QDP3_9GAMM S-adenosylmethionine:tRNA ribosyltransferase-isomerase; OS = Ferrimonas sediminum OX=718193 GN=queA PE=3 SV=1
MQVADFQFDLPDELIARFPMAQRSASRLLHLDGNGGHLVDGQFPDLLDLLHDGDLLVFNNTRVIPARVFGKKASGGKIEVLVERVVDAHRVLAHVRSSKSPKVGTELQFEQGVKAIMVARHDALFELEFQGSTPVLSILDAIGHMPLPPYIDRPDDEADRERYQTVYNSRPGAVAAPTAGLHFDDGMLEKLKAKGVRFAYVTLHVGAGTFQPVRVDKIEDHHMHSEWAEVPQEVVDAIIKTKADGGRVVAVGTTSVRSLESAAQASLVKTGELQPFASDTNIFIYPGYRFQLVDAMVTNFHLPESTLIMLVSAFAGQDKVMAAYQHAVDNRYRFFSYGDAMFINRDEKLHSQEDCLD

SEQ ID NO: 66489 - protein, 354 aa, Ferrimonas sp.
  REGION 1..354: note = tr|A0A4U1BHK7|A0A4U1BHK7_9GAMM S-adenosylmethionine:tRNA ribosyltransferase-isomerase; OS = Ferrimonas sp. IMCC35001 OX=2569538 GN=queA PE=3 SV=1
MQVADFQFDLPDELIARYPTQERSASRLLHLDGNSGHLVDGQFPELVDLLHDGDLLVFNNTRVIPARVYGNKASGGKIEVLVERVLDTRRVLAHVRSSKSPKPGTELVFEQGVSATMVARHDALFEIEFHGDTPVLSILEAIGHMPLPPYIDRPDEEADKERYQTVYNRRPGAVAAPTAGLHFDDAILERLRAKGVEFAYVTLHVGAGTFQPVRVDKVEDHHMHSEWAEVPQEVVDAVIRTKANGGRVVAVGTTSVRSLESAAQATLAKTGVLEAFAADTSIFIYPGYRFQLVDAMVTNFHLPESTLIMLVSAFAGQDNVMNAYRHAVENRYRFFSYGDAMFINRDEKLHGEVE

SEQ ID NO: 66490 - protein, 357 aa, Ferrimonas sp.
  REGION 1..357: note = tr|A0A4U1BSV1|A0A4U1BSV1_9GAMM S-adenosylmethionine:tRNA ribosyltransferase-isomerase; OS = Ferrimonas sp. IMCC35002 OX=2569539 GN=queA PE=3 SV=1
MQVADFKFDLPDELIARHPMPERTASRLLHLDGNSGRLVDAQFPDLLDQLHDGDLMVFNNTRVIPARVFGKKASGGKLEVLVERVLDDKRVLAHVRSSKSPKPGTELHFDNDIKATMVARHDALFEIEFHGDSTVLRILDDIGHMPLPPYIDRPDDDADRERYQTVYNQRPGAVAAPTAGLHFDEAMLAKLKAKGVKFAYVTLHVGAGTFQPVRVDKIEDHHMHSEYAEVPQDVVDAVIRTKANGGRVIAVGTTSVRSLESAAQASLAQTGELKPFASDTNIFIYPGYRFQLVDAMVTNFHLPESTLIMLVSAFAGQDKIMAAYEHAVAEKYRFFSYGDAMFINRDEQLHSNDKSLD

SEQ ID NO: 66491 - protein, 338 aa, unidentified
  source 1..338: note = Ferriphaselus amnicola
  REGION 1..338: note = tr|A0A2Z6G952|A0A2Z6G952_9PROT S-adenosylmethionine:tRNA ribosyltransferase-isomerase; OS = Ferriphaselus amnicola OX=1188319 GN=queA PE=3 SV=1
MRTDLFDFHLPEELIAQHPPAQRGGSRLLHVAGAALTHRQFADLPTLLRPDDLLVLNDTRVLKARLFGQKSSGGQVEVLVERVTGEHEVLAQVRASKSPKLGSRIVLAGELEVEVLGREGEFFCLRFLSDDSAYELLERYGKLPLPPYITHAAGEEDESRYQTVFAREPGAVAAPTAGLHFDDAMLAKLRAQGVRSAHVTLHVGAGTFKPVRAENVSEHVMHSERYSIPQATVDTIRETRARGGRVVAVGTTSLRALESAAAQAELQAGERETNIFITPGYQFQVVDVLLTNFHLPRSTLLMLVCAFGGMDNLLAAYLEAVAQGYHFFSYGDAMLIER

SEQ ID NO: 66492 - protein, 340 aa, Ferrithrix thermotolerans
  REGION 1..340: note = tr|A0A1M4SIH2|A0A1M4SIH2_9ACTN S-adenosylmethionine:tRNA ribosyltransferase-isomerase; OS = Ferrithrix thermotolerans DSM 19514 OX=1121881 GN=queA; PE = 3 SV=1
MFGNYRDIAAYDYELPESKIAQTPLEKRSASRLLVSDGSSIEDRYVYDLPNILEPGDLVVVNDSKVFSARLSLQRSTGGAAEVLLLEEISDRFYNALLRPSRKLVTGESLYHDGVKVVRVEKGVRDCEDGELPVVEVLSNALIDKIGEIPLPPYIKTKVDDPSRYQTIYAQNYGSAAAPTAGLHLDEEVFEGFKRRGIEVATVELMVGIDTFKPISEESIDQHKMHSERYIVAPCVWEKVKAAKRVVAIGTTVVRTLESVASSNLLEGRTDLYITPGFRFKVVDLLMTNFHTPRSSLLVLIASFYGPRWRELYSHALRDGYRFLSFGDAMLIARNDDVVW

SEQ ID NO: 66493 - protein, 349 aa, unidentified
  source 1..349: note = Ferrovibrio sp.
  REGION 1..349: note = tr|A0A2M8U069|A0A2M8U069_9PROT S-adenosylmethionine:tRNA ribosyltransferase-isomerase; OS = Ferrovibrio sp. OX=1917215 GN=queA PE=3 SV=1
MLVSDFDFELPPALIAERPAVPREAARLLLHVGSIDRREFTVADLPDLLRPNDLLVFNDTKVIPARLYGRRERDPEVRVEALLLKPIGEQRWTAMARPAKRLKSGDRVLFDDGIVAEAIGREDDQIVLRFDRADGELLTALEDAGAMPLPPYIVAQRKADAQDKIDYQTVFAEKTGAIAAPTAGLHFTPALIETLKARGIGFARVTLHVGAGTFLPVKVDRIEDHKMHAEWGEVTEETVAAIRAAKAKGGRVIAIGTTSLRLLESAARDGGLKPFRGDTDIFITPGFRFGVADGLMTNFHLPKSTLLMLVAAFVGLEGQRAIYAHAVQKGFRFYSYGDTSLLFRQASPR

SEQ ID NO: 66494 - protein, 349 aa, unidentified
  source 1..349: note = Ferrovibrio sp.
  REGION 1..349: note = tr|A0A516H4G0|A0A516H4G0_9PROT S-adenosylmethionine:tRNA ribosyltransferase-isomerase; OS = Ferrovibrio sp. K5 OX=2594003 GN=queA PE=3 SV=1
MLVSDFDFELPPALIAERPAVPREAAKLLLHAGGIDPRTLTVADLPGLLQPNDLLVFNDTKVIPARLYGRRERDPEVRVEALLLKPIGERRWTAMAKPAKRLKPGDRVLFDGGLVVEALGREDDQIVLRFDRDDAEVLTALETAGAMPLPPYIVAQRKADAQDRTDYQTVFAEKTGAIAAPTAGLHFTPALIETLKRQGIGFARVTLHVGAGTFLPVKVDRVADHKMHAEWGEVTDGTVAAIRAAKEKGGRVIAIGTTSLRLLESAARDGTLKPFRGDTDIFITPGFRFHVADGLMTNFHLPKSTLLMLVAAFVGLQEQRTIYAHAVEKGFRFYSYGDTSLLFRQAGKK

SEQ ID NO: 66495 - protein, 351 aa, unidentified
  source 1..351: note = Ferrovum sp.
  REGION 1..351: note = tr|A0A149VY81|A0A149VY81_9PROT S-adenosylmethionine:tRNA ribosyltransferase-isomerase; OS = Ferrovum sp. Z-31 OX=1789004 GN=queA PE=3 SV=1
MRSMDFCTSDFDYILPPHLIAQTPTAVRRASRLLHLSARGLRDQWFAQLPELLWAGDLLVFNDTRVIKARVFGQKASGGRIEALVERVVSASEAWVQIRASHAPRAGGLIRFADGRAWEVLEKVEDLYRVALMDGETGPDFHAWLEQVGSLPLPPYIDHAAGVVDAERYQTVYARNPGAVAAPTAGLHFDEAMLETVRAGGVETASLTLHVGAGTFQPVRVERLADHHMHAEWFNLPAETVEAIRRTWARGGRVVAVGTTSLRALESAAAKGELCAGSQETRLFITPGYRFQVVDCLLTNFHLPRSTLLMLVSAFAGMEAVRQAYAHAVAQAYRFFSYGDAMLLEREKDEV

SEQ ID NO: 66496 - protein, 349 aa, unidentified
  source 1..349: note = Ferrovum sp.
  REGION 1..349: note = tr|A0A257UCE2|A0A257UCE2_9PROT S-adenosylmethionine:tRNA ribosyltransferase-isomerase; OS = Ferrovum sp. 37-45-19 OX=1970377 GN=queA PE=3 SV=1
MKLRTDDFDYFLPESLIAQTPVPQRTHSRLMVVGESTIEDSYFYHLDQWLRPHDLLILNNTQVLKARLFGKKDSGGKVECLVERVSSPHRALVHFRASHAPKPGSLVYFDHDVALTVTQRVEDLFEVEFVRLSQNSPQDFFVWMEQDGVLPLPPYIDRSQDLQDIERYQTVYAQVPGAIAAPTAGLHFDEELFERLREKGVAVAHVTLHVGAGTFAPVKVDFVEQHVMHKEWYFIPEDTIQAIKHCQERGGRVIAVGTTSMRALESGALNKELQAGSQETDIFITPGFEFKVIDMLVTNFHLPRSTLLMLVSAFSGLKRMRRAYQHAIDQKYRFFSYGDAMLLTRGQDQ

SEQ ID NO: 66497 - protein, 349 aa, Ferruginibacter sp.
  REGION 1..349: note = tr|A0A3M9NEC6|A0A3M9NEC6_9BACT S-adenosylmethionine:tRNA ribosyltransferase-isomerase; OS = Ferruginibacter sp. BO-59 OX=2294116 GN=queA PE=3 SV=1
MKLSQFKFDLPLNLIAQNPTKRREDSRLMVIERATGKIENKHFKDILDYFDDKDVFVVNNTKVFPARMYGRKEKTGARIEVFLLRELHRQNRLWDVIVDPARKIRVGNKLYFGENDELVAEVIDNTTSRGRTIRFLWDGTEEDFRKMLYFMGETPLPKYIKRKPDEEDRERYQTVYAKHEGAVAAPTAGLHFSPELIKRLEIKGIKFAEVTLHTGLGTFRPIEVEDLSKHKMDAEYYRIDEEACKIVNKAKQTNHRICSVGTTTMRAMESSFTATKLLKPSEGWTNHFIHPPYTFNIADSLITNFHLPKTSLLIMACAFAGYDLIMDAYKKAIKDKYRFFSYGDAMLII

SEQ ID NO: 66498 - protein, 410 aa, Ferruginibacter sp.
  REGION 1..410: note = tr|A0A3M9N9R4|A0A3M9N9R4_9BACT S-adenosylmethionine:tRNA ribosyltransferase-isomerase; OS = Ferruginibacter sp. BO-59 OX=2294116 GN=EFY79_14990; PE = 3 SV=1
MHPKDLTIEDFNYHLPEEKIAIYPLAQRDQSKLLIYKNEKISEDIYRNVAEYLPRNSFLVFNDTKVIKARILFQKPTGGVIEIFCLEPHEKISDYAVVLQQKKSTNWKCMIGGAGKLKEKFLLKKFFIGENEITLKALLIEKLSDAYVVQLSWNPGGYSFAEIMEHAGQTPLPPYIKRKVEESDSEKYQTIYSHYEGSVAAPTAGLHFTEEIFSSLKSKKIGTGFVTLHVGAGTFKPVKADKMEGHEMHAEWIDVSAKFIEQLIQHIPNDIVCVGTTSVRTVESLYWMGLKTFLNPEIEFEKLKINQWEVYEGELLKMKLSAKESLTSLLNYLIIKKTERLLIQTQIIIAPGYEFKIMRCIITNFHQPKSTLLLLVSALIGENWKKIYEYALSHDFRFLSYGDGCLIFKD

SEQ ID NO: 66499 - protein, 341 aa, Fervidicola ferrireducens
  REGION 1..341: note = tr|A0A140LCE5|A0A140LCE5_9THEO S-adenosylmethionine:tRNA ribosyltransferase-isomerase; OS = Fervidicola ferrireducens OX=520764 GN=queA PE=3 SV=1
MDVKEFYYELPEELIAQEPLPERDKSRLMVVHRDTRSFEHRIFENIIDYLEEGDCLVLNDTRVIPARLLGTRKDTGGKIEFILLKRIEKDKWEILVKPGRRAKLGSEFTFGDGRLQAKVLDYTDAGGRIVEFYYEGIFEHVLDEVGKMPVPPYIKKELEDKERYQTVYARKPGSAAAPTAGFHFTRELLKKIEQKGVRVCYITLHVGLGTFRPVKEEKVEQHKMHHEYFEVDNETARIINATKQQGRRVIAVGTTSTRTLETVADENGFVKSQSGWTDLFIYPGYRFKVVDGLVTNFHLPESTLLMLVCAFADKELIMSAYKEAIKEKYRFYSFGDAMLIV

SEQ ID NO: 66500 - protein, 347 aa, Fervidobacterium changbaicum
  REGION 1..347: note = tr|A0A1G8DY45|A0A1G8DY45_9BACT S-adenosylmethionine:tRNA ribosyltransferase-isomerase; OS = Fervidobacterium changbaicum OX=310769 GN=queA PE=3 SV=1
MGSVDLFKLEAYDYNLPEELIAQEPVEPRDLSRLMVVDRRTGEIQHKIFRDVIEHLDPGDLLVFNTSKVIPARLFGRKTTGAKVEILLLEKIEQGVWKCLVKPGKAVKERTEIVFDLFNKECGITAKCVGRAEEGTRILEFSTKSDSEIFAIGKVPLPHYIKNENVDFNRYQTVYAKYEGSVAAPTAGLHFTTELLEKIKNKGILTAEVVLHVGIGTFRPVKVEDIRQHKMHEEYYVVPEETVRIIDEVKIRGGRLIAVGTTSVRTLETIARLPKATSYSGKTDIFIYPPFEFKLVDALITNFHLPKSSLLMLVSAFTGYELTMKAYKIAVEERYRFFSFGDAMLIL

SEQ ID NO: 66501 - protein, 348 aa, Fervidobacterium gondwanense
  REGION 1..348: note = tr|A0A1M7S075|A0A1M7S075_FERGO S-adenosylmethionine:tRNA ribosyltransferase-isomerase; OS = Fervidobacterium gondwanense DSM 13020 OX=1121883; GN = queA PE=3 SV=1
MDKMENSKLYKLDAYDYFLPEELIAQQPIEPRDHSRLMVLDRTTGNIQHRMFKDILEYLSPKDILVFNTSKVIPARIYGKKTTGATVELLLLEKMSLGVWKCLVKPGKAVKEGTEIVFHKPDGNIIGKCVGRAEEGTRIIEFSVSDDHIIFSLGKIPLPHYIKNENIEFERYQTVYAKHEGSVAAPTAGLHFTNELLEKIKSKGVRTAEVILHVGIGTFRPVKAEDIRHHKMHEEYYIVPEETVNLIDEVKSTNGRVIAVGTTSVRTLETIARQPKSGSYSGKTDIFIYPPFEFKIVDALITNFHLPKSSLIMLVSAFAGYELTMQAYKIAVEEKYRFFSFGDAMFIF

SEQ ID NO: 66502 - protein, 347 aa, Fervidobacterium islandicum; identical to SEQ ID NO: 66500
  REGION 1..347: note = tr|A0A1B0VLB3|A0A1B0VLB3_FERIS S-adenosylmethionine:tRNA ribosyltransferase-isomerase; OS = Fervidobacterium islandicum OX=2423 GN=queA PE=3 SV=1

SEQ ID NO: 66503 - protein, 349 aa, Fervidobacterium nodosum
  REGION 1..349: note = tr|A7HNS1|A7HNS1_FERNB S-adenosylmethionine:tRNA ribosyltransferase-isomerase OS=Fervidobacterium nodosum (strain ATCC 35602 / DSM 5306 / Rt17-B1) OX=381764; GN = queAPE=3 SV=1
MDNINNNSQLYNLEMYDYYLPEELIAQSPVEPRDSSRLMVLNKATGEIQHRIFRDIGEYIHEGDLLVFNTTKVIPARLFGKKTTGANIEILLLEKLGLGIWKCLVKPGKAVKEGTEIIFENTNMKMYGKCLSRAEEGTRVIEFSEKEDEKIFSFGNVPLPHYIKNHNVKIERYQTVYAKHEGSVAAPTAGLHFTTELLNELKNKGVKTAEVVLHVGIGTFKPVKVGDIRQHKMHEEYYIVSGETISAINEVKASGKRVIAVGTTTVRTLETIARLQKSDSYSGKTDIFIYPPFEFKIVDALITNFHLPKSSLIMLVSAFAGYDLTMRAYRIAVQERYRFFSFGDAMFIF

SEQ ID NO: 66504 - protein, 347 aa, Fervidobacterium pennivorans
  REGION 1..347: note = tr|A0A172T3Z3|A0A172T3Z3_FERPE S-adenosylmethionine:tRNA ribosyltransferase-isomerase; OS = Fervidobacterium pennivorans OX=93466 GN=queA PE=3 SV=1
MKPVDLYKLEAYDYTLPEELIAQEPVEPRDHSRLMVVNRKTQEIEHRIFKDIVEYLNAGDLLVFNTSKVIPARIIGRKPTGAKVELLLLEKIEPGVWKCLVKPGKAIKEGTEIIFDVHNNEIALTAKCVGRAEEGTRLVEFSTKNDNEIFALGKVPLPHYISNDNIDFERYQTVYAKYEGSVAAPTAGLHFTEQLLERIREKGILTAEVVLHVGIGTFRPVKVEDIRQHKMHEEYYVVPEETVHIIEQVKNEGGKVFAVGTTSVRTLETIARLPKAPSYSGKTDIFIYPSFEFKLVDALITNFHLPKSSLIMLVSAFAGYELIMKAYKIAVEERYRFFSFGDAMLIL

SEQ ID NO: 66505 - protein, 347 aa, Fervidobacterium pennivorans
  REGION 1..347: note = tr|H9UEM4|H9UEM4_FERPD S-adenosylmethionine:tRNA ribosyltransferase-isomerase OS=Fervidobacterium pennivorans (strain DSM 9078 / Ven5) OX=771875 GN=queA; PE = 3 SV=1
MKPVDLYKLEAYDYDLPEELIAQEPVEPRDHSRLMVVNRKTQEIEHRIFKDIVEYLNAGDLLVFNTSKVIPARIIGKKTTGAKVELLLLEKIEPGVWKCLVKPGKAVKEGTEIIFNVYSNENVVTAKCVGRAEEGTRLVEFSTQNDQEIFAIGKVPLPHYIKNDNIDFERYQTVYAKYEGSVAAPTAGLHFTEQLLEKIREKGILTAEVVLHVGIGTFRPVKVEDIRKHKMHEEYYVVPEETVRIIEQVKNKGGKVFAVGTTSVRTLETIARLPKAPSYSGKTNIFIYTPFEFKLVDALITNFHLPKSSLIMLVSAFAGYELTMKAYKIAVEERYRFFSFGDAMLIL

SEQ ID NO: 66506 - protein, 343 aa, Fervidobacterium sp.
  REGION 1..343: note = tr|A0A3D2GEU0|A0A3D2GEU0_9BACT S-adenosylmethionine:tRNA ribosyltransferase-isomerase (Fragment) OS=Fervidobacterium sp. OX=1871331; GN = DE117_06080 PE=3 SV=1
MKKLDLNSFQDKDLHKLESYDYYLPQELIAQSPIEPRDKSRLMVVNKTTGEISHRIFSDIKEYLKEGDLLVFNVSKVIPARLLGKKTTGANVEVLLVEKLEPGIWKCLVKPGKAIKEGTEVLFERNSEKLLARCIDRAEEGTKIFSFSMKGDNDIFFFGTAPLPHYIKTKDIDIDRYQTVYAREEGSIAAPTAGLHFTTDLLEKIRQKGIKFAEVTLHVGIGTFKPVKIGDITQHKMHEEYYIVSEESAKTIEECHKNGGRIVAVGTTSVRTLETIARLPKASSYSGKTNLFIYPPYEFKYVDALITNFHLPKSSLIMLVSAFAGYELTMKAYNIAVEEKYRF

SEQ ID NO: 66507 - protein, 344 aa, unidentified
  source 1..344: note = Fervidobacterium thailandense
  REGION 1..344: note = tr|A0A1E3G4K3|A0A1E3G4K3_9BACT S-adenosylmethionine:tRNA ribosyltransferase-isomerase; OS = Fervidobacterium thailandense OX=1008305 GN=queA PE=3; SV = 1
MERNLYDLEAYDYHLPEELIAQEPVEPRDASRLMVINRKTGTIEHRIFREIVEYLIPGDTMVFNVSKVIPARLVGRKSTGAKVEVLLLEKLGEGVWKCLVKPGKAIKDGTVLIFGEAQDSLMAKCLGRAEEGTRILEFSAKSDSEIFSFGQVPLPHYIKNQSIDFQRYQTVYAKNEGSVAAPTAGLHFTPELIERIKKKGVNIAEITLHVGIGTFRPVKAKDIREHKMHEEFYVVPKETVQVINETKKSGGRIIAVGTTSVRTLETIARLPLADSYSGKTDIFIYPPFEFKLVDALVTNFHLPKSTLLMLVSAFAGYDLTMKFYNLAVAERYRFFSFGDACFII

SEQ ID NO: 66508 - protein, 398 aa, Fibrella aestuarina
  REGION 1..398: note = tr|I0KG27|I0KG27_9BACT S-adenosylmethionine:tRNA ribosyltransferase-isomerase OS=Fibrella aestuarina BUZ 2; OX = 1166018 GN=FAES_5081 PE=3 SV=1
MLPDLVLDQFQYDLPDERIARFPLSQRDGSKLLVYRQGQLAHHTFRELPDLLPPDSYLVFNNTKVIPARLLFTRATGGIVELFLLNPAPADRPITSAMADLGETMWQCMVGNRKRWKADEVLQMPLGDTVLTAEWADADTNEIRFRWQPAPVSFAEIVQQAGQMPLPPYLKRAATEADSTAYQTVYARQEGAVAAPTAGLHFTDAVFDDLAQRGIAHDTLTLHVGAGTFQPIKTTDVRAHTMHSEQVIYTQENLEKLLPHLGHVIPVGTTSMRSLESLYWFGVRLLRQHPDPFHLDQHYAYNVPSAEQPDTETAVRAVLTYLRETQQATLTAHTGIYITPGYQLRVCRGIITNFHQPGSTLILLIATLVGNDWRTIYNEALSNDYRFLSYGDSSLLLP

SEQ ID NO: 66509 - protein, 347 aa, Fibrella aestuarina
  REGION 1..347: note = tr|I0KGP9|I0KGP9_9BACT S-adenosylmethionine:tRNA ribosyltransferase-isomerase OS=Fibrella aestuarina BUZ 2; OX = 1166018 GN=queA PE=3 SV=1
MKLSEFRFDLPESLIAKYPVERGESRLMVIDRKTKTIEHKKFGDILSYFNDGDSMVINNTKVFPARLYGNKEKTGAKIEVFLLRELNREMKLWDVLVDPARKIRVGNKLYFGDSDLVAEVIDNTTSRGRTIRFLFDGNHEEFMKAVDQLGEMPIPREIMRESVDADREHFQTVFAEHVGAVAAPTAGLHFTRAMMKRMEIKGIHFAPITLHIGLGTFRQVDVEDLTKHKTDSENFRIGPEAANIVNASLDAGKRVCAIGTTALKAIESSVSANARLKPVEGWTDRFIFPPYEFKIANSLLTNLHLPESVLLMMTSAFGGHELIKEAYQVAIKEKYRFFTYGDAMLIL

SEQ ID NO: 66510 - protein, 398 aa, Fibrella sp.
  REGION 1..398: note = tr|A0A1W6E370|A0A1W6E370_9BACT S-adenosylmethionine:tRNA ribosyltransferase-isomerase; OS = Fibrella sp. ES10-3-2-2 OX=1834519 GN=queA PE=3 SV=1
MLPDLRLDQFQYDLPDERIARFPLAKRDQSKLLVYKEGQISHHQFVDLPDLLPADSFLVFNNTKVIPARLLFTRSTGATIELFLLNPMPSDRPVGEAMLDKGEAVWQCMIGNRKKWREGETLLLTFGEVVLIAEWEDTDKSLIRFTWQPDDMTFAELIQQAGQMPLPPYLKREPIAADSQTYQTVYARKEGAVAAPTAGLHMTKDVLGTLAERGIGHDALTLHVGAGTFQPIKADDPRQHTMHAEQVVYTRENITNVLKHLGHLIPIGTTSMRSLESLYWFGVRLLASHPDPFHLDQQYAYNVPAEEQPSAHDAVEAVRLYMEQHKLPLLTAHTSIYITPGYQMRMCRGIVTNFHQPGSTLILLIAALVGDDWRTIYTEALSNDYRFLSYGDSSLLLP

SEQ ID NO: 66511 - protein, 347 aa, Fibrella sp.
  REGION 1..347: note = tr|A0A1W6E6A6|A0A1W6E6A6_9BACT S-adenosylmethionine:tRNA ribosyltransferase-isomerase; OS = Fibrella sp. ES10-3-2-2 OX=1834519 GN=queA PE=3 SV=1
MKLAEFRFDLPESLIAKYPVERGEARLMVVDRKTKTIEHKKFGDILSYFSDGDVMVINNTKVFPARLYGNKEKTGAKIEVFLLRELNREMKLWDVLVDPARKIRVGNKLYFGDSDLVAEVIDNTTSRGRTIRFLFDGNHDEFMKAVDQLGEMPIPREIMRESVEADREHYQTVFAQHVGAVAAPTAGLHFTRAMMKRMEIKGIHFAPVTLHIGLGTFRQVDVEDLTKHKTDSENFRIEPDATAIVNAGLDAGKRVCAIGTTALKAIESSVSANSRLKPVEGWTDRFIFPPYDFKIANALLTNMHLPESVLLMMTSAFGGHELIKEAYQIAIKEKYRFFTYGDAMLIL

SEQ ID NO: 66512 - protein, 347 aa, Fibrisoma limi
  REGION 1..347: note = tr|I2GFM4|I2GFM4_9BACT S-adenosylmethionine:tRNA ribosyltransferase-isomerase OS=Fibrisoma limi BUZ 3; OX = 1185876 GN=queA PE=3 SV=1
MKLSEFKFDLPESLIAKYPLERGESRLMVVHRKTKQIEHKQFSDILSYFDDGDVMVINNTKVFPARLYGNKEKTGAKIEVFLLRELNREMKLWDVLVDPARKIRVGNKLYFGDSDLVAEVIDNTTSRGRTIRFLFDGNHEEFMKAVDELGETPLPREIKRKTEDADRDRYQTVFAEHIGAVAAPTAGMHFTRAMMKRMEIKGIHFAPVTLHVGLGTFRQVDVEDLTKHKTDSENYRISDDSAQIVNEALDAGKRVCAIGTTSLKAVESSVSANSRLKPVEGWTDKFIFPPYDFKIANSLLTNFHLPESILIMMTSAFGGHDLIRHAYEVAIKEKYRFFSYGDAMLIL

SEQ ID NO: 66513 - protein, 409 aa, Fibrisoma limi
  REGION 1..409: note = tr|I2GMX1|I2GMX1_9BACT S-adenosylmethionine:tRNA ribosyltransferase-isomerase OS=Fibrisoma limi BUZ 3; OX = 1185876 GN=queA PE=3 SV=1
MANVETLRLEQFQYELPDERIARFPLAQRDQSKLLVYRSGEITHTRFNSLPNVLPDGSFLVFNDTKVIPARLIFTRSTGAVIELFLLNPVPLDRPITLAMQDTRSVVWQCMVGNRKRWKQSETLQTILPSKEGDIILEATWEDYEQSTVRLSWQSSASNASPETFAQVIQLAGQIPLPPYLKRDVVDADRDTYQTVYSKQEGAVAAPTAGLHFTKAVFDGLAHRGFDHDYLTLHVGAGTFQPIKTDDVRQHHMHTEQVVYTQLNLRRLMDHHNQILPVGTTSMRALESLYWMGVKLLRGDADPFRLDQHYAYQIPPDEQPTVLESLGAFLHYLEQTGQASVVAHTGIYITPGYTFKLCKGIITNFHQPGSTLILLVAALIGEDWRRVYNEAINEGYRFLSYGDSSLLLP

SEQ ID NO: 66514 - protein, 347 aa, Fibrisoma sp.
  REGION 1..347: note = tr|A0A418LX67|A0A418LX67_9BACT S-adenosylmethionine:tRNA ribosyltransferase-isomerase; OS = Fibrisoma sp. HYT19 OX=2305895 GN=queA PE=3 SV=1
MKLSEFKFDLPESLIAKYPLERGESRLMVVHRKTKQIEHKQFSDILNYFDDGDVMVINNTKVFPARLYGNKEKTGAKIEVFLLRELNREMKLWDVLVDPARKIRVGNKLYFGDSDLVAEVIDNTTSRGRTIRFLFDGNHEEFMKAVDELGETPLPREIKRKTEDADRDRYQTVFAEHIGAVAAPTAGMHFTRAMMKRMEIKGIHFAPVTLHVGLGTFRQVDVEDLTKHKTDSENYRISDDSAQIVNEALDAGKRVCAIGTTSLKAVESSVSANSRLKPVEGWTDKFIFPPYEFKIANSLLTNFHLPESILIMMTSAFGGHDLIRHAYEVAIKEKYRFFSYGDAMLIL

SEQ ID NO: 66515 - protein, 406 aa, Fibrisoma sp.
  REGION 1..406: note = tr|A0A418M157|A0A418M157_9BACT S-adenosylmethionine:tRNA ribosyltransferase-isomerase; OS = Fibrisoma sp. HYT19 OX=2305895 GN=queA PE=3 SV=1
MMSAETLRLEQFQYELPDERIARFPLAQRDQSKLLVYRSGQITHSRFINLPDELPDGSFLVFNDTKVIPARLIFTRSTGAVIELFLLNPLPLDRPITLAMQDTGSVVWQCMVGNRKRWKPTETLHTTLPSEAGDILLEATWEDYEQSAVRLSWRSPSGTESFAKVIHLAGQIPLPPYLKRAVVDADRDTYQTVYSRQEGAVAAPTAGLHFTEAVFDELARRGFEHDYLTLHVGAGTFQPIKTDDVRQHHMHTEQVVYTLSNLRRLLDHHDRILPVGTTSMRALESLYWMGVKLLRQEPEPFRLDQHYAYQLPPDEQPTVPESLRAVQHYLEQSGQTSVVAHTGIYITPGYTFRLCKGIITNFHQPGSTLILLIAALIGEKWREVYREALDGDYRFLSYGDSSLLIP

SEQ ID NO: 66516 - protein, 349 aa, Fibrobacter intestinalis
  REGION 1..349: note = tr|A0A1T4K3Y0|A0A1T4K3Y0_9BACT S-adenosylmethionine:tRNA ribosyltransferase-isomerase; OS = Fibrobacter intestinalis OX=28122 GN=queA PE=3 SV=1
MISDRLSDYAFDFPKELIASRSPGKGKTQILHCPKDGKGPLEIVPAPRIVEFFRPGDCIVVNNTKVIPARLFGRTLHGGQVEILLVQTLFPDEAGNARWEAWVRPGKAFPVGRELEIAGIKTHVEQINPDGARVLRFEATPVELEKVMNEQGHVPLPPYIARPDDEEDKKAYQTIFAKYNGAVAAPTASLHFNSQMLEDLKAKGVKIAEVTLHVGPGTFQNIATENFREHKMHGEHYELTQENADIINGARQNGGRIVPIGTTSTRVIETIAQEDGTLSAQTGVTHAFFYPGYRYKIADGLLTNFHWPKSSLILLVAAFYGRENTLAAYKYAVEHRLHLFSYGDGMLIL

SEQ ID NO: 66517 - protein, 348 aa, Fibrobacter sp.
  REGION 1..348: note = tr|A0A1M6U0G0|A0A1M6U0G0_9BACT S-adenosylmethionine:tRNA ribosyltransferase-isomerase; OS = Fibrobacter sp. UWH4 OX=1896210 GN=queA PE=3 SV=1
MESHNLSDYNFEFPKELIASRTAGKGKTRILHCPKDGGERHIMKAPEIVDLFKPGDCLVVNNTKVIPARLYGHTMHGGEVETLLVQALIPAEDGSARYEAQVRPGKAFKIGRELDIAGVKTIVEDIKEDGARVLRFAVTPVELEAVMNREGHVPLPPYIDRPDDEDDKKAYQTIFAKYSGAVAAPTASLHFSEEMLEALKAKGVYVAEVTLHVGPGTFQNISVEDFTQHKMHGEHYELTKENAEIINKAKREGGRIVTVGTTSTRVVETIADANGIVKAQSGVTHAFFYPGYRYKIVDGLLTNFHWPKSSLILLVSAFYGRENTLAAYKMAVENKMKLFSYGDGMLIL

SEQ ID NO: 66518 - protein, 348 aa, Fibrobacter sp.
  REGION 1..348: note = tr|A0A254SVK2|A0A254SVK2_9BACT S-adenosylmethionine:tRNA ribosyltransferase-isomerase; OS = Fibrobacter sp. UWB1 OX=1964355 GN=queA PE=3 SV=1
MESHNLSDYNFEFPKELIASRTAGKGKTRILHCPKNGGERHILKAPEIVDLFKPGDCLVVNNTKVIPARLYGHTMHGGEVETLLVQALIPAEDGSARYEAQVRPGKAFKVGRELDIAGVKTVVEDIKEDGARVLRFAVTPVELEAVMNREGHVPLPPYIDRPDDEDDKKAYQTIFAKYSGAVAAPTASLHFSEEMLEALKAKGVYVAEVTLHVGPGTFQNISVEDFTQHKMHGEHYELTAENADIINKAKREGGRIVTVGTTSTRVVETIADANGFLKPQKGITHAFFYPGYRYKIVDGLLTNFHWPKSSLILLVSAFYGRENTLEAYKMAVENKMKLFSYGDGMLIL

SEQ ID NO: 66519 - protein, 348 aa, Fibrobacter succinogenes
  REGION 1..348: note = tr|A0A380S791|A0A380S791_FIBSU S-adenosylmethionine:tRNA ribosyltransferase-isomerase; OS = Fibrobacter succinogenes OX=833 GN=queA PE=3 SV=1
MDYRLSDYNFEFPKELIASRTAGKGKTHILYCPKNGGERRIMKAPEIVDLFRPGDCLVVNNTKVIPARLYGETQFGGQVEVLLVQALNPSEAGEARFEAKVHPGKAFQVGRELKLAGVRTFVEEVHEEDGNRVLRFEKTPAEMEEVMNKEGHVPLPPYIDRPDDEDDKKAYQTIFAKYAGAVAAPTASLHFSEQMLDDLKAKGVYVAEVTLHVGPGTFQNISVEDFTKHKMHGEHYELTKENADIINKAKREGGRIVTVGTTSTRVIETVADANGFLKPQKGVTYAFFYPGYKYKIVDGLLTNFHWPKSSLILLVSAFYGRENTLDAYKMAVENKLKLFSYGDGMLIL

SEQ ID NO: 66520 - protein, 348 aa, Fibrobacter succinogenes
  REGION 1..348: note = tr|C9RMW6|C9RMW6_FIBSS S-adenosylmethionine:tRNA ribosyltransferase-isomerase OS=Fibrobacter succinogenes (strain ATCC 19169 / S85) OX=59374 GN=queA PE=3 SV=1
MDYHLSDYNFEFPKELIASRTAGKGKTHILYCPKNGGERRIMKAPEIVDLFRPGDCLVVNNTKVIPARLYGETQFGGQVEVLLVQALNPSEAGEARFEAKVHPGKAFQVGRELKLAGVRTFVEEVHEEDGNRVLRFEKTPAEMEEVMNKEGHVPLPPYIDRPDDEDDKKAYQTIFAKYAGAVAAPTASLHFSEQMLEDLKAKGVYVAEVTLHVGPGTFQNISVEDFTQHKMHGEHYELTKENADIINKAKREGGRIVTVGTTSTRVIETVADANGFLKPQKGVTYAFFYPGYKYKIVDGLLTNFHWPKSSLILLVSAFYGRENTLDAYKMAVENKLKLFSYGDGMLIL

SEQ ID NO: 66521 - protein, 195 aa, unidentified
  source 1..195: note = Fibrobacteres bacterium
  REGION 1..195: note = tr|A0A3C0PDB5|A0A3C0PDB5_9BACT S-adenosylmethionine:tRNA ribosyltransferase-isomerase (Fragment) OS=Fibrobacteres bacterium OX=2052160; GN = DCO75_02740 PE=3 SV=1
MKTSDFDYNIPERLIAQFPCRKRDECRLMYIDRSNHSINHNKFCDLPGLLKPGDRLVFNDTKVLPARIFCCKADTGAKIELLFTERISDISWKVLAKPAKRLKKNIRLFIEDIPQVQLEVIDIYEDGGRLVTLCNNRVVATIEELLDRSGRIPLPPYIKRESGQSDKETYRTVYAANAGAIASPTAGLHFTDGLM

SEQ ID NO: 66522 - protein, 347 aa, unidentified
  source 1..347: note = Fibrobacteres bacterium
  REGION 1..347: note = tr|A0A1J5EMM6|A0A1J5EMM6_9BACT S-adenosylmethionine:tRNA ribosyltransferase-isomerase; OS = Fibrobacteres bacterium CG2_30_45_31 OX=1805149 GN=queA; PE = 3 SV=1
MSCHLSDYDFEFPEELIASRTAGKGKTKILHCPKDGGPRAIIPAPAIVDLFRPGDCLVVNNTKVIPARLFGETEHGGKVETLLVQALIPAANGEARWEAWVRPGKAFPTGRTLNIADIPVTVEDIREDGARVLRFAITPMELESVMNAKGHVPLPPYIARPDDEEDKKAYQTIFAKYAGAVAAPTASLHFNEAMMEAVKAKGVKVAEVTLHVGPGTFQNISVDDFRLHKMHGEHYDLTREDADIINNARAQGGRIITVGTTSTRVLETIAAEDGSLIAQSGVTHAFIYPGYRYKIVDGLLTNFHWPKSSLILLVSALYGRENTLEAYAYAVSQKMKLFSYGDGMLIL

SEQ ID NO: 66523 - protein, 349 aa, unidentified
  source 1..349: note = Fictibacillus aquaticus
  REGION 1..349: note = tr|A0A235FB99|A0A235FB99_9BACI S-adenosylmethionine:tRNA ribosyltransferase-isomerase; OS = Fictibacillus aquaticus OX=2021314 GN=queA PE=3 SV=1
MDLNLFDFDLPDELIAQTPLKDRTSSRLMVLDKHTGDVTHDIFSNVTQYLKAGDCLVLNDTRVLPARLYGQKEDTGAKIEVLLLKEQNADEWETLVKPAKRVKVGTKVMFGDGRLSAVCTGELENGGRVLKLLYEGILYEHLDALGEMPLPPYIKEQLEEKDRYQTVFARHQGSAAAPTAGLHFTEELLQELKDKGIHVAFITLHVGLGTFRPVAVENILEHDMHAEFYQLTAGTAALLNKVKEEGGRIYTVGTTSTRTLETVASRHDGRFQEESGWTDIFIYPGYEFKAIDGLITNFHLPKSTLIMLISALAGRENVLNAYRKAVEERYRFFSFGDAMLIHEGGNTLK

SEQ ID NO: 66524 - protein, 342 aa, unidentified
  source 1..342: note = Fictibacillus arsenicus
  REGION 1..342: note = tr|A0A1V3GBG8|A0A1V3GBG8_9BACI S-adenosylmethionine:tRNA ribosyltransferase-isomerase; OS = Fictibacillus arsenicus OX=255247 GN=queA PE=3 SV=1
MKVNDFDFLLPEELIAQTPLENRTSSRLMVLDKENKSIEHEHFYDLKNYLKKGDCLVLNDTRVLPARLFGQKADTGAKVEILLLKEEGQDTWETLVKPAKRVKPGTEITFGDGRLKAVCVGESDHGGRNLKFIYSGIFYELLDDLGQMPLPPYIKEQLEEKDRYQTVYAVHQGSAAAPTAGLHFTEEMIEEIKASGVHVTFITLHVGLGTFRPVSVEDIFEHDMHAEFYQITKGTAELLNQVRESGGRIITVGTTSTRTLETVANKFDGKFEEDSGWTDIFIYPGYEFKAIDGLITNFHLPKSTLIMLVSAFASKEFVMEAYKEAVEEKYRFFSFGDAMLIL

SEQ ID NO: 66525 - protein, 341 aa, unidentified
  source 1..341: note = Fictibacillus arsenicus
  REGION 1..341: note = tr|A0A1V3G369|A0A1V3G369_9BACI S-adenosylmethionine:tRNA ribosyltransferase-isomerase; OS = Fictibacillus arsenicus OX=255247 GN=UN64_18835 PE=3; SV = 1
MEFAMKFELPQELNAKEPPERRGIRRDYVKMMVLNKTTGHTEHTKFYQLDRYLKKGDLLVLNASRTVPAVLKSIREIDGTEIEVRLAHRKNESIWEALPVSGTLMKGEIIRFSPTLTATVVEQSSDTPFVSLAFNLCCSSLYNQIYSLGEPVRYEYIQEPWNLDYYQTVFATIPGSVEMPSAGRAFSWELLFRLQKKGVRIAYITLHTGLSYLLDDKWHKGPDKNFENYEVPEETVNQIRETKDAGGRVVAVGTTVVRALETVALEKNHLQAHTGWTNLYITENTKLQICDGLITGMHEPEASHLQLLSAFVDKDKLYDAYQGAIEQRYLWHEFGDMNLIL

SEQ ID NO: 66526 - protein, 353 aa, unidentified
  source 1..353: note = Fictibacillus enclensis
  REGION 1..353: note = tr|A0A0V8JA50|A0A0V8JA50_9BACI S-adenosylmethionine:tRNA ribosyltransferase-isomerase; OS = Fictibacillus enclensis OX=1017270 GN=queA PE=3 SV=1
MDINMFDFDLPEELIAQTPLKDRTASRLMVLDPATGKVEHNTFKNIIDYLNPGDCLVLNDTKVLPARLLGEKEDTKAKIEILLLKETGDDTWETLVKPAKRVKPGTTVVFGNGLLKAVCTGETDQGGRTFKFEYEGIFYEILDALGEMPLPPYIKEQLEERDRYQTVYAKHQGSAAAPTAGLHFTESLLEDIKKKGVHVTFITLHVGLGTFRPVSAENIEEHDMHAEFYQITKGTAELLNHVKKNGGRIVSVGTTSTRTLETVAGKHDEFCEDSGWTDIFIYPGYTFKAIDGMITNFHLPKSTLIMLISALAGREHVLKAYKEAVNERYRFFSFGDAMLILEGENKHDSSRPV

SEQ ID NO: 66527 - protein, 341 aa, unidentified
  source 1..341: note = Fictibacillus enclensis
  REGION 1..341: note = tr|A0A0V8IRG5|A0A0V8IRG5_9BACI S-adenosylmethionine:tRNA ribosyltransferase-isomerase; OS = Fictibacillus enclensis OX=1017270 GN=AS030_22135 PE=3; SV = 1
MMSAALSFVLPDELNASMPPERRGIRRDYVKMMVIDKKEGTTSHSHFYKLDHYLQEGDVLVLNASRTIPAVLKGNLADGTVIEVRLAHKKSDQNWEALILADEVKNGDTIHFSPVLSATVVTAATDSPFSLLAFNLCCTALYDQIYQIGQPVRYEYIETPWDLDYYQTVFATSPGSVEMPSAGRAFSWELLFRLQKKGVRIEYVELHTGLSYLMDDKWHLEPRENLEEYSIPEKTAAAVRQAKSNGHKVIAVGTTVVRALESAVDTKGHLKAARGWTNLYITGTTKLQVADGLITGLHEPEASHLDLLSAFVPVQHLHVSYKEAIGQKYFWHEFGDMNLII

SEQ ID NO: 66528 - protein, 336 aa, unidentified
  source 1..336: note = Fictibacillus macauensis
  REGION 1..336: note = tr|I8UKQ1|I8UKQ1_9BACI S-adenosylmethionine:tRNA ribosyltransferase-isomerase OS=Fictibacillus macauensis ZFHKF-1 OX=1196324 GN=A374_00500 PE=3 SV=1
MSFSFALPSQLNAALPPEKRGVRRDYVKMLVINTKTKRTTHDVFFHLSHYLERGDVVVLNASRTLPAVLTATSKDRRYEVRLARRLKAQQWEVLVPHVSLEQGEILHFSKHLTAVVEHVNAHSPFITLFFHLPEPAFFDEVYKIGEPVRYEYIETPWKLDYYQTVFGSVPGSVEMPSAGRAFSWELLFQLQAMGVKIAFVELHTGLSYLMDDRWHIGPRENKEFYNISKETANVIHTAKQKGKRIIAVGTTVVRALESAAASGTLQPKKGWTNLYISEQSKLQIVDGLITGLHEPEASHLDLLTAFVPREFLQAAYSEAVEHRYLWHEFGDMNLII

SEQ ID NO: 66529 - protein, 347 aa, unidentified
  source 1..347: note = Fictibacillus macauensis
  REGION 1..347: note = tr|I8UER6|I8UER6_9BACI S-adenosylmethionine:tRNA ribosyltransferase-isomerase OS=Fictibacillus macauensis ZFHKF-1 OX=1196324 GN=queA PE=3 SV=1
MDITMFDFNLPDELIAQTPLLDRTASRLMVLNPMTGEVKHETFKHIIDYFQPGDCLVLNDTRVLPARLLGEKEETQAKIEVLLLKEVGNDTWETLVKPAKRVKKGTVVSFGDGRLKATCVDETDQGGRVFQFQYEGIFYEILDALGEMPLPPYIKEQLEERDRYQTVFAKHEGSAAAPTAGLHFTEELLEAIKQKGVHVTFITLHVGLGTFRPVSVDNILEHDMHAEYYEMTRETAELLRSVKANGGRIISVGTTSTRTLETIAQKHGDFTKASGWTDIFIYPGYEFKAIDGMLTNFHLPKSTLIMLISALAGREHVLAAYQKAVEEKYRFFSFGDAMLILEGEKQS

SEQ ID NO: 66530 - protein, 341 aa, unidentified
  source 1..341: note = Fictibacillus phosphorivorans
  REGION 1..341: note = tr|A0A161TNW7|A0A161TNW7_9BACI S-adenosylmethionine:tRNA ribosyltransferase-isomerase; OS = Fictibacillus phosphorivorans OX=1221500 GN=AWM68_19125; PE = 3 SV=1
MESAMKFELPDELNAKEPPERRGLRRDYVKMMVLDKTTGQTNHTQFYQLDRFLKKGDLLVLNASRTVPAVLKSIKEQDGTEVEVRLAHRKNDSIWEALPVSGSVKKDDVIRFSPTLTATIIEQSDHTPFVTLAFNLCCSSLFNQIYDLGEPVRYEYIEEPWNLDYYQTVFATIPGSVEMPSAGRAFSWELLFRLQKKGVKIAYITLHTGLSYLLDDKWHKGPDKNFENYEVPKETAELILETKHAGGRIIAVGTTVVRTLETVAIEKGMLQEASGWTNLYITENTKLQVCDGLITGMHEPEASHLQLLSAFVDREKLYNAYTDAIHQRYLWHEFGDMNLIL

SEQ ID NO: 66531 - protein, 343 aa, unidentified
  source 1..343: note = Fictibacillus phosphorivorans
  REGION 1..343: note = tr|A0A160IIL4|A0A160IIL4_9BACI S-adenosylmethionine:tRNA ribosyltransferase-isomerase; OS = Fictibacillus phosphorivorans OX=1221500; GN = ABE65_001060 PE=3 SV=1
METAMKFEVPEELNAKEPPERRGLRRDYVKMMVLDKDTGVTKHTQFYQLDKYLKKGDLLVLNASRTVPAVLKSHKEADGTEVEIRLAHRKNESIWEALPVSGTVKEGDIIRFSPTLTATIIKQSEDTPFVSLAFNLCCSSLFNQIYDLGEPVRYEYIQKPWNLDYYQTVFATIPGSVEMPSAGRAFSWELLFRLQKKGVRIAYITLHTGLSYLLDDKWHKGPDKNFENYHVSKETADLISETKNSGGRVIAVGTTVVRTLETVAQQNGKVQEASGWTNLYITENTKLRVCDGLITGMHEPEASHLQLLSAFLDRSKLYTAYNDAIQKRYLWHEFGDMNLILGE

SEQ ID NO: 66532 - protein, 340 aa, unidentified
  source 1..340: note = Fictibacillus solisalsi
  REGION 1..340: note = tr|A0A1H0CAG4|A0A1H0CAG4_9BACI S-adenosylmethionine:tRNA ribosyltransferase-isomerase; OS = Fictibacillus solisalsi OX=459525 GN=SAMN04488137_4852; PE = 3 SV=1
MSAALSFVLPDELNASMPPERRGIRRDYVKMMVIDKKEGTTTHSHFYKLDHYLQAGDVLVLNASRTIPAVLKGNLADGTVAEVRLAHKKSDQNWEALILADEVKSGDTIHFSPVLTATVVTAATDRPFSLLAFNLCCTALYDQIYQIGQPVRYEYIETPWDLDYYQTVFATSPGSVEMPSAGRAFSWELLFRLQKKGVRIEYVELHTGLSYLMDDKWHLEPRENLEEYSIPEKTAAAIRKAKRNGHKVIAVGTTVVRALESAVDTKGHLKAARGWTNLYITGATKLQVADGLITGLHEPEASHLDLLSAFVSPQHLHVSYKEAIGQKYFWHEFGDMNLII

SEQ ID NO: 66533 - protein, 345 aa, unidentified
  source 1..345: note = Fictibacillus solisalsi
  REGION 1..345: note = tr|A0A1G9WRS1|A0A1G9WRS1_9BACI S-adenosylmethionine:tRNA ribosyltransferase-isomerase; OS = Fictibacillus solisalsi OX=459525 GN=queA PE=3 SV=1
MDINMFDFDLPDELIAQTPLKDRTASRLMVLDPATGKVEHNTFKNIIDYLNPGDCLVLNDTRVLPARLLGEKEDTKAKIEILLLKETGDDTWETLVKPAKRVKQGTTVVFGNGLLKAVCTGETDQGGRTFKFEYEGIFYEILDALGEMPLPPYIKEQLEERDRYQTVYAKHQGSAAAPTAGLHFTESLLEDIKKKGVHVTFITLHVGLGTFRPVSAENIEEHDMHAEFYQITKGTAELLNQVKKNGGRIVSVGTTSTRTLETVAGKHGGFCEDSGWTDIFIYPGYTFKAIDGMITNFHLPKSTLIMLISALAGREHVLEAYKEAVNERYRFFSFGDAMLILEGEN

SEQ ID NO: 66534 - protein, 340 aa, unidentified
  source 1..340: note = Fictibacillus sp.
  REGION 1..340: note = tr|A0A4V1QKQ7|A0A4V1QKQ7_9BACI S-adenosylmethionine:tRNA ribosyltransferase-isomerase; OS = Fictibacillus sp. S7 OX=2212476 GN=DMO16_15255 PE=3 SV=1
MSAALSFVLPDELNASMPPERRGIRRDYVKMMVIDKKEGTTSHSHFYKLDHYLQEGDVLVLNASRTIPAVLKGNLADGTVIEVRLAHKKSDQNWEALILADEVKNGDTIHFSPVLSATVVTAATDSPFSLLAFNLCCTALYDQIYQIGQPVRYEYIETPWDLDYYQTVFATSPGSVEMPSAGRAFSWELLFRLQKKGVRIEYVELHTGLSYLMDDKWHLEPRENLEEYSIPEKTAAAVRQAKSNGHKVIAVGTTVVRALESAVDTKGHLKAARGWTNLYITGTTKLQVADGLITGLHEPEASHLDLLSAFVPVQHLHVSYKEAIGQKYFWHEFGDMNLII

SEQ ID NO: 66535 - protein, 341 aa, unidentified
  source 1..341: note = Fictibacillus sp.
  REGION 1..341: note = tr|A0A4Q7Q8Z2|A0A4Q7Q8Z2_9BACI S-adenosylmethionine:tRNA ribosyltransferase-isomerase; OS = Fictibacillus sp. BK138 OX=2512121 GN=EV282_3844 PE=3; SV = 1
MESAMKFELPQELNAKEPPERRGIRRDYVKMMVLNKTTGYTEHTKFYQLDRYLKRGDLLVLNASRTVPAVLKSIREIDGTEVEVRLAHRKNESIWEALPVSGTLTKGEIIRFSPTLTATVVEQSSDTPFVSLAFSLCCSSLYNQIYSLGEPVRYEYIQEPWNLDYYQTVFATIPGSVEMPSAGRAFSWELLFRLQKKGVRIAYITLHTGLSYLLDDKWHKGPDKNFENYEVPEETVNLIQETKEAGGRVVAVGTTVVRALETVALEKKELQAHTGWTNLYITENTKLQICDGLITGMHEPEASHLQLLSAFVDKDKLYDAYQGAIEQRYLWHEFGDMNLIL

SEQ ID NO: 66536 - protein, 362 aa, unidentified
  source 1..362: note = Unknown
  REGION 1..362: note = tr|A0A2P8WAX0|A0A2P8WAX0_9CYAN S-adenosylmethionine:tRNA ribosyltransferase-isomerase; OS = filamentous cyanobacterium CCT1 OX=2107702 GN=queA PE=3; SV = 1
MSPEIPNSSSEYSLAAYQYSLPPEKIAQTPVTPRDASRLLVVDSASTHRHHRFCDLPTLLQPGDLLVLNDTRVIPARLLGYKPSGAQVEVFLLEDQGDNRWLALVRPGRRLKPGATVHFGPNPDQPDLVAQVLDTDPDTSGRLLKFEPQSSESLFALFERLGEVPLPPYITDTAASPEQYQTVYAEAPGAVAAPTAGLHFTPELFERLEEMGVGRSRITLHVGVGTFRPVETDNILDHKMHGEWIDVSAETVAQIHATKARGGRVIAVGTTVVRALEGAAQGGELQPYQGKVNLFIYPGYQYRAIDGLITNFHLPGSSLLMLVSALIGRERLLGLYEDAIAQDYRFYSFGDAMLILPEAVQR

SEQ ID NO: 66537 - protein, 379 aa, unidentified
  source 1..379: note = Unknown
  REGION 1..379: note = tr|A0A2T1G2H8|A0A2T1G2H8_9CYAN S-adenosylmethionine:tRNA ribosyltransferase-isomerase; OS = filamentous cyanobacterium Phorm 6 OX=2107706 GN=queA; PE = 3 SV=1
MTEIDWSLDGYDYELSPEYIAQNPAVPRDSSRLLTVDSPSSHQHRIFRDLPDLLEPGDLLILNNTRVLPARLFGHKPNGPAVEILLMEERQHNCWLALVKPGKRLKLGAKIEFDPIAPACDDSPVAPCCCVPEAQAPEHHRLTATVIARDDATGGRLLEFDLPTEMSLIPFLDEYGHIPLPPYIDKSQAAPEQYQTVYAEKVGAVAAPTAGLHFTEELFSRLEQRGIEKAFVTLHVGVGTFRPVEVADVTTHQMHGEWVEVPLATVEKIRETQARGGRIIAVGTTSVRALEGAAAASDDFSLQPFCGPTNLFIYPGYKWRVVEGMITNFHLPRSTLMMMLSAMIGRSRLLELYREAIEHQYRFYSFGDAMLILPAAKIN

SEQ ID NO: 66538 - protein, 350 aa, Filibacter sp.
  REGION 1..350: note = tr|A0A3P5XWS3|A0A3P5XWS3_9BACL S-adenosylmethionine:tRNA ribosyltransferase-isomerase; OS = Filibacter sp. TB-66 OX=2483811 GN=queA PE=3 SV=1
MDVHDFDFDLPERLIAQTPLQNRTASRLMVLDKETGQVEHRQFPDLLNELQKGDVLVLNDTRVLPARLMGVKEETGATIEVLLLKETGYDEWETLVKPAKRVKVGTIVTFGDGRLKAQCTGILEQGGRIFKFSYEGIFYEILDALGEMPLPPYITESLDDQSRYQTVFAKERGSAAAPTAGLHFTAEFLEEIRAKGVTVTFITLHVGLGTFRPVSADSIEGHTMHSEYYHVTESTANTINDAKQQGGRIFAVGTTSARTLETIGSANNGKIVPSSGWTSIFIFPGYEFTILDGLLTNFHLPKSTLIMLVSALSSREFVLAAYEEAVKENYRFFSFGDAMFIKPSHRKESY

SEQ ID NO: 66539 - protein, 340 aa, Filifactor alocis
  REGION 1..340: note = tr|D6GTP5|D6GTP5_FILAD S-adenosylmethionine:tRNA ribosyltransferase-isomerase OS=Filifactor alocis (strain ATCC 35896 / D40 B5) OX=546269 GN=queA PE=3 SV=1
MNTKDFYYDLPEACIAQEPLKQRDSSKLLLLDKKTGEIEHKHFKDITQYLKKGDVLVMNNTRVLPARLFGTKEDTGANIELLLLKRMDLTTWEVMAKPAKRLKIGNIIFFHQTLSAVVKEIKDEGIRIIEFIYDGIFEEILDMLGTMPLPPYIHKKLEDKERYQTVYSKVDGSAAAPTAGLHFTKKLLSELQDIGVQLEYVTLHVGLGTFRPVMVEDVTKHHMHTEYYEIQKDVAQRINQAKAEKRRIICVGTTSVRTLESSARDGRISELSGWTDIFIYPPYRFQMADALITNFHLPESTLLMLVSALANKEFIMHAYKTAIEQNYRFFSFGDAMFIHN

SEQ ID NO: 66540 - protein, 410 aa, unidentified
  source 1..410: note = Filimonas endophytica
  REGION 1..410: note = tr|A0A561ID91|A0A561ID91_9BACT S-adenosylmethionine:tRNA ribosyltransferase-isomerase; OS = Filimonas endophytica OX=1500311 GN=FHW48_110194 PE=3; SV = 1
MAHPGNLSISNYTYSLPDDRIAVHPLEKRDDSKLLIYQNGRISEDRYRMLHQHLPAEAMLVFNNTKVVEARLYFQKHTGSIIEIFCLEPGGFADITSAMQQTGHVLWKCLVGGAKKWKQGPLEKKIEINNQTITLSATLVERKDDYYLIEFRWSDNHLHFAEVLHAAGSLPLPPYLNRQVEEGDKTRYQTIYAKHDGSVAAPTAGLHFTPELLQQLQQKNIEQHFVTLHVGAGTFKPVKASVMQEHEMHAEFIEIQAAFIRRLIQQLQSGQPVIAVGTTSLRTIESLYWMGVARQQASQPMTGNINLSQWDAYELPQNIPATEALHSLLQWMEAQKMEMLFAKTQIIIAPGYTLRVAQALITNFHQPQSTLLLLVAAIIGEDWRKVYDYALNHEFRFLSYGDGSLLWKKA

SEQ ID NO: 66541 - protein, 349 aa, unidentified
  source 1..349: note = Filimonas endophytica
  REGION 1..349: note = tr|A0A561J5H2|A0A561J5H2_9BACT S-adenosylmethionine:tRNA ribosyltransferase-isomerase; OS = Filimonas endophytica OX=1500311 GN=queA PE=3 SV=1
MKLSQFKFDLPLNLIAQNPTKRREDSRMMVVDRKTGNIENRFFREILDYFDDKDTFVVNNTKVFPARMYGRKEKTGAKIEVFLLRELNKPNRLWDVIVDPARKIRVGNKLYFGENDELVAEVIDNTTSRGRTIRFLWEDDEESFKKMLEFLGETPLPKYIKRKPDEEDKERYQTVYAKFEGAVAAPTAGLHFSKELIKRCEIKGVRFAEVTLHTGLGTFRPIEVEDLSKHKMDAEYYRIDEAACKIVNKAKETGHRICSIGTTTMRAMESSFTAQKLLKPSEGWTNTFIHPPYDFNVADSLVTNFHLPKTSLLIMACAFAGYDLIMEAYKKAIKDKYRFFSYGDAMLIL

SEQ ID NO: 66542 - protein, 409 aa, Filimonas lacunae
  REGION 1..409: note = tr|A0A173MRN5|A0A173MRN5_9BACT S-adenosylmethionine:tRNA ribosyltransferase-isomerase; OS = Filimonas lacunae OX=477680 GN=SAMN05421788_104284 PE=3; SV = 1
MAHPGNLSIVDYTYHLPDDRIAIHPLAQRDESKLLVYKSGKIQESQYRNLASFIPSGSLLVFNNTKVVEARLLFQKHTGSTIEIFCLEPAGFADVTTAMQQTEEVLWKCLVGGAKKWKQGPLEKTIDVDGNPVTLSVTLVEKKDDHCVVQFNWSDKHLHFATILHAAGSLPLPPYLNRQVEEEDKERYQTVYAKHDGSVAAPTAGLHFTPELLQQLQQQNIQQAFVTLHVGAGTFKPVKAATMNEHEMHAEFIEVQASFIQQLIQQLQNNQPVITVGTTSLRTTESLYWMGVKAHALLQSGGASVDIAQWDAYELPQHFTAAEALQHLLQWMQQQQMEVLLAKTQIIIAPGYQLRIAQALVTNFHQPQSTLLLLVAAITGNNWRTIYQYAMDHAFRFLSYGDGSLLWKD

SEQ ID NO: 66543 - protein, 349 aa, Filimonas lacunae
  REGION 1..349: note = tr|A0A173MAW3|A0A173MAW3_9BACT S-adenosylmethionine:tRNA ribosyltransferase-isomerase; OS = Filimonas lacunae OX=477680 GN=queA PE=3 SV=1
MKLSQFKFDLPLNLIAQNPTKRREDSRMMVIDRKTGNIENRNFKDILDYFDDKDVFVVNNTKVFPARMYGRKEKTGAKIEVFLLRELNKPNRLWDVIVDPARKIRVGNKLYFGENDELVAEVIDNTTSRGRTIRFLWDEDEESFKKMLEFLGETPLPKYIKRKPDEEDKERYQTVYAKYEGAVAAPTAGLHFSKELIKRCEIKGVRFSEVTLHTGLGTFRPIEVEDLSKHKMDAEYYRIDENACKIVNKAKETGHRICSIGTTTMRAMESSFTAQKLLKPSEGWTNTFIHPPYDFNVADSLVTNFHLPKTSLLIMACAFAGYDLIMEAYKRAIKDKYRFFSYGDAMLIL

SEQ ID NO: 66544 - protein, 409 aa, Filimonas sp.
  REGION 1..409: note = tr|A0A2U0ZQL1|A0A2U0ZQL1_9BACT S-adenosylmethionine:tRNA ribosyltransferase-isomerase; OS = Filimonas sp. YR581 OX=2135469 GN=C7485_105221 PE=3 SV=1
MAHPGNLSITDYTYSLPDSRIAVHPLAKRDESRLLVYKNGNITESRYSFLDEQLPEGAMLVFNNTKVVEARLLFQKHTGSSIEIFCLEPSGFTDITSAMQQTGQVLWKCLVGGAKKWKQGPLEKEIVIDNHTTTLSATLVEKKDDHCVVLFEWPDARYHFAAVLHAAGSLPLPPYLNRQVEEDDKTRYQTVYAKHDGSVAAPTAGLHFTPELLQRLQQKNIQSQYITLHVGAGTFKPVKAATMQEHEMHAEFIEIQVSFINQLLQQLSSGQPVIAVGTTSLRTIESLYWMGVKVHQTPTLEADALNLHQWDAYELPQNISVHDALSSLLQWMQRQQTDILLAKTQIIIAPGYTLRIAQALITNFHQPQSTLLLLVAAITGENWRTIYQYALDHQFRFLSYGDGSLLWKD

SEQ ID NO: 66545 - protein, 416 aa, Filimonas sp.
  REGION 1..416: note = tr|A0A4Q1D0E5|A0A4Q1D0E5_9BACT S-adenosylmethionine:tRNA ribosyltransferase-isomerase; OS = Filimonas sp. TTM-71 OX=2508721 GN=ESB13_19955 PE=3 SV=1
MTHPKHLTIQDFTYHLPEDRIARYPLPTRDESKLLVYRNGEITEHRYRTLDEHIPAGSLLVFNNTKVVEARLLFQKATGGVIELFCLEPAEATDITTAMTTTGEVRWKCLVGGAKKWKEEPLVKTIGNNGQPFQLTVHKEEKINDYFIVRFQWDAASLNFADVLHAAGVMPLPPYLNRKAEAADQERYQTIYARHDGSVAAPTAGLHFTPALLEKLAAKQVSTAFVTLHVSAGTFKPVKADTMDAHDMHSEFIEVNAAFIETIIKQLPAPVITVGTTSLRTLESLYWMGVKVKAARDKQLSFTNISVQHLEVHQWDAYELPRDIDAATALNELLLWMQAHDLPVLTARTQIMIAPGYQLRIAQALITNFHQPQSTLLLLVAAIIGMDWRKVYDYAMTHDFRFLSYGDGSLLWNSNK

SEQ ID NO: 66546 - protein, 335 aa, Filobacillus milosensis
  REGION 1..335: note = tr|A0A4Y8ISI7|A0A4Y8ISI7_9BACI S-adenosylmethionine:tRNA ribosyltransferase-isomerase; OS = Filobacillus milosensis OX=94137 GN=E3U55_07850 PE=3; SV = 1
MTLKTFEIPKELNASVPAEYRNGSRDQVKLMVTEGEETSFSEFQNLTNYVKSGDVMIFNNTRTIPAGLKATYKQKEVEFRLSQQIDEFTWEGFVLKEEMMIGEQLIVTPDLTFTIVGYGGEKPLVQLQSNMNSKDTMIGVITLGEPIRYDYINHPYPINTYQTVYGSIPGSMEMPSAGRAFTWDMLNKLKSNGVNIGFIQLYTGLSYYEKDQWPNPSNHPERYNVSQEVVDLVNKAKHEGRRVIAVGTTVVRALESAALNGTLFEQNDEYTNLYVNAKYDRQIVDSLLTGLHEPEASHLDMLTNWIEKDHLIDLYHDAMKRRFLWHEFGDLHLIL

SEQ ID NO: 66547 - protein, 342 aa, Filobacillus milosensis
  REGION 1..342: note = tr|A0A4Y8IWX6|A0A4Y8IWX6_9BACI S-adenosylmethionine:tRNA ribosyltransferase-isomerase; OS = Filobacillus milosensis OX=94137 GN=queA PE=3 SV=1
MNIEDFDFELPEELIAQTPLENRANSRLMVLNRKEESIDHRNFYHILDYFNEGDCLVLNNTKVLPARLFGHKEDTGGKVEVLLLNQQEGDEWEVLVKPAKKVKEGTRIVFGDGLLSAECIGLKEHGGRVIRFEYNGIFLEVLDQLGEMPLPPYIKEQLDDRDRYQTVYAEEVGSAAAPTAGLHFTEELLDQIKQKGVKIAYITLHVGLGTFRPVQVDNIEEHDMHSEFYQMSEDTASLLNDVKNSGNKIYAVGTTSVRTLETIARDESGQFKAKSGWTDIFIYPPYQFRAIDAMITNFHLPKSTLIMLVSAFANKEFILEAYYKAVEERYRFFSFGDAMLIL

SEQ ID NO: 66548 - protein, 357 aa, Filomicrobium sp.
  REGION 1..357: note = tr|A0A2D7FDK0|A0A2D7FDK0_9RHIZ S-adenosylmethionine:tRNA ribosyltransferase-isomerase; OS = Filomicrobium sp. OX=2024831 GN=queA PE=3 SV=1
  VARIANT 43: note = Xaa can be any naturally occurring amino acid
  VARIANT 50: note = Xaa can be any naturally occurring amino acid
  VARIANT 81: note = Xaa can be any naturally occurring amino acid
  VARIANT 93: note = Xaa can be any naturally occurring amino acid
  VARIANT 240: note = Xaa can be any naturally occurring amino acid
  VARIANT 334: note = Xaa can be any naturally occurring amino acid
  VARIANT 357: note = Xaa can be any naturally occurring amino acid
MRTDQFDFDLPDDLIALRPAEPRDSARLLVVGQDATGDRSVRXLPNELRXGDVLVFNNTRVIPAALEGVRIRGDTQARIQXNLHKRIAADRWXAFARPARKLNVGDRVRFGDGNSSCLMGALDATVAGRYQGGEIEFQFDLSGPTLDDAISNVGAMPLPPYIASRRQADVQDASSYQTVYAEHDGAVAAPTAGLHFTEELFSNLADRGIETAYLTLHVGAGTFLPVKADEIDAHKMHAEXGEVPPELAARLNEIRSSGGRLIAVGTTVVRLLESATTTDGEIQPFIGDTDIFISPGHSFRAIDGMMTNFHLPRSTLFMLVSAFVGLERMQQAYXHAIQSKYRFYSYGDSSLLWPKAX

SEQ ID NO: 66549 - protein, 368 aa, unidentified
  source 1..368: note = Fimbriiglobus ruber
  REGION 1..368: note = tr|A0A225DWT9|A0A225DWT9_9BACT S-adenosylmethionine:tRNA ribosyltransferase-isomerase; OS = Fimbriiglobus ruber OX=1908690 GN=FRUB_04687 PE=3 SV=1
MIAADSPVQRPPLAKLLVVDRFGAMTHAVRSALVEFLRPGDLVVANDAATLPASLQGVHVRSGEPVEVRLAGRRSLAADDVRQFVAVVFGAGDYHARTEDRPPPPVLDPGDRLTLSPLVATVERRLGHARLVGLRFDGTPDAIWAGLARHGRPIQYAHMPVPLALWDVWTPVAGPPVAFESPSAGFALDWHVLEGFRARGVGFATLTHAAGISSTGDPELDRRLPFDEPYHIPAATALAVRLTRARGSRVVAIGTTVVRALEHAALADGRVRAGDGVATQRIGAATRLCVADAILSGTHEPDTSHYELLRAFAADAVLDRVNVALQAGDYRTHEFGDSVFIEREYGRREYFSPQICADERGSESGILF

SEQ ID NO: 66550 - protein, 343 aa, unidentified
  source 1..343: note = Fimbriiglobus ruber
  REGION 1..343: note = tr|A0A225DGB5|A0A225DGB5_9BACT S-adenosylmethionine:tRNA ribosyltransferase-isomerase; OS = Fimbriiglobus ruber OX=1908690 GN=queA PE=3 SV=1
MSDLFFDYDLPEHLVAQEPAHPRDAARLLVARRDTGTLEHRVFHDLPDLLRPGDLIVLNDTKVLPARVIGRRAKTGGKWEGLFLHENPSGEWELLAQTRGFPEVGETLIVEPGELKLVLTGRTTDRHWLVRPDPPGTPADLLARHGQVPLPPYIRKGRARTDDQARYQTVYAAHTGSVAAPTAGLHFTPELFERLTATGIRTARVTLHVGLGTFAPVKTQDPTAHPIHAEWCEVGPETVAAVVETRARGGRVVAVGTTTTRTLESAARGGTLVPWRGDTSLFIRPPFNFQVLGGLVTNFHLPKTTLLLLAQAFAGTDLLRAAYREAVAREYRFYSYGDAMVIL

SEQ ID NO: 66551 - protein, 316 aa, unidentified
  source 1..316: note = Fimbriimonas ginsengisoli
  REGION 1..316: note = tr|A0A068NRL0|A0A068NRL0_9BACT S-adenosylmethionine:tRNA ribosyltransferase-isomerase; OS = Fimbriimonas ginsengisoli Gsoil 348 OX=661478 GN=queA; PE = 3 SV=1
MDRAASRLLHLDRSTGEVRHRAFREVVDLLREGDLLVLNDTRVSAVRLIGHKPTGGTVEALLLREEAPGVYEALIKPGRRMRPGAEVLFEGELQAEVLEEREEGRKLLQFAPQADLKDRLSTFGLAPLPPYIHEALRDKERYQTVYGRHEGSAAAPTAGLHFTPEIFDVLARKGVETARVTLHVGLDTFRPVQAEDPSDHPIHGERCDISQETASKINGARGRIIAVGTTSVRTLETFAVDRRRVEPGERVSRLYIRPGYDFRIVDGMFTNFHMPRTTMLMMISAMAGRENVMKAYREALSESYRFLSFGDSMLIL

SEQ ID NO: 66552 - protein, 345 aa, Finegoldia magna
  REGION 1..345: note = sp|B0S1J2|QUEA_FINM2 S-adenosylmethionine:tRNA ribosyltransferase-isomerase OS=Finegoldia magna (strain ATCC 29328) OX=334413 GN=queA PE=3 SV=1
MNTDDFDYELDEKFIAQTPLDKRDESKLMVMDRFNGNTEIKKFYNIIDYLNPGDVLVCNNTRVIPARLFGHRPEKEEKIEVLLLQQTEDKWECLVKPGKKMKLNQVIEFSDSVSAKVVDITEDGSRILKFEYEGIFEERLDELGNMPLPPYIKEKLNDKERYQTVYSKHNGSAAAPTAGLHFTNELLEKIKDKGIYVVFLTLHVGLGTFRPVKVDDVKDHHMHSEYYTISQETVDIINRQKSKGHNIIAVGTTSVRTLETVTHNNNSKLVAESGWTDIFIYPGFEFNIVDSLITNFHLPKSTLMMLVSAFSKKEYIFDAYEKAKQNDFRFFSFGDAMFINGGRNV

SEQ ID NO: 66553 - protein, 345 aa, Finegoldia magna
  REGION 1..345: note = tr|A0A233VPP5|A0A233VPP5_FINMA S-adenosylmethionine:tRNA ribosyltransferase-isomerase; OS = Finegoldia magna OX=1260 GN=queA PE=3 SV=1
MNTDDFDYELDEKFIAQTPLDKRDESKLMVMDRFNGNTEIKKFYNIIDYLNPGDVLVCNNTRVIPARLFGHRPGKEEKIEVLLLQQTEDKWECLVKPGKKMKLGQVIEFSDKVSAKVVDITEDGSRILKFDYEGIFEERLDELGNMPLPPYIKEKLDDKERYQTVYSKHKGSAAAPTAGLHFTNELLEKIKEKGIYVVFLTLHVGLGTFRPVKVDDVKDHHMHSEYYTISQEAVDIINRQKSEGHKIIAVGTTSVRTLETVTHNNNSKLVAESGWTDIFIYPGFEFNIVDSLITNFHLPKSTLMMLVSAFSKKEYIFDAYEKAKQNDFRFFSFGDAMFINGGKNV

SEQ ID NO: 66554 - protein, 341 aa, unidentified
  source 1..341: note = Firmicutes bacterium
  REGION 1..341: note = tr|A0A373Q3S2|A0A373Q3S2_9FIRM S-adenosylmethionine:tRNA ribosyltransferase-isomerase; OS = Firmicutes bacterium AM55-24TS OX=2292896 GN=queA PE=3; SV = 1
MKRTDFYYDLPEELIAQEPLKDRSSSRLMILDKNTGEIEHKHFYDIVDELNEGDALILNDTKVLPARLYGQKEGTGGAIEFLLLHKHTLDTWEVILKPGRKAKPGARFVFGNGELKAEVLDVINDGNRLVKFEYEGVFEEVLDKLGEMPLPHYITHKLEDKNRYQTVYAKNPGSAAAPTAGLHFTPELLEKIKAKGVNIGYVTLHVGLGTFRPVKADDILEHKMHSEFYILPQETADLVNKTKSNGKRVISVGTTATRVLETVGMENEKLEQKTGWTNIFIYPGKEFHVIDALITNFHLPESTLIMLVSALAGRENVLNAYKTAVQEKYRFFSFGDAMLIK

SEQ ID NO: 66555 - protein, 353 aa, unidentified
  source 1..353: note = Firmicutes bacterium
  REGION 1..353: note = tr|A0A1Q6S181|A0A1Q6S181_9FIRM S-adenosylmethionine:tRNA ribosyltransferase-isomerase; OS = Firmicutes bacterium CAG:65_45_313 OX=1897036 GN=queA; PE = 3 SV=1
MAETTELKKSDFYFDLPQELIAQDPLEDRSSSRLLVLDKNTGEISHHIFRDIIDYLHPGDCLVLNNTKVIPARLLGEREGTGGHVEVLLLKRKEADVWETLVKPGKKCKPGQRLSFGDGLLKAEVLETVEEGNRLIRFEYEGIFEEVLDKLGEMPLPPYITHKLKDKNRYQTVYAKYEGSAAAPTAGLHFTRELLQQIADKGIKIAYVTLHVGLGTFRPVKEENVLEHHMHSEYYQVTEEAANTINETKRNGGRVICVGTTSCRTVESAADEQGMVQPGCDNTEIFIYPGYRFKVLDALITNFHLPESTLVMLVSALAGREHILHAYEEAIREKYRFFSFGDAMFIADLKGEK

SEQ ID NO: 66556 - protein, 408 aa, Fischerella major
  REGION 1..408: note = tr|A0A1U7H583|A0A1U7H583_9CYAN S-adenosylmethionine:tRNA ribosyltransferase-isomerase; OS = Fischerella major NIES-592 OX=210994 GN=queA PE=3 SV=1
MQEQLAKTNSHLTSKQKIENSELDLSLAGYDYELPTELIAQNPAVPRDSSRLLVVSSPNVDKDDTLQHRIFRDLPEILRPGDLLVMNNTRVIPARLYGEKLTGAEVEVLLLEERQHNCWLALVKPGKRFKHGSKIVFTAKGKTDGEIGRWGENFHPTTPPPHLPITEAPLPHHLLTATVLETDAATGGRLLQFDLPQGVSLLQLLDVFGEVPLPPYITNTEAQSEQYQTVYAQNPGAVAAPTAGLHFTPELLEKLRQQNINQAFVTLHVGVGTFRPVEVENVTTHTMHEEWIEVPPSTVEQIRATKAAGGRIIAVGTTVVRALEGAATTGELQPFCGKTNLFIYPGYQWRVVEGMITNFHLPRSSLLMLVSALIGRQRLLNIYQEAIVSRYRFYSFGDAMLILPEARI

SEQ ID NO: 66557 - protein, 398 aa, unidentified
  source 1..398: note = Fischerella muscicola
  REGION 1..398: note = tr|A0A2N6JUK0|A0A2N6JUK0_FISMU S-adenosylmethionine:tRNA ribosyltransferase-isomerase; OS = Fischerella muscicola CCMEE 5323 OX=2019572 GN=queA; PE = 3 SV=1
MQEQLAKTNSHLTSKQKTENSELDLSLAGYDYELPTELIAQNPAVPRDSSRLLVVNSPNVGKENTLQHRIFRELPEILRPGDLLVMNNTRVIPARLYGEKSTGAEVEVLLLEERQHNCWLALVKPGKRFKHGSKIVFTAKVDTDKEIGRWGERFHPTTPLPDRLLSATVLETDAATGGRLLQFDLPEEVSLLQLLDVFGEVPLPPYITTTEAQSEQYQTVYAQNPGAVAAPTAGLHFTPQLLEKLRQQNINQAFVTLHVGVGTFRPVEVENVTTHTMHEEWIEVPPSTVEQIRATKAAGGRIIAVGTTVVRALEGAATTGELQPFCGKTNLFIYPGYQWRVVEGMITNFHLPRSSLLMLVSALIGRQRLLNIYQEAIASRYRFYSFGDAMLVLPEARI

SEQ ID NO: 66558 - protein, 408 aa, Fischerella sp.
  REGION 1..408: note = tr|A0A0S3TSX2|A0A0S3TSX2_9CYAN S-adenosylmethionine:tRNA ribosyltransferase-isomerase; OS = Fischerella sp. NIES-3754 OX=1752063 GN=queA PE=3 SV=1
MQEQLAKTNSHLTSKQKTENSELDLSLAGYDYELPTELIAQNPAVPRDSSRLLVVSSPNVDKDDTLQHRIFRDLPEILRPGDLLVMNNTRVIPARLYGEKLTGAEVEVLLLEERQHNCWLALVKPGKRFKHGSKIVFTAKGKTDGEIGRWGENFHPTTPPPHLPITEAPLPHHLLTATVLETDAATGGRLLQFDLPQGVSLLQLLDVFGEVPLPPYITNTEAQSEQYQTVYAQNPGAVAAPTAGLHFTPELLEKLRQQNINQAFVTLHVGVGTFRPVEVENVTTHTMHEEWIEVPPSTVEQIRATKAAGGRIIAVGTTVVRALEGAATTGELQPFCGKTNLFIYPGYQWRVVEGMITNFHLPRSSLLMLVSALIGRQRLLNIYQEAIVSRYRFYSFGDAMLILPEARI

SEQ ID NO: 66559 - protein, 390 aa, Fischerella sp.
  REGION 1..390: note = tr|A0A1Z4TN12|A0A1Z4TN12_9CYAN S-adenosylmethionine:tRNA ribosyltransferase-isomerase; OS = Fischerella sp. NIES-4106 OX=2005456 GN=queA PE=3 SV=1
MQEQLTKTNSHLRSEQTPENSELDLSLAGYDYELPTELIAQNPVVPRDSSRLLVVNSLNVGIDTIPQHRIFRNLPEILRPGDLLVMNNTRVLPARLYGKKLTGAEVEVLLLEERQHNRWLALVKPGKRFKRGSQIVFTAKVNTDGDHPTTPLPYHSLTATVIATDTATGGRLLQFELPEEVSLLQLLDVFGEIPLPPYITTTEAQSEQYQTVYAQNPGAVAAPTAGLHFTPELLQKLREQNINQAFVTLHVGVGTFRPVEVENLTTHTMHEEWIEVPQNTVEQIRATKAAGGRIIAVGTTVVRALEGSATKDELQPFCGKTNLFIYPGYKWRVVEGMITNFHLPRSSLLMLVSALIGRQRLLNIYQEAIASRYRFYSFGDAMLILPEATI

SEQ ID NO: 66560 - protein, 416 aa, Fischerella thermalis
  REGION 1..416: note = tr|A0A2N6LIW5|A0A2N6LIW5_9CYAN S-adenosylmethionine:tRNA ribosyltransferase-isomerase; OS = Fischerella thermalis CCMEE 5319 OX=2019665 GN=queA; PE = 3 SV=1
MQEQLAKTNSHLTSKQKIENSELDLSLAGYDYELPTELIAQNPAFPRDSSRLLVVSSANVDKDDTLQHRIFRDLPEILRPGDLLVMNNTRVIPARLYGEKLTGAEVEVLLLEERQHNCWLALVKPGKRFKHGSKIVFTAKGKTDEEMGKLGDGEIGRWGEKFHPTTPPPHLPITEAPSPHHLLTATVLETDAATGGRLLQFDLPEEVSLLQLLEVFGEVPLPPYITNTEAQSEQYQTVYAQNPGAVAAPTAGLHFTPELLEKLRQQNINQAFVTLHVGVGTFRPVEVENVTTHTMHEEWIEVPPSTVEQIRATKAAGGRIIAVGTTVVRALEGAATTGELQPFCGKTNLFIYPGYQWRVVEGMITNFHLPRSSLLMLVSALIGRQRLLNIYQEAIASRYRFYSFGDAMLILPEARI

SEQ ID NO: 66561 - protein, 416 aa, Fischerella thermalis
  REGION 1..416: note = tr|A0A2N6MBQ5|A0A2N6MBQ5_9CYAN S-adenosylmethionine:tRNA ribosyltransferase-isomerase; OS = Fischerella thermalis CCMEE 5205 OX=2019671 GN=queA; PE = 3 SV=1
MQEQLAKTNSHLTSKQKIENSELDLSLAGYDYELPTELIAQNPAFPRDSSRLLVVNSPNVDKDNTLQHRIFRDLPEILRPGDLLVMNNTRVIPARLYGEKLTGAEVEVLLLEERQHNCWLALVKPGKRFKHGSKIVFTAKGKTDEEMGRLGYGEIGRWGEKFHPTTPPPHLPITEAPSPHHLLTATVLETDAATGGRLLQFDLPEGVSLLQLLDVFGEVPLPPYITNTEAQSEQYQTVYAQNPGSVAAPTAGLHFTPELLEKLRQQNINQAFVTLHVGVGTFRPVEVENVTTHTMHEEWIEVPPSTVEQIRATKAAGGRIIAVGTTVVRALEGAATTGELQPFCGKTNLFIYPGYQWRVVEGMITNFHLPRSSLLMLVSALIGRQRLLNIYQEAIASRYRFYSFGDAMLILPEARI

SEQ ID NO: 66562 - protein, 349 aa, unidentified
  source 1..349: note = Flagellimonas aquimarina
  REGION 1..349: note = tr|A0A316KUH5|A0A316KUH5_9FLAO S-adenosylmethionine:tRNA ribosyltransferase-isomerase; OS = Flagellimonas aquimarina OX=2201895 GN=queA PE=3 SV=1
MKLSNFNFELPKELLAEYPAENRDESKLMVIHRETGKIEHKMFKDLIDYFDEGDVMALNNTKVFPARLYGNKEKTGARIEVFLLRELNQEQRLWDVLVDPARKIRIGNKLYFGEDESLVAEVIDNTTSRGRTLRFLYDGSYTDFRRKLRELGETPLPKYIKRGVEPEDEERYQTIYAKHEGAVAAPTAGLHFSKHLLKRLEIKGINFAEVTLHVGLGTFNPVEVEDLSKHKMDSEELVIDEKATEIINNAKENKKRICAVGTTVMRGLESAVSSGHTLNTFEGWTNKFIFPPYDFSIANCMITNFHLPKSTLLMMVSAFIGHDLMKKAYKQAILEGYRFYSYGDAMLVI

SEQ ID NO: 66563 - protein, 349 aa, Flagellimonas eckloniae
  REGION 1..349: note = tr|A0A0Q1H823|A0A0Q1H823_9FLAO S-adenosylmethionine:tRNA ribosyltransferase-isomerase; OS = Flagellimonas eckloniae OX=346185 GN=queA PE=3 SV=1
MKLSNFNFELPTELLAEYPAENRDESKLMVIHKDTGKIEHKMFKDLINYFDEGDVMVLNNTKVFPARLFGNKEKTGARIEVFLLRELNQEQRLWDVLVDPARKIRIGNKLYFGDDESVVAEVIDNTTSRGRTLRFLYDGSYIDFRRKLRELGETPLPKYIKRGVEPEDEERYQTIYAKYEGAVAAPTAGLHFSKHLLKRLEIKGVDFAEVTLHVGLGTFNPVEVEDLSKHKMDSEELVIDEKATEVVNNAQKEKKKICAVGTTVMRGLESAVSSGHTLNTFEGWTNKFIFPPYDFSIANCMITNFHLPKSTLLMMVSAFMGHDLMKKAYKQAILEGYRFYSYGDAMLII

SEQ ID NO: 66564 - protein, 349 aa, unidentified
  source 1..349: note = Flagellimonas flava
  REGION 1..349: note = tr|A0A1M5N543|A0A1M5N543_9FLAO S-adenosylmethionine:tRNA ribosyltransferase-isomerase; OS = Flagellimonas flava OX=570519 GN=queA PE=3 SV=1
MKLSNFNFELPKELLAEYPAENRDESKLMVIHRDTGKIEHKMFKDLINYFDEGDVMVLNNTKVFPARLYGNKEKTGARIEVFLLRELNQEQRLWDVLVDPARKIRIGNKLYFGEDESLVAEVIDNTTSRGRTLRFLYDGSYTDFRRKLRQLGETPLPKYIKRDVEPEDEERYQTIYAKYEGAVAAPTAGLHFSKHLLKRLEIKGVDFAEVTLHVGLGTFNPVEVEDLSKHKMDSEELVIDEKATEVVNNAKQSKRRICAVGTTVMRGLESAVSSEHTLNTFEGWTNKFIFPPYDFSIANCMITNFHLPKSTLLMMVSAFIGHDLMKKAYKQAILEQYRFYSYGDAMLII

SEQ ID NO: 66565 - protein, 349 aa, unidentified
  source 1..349: note = Flagellimonas maritima
  REGION 1..349: note = tr|A0A2Z4LVC2|A0A2Z4LVC2_9FLAO S-adenosylmethionine:tRNA ribosyltransferase-isomerase; OS = Flagellimonas maritima OX=1383885 GN=queA PE=3 SV=1
MKLSNFNFELPKELLAEYPAENRDESKLMVIHRETGKIEHKMFKDLIDYFDEGDVMALNNTKVFPARLYGNKEKTGARIEVFLLRELNQEQRLWDVLVDPARKIRIGNKLYFGDDESLVAEVIDNTTSRGRTLRFLYDGSYTDFRRKLRELGETPLPKYIKRDVEPEDEKRYQTIYAKHEGAVAAPTAGLHFSKHLLKRLEIKGVDFAEVTLHVGLGTFNPVEVEDLSKHKMDSEELVIDEKATEIINNAKKNKQRVCAVGTTVMRGLESAVSSDHTLNTFEGWTNKFIFPPYEFSIANCMITNFHLPKSTLLMMVSAFVGHDLMKKAYKQAILEGYRFYSYGDAMLVL

SEQ ID NO: 66566 - protein, 349 aa, unidentified
  source 1..349: note = Flagellimonas pacifica
  REGION 1..349: note = tr|A0A285MUK0|A0A285MUK0_9FLAO S-adenosylmethionine:tRNA ribosyltransferase-isomerase; OS = Flagellimonas pacifica OX=1247520 GN=queA PE=3 SV=1
MKLSNFNFELPKELLAEYPAENRDESKLMVIHRETGKIEHKMFKDLIDYFDEDDVMVLNNTKVFPARLYGNKEKTGARIEVFLLRELNQEQRLWDVLVDPARKIRIGNKLYFGEDESLVAEVIDNTTSRGRTLRFLYDGSYTDFRRKLRELGETPLPKYIKRDVEPEDEERYQTIYAKYEGAVAAPTAGLHFSKHLLKRLEIKGVDFAEVTLHVGLGTFNPVEVEDLSKHKMDSEELVIDEKATEVVNNAKTNKKRVCAVGTTVMRGLESAVSSEHTLNTFEGWTNKFIFPPYDFSIANCMITNFHLPKSTLLMMVSAFVGHDLMKKAYKQAILEGYRFYSYGDAMLVI

SEQ ID NO: 66567 - protein, 349 aa, Flagellimonas sp.
  REGION 1..349: note = tr|A0A5C8V5C5|A0A5C8V5C5_9FLAO S-adenosylmethionine:tRNA ribosyltransferase-isomerase; OS = Flagellimonas sp. 176CP5-101 OX=2603628 GN=queA PE=3; SV = 1
MKLSNFSFELPKELLAEYPAENRDESKLMVIHRESGKIEHKMFKDLINYFDEGDVMALNNTKVFPARLYGNKEKTGARIEVFLLRELNQEQRLWDVLVDPARKIRIGNKLYFGDDESLVAEVIDNTTSRGRTLRFLYDGSYTDFRRKLRELGETPLPKYIKRGVEPEDEERYQTIYAKHEGAVAAPTAGLHFSKHLLKRLEIKGVKFAEVTLHVGLGTFNPVEVEDLSKHKMDSEELVIDEKATEIINNAKQEKRRICAVGTTVMRGLESAVSSGHTLNTFEGWTNKFIFPPYEFSIANCMITNFHLPKSTLLMMVSAFIGHDLMKKAYKQAILEGYRFYSYGDAMLII

SEQ ID NO: 66568 - protein, 348 aa, Flammeovirga kamogawensis
  REGION 1..348: note = tr|A0A553GF20|A0A553GF20_9BACT S-adenosylmethionine:tRNA ribosyltransferase-isomerase; OS = Flammeovirga kamogawensis OX=373891 GN=queA PE=3 SV=1
MKLSQFQFDLPTDLIAQYPAENRDESRLMVLHRATGKIEHKMFKDIVDYFDEGDVLVMNNTKVFPARLYGNKEKTGAKIEVFLLRELNKESHLWDVLVDPARKIRVGNKLYFGDGSLVAEVIDNTTSRGRTIRFLVDGEDEEFYKTIEELGETPIPRDLEREAEASDRDRYQTIFAEKKGAVAAPSAGLHFTPQIAKRLEIKSVEMTPITLHVGLGAFRDVDVEDLTKHKMDSEHYEVGAETVDVVNKALGEKKNVCAIGTTALRSLETSVSASNTLKANEGWTDKFIFPPYDFKIVSSMVTGFHKPKSTLLMMAAAFGGYDLMMKAYEEAIKEKYRFLSYGDAMLIL

SEQ ID NO: 66569 - protein, 409 aa, Flammeovirga kamogawensis
  REGION 1..409: note = tr|A0A553GJI0|A0A553GJI0_9BACT S-adenosylmethionine:tRNA ribosyltransferase-isomerase; OS = Flammeovirga kamogawensis OX=373891 GN=queA PE=3 SV=1
MDKDIQLPQIDLNNYQYDLPTGRIAKHPHSPRDESKLMLYKNGNISHKVFKDIVGELDADYTLFFNNTKVLPARLYFQKETGANIEVFLLNPIKPTRDISAAMLAESGTVWECAIGNYKRWKDQSLVSAVNVEGEIVKLTVSHDDRTKRFVKFEWDNPSLKFVDIISAAGNTPLPPYIKRAATEEDKDTYQTVYSKNEGAVAAPTAGLHFTKDVLAKLAAKGVKEEEVTLHVSAGTFKPISADIVTDHEMHNEQVIVTQENIKALIDAKKVACVGTTSMRTLESTYWFGVRLIHEGDTATFDIHKLEAYQKVAEHSSLPSRQESFRAVLDYMIKKDISTLSGETSIFIMPGYQFRVIDALVTNFHLPSTTLVLLIAAFIGEDWRKVYNQALDNEYRFLSYGDSSLLFRN

SEQ ID NO: 66570 - protein, 348 aa, Flammeovirga pacifica
  REGION 1..348: note = tr|A0A1S1Z1S3|A0A1S1Z1S3_9BACT S-adenosylmethionine:tRNA ribosyltransferase-isomerase; OS = Flammeovirga pacifica OX=915059 GN=queA PE=3 SV=1
MKLSQFQFDLPSDLIAQYPAENRDEARLMVLHRKTGEIEHRLFKDIVEYFDEGDCLVMNDTKVFPARLYGNKEKTGAKIEVFLLRELNKESHLWDVLVDPARKIRVGNKLYFGDGSLVAEVIDNTTSRGRTIRFLVDGEDEEFYKTIEELGETPIPRDLEREAEPSDRDRYQTIFAEKKGAVAAPSAGLHFTPQIAKRMEIKSVEITPITLHVGLGAFRDVDVEDLTKHKMDSEHYSVGQETVDIVNQALTEKKNICAVGTTALRSLETSVSASNTLKANEGWTDKFIFPPYDFKIVSSMVTGFHKPKSTLLMMASAFGGYDLMMRAYEEAIKEKYRFLSYGDAMLIL

SEQ ID NO: 66571 - protein, 404 aa, Flammeovirga pacifica
  REGION 1..404: note = tr|A0A1S1Z5E5|A0A1S1Z5E5_9BACT S-adenosylmethionine:tRNA ribosyltransferase-isomerase; OS = Flammeovirga pacifica OX=915059 GN=queA PE=3 SV=1
MKLPEINLDDYQYELPNERIAAHPANPRDSSKLMMYKEGEIEHKVFKEITNELNSDYTLFFNNTKVLPARLYFKKPTGAQIEVFLLNPIAPTRDISAAMLEKSGTIWECAIGNFKRWKEDKLEAAVQTEKGIVKLTVSHEDRDKRFVKFEWEEESLNFVDIISAAGNTPLPPYIKRTATEDDKETYQTVYSKNEGAVAAPTAGLHFTNEVLDILKNQGVDEQEVTLHVSAGTFKPITADKVTDHEMHNEQIIITKENVKALINAHKVACVGTTSMRTLESSYWYGVRLLLDNNTTFDIHKLEAYERMESGATLPTRQESFSAILKYMEENNLDNIHGETSIFIMPGYQFQVIDTLVTNFHLPSTTLVLLIAAFIGEDWRKVYQAALDNDYRFLSYGDSSILFRK

SEQ ID NO: 66572 - protein, 371 aa, Flammeovirga sp.
  REGION 1..371: note = tr|A0A1B1FPZ9|A0A1B1FPZ9_9BACT S-adenosylmethionine:tRNA ribosyltransferase-isomerase; OS = Flammeovirga sp. MY04 OX=1191459 GN=MY04_0839 PE=3 SV=1
MVYKEGNIEHKVFREITKELNSDYTLFFNNTKVLPARLYFKKPTGAQIEVFLLNPIAPTRDISAAMLEKSGTIWECAIGNFKRWKEDKLEAAVQTEKGIVKLTVSHEDREKRYVKFEWEEESLNFVDIISAAGNTPLPPYIKRTATEDDKETYQTVYSKNEGAVAAPTAGLHFTNEVLDVLKNQGVDEQEVTLHVSAGTFKPITADKVTDHDMHNEQIIITKENVKALIEANKVACVGTTSMRTLESSYWYGVRLLLDNNSTFDIQKLEAYERMESGVTLPSRQESFGAILKHMEEHNLDTIHGETSIFIMPGYQFQVIDTLVTNFHLPSTTLVLLIAAFIGEDWRKVYQAALDNDYRFLSYGDSSILFRK

SEQ ID NO: 66573 - protein, 348 aa, Flammeovirga sp.
  REGION 1..348: note = tr|A0A150AEM5|A0A150AEM5_9BACT S-adenosylmethionine:tRNA ribosyltransferase-isomerase; OS = Flammeovirga sp. SJP92 OX=1775430 GN=queA PE=3 SV=1
MKLSQFQFDLPKDLIAQYPEENRDDARLMVLHRKTGEIEHRKFRDIVEYFDDGDVLVMNDTKVFPARLYGNKEKTGAKIEVFLLRELNKESHLWDVLVDPARKIRVGNKLYFGDGSLVAEVIDNTTSRGRTIRFLVDGEEEEFYRTIEELGETPIPRDLGREAEPSDKDRYQTIFAAKKGAVAAPSAGLHFTPQIAKRFEIKSVDITPITLHVGLGAFRDVDVEDLTKHKMDSEHYRVGEETVEIVNKALENKKNVCAIGTTVLRSLETSVSASNSLKGNEGWTDKFIFPPYDFKIVNSMVTGFHKPKSTLLMMATAFGGYDLVMRAYEEAIKEKYRFLSYGDAMLIL

SEQ ID NO: 66574 - protein, 255 aa, Flammeovirga yaeyamensis
  REGION 1..255: note = tr|B1A197|B1A197_9BACT S-adenosylmethionine:tRNA ribosyltransferase-isomerase (Fragment) OS=Flammeovirga yaeyamensis OX=367791 PE=3 SV=1
EWEEESLNFVDIISAAGNTPLPPYIKRTATEDDKETYQTVYSKNEGAVAAPTAGLHFTNEVLDVLKNQGVDEQEVTLHVSAGTFKPITADKVTDHDMHNEQIIITKENVKALIEANKVACVGTTSMRTLESSYWYGVRLLLDNNSTFDIQKLEAYERMESGVTLPSRQESFGAILKHMEEHNLDTIHGETSIFIMPGYQFQVIDTLVTNFHLPSTTLVLLIAAFIGEDWRKVYQAALDNDYRFLSYGDSSILFRK

SEQ ID NO: 66575 - protein, 158 aa, unidentified
  source 1..158: note = Flammeovirgaceae bacterium
  REGION 1..158: note = tr|A0A2D9TP25|A0A2D9TP25_9BACT S-adenosylmethionine:tRNA ribosyltransferase-isomerase; OS = Flammeovirgaceae bacterium OX=2026740 GN=CMB87_04630; PE = 3 SV=1
  VARIANT 17: note = Xaa can be any naturally occurring amino acid
  VARIANT 92: note = Xaa can be any naturally occurring amino acid
MIIKCILKKLLFQKKNXSNLKKSKNIIAVGTTSLRTLESLYFLGIKLSNKNTDINIEQYPYMKNHKKYNKNEICNIILKYMNSNNLNFIKFXSSLFIIPGYNFKFCNQLITNFHYPKSTLILLIAAFVGEDWKKIYKFATKKNFRFLSYGDSSLLFKK

SEQ ID NO: 66576 - protein, 348 aa, unidentified
  source 1..348: note = Flammeovirgaceae bacterium
  REGION 1..348: note = tr|A0A1Z9SD10|A0A1Z9SD10_9BACT S-adenosylmethionine:tRNA ribosyltransferase-isomerase; OS = Flammeovirgaceae bacterium TMED262 OX=1986699 GN=queA; PE = 3 SV=1
  VARIANT 68: note = Xaa can be any naturally occurring amino acid
MKLSEFDFKLAATRTAIHPAANRDESRLMILHKKTGKIEHKQFKDIIKFFKEDDVLVLNDTKVFPARXYGQKEKTGAKIEVFLLRELNPELNLWDVLVDPARKIRVGNKLYFGEGELVAEVIDNTTSRGRTIRFIPEDTERDFHDIIQEYGETPLPKEIKRKVDKKDEERFQTVYAKNIGAVAAPAAGLHFTDILLKKLILKGVKIVKITSHTGLGTFKDIDVEDLTKHKMDSENFSVPVETEIEVNRALDNGNRIFAVGTSTMKTLETAVSASNRLKAKSGWTDKFIFPPYDFKICGAMITNFHSPKSTLLMMASAYGGFDQVMKVYKVAIKEKYMFHTYGDALMII

SEQ ID NO: 66577 - protein, 400 aa, unidentified
  source 1..400: note = Flaviaesturariibacter sp.
  REGION 1..400: note = tr|A0A4R4E2U8|A0A4R4E2U8_9BACT S-adenosylmethionine:tRNA ribosyltransferase-isomerase; OS = Flaviaesturariibacter sp. 17J68-15 OX=2545761 GN=queA; PE = 3 SV=1
MTDFPISAFDYPLPDDRIAAFPLAERDASRLLVWESGKISDRHFHNLAEELPGGATLVVNDTRVIEARIFFQKASGGIIELFLLEPQQPAEMTAALQSEGPVQWRCLIGGASKWKAGQVLTKTLTVQGADCVLEARFVSKEPDEFIVDLRWAPPLPFAEVLHAAGAIPLPPYIRRAAEGADAERYQTIFARQQGSVAAPTAALHFTPRVLEALEAKSIRRTPVTLNVGAGTFKPVKSDTIGGHPMHGEYFSVMASSLRELVDATRLVAVGTTSLRTLESLYWLGVKTAAAGMLQTELGQWEAYELETPFSYRDSLTVLLRELEKNGWNELHGRTSLLIRPGYRFQSAEALLTNFHQPKSTLVCLVAAFIGEDWRRVYTHALEQGYRFLSYGDSSLLWRKS

SEQ ID NO: 66578 - protein, 349 aa, unidentified
  source 1..349: note = Flaviaesturariibacter sp.
  REGION 1..349: note = tr|A0A4R1B6Q4|A0A4R1B6Q4_9BACT S-adenosylmethionine:tRNA ribosyltransferase-isomerase; OS = Flaviaesturariibacter sp. 17J68-12 OX=2502780 GN=queA; PE = 3 SV=1
MKLSQFKFDLPLNLIAQNPSKKREDSRMMVINRKTGEIENRNFRDILDYFDDKDAFVVNNTKVFPARMYGRKEKTGAKIEVFLLRELNKEHRLWDVIVDPARKIRVGNKLYFGDDEDLVAEVIDNTTSRGRTIKFLFDGDDNAFRLILEKHGETPLPKYIKRKPDDEDRERYQTVYAKYEGAVAAPTAGLHFSRELIKRCEIKGVRFAEVTLHTGLGTFRPIEVEDLSKHKMDAEYYRIEDTACKIVNKAKETGHRVCSIGTTTMRALESSFTAQRMLKPSEGWTNTFIHPPYEFNIADALVTNFHLPKTSLLIMACAFAGYDLMMEAYKKAIKEKYRFFSYGDAMLII

SEQ ID NO: 66579 - protein, 419 aa, Flavihumibacter petaseus
  REGION 1..419: note = tr|A0A0E9N6J6|A0A0E9N6J6_9BACT S-adenosylmethionine:tRNA ribosyltransferase-isomerase; OS = Flavihumibacter petaseus NBRC 106054 OX=1220578 GN=queA; PE = 3 SV=1
MKSAPNHPKSISIAAYQYALPDNRIASFPLSDRDASKLLVFREGNIRDGQYRDLPAEIPSGYLLVFNQTRVVRARMVFTKPSGGRIEVFCLEPTSDYAEMTTALAQTGKVNWTCLVGGAAKWKPGMVLEKSVSLPDGTSLMLKASISHREQETFVIQFTWEPGYIAFAEVLEVAGAIPIPPYLKRESTESDLERYQTIYAREEGSVAAPTAGLHFTPNLLQRLTEKNINSAFVTLHVGAGTFKPVKAEKIEGHEMHAEWIEVEKHVIETLLHAGNKVIAVGTTSLRTLESIYWMGCKAYADPDTPLDQLEVHQWDPYDGAVPSQMPVEAALRALLQRMETEKAMKIVSKTSLLIAPGYRVRMVEALITNFHQPQSTLLLLVAAMVGADWKKIYEHALKSDYRFLSYGDGSILWKSASQF

SEQ ID NO: 66580 - protein, 349 aa, Flavihumibacter petaseus
  REGION 1..349: note = tr|A0A0E9MTX0|A0A0E9MTX0_9BACT S-adenosylmethionine:tRNA ribosyltransferase-isomerase; OS = Flavihumibacter petaseus NBRC 106054 OX=1220578 GN=queA; PE = 3 SV=1
MKLSQFKFDLPLNLIAQHPTKKREDSRMMVVHRKTGQIENKNFRDILDYFDDKDVFVVNNTKVFPARMYGRKEKTGAKIEVFLLRELNKPNRLWDVIVDPARKIRVGNKLYFGDNDELVAEVIDNTTSRGRTIRFLWEGTDAEFRTMLEFLGETPLPKYIKRKPDEEDKERYQTVYAKHEGAVAAPTAGLHFSRELIKRLEIKGVRFAEVTLHTGLGTFRPIEVEDLSKHKMDAEYYRIDDNSCQIVNKAKTTGHRICSIGTTTMRAIESSFTAEKLLKPSEGWTNHFIHPPYQFSIADALVTNFHLPKTSLLIMTCAFAGYDLAMEAYKKAIKDKYRFFSYGDAMLVI

SEQ ID NO: 66581 - protein, 349 aa, unidentified
  source 1..349: note = Flavihumibacter solisilvae
  REGION 1..349: note = tr|A0A0C1LJS8|A0A0C1LJS8_9BACT S-adenosylmethionine:tRNA ribosyltransferase-isomerase; OS = Flavihumibacter solisilvae OX=1349421 GN=queA PE=3 SV=1
MKLSQFKFDLPLNLIAQHPAKKREDSRMMVVHRKTGNIENKNFRDILEYFDDKDVFVVNNTKVFPARMYGRKEKTGAKIEVFLLRELNKPNRLWDVIVDPARKIRVGNKLYFGDNDELVAEVIDNTTSRGRTIRFLWDGTDEEFRQMLEFLGETPLPKYIKRKPDEEDKERFQTVYAKHEGAVAAPTAGLHFSRELIKRLEIKGVRFAEVTLHTGLGTFRPIEVEDLSKHKMDAEYYRIEDNACQIVNKAKTTGHRLCSIGTTTMRAIESSFTAEKLLKPSEGWTNHFIHPPYEFSIADALVTNFHLPKTSLLIMTCAFAGYDLAMEAYRKAIKDKYRFFSYGDAMLVI

SEQ ID NO: 66582 - protein, 415 aa, unidentified
  source 1..415: note = Flavihumibacter solisilvae
  REGION 1..415: note = tr|A0A0C1LBK0|A0A0C1LBK0_9BACT S-adenosylmethionine:tRNA ribosyltransferase-isomerase; OS = Flavihumibacter solisilvae OX=1349421 GN=queA PE=3 SV=1
MNGTNSPKTLAIADYTYDLPDHRIASYPLSNRDASRLLVYESGNIHETTYRQLADQVPAGHLLVFNKTKVVEARIYFTKPTGGVIELFCLEPHPDYPDVTTAMLQTGQVRWNCLVGGASKWKHGTILEKSVTYGDTTVHLTAAIDARNQDTFSILFTWAPDTLSFAELLHAVGVIPIPPYLKRDSNKQDSDRYQTIYAEMEGSVAAPTAGLHFTDQVFKELSDKGISRSFVTLHVGAGTFKPVKSEYIADHDMHAEFIEVDIATIEELLSYEGRILAVGTTSLRTLESLYWMGVKAYVNPRINIEGLEMKQWEVYEELGRHQLTAGQSLISLLSWMKKHQMVRILCKTQILIAPGYYVRMIRGLITNFHQPQSTLLLLVAALIGNDWKKVYAYALENDFRFLSYGDGSLLWCNKP

SEQ ID NO: 66583 - protein, 349 aa, Flavihumibacter sp.
  REGION 1..349: note = tr|A0A162PBW6|A0A162PBW6_9BACT S-adenosylmethionine:tRNA ribosyltransferase-isomerase; OS = Flavihumibacter sp. CACIAM 22H1 OX=1812911 GN=queA PE=3; SV = 1
MKLSQFKFDLPLNLIAQNPAKKREDSRLMVVHRKTGNIENKTFRDILDYFDDKDVFVVNNTKVFPARMYGRKEKTGAKIEVFLLRELNKPNRLWDVIVDPARKIRVGNKLYFGENDELVAEVIDNTTSRGRTIRFLWEGTDEEFRQMLEFLGETPLPKYIKRKPDEEDKERYQTVYAKHEGAVAAPTAGLHFSRELIKRLEIKGVRFAEVTLHTGLGTFRPIEVEDLSKHKMDAEYYRIDEMACQIVNKAKTNNHRICSIGTTTMRAIESSFTAEKLLKPSEGWTNHFIHPPYEFSIADALVTNFHLPKTSLLIMTCAFAGYDLAMEAYKKAIKDKYRFFSYGDAMLVI

SEQ ID NO: 66584 - protein, 413 aa, Flavihumibacter sp.
  REGION 1..413: note = tr|A0A0C1IQ11|A0A0C1IQ11_9BACT S-adenosylmethionine:tRNA ribosyltransferase-isomerase; OS = Flavihumibacter sp. ZG627 OX=1463156 GN=queA PE=3 SV=1
MKNIKNPYTLQIADFSYELIDDRIAKFPLEERDASRLLVYRKGEITESVYRDLADEIPAGSLLVFNDTRVVRARLVFKKNNGRDIEIFCLEPDQRYTDISSAMAVSGEVYWNCLVGGASKWKQGMTLEMKLEHDGIPVLLSASIHSRNNNSFTIHFCWSPVEITFAEILNIAGKMPIPPYLHRKSEDSDTTRYQTIFANKEGSVAAPTAGLHFTDHVFESLREKGITSTFVTLHVGAGTFKPVKSEIIGDHEMHAEFIDVQRQILEELLRFDGNIIAAGTTSMRTLESLYWMGVKVAVCPEAHLEDISVKQWDPYIQQLENHIPPTEAILHLLRWMDRNNLTRIICKTQIFIAPGYKVKMVNALITNFHQPQSTLLLLVAALIGEDWRKVYDYALENRYRFLSYGDGSLLWGN

SEQ ID NO: 66585 - protein, 350 aa, unidentified
  source 1..350: note = Flavimaricola marinus
  REGION 1..350: note = tr|A0A238LE04|A0A238LE04_9RHOB S-adenosylmethionine:tRNA ribosyltransferase-isomerase; OS = Flavimaricola marinus OX=1819565 GN=queA PE=3 SV=1
MKLSDFDFDLPEQLIAVRPARPRSSSRLLVARGPETVEAHAIDLPRFLNPGDRLVLNDTKVIPARLTGQRHRPGAPGEGTAKIEVTLLEPRANGAWAALVKPLRKWREGETVVFSPDLSAVLEAREADAALVRFNLTGDDFDAALNAAGAMPLPPYIAAKRPSDEADKADYQTLWADKLGAVAAPTASLHFDEALMAALAERGVDLTYVTLHVGAGTFLPVKVDDISEHKMHAEWGEVSEAAADEINATRAAGGRVIPVGTTALRLIESAASEAGVAPWRGDTDIFITPGYQFRAADGLMTNFHLPKSTLMMLVSALMGPERIREIYAHAIAQGYRFFSYGDASLLLPKG

SEQ ID NO: 66586 - protein, 349 aa, unidentified
  source 1..349: note = Flavipsychrobacter stenotrophus
  REGION 1..349: note = tr|A0A2S7SZ93|A0A2S7SZ93_9BACT S-adenosylmethionine:tRNA ribosyltransferase-isomerase; OS = Flavipsychrobacter stenotrophus OX=2077091 GN=queA PE=3; SV = 1
MKLSQFKFELPLNLIAQHPAKKREESRLMVVDRATGKIEHKVFKDVLGYFHDKDVMVVNNTKVFPARLYGRKEKTGAKIEVFLLRELNKPNHLWDVIVDPARKIRVGNKLYFGDNDELVAEVIDNTTSRGRTIRFLFDGTDQEFRNMLDILGETPLPKYIKRKPEEEDKERYQTVYAKYEGAVAAPTAGMHFSRELIKRLEIVGVKFAEATLHTGLGTFRPIEVEDLSKHKMDAEYFKVDEYAANIVNKAKIEKRHVCSVGTTTMRALESSVTAQGLLKPEEGWTNLFIHPPYEFSIADSLITNFHLPKTSLMIMACAFAGFDLMMHTYETAIKEKYRFFSYGDAMLII

SEQ ID NO: 66587 - protein, 407 aa, unidentified
  source 1..407: note = Flavipsychrobacter stenotrophus
  REGION 1..407: note = tr|A0A2S7SXH1|A0A2S7SXH1_9BACT S-adenosylmethionine:tRNA ribosyltransferase-isomerase; OS = Flavipsychrobacter stenotrophus OX=2077091 GN=queA PE=3; SV = 1
MHPRNLRIEDYTYDLPDARIAQYPLQQRDASKLLIYTNGQIAEDTYSHLADHIPVNTLMVFNQTKVVHARLPFAKPTGGAIEIFCLEPHSSHSDIQTAMLQKGQVWWNCLVGSAKKWKDSITLTLPCPEAGFTLSATMVNKSESYYTIQLDWDNPDMTFAEVLHHAGKVPLPPYLNRLADVKDEERYQTIFAKDEGSVAAPTAGLHFTDAVMNELAAKDVDKAFVTLHVGAGTFKPVKSETMQEHDMHAEWIEVNASTIQQLLQHGDNKIVAVGTTSLRTLESLYWIGCKLFKGMAVDMEGIAINQWDAYEITDPCPKEEALNALLNHMAVNGTNKIVTRTRILIAPGYTFRIIDGLVTNFHQPQSTLLLLVSALIGENWRKVYGYAMAHDFRFLSYGDGSLLWKQK

SEQ ID NO: 66588 - protein, 349 aa, Flaviramulus basaltis
  REGION 1..349: note = tr|A0A1K2IEX3|A0A1K2IEX3_9FLAO S-adenosylmethionine:tRNA ribosyltransferase-isomerase; OS = Flaviramulus basaltis OX=369401 GN=queA PE=3 SV=1
MKLSHFGFNLPDELLAEYPAENRDESRLMVLDRKKQTIEHKMFKDIIDYFDEDDVLILNNTKVFPARLYGNKEKTGARIEVFLLRELNEEQRLWDVLVDPARKIRIGNKLYFGDDDTLVAEVIDNTTSRGRTLRFLYDGSYREFRLKLTQLGETPLPKYIKRGVEAEDEERYQTIFAKNEGAVAAPTAGLHFSKHLLKRLEIKGVNFAEVTLHVGLGTFNPVEVEDLSKHKMDSEELKIDEKAVNIVNTGIKNKKRVCAVGTTAMRAIETAVSSSGKLNEIDGWTNKFIFPPYDFSIANCMITNFHTPKSTLLMMVSAFAGHDFIKRAYEEAVKEKYKFYSYGDAMLII

SEQ ID NO: 66589 - protein, 349 aa, Flavisolibacter ginsengisoli
  REGION 1..349: note = tr|A0A1M4ULR4|A0A1M4ULR4_9BACT S-adenosylmethionine:tRNA ribosyltransferase-isomerase; OS = Flavisolibacter ginsengisoli DSM 18119 OX=1121884; GN = queA PE=3 SV=1
MKLSQFKFDLPLNLIAQHPAKKREDARMMVVHRKTGQIENKLFKDILEYFDDKDVFTVNNTKVFPARMYGRKEKTGAKIEVFLLRELNKEHRLWDVIVDPARKIRVGNKLYFGDTEELVAEVIDNTTSRGRTIKFLHEGSEDEFRLVLEKYGETPLPKYIKRKPDEEDRERYQTVYAKHEGAVAAPTAGLHFSRELIKRCEIKGIRFAEVTLHTGLGTFRPIEVEDLSKHKMDAEYYRIEDAACNIVNKAKETSHRICSIGTTTMRALESSVTAQKLLKPSEGWTNIFIHPPYDFNIADSLVTNFHLPKTSLLIMTCAFAGYDLTMEAYKKAIKDKYRFFSYGDALLIV

SEQ ID NO: 66590 - protein, 404 aa, Flavisolibacter ginsengisoli
  REGION 1..404: note = tr|A0A1M5CS94|A0A1M5CS94_9BACT S-adenosylmethionine:tRNA ribosyltransferase-isomerase; OS = Flavisolibacter ginsengisoli DSM 18119 OX=1121884; GN = queA PE=3 SV=1
MKISPETVYISDYNYELPSANIAEVPLLNRDDSKLLIYEKGKIIDSVFHQLPSYIEPGSTLILNNTRVIEARLLFQKDTGATIELFCLEPYELSIEQAMQQHEKIIWKCLIGGASKWKPGQLLTKPIGENSGYILTARYIEKREDYFLIEFSWNNAAASFVEVLHETGAIPLPPYIKRKAEKLDWERYQTVFSEQEGSVAAPTAALHFTQNTFQQLKERNVAYDYITLHVGAGTFKPVKSATIAGHSMHAEPFSVKKQVIEELIKAAKIIATGTTSLRTLESLYWISLKLKLSPNAELMLDQWEAYAIDEQLPNIPAKESFEYLLQWMNEHAVTELHCRTSLIIIPGYQFKVAHGLITNFHQPHSTLLLLIAAFIGDNWKKVYSHALQNNYRFLSYGDSSLLWR

SEQ ID NO: 66591 - protein, 401 aa, unidentified
  source 1..401: note = Flavisolibacter ginsenosidimutans
  REGION 1..401: note = tr|A0A5B8UP79|A0A5B8UP79_9BACT S-adenosylmethionine:tRNA ribosyltransferase-isomerase; OS = Flavisolibacter ginsenosidimutans OX=661481; GN = FSB75_09090 PE=3 SV=1
MNAEKILIEDYTYNLPNERISAYPLPKRDDSKLLVYKSGKITHDRFYNLPQQLPPNSLLILNNTKVIEARLLFKKQSGGVIEIFCLEPHLQSMENALQQQGSCKWQCLIGGASKWKPGQVLEKSLSVEDKKVILQARYLGKVEDSFIIQFDWQPEDFHFVQVLHAAGAIPLPPYIKRGAEEIDAARYQTIFGKYEGSVAAPTAALHFTDAVFEALRKKNMQTEFVTLNVGAGTFKPVKSSAIADHQMHGEDFTVEKAALQKIIEANTIVAVGTTSLRTLESIYWLGVKLLNGSLADEWILGQWEVYSLSSDVDYKKSLEAIVQWMDERAITQLHCRTSLLIVPGYQFKIPSALVTNFHQPQSTLLLLVAAFIGEDWKKVYEHALQNDYRFLSYGDSSLLFR

SEQ ID NO: 66592 - protein, 349 aa, unidentified
  source 1..349: note = Flavisolibacter ginsenosidimutans
  REGION 1..349: note = tr|A0A5B8UFE5|A0A5B8UFE5_9BACT S-adenosylmethionine:tRNA ribosyltransferase-isomerase; OS = Flavisolibacter ginsenosidimutans OX=661481 GN=queA; PE = 3 SV=1
MKLSQFKFDLPLNLIAQHPAKRREDARMMVVNRKTGEMENKHFRDILDYFDDKDVFVVNNTKVFSARMYGRKEKTGAKIEVFLLRELNKEHRLWDVIVDPARKIRVGNKLYFGDTEELVAEVIDNTTSRGRTIKFLHEGTEEEFKATLEKYGETPLPKYIKRKPDDEDRERYQTVYAKYEGAVAAPTAGLHFSRELIKRCEIKGIRFAEVTLHTGLGTFRPIEVEDLSKHKMDAEYYRIDEPAVKVVNKAKETSRRICSIGTTTMRSLESSVTAQGFLKPSEGWTNMFIHPPYNFSIADALVTNFHLPKTSLLIMTCAFAGYDLTMEAYKKAIKDKYRFFSYGDALLVI

SEQ ID NO: 66593 - protein, 421 aa, unidentified
  source 1..421: note = Flavisolibacter tropicus
  REGION 1..421: note = tr|A0A172U2D5|A0A172U2D5_9BACT S-adenosylmethionine:tRNA ribosyltransferase-isomerase; OS = Flavisolibacter tropicus OX=1492898 GN=queA PE=3 SV=1
MITNPSTVYISEYDYELPANQIAEFPLAQRDSSRLLVYEQGQIKDDCFTSLPSYLPNASTLVLNNTRVIEARLFFKKDTGAIIEIFCLGPHTPASMEQALSSHHETLWYCLIGGASKWKHGQILHKEVTINGVSVILNARFVGKSGDQFIIAFTWDTNHSFSEVLHVAGSIPLPPYIKRKAENEDSERYQTVFAKHEGSVAAPTAALHFTESVFDELKAKDIFPHYITLHVGAGTFKPVKTETIEGHNMHAEKFSVSATLLKKLISAKTIVAVGTTSLRTLESLHWFGIKVKQGQFDFTLHQWEAYELPDASISYNESLQILLDYLRENKLEELHCETSLLIMPGYEFKSAKALVTNFHQPKSTLLLLVAAFIGIEWKKLYEHALQNNYRFLSYGDSSLLWRETPPSNSPEGEGSHGTRPA

SEQ ID NO: 66594 - protein, 349 aa, unidentified
  source 1..349: note = Flavisolibacter tropicus
  REGION 1..349: note = tr|A0A172TU84|A0A172TU84_9BACT S-adenosylmethionine:tRNA ribosyltransferase-isomerase; OS = Flavisolibacter tropicus OX=1492898 GN=queA PE=3 SV=1
MKLSQFKFDLPLNLIAQNPAKKREDARLMVVHRKTGEIENKHFRDILDYFDDKDTFVVNNTKVFPARMYGRKEKTGAKIEVFLLRELNKEQRLWDVIVDPARKIRVGNKLYFGDDEDLVAEVIDNTTSRGRTIKFLFEGDDEGFRQILEKHGETPLPKYIKRKPDEEDRERYQTVYAKHEGAVAAPTAGLHFSRELIKRCEIKGIRFSEVTLHTGLGTFRPIEVEDLSKHKMDAEYYRIEEQACKIVNKAKETNHRICSIGTTTMRALESSFTAQRLLKPSEGWTNNFIHPPYDFSIADSLVTNFHLPKTSLLIMACAFAGYDLMMEAYQKAIKDKYRFFSYGDAMLII

SEQ ID NO: 66595 - protein, 349 aa, unidentified
  source 1..349: note = Flavivirga eckloniae
  REGION 1..349: note = tr|A0A2K9PTI4|A0A2K9PTI4_9FLAO S-adenosylmethionine:tRNA ribosyltransferase-isomerase; OS = Flavivirga eckloniae OX=1803846 GN=queA PE=3 SV=1
MKLSHFGFNLPNELLAEHPAENRDESRLMVLNRKEQTIEHRMFKDLIDYFEEDDVLILNNTKVFPARLYGNKEKTGARIEVFLLRELNEEQRLWDVLVDPARKIRIGNKLYFGDDDTLVAEVIDNTTSRGRTLRFLYDGSYSEFRRKLTELGETPLPKYIKRDVEPEDEERYQTIYAKNEGAVAAPTAGLHFSKHLLKRLEIKGIDFAEVTLHVGLGTFNPVEVEDLSKHKMDSEELKINETAVNIVNKGIDNKRRVCAVGTTAMRAIESSVSSNGRLNEIDGWTNKFIFPPYDFSIANCMITNFHTPKSTLLMMVSAFAGHDFIKKAYEEAVKEKYKFYSYGDAMLIL

SEQ ID NO: 66596 - protein, 349 aa, Flavivirga sp.
  REGION 1..349: note = tr|A0A4S1E2S7|A0A4S1E2S7_9FLAO S-adenosylmethionine:tRNA ribosyltransferase-isomerase; OS = Flavivirga sp. RZ03 OX=2559571 GN=queA PE=3 SV=1
MKLSNFGFNLPDELLAEYPAENRDESRLMVLNRKEQTIEHKMFKDLIDYFDEEDVLILNNTKVFPARLYGNKEKTGARIEVFLLRELNEEQRLWDVLVDPARKIRIGNKLYFGDDDTLVAEVIDNTTSRGRTLRFLYDGSYTEFRRKLNELGETPLPKYIKRDVEPDDEDRYQTIYAKNEGAVAAPTAGLHFSKHLLKRLEIKGIDFAEVTLHVGLGTFNPVEVEDLSKHKMDSEELKIDEKAVNIVNKGIENKKRVCAVGTTAMRAIESSVSSNGKLNEIDGWTNKFIFPPYDFSIANCMITNFHTPKSTLLMMVSAFAGHDFIKKAYEEAVKEKYKFYSYGDAMLII

SEQ ID NO: 66597 - protein, 350 aa, unidentified
  source 1..350: note = Flavobacteria bacterium
  REGION 1..350: note = tr|Q26G50|Q26G50_FLABB S-adenosylmethionine:tRNA ribosyltransferase-isomerase OS=Flavobacteria bacterium (strain BBFL7) OX=156586 GN=queA PE=3 SV=1
MKLSQFGYKLPENLIAQHPAENRDESRLMVLHKKTGEIEHKMFKDVLDYFEEDDVFVTNNTRVFPARLYGNKEKTGARIEVFLLRELNPTTKLWDVLVDPARKIRIGNKLYFGEDESLVAEVIDNTTSRGRTLRFLFDGSYEEFRQKLKDLGETPLPRELGREVEEEDEERYQTIYATNEGAVAAPVAGLHFSKHLLKRLEIKGIHRTAITMHIGLGTFAPVEVEDLSKHKMDSEQAEITEETCAIVNKAIDTRKNVCAVGTTTMRTLESAVSSDGHLNTFDGWTNKFIFPPYDFSIANAMITNFHHPKSTLMMQAAAFAGYDLLKKAYDVAIKEEYKFSTYGDAMLIVD

SEQ ID NO: 66598 - protein, 349 aa, unidentified
  source 1..349: note = Flavobacteria bacterium
  REGION 1..349: note = tr|A3J295|A3J295_9FLAO S-adenosylmethionine:tRNA ribosyltransferase-isomerase OS=Flavobacteria bacterium BAL38 OX=391598 GN=queA PE=3 SV=1
MKLSHFQFNLPEELLAEFPTENRDESRLMVVNRKTGTIEHKLFKDVIDYFDDGDVMVLNNTKVFPARLYGNKEKTGARIEVFLLRELNAEQRLWDVLVDPARKIRIGNKLYFGDDDSLVAEVIDNTTSRGRTLRFLYDGSYEEFREKLVELGETPIPKYINREVTPEDAERYQTIYAKVEGAVAAPTAGLHFSKHLLKRLEIKGVDFAEVTLHVGLGTFNPVEVEDLSKHKMDSEEMKISQEACDIINNAKTKKKKVCCVGTTAMRAMESSVSSQRTLNPFEGWTNKFIYPPYDFSLADAMITNFHTPKSTLLMMISAFCGHDLMKKAYEEAVKEKYRFYSYGDAMLII

SEQ ID NO: 66599 - protein, 349 aa, unidentified
  source 1..349: note = Flavobacteriaceae bacterium
  REGION 1..349: note = tr|A0A3L9MFE3|A0A3L9MFE3_9FLAO S-adenosylmethionine:tRNA ribosyltransferase-isomerase; OS = Flavobacteriaceae bacterium YIM 102668 OX=2479857; GN = queA PE=3 SV=1
MKTSDFDFNLPEELLAEHPAENRDESRLMVVHRDTGEIEHRLFKDVIEYFDEGDVMIRNNTKVFPARLMGNKEKTGANIEVFLLRELDAETRLWDVLVDPARKIRIGNKLFFDNDDTLVAEVVDNTTSRGRTLRFLFDGSYEEFRAKLKELGETPLPKYILREVEPEDAERYQTIYAKHEGAVAAPTAGLHFSKHLLKRLEIKGVDFAELTLHIGLGTFIPVEVEDLSKHKMESEQVIIPQESVDLVNNAIDNKKKVCAIGTTTMRSIESSVSADGHLNAYDGWTNKFIHPPYDFSIANCMITNFHTPKSTLIMMISAFAGHDLTMKAYNEAVKEGYKFYSYGDAMLIL

SEQ ID NO: 66600 - protein, 349 aa, unidentified
  source 1..349: note = Flavobacteriaceae bacterium
  REGION 1..349: note = tr|A0A2M7NQ53|A0A2M7NQ53_9FLAO S-adenosylmethionine:tRNA ribosyltransferase-isomerase; OS = Flavobacteriaceae bacterium CG_4_10_14_3_um_filter_31_253 OX=1973987 GN=queAPE=3 SV=1
MKLSHYEFKLPDELLAEYPAEHRDESRLMVLNRKTQTIEHKLFKDIIDYFEEGDVLMLNNTKVFPARMYGNKEKTGAKIEVFLLRELNAENRLWDVLVDPARKIRIGNKLFFGDDDSLVAEVIDNTTSRGRTLRFLFDGSYEAFREKLIELGETPLPKYINRKLTPEDEERYQTIYAKHEGAVAAPTAGLHFSKHLMKRLEIKGIEFAEMTLHVGLGTFSPVEVEDLSKHKMDSEQIIITANAAQKINQAKKEKRRICAVGTTVMRTVESSVSANHLLNPYEGWTNKFIFPPYDFSIADSMITNFHTPKSTLMMMTAAFAGYDFLMKAYKEAIKEKYRFYSYGDAMLII

SEQ ID NO: 66601 - protein, 351 aa, unidentified
  source 1..351: note = Flavobacteriales bacterium
  REGION 1..351: note = tr|A0A1Z9PXQ5|A0A1Z9PXQ5_9FLAO S-adenosylmethionine:tRNA ribosyltransferase-isomerase; OS = Flavobacteriales bacterium TMED228 OX=1986725 GN=queA; PE = 3 SV=1
  VARIANT 121: note = Xaa can be any naturally occurring amino acid
  VARIANT 123: note = Xaa can be any naturally occurring amino acid
  VARIANT 126..127: note = Xaa can be any naturally occurring amino acid
  VARIANT 240: note = Xaa can be any naturally occurring amino acid
MKYKLSMFNFDLPEKLITDTPAKNRDDAKLMVLHRDSGEIEHKKVSDLIDYFDDGDVVCINNTKVFPARLYANKEKTGARIEVFLLRELNKKNRLWDVLVDPARKIRIGNKLFFGENDELXAXVIXXTTSRGRTLRFLYDGTHEEFKETLNSLGQTPLPRFIKREPTPNDTERYQTVFAKNEGAVAAPTAGLHLSKTQMLKMQIKGIEFAETTLHVGLGTFSPIMVEDLSKHKMESEQMXINSTASTIINNALVNRKKVCAVGTTVMRSLETSVSTKNMVIPYDGWTNIFIFPPYDFKIGSCMLTNFHLPKSSLMMQVSAFSGYDLLMKAYKEAVKKKYKFHTFGDAMLII

SEQ ID NO: 66602 - protein, 349 aa, unidentified
  source 1..349: note = Flavobacteriales bacterium
  REGION 1..349: note = tr|A0A2G6F5Y6|A0A2G6F5Y6_9FLAO S-adenosylmethionine:tRNA ribosyltransferase-isomerase; OS = Flavobacteriales bacterium OX=2021391 GN=queA PE=3 SV=1
MKLSHFKYDLPEKLLAEYPSEVRDEARLMVLNRKDQTIEHKLFKDLVNYFEEDDVMVFNNTKVFPARLFGNKEKTGARIEVFLLRELNPETRLWDVLVDPARKIRIGNKLFFGENEDLVAEVIDNTTSRGRTLRFLFDGAYEDFRKKLKELGQTPLPKYIKRAVEPLDEERYQTIYAKHEGAVAAPTAGLHFSKHLLKRLEIKGVDLAEVTLHVGLGTFQPVEVEDLSKHKMDSEEIYIPEIAVKKINKAIDNNRRICAIGTTVIRTLESSVSTDGHLNKYNGWTNKFIFPPYEFNIANAMVTNFHTPKSTLMMMTSAFAGHDFLKEAYAEAIKEKYKFYSYGDAMLIL

SEQ ID NO: 66603 - protein, 274 aa, unidentified
  source 1..274: note = Flavobacteriia bacterium
  REGION 1..274: note = tr|A0A432J3V9|A0A432J3V9_9BACT S-adenosylmethionine:tRNA ribosyltransferase-isomerase (Fragment) OS=Flavobacteriia bacterium OX=2044941; GN = DSY83_04685 PE=3 SV=1
MKLSNFNFELPKELLAEYPAENRDESKLMVIHRDSGKIEHKMFKDLIDYFDEGDVMVLNNTKVFPARLYGNKEKTGARIEVFLLRELNQEQRLWDVLVDPARKIRIGNKLYFGDDESLVAEVIDNTTSRGRTLRFLYDGSYTDFRRKLRELGETPLPKYIKREVTPDDEERYQTIYAKHEGAVAAPTAGLHFSKHLLKRLEIKGIDFAEVTLHVGLGTFNPVEVEDLSKHKMDSEELVIDEKATEVVNKAKIKKKRICAVGTTVMRGLESAVSS

SEQ ID NO: 66604 - protein, 349 aa, unidentified
  source 1..349: note = Flavobacteriia bacterium
  REGION 1..349: note = tr|A0A1Q3ZJR3|A0A1Q3ZJR3_9BACT S-adenosylmethionine:tRNA ribosyltransferase-isomerase; OS = Flavobacteriia bacterium 40-80 OX=1895763 GN=queA PE=3; SV = 1
MKLSDFNFNLPDELIAEYPSKNRDEARLMVVHRESGKIEHKLFKDIITYFDDGDVMITNNTKVFPARMYGNKEKTGAKIEVFLLRELNRESLLWDVLVDPARKIRIGNKLYFGDDDSLVAEVIDNTTSRGRTLRFLFDGTYEEFKAKITELGETPLPKYIKRDVEKDDEERYQTIYASIEGAVAAPTAGLHFSRELLKRLELKGVNFAEVTLHVGLGTFRTVEVEDLTKHKMDSEQVIITEKAAKVVNEAKLKKKKVCAIGTTSMRAIESSVSSDGLLKPYDGWTNKFIFPPYDFSVANCMVTNFHTPLSTLLMMISAFCGHELMMEAYGQAIKEKYNFYSYGDAMLIL

SEQ ID NO: 66605 - protein, 349 aa, unidentified
  source 1..349: note = Flavobacterium aciduliphilum
  REGION 1..349: note = tr|A0A328YMV7|A0A328YMV7_9FLAO S-adenosylmethionine:tRNA ribosyltransferase-isomerase; OS = Flavobacterium aciduliphilum OX=1101402 GN=queA PE=3; SV = 1
MKLSHFNFNLPAELLAEFPAENRDESRLMVVDRKKGTIEHKLFKDIIDYFDDGDVMILNNTKVFPARMYGNKEKTGARIEVFLLRELNAEQRLWDVLVDPARKIRIGNKLYFGDDDSLVAEVIDNTTSRGRTLRFLYDGTYEEFRNKLTELGETPIPKYINREVTEEDAERYQTIYAKEEGAVAAPTAGLHFSKHLLKKLEIKGINFAEVTLHVGLGTFNPVEVEDLSKHKMDSEELKITQEACDIVNAAKANKKRICCIGTTSMRAIESSVSSAKTLNPYEGWTNKFIFPPYDFSIADCMVTNFHTPKSTLLMMISAFCGHDLMKKAYEEAVKEKYKFYSYGDAMLIL

SEQ ID NO: 66606 - protein, 349 aa, unidentified
  source 1..349: note = Flavobacterium akiainvivens
  REGION 1..349: note = tr|A0A0M9VID8|A0A0M9VID8_9FLAO S-adenosylmethionine:tRNA ribosyltransferase-isomerase; OS = Flavobacterium akiainvivens OX=1202724 GN=queA PE=3 SV=1
MKLSNFNFNLPKELLAEFPTENRDESRLMVVDRKTKTIEHKLFKDIIDYFDEGDVMVLNNTKVFPARLYGNKEKTGARIEVFLLRELNSEQRLWDVLVDPARKIRIGNKLYFGDDDSLVAEVIDNTTSRGRTLRFLYDGSYEEFRQKLTELGETPIPKYINREVTPEDAERYQTIYAKEEGAVAAPTAGLHFSKHLLKKLEIKGIDFAEITLHVGLGTFNPVEVEDLSKHKMDSEELIITQQACDVVNKAKTNKHKVCAIGTTTMRAMESSVSSSKTLNPYVGWTNKFIFPPYDFSVADCMVTNFHTPKSTLLMMISAFMGHDLMKKAYEEAIKENYRFYTYGDAMLIL

SEQ ID NO: 66607 - protein, 349 aa, unidentified
  source 1..349: note = Flavobacterium album
  REGION 1..349: note = tr|A0A2S1QX80|A0A2S1QX80_9FLAO S-adenosylmethionine:tRNA ribosyltransferase-isomerase; OS = Flavobacterium album OX=2175091 GN=queA PE=3 SV=1
MKLSNFNFNLPKELLAEYPAENRDEARLMVIDRKTKKIEHKLFKDVLDYFEEGDVMVLNNTKVFPARLYGNKEKTGARIEVFLLRELNSEQRLWDVLVDPARKIRIGNKLYFGDDDSLVAEVIDNTTSRGRTLRFLYDGSYEEFRNKLTELGETPIPKYINREVVPEDAERYQTIYAKEEGAVAAPTAGLHFSKHLLKRLEIKGIDFAEITLHVGLGTFNPVEVEDLSKHKMDSEELIIRQEACDIVNKAKLSRKKVCAVGTTTMRAMESSVSSAKTLNPYVGWTNKFIFPPYDFSVADCMITNFHTPKSTLLMMISAFMGHDLMRAAYDEAIKEGYRFYTYGDAMLIL

SEQ ID NO: 66608 - protein, 349 aa, unidentified
  source 1..349: note = Flavobacterium alvei
  REGION 1..349: note = tr|A0A2S5AD47|A0A2S5AD47_9FLAO S-adenosylmethionine:tRNA ribosyltransferase-isomerase; OS = Flavobacterium alvei OX=2080416 GN=queA PE=3 SV=1
MKLSHFQFNLPKELLAEYPAENRDESRLMVIDRKKGTIEHKMFKDVINYFDEGDVMILNNTKVFPARLYGNKEKTGARIEVFLLRELNAEQRLWDVLVDPARKIRIGNKLYFGDDDSLVAEVIDNTTSRGRTLRFLYDGSYDEFRNKLTELGETPIPKYINRDVTPEDADRYQTIYAKEEGAVAAPTAGLHFSKHLLKRLEIKGVKFAEVTLHVGLGTFNPVEVEDLSKHKMDSEELKITQEACDVVNEAKGKRKRICAVGTTSMRAIESSVSSQRTLNPYDGWTNKFIFPPHDFSVATCMITNFHTPKSTLLMMISAFCGHDLMRKAYDEAIKEGYKFYSYGDAMLII

SEQ ID NO: 66609 - protein, 349 aa, Flavobacterium anhuiense
  REGION 1..349: note = tr|A0A1G5K634|A0A1G5K634_9FLAO S-adenosylmethionine:tRNA ribosyltransferase-isomerase; OS = Flavobacterium anhuiense OX=459526 GN=queA PE=3 SV=1
MKLSHFNFNLPKELLAEFPAENRDESRLMVIDRKKNTIEHKMFKDVINYFDDGDVLILNNTKVFPARLYGNKEKTGARIEVFLLRELNSEQRLWDVLVDPARKIRIGNKLYFGDDDSLVAEVIDNTTSRGRTLRFLYDGSYEEFRNKLTELGETPIPKYINRDVTPEDAERYQTIYAKEEGAVAAPTAGLHFSKHLLKKLEIKGVNFAEVTLHVGLGTFNPVEVEDLSKHKMDSEELIITQKACDIVNEGKAKKKRICAVGTTSMRAIESSVSSANTLNPYEGWTNKFIFPPHDFSIANCMITNFHTPKSTLLMMISAFCGHDLMKKAYEEAIKEGYKFYSYGDAMLIL

SEQ ID NO: 66610 - protein, 349 aa, unidentified
  source 1..349: note = Flavobacterium aquaticum
  REGION 1..349: note = tr|A0A327YIX5|A0A327YIX5_9FLAO S-adenosylmethionine:tRNA ribosyltransferase-isomerase; OS = Flavobacterium aquaticum OX=1236486 GN=queA PE=3 SV=1
MKLSHFNFNLPEELLAEFPAENRDESRLMVVNRKTNTIEHKLFKDVIDYFDDGDVMVLNNTKVFPARLYGNKEKTGARIEVFLLRELNAEQRLWDVLVDPARKIRIGNKLYFGDDDSLVAEVIDNTTSRGRTLRFLYDGSYEEFREKLVELGETPIPKYINREVTPEDAERYQTIYAKEEGAVAAPTAGLHFSKHLLKRLEIKGVDFAEVTLHVGLGTFNPVEVEDLSKHKMDSEEMIITQEACDIVNNAKAKKKKICCVGTTSMRAMESSVSSQRTLNPYTGWTNKFIYPPYDFSIADCMITNFHTPKSTLLMMISAFCGHDLMKKAYEEAIKEKYRFYSYGDAMLII

SEQ ID NO: 66611 - protein, 349 aa, Flavobacterium aquatile
  REGION 1..349: note = tr|A0A095U452|A0A095U452_9FLAO S-adenosylmethionine:tRNA ribosyltransferase-isomerase; OS = Flavobacterium aquatile LMG 4008 = ATCC 11947; OX = 1453498 GN=queA PE=3 SV=1
MKLSHFQFNLPTELLAEYPAENRDESRLMVIDRKTGTIEHKMFKDIINYFDDGDVMILNNTKVFPARMFGNKEKTGARIEVFLLRELNAEQRLWDVLVDPARKIRIGNKLYFGDDDSLVAEVIDNTTSRGRTLRFLYDGSYEEFRNKLTELGETPIPKYINREVNEDDAERYQTIYAKEEGAVAAPTAGLHFSKHLLKRLEIKGINFAEVTLHVGLGTFNPVEVEDLSKHKMDSEELKINQEACDIVNDAKAKKKRICCIGTTSMRAIESAVSSQRTLNPFDGWTNKFIFPPYDFSIADCMVTNFHTPKSTLLMMISAFCGHDLMKKAYEEAIKEKYKFYSYGDAMLII

SEQ ID NO: 66612 - protein, 349 aa, unidentified
  source 1..349: note = Flavobacterium aquicola
  REGION 1..349: note = tr|A0A3E0EDH7|A0A3E0EDH7_9FLAO S-adenosylmethionine:tRNA ribosyltransferase-isomerase; OS = Flavobacterium aquicola OX=1682742 GN=queA PE=3 SV=1
MKLSHFNFNLPKELLAEYPAENRDESRLMIVDRKNQTITHKMFKDVIDYFDDGDVLILNNTKVFPARLYGNKEKTGARIEVFLLRELNAEQRLWDVLVDPARKIRIGNKLYFGDDDSLVAEVIDNTTSRGRTLRFLYDGSYEEFRNKLTELGETPIPKYINRDVTPEDAERYQTIYAKEEGAVAAPTAGLHFSKHLLKRLEIKGVKFAEVTLHVGLGTFNPVEVEDLSKHKMDSEELKITQEACDIVNTAKAAKKRICTVGTTSMRAVESSVSSQNTLNPYDGWTNKFVFPPHDFSIPTCMITNFHTPKSTLLMMVSAFCGHDLMKRAYEEAIKEEYKFYSYGDAMLII

SEQ ID NO: 66613 - protein, 349 aa, Flavobacterium aquidurense
  REGION 1..349: note = tr|A0A1H3TFD4|A0A1H3TFD4_9FLAO S-adenosylmethionine:tRNA ribosyltransferase-isomerase; OS = Flavobacterium aquidurense OX=362413 GN=queA PE=3 SV=1
MKLSHFQFNLPKELLAEFPAENRDESRLMVIDRAKQTIEHKMFKDVINYFDDGDVLILNNTKVFPARLYGNKEKTGARIEVFLLRELNSEQRLWDVLVDPARKIRIGNKLYFGDDDSLVAEVIDNTTSRGRTLRFLYDGSYEEFRNKLTELGETPIPKYINREVTAEDAERYQTIYAKEEGAVAAPTAGLHFSKHLLKKLEIKGVNFAEVTLHVGLGTFNPVEVEDLSKHKMDSEELIIKQEACDIVNEAKAKKKRICAVGTTSMRAIESSVSSQNTLNPYEGWTNKFIFPPHDFSIANCMITNFHTPKSTLLMMISAFCGHDLMKRAYEEAIKEGYKFYSYGDAMLII

SEQ ID NO: 66614 - protein, 349 aa, Flavobacterium aquidurense
  REGION 1..349: note = tr|A0A0Q0WWZ9|A0A0Q0WWZ9_9FLAO S-adenosylmethionine:tRNA ribosyltransferase-isomerase; OS = Flavobacterium aquidurense OX=362413 GN=queA PE=3 SV=1
MKLSHFQFNLPKELLAEFPAENRDESRLMVIDRQKQTIEHKMFKDVINYFDDGDVLILNNTKVFPARLYGNKEKTGARIEVFLLRELNSEQRLWDVLVDPARKIRIGNKLYFGDDDSLVAEVIDNTTSRGRTLRFLYDGSYEEFRNKLTELGETPIPKYISREVTAEDAERYQTIYAKEEGAVAAPTAGLHFSKHLLKKLEIKGINFAEVTLHVGLGTFNPVEVEDLSKHKMDSEELIIKQEACDIVNAAKANKKRICAVGTTSMRAIESSVSSQNTLNPYEGWTNKFIFPPHDFSIANCMITNFHTPKSTLLMMISAFCGHDLMKRAYDEAIKEEYKFYSYGDAMLII

SEQ ID NO: 66615 - protein, 349 aa, Flavobacterium araucananum
  REGION 1..349: note = tr|A0A227P5H2|A0A227P5H2_9FLAO S-adenosylmethionine:tRNA ribosyltransferase-isomerase; OS = Flavobacterium araucananum OX=946678 GN=queA PE=3 SV=1
MKLSHFQFNLPKELLAEFPAENRDESRLMVIDRQKQTIEHKMFKDVINYFDDGDVLILNNTKVFPARLYGNKEKTGARIEVFLLRELNSEQRLWDVLVDPARKIRIGNKLYFGDDDSLVAEVIDNTTSRGRTLRFLYDGSYEEFRNKLTELGETPIPKYISREVTPEDAERYQTIYAKEEGAVAAPTAGLHFSKHLLKKLEIKGINFAEVTLHVGLGTFNPVEVEDLSKHKMDSEELIIKQEACDIVNAAKVAKKRICAVGTTSMRAIESSVSSQNTLNPYEGWTNKFIFPPHDFSIANCMITNFHTPKSTLLMMISAFCGHDLMKRAYEEAIKEEYKFYSYGDAMLII

SEQ ID NO: 66616 - protein, 349 aa, unidentified
  source 1..349: note = Flavobacterium arcticum
  REGION 1..349: note = tr|A0A345H9M5|A0A345H9M5_9FLAO S-adenosylmethionine:tRNA ribosyltransferase-isomerase; OS = Flavobacterium arcticum OX=1784713 GN=queA PE=3 SV=1
MKLSNFNFNLPNELLAEFPAESRDEARLMVINRKTKTIEHKLFKDVLDYFDEGDVMVLNNTKVFPARLYGNKEKTGARIEVFLLRELNAEQRLWDVLVDPARKIRIGNKLYFGEDDSLVAEVIDNTTSRGRTLRFLYDGSYEEFRAKLTELGETPIPKYISRDVTPEDAERYQTIYAKEEGAVAAPTAGLHFSKHLLKRLEIKGVDFAEVTLHVGLGTFNPVEVEDLSKHKMDSEELIINQEACDIVNNAKSAKRRICAVGTTSMRAMESSVSSQHTLNPYVGWTNKFIFPPYDFSIADCMITNFHTPKSTLLMMISAFMGHDLMREAYDEAVKEKYRFYTYGDAMLIL

SEQ ID NO: 66617 - protein, 349 aa, unidentified
  source 1..349: note = Flavobacterium aurantiibacter
  REGION 1..349: note = tr|A0A255ZW14|A0A255ZW14_9FLAO S-adenosylmethionine:tRNA ribosyltransferase-isomerase; OS = Flavobacterium aurantiibacter OX=2023067 GN=queA PE=3; SV = 1
MKLSHFNFNLPKELLAEFPAENRDESRLMVVNRATKTIEHRMFKDIIEYFDEGDVMIINNTKVFPARLYGNKEKTGARIEVFLLRELNSEQRLWDVLVDPARKIRIGNKLYFGDDDSLVAEVIDNTTSRGRTLRFLYDGSYEEFRAKLKELGETPIPKYINRDVQPEDADWYQTIYAKEEGAVAAPTAGLHFSKHLLKRLEIKGIDFAEVTLHVGLGTFNPVEVEDLSKHKMDSEELRITQEACDIVNRAKANRKKVCAIGTTSMRAIESSVSSARTLNPYDGWTNKFIFPPYDFSIADCMVTNFHTPKSTLLMMISAFCGHDLMKKAYEEAVKEQYKFFSYGDAMLIL

SEQ ID NO: 66618 - protein, 349 aa, Flavobacterium beibuense
  REGION 1..349: note = tr|A0A444WC62|A0A444WC62_9FLAO S-adenosylmethionine:tRNA ribosyltransferase-isomerase; OS = Flavobacterium beibuense OX=657326 GN=queA PE=3 SV=1
MKLSNFNFNLPKELLAEFPAENRDESRLMVVNRKTKTIEHRLFKDILEYFDEGDVMVLNNTKVFPARLYGNKEKTGARIEVFLLRELNSEQRLWDVLVDPARKIRIGNKLYFGDDDSLVAEVIDNTTSRGRTLRFLYDGSYEEFRAKLTELGETPIPKYINREVVPEDAERYQTIYAKEEGAVAAPTAGLHFSKHLLKRLEIKGIDFAEITLHVGLGTFNPVEVEDLSKHKMDSEELMITQEACDIVNKAKVNKKKVCAVGTTTMRAMESSVSSQKTLNPYVGWTNKFIFPPYDFSVADCMITNFHTPKSTLLMMISAFMGHDLMKKAYEEAVKEEYRFYTYGDAMLIL

SEQ ID NO: 66619 - protein, 349 aa, Flavobacterium beibuense
  REGION 1..349: note = tr|A0A0A2LMJ8|A0A0A2LMJ8_9FLAO S-adenosylmethionine:tRNA ribosyltransferase-isomerase; OS = Flavobacterium beibuense F44-8 OX=1406840 GN=queA PE=3; SV = 1
MKLSNFNFNLPKELLAEFPAENRDESRLMVVNRKTNTIEHRLFKDILEYFDEGDVMVLNNTKVFPARLYGNKEKTGARIEVFLLRELNSEQRLWDVLVDPARKIRIGNKLYFGDDDSLVAEVIDNTTSRGRTLRFLYDGSYEEFRAKLNELGETPIPKYINREVVPEDADRYQTIYAKEEGAVAAPTAGLHFSKHLLKRLEIKGIDFAEVTLHVGLGTFNPVEVEDLSKHKMDSEELIITQDACDIVNKAKAAKRKVCAVGTTTMRAMESSVSSQKTLNPYVGWTNKFIFPPYDFSVADCMITNFHTPKSTLLMMISAFMGHDLMKKAYEEAVKEGYKFYSYGDAMLIL

SEQ ID NO: 66620 - protein, 349 aa, Flavobacterium branchiophilum
  REGION 1..349: note = tr|G2Z083|G2Z083_FLABF S-adenosylmethionine:tRNA ribosyltransferase-isomerase OS=Flavobacterium branchiophilum (strain FL-15) OX=1034807 GN=queA PE=3 SV=1
MKLSQFQFNLPKELLAEFPAENRDESRLMVVNRKTQTIEHRMFKDIIDYFDDGDVFVINNTRVFPARLYGNKEKTGARIEVFLLRELNAEQRLWDVLVDPARKIRIGNKLYFGDDDSLVAEVIDNTTSRGRTLRFLFDGSYTEFREKLKELGETPIPKYINREVVPEDEERYQTIYAKEEGAVAAPTAGLHFSKHLMKRLEIKGVHFAEVTLHVGLGTFNPVEVEDLSKHKMDSEELKITQDACDIVNAAKTRKSKVCAIGTTSMRAIESSVSSAATLNPYDGWTNKFIFPPHDFSIADAMVTNFHTPKSTLLMMISAFCGHDLMRKAYDEAIKEEYKFYSYGDAMLII

SEQ ID NO: 66621 - protein, 349 aa, Flavobacterium branchiophilum; identical to SEQ ID NO: 66620
  REGION 1..349: note = tr|A0A2H3KDK9|A0A2H3KDK9_9FLAO S-adenosylmethionine:tRNA ribosyltransferase-isomerase; OS = Flavobacterium branchiophilum OX=55197 GN=queA PE=3 SV=1

SEQ ID NO: 66622 - protein, 349 aa, Flavobacterium caeni
  REGION 1..349: note = tr|A0A1G5JTF6|A0A1G5JTF6_9FLAO S-adenosylmethionine:tRNA ribosyltransferase-isomerase; OS = Flavobacterium caeni OX=490189 GN=queA PE=3 SV=1
MKLSHFNFNLPKELLADYPAENRDESRLMVIHRDTKKIEHRMFKDIIDYFEDGDVLVLNNTKVFPARLYGNKEKTGARIEVFLLRELNSEQRLWDVLVDPARKIRIGNKLYFGDDDSLVAEVIDNTTSRGRTLRFLYDGSYDEFRNKLTELGETPIPKYINREVNEDDAERYQTIYAKEEGAVAAPTAGLHFSKHLLKRLEIKGVNFAEITLHVGLGTFNPVEVEDLSKHKMDSEELVITQEACDIVNAAKGKRKKVCAVGTTSMRAIESSVSSNKTLNPYEGWTNKFIFPPHDFAVANCMITNFHTPKSTLLMMVSAFIGHDLMKKAYEEAIKEQYRFYSYGDAMLIL

SEQ ID NO: 66623 - protein, 349 aa, Flavobacterium cauense
  REGION 1..349: note = tr|V6S4J3|V6S4J3_9FLAO S-adenosylmethionine:tRNA ribosyltransferase-isomerase OS=Flavobacterium cauense R2A-7 OX=1341154 GN=queA PE=3 SV=1
MKLSNFNFNLPAELLAEYPAENRDEARLMVVNRKTQTIEHKLFKDVLDYFGEGDVMVLNNTKVFPARLYGNKEKTGARIEVFLLRELNAEQRLWDVLVDPARKIRIGNKLYFGDDDSLVAEVIDNTTSRGRTLRFLYDGSYEEFRAKLLELGETPIPKYINREVTPEDAERYQTIYAKEEGAVAAPTAGLHFSKHLMKRLEIKGVEFAEVTLHVGLGTFNPVEVEDLSKHKMDSEELKISQEACDIVNKAKVNKKRVCAVGTTTMRAMESSVSSSRTLNAFEGWTNKFIFPPYDFSVADCMITNFHTPKSTLLMMISAFCGHDLMRKAYDEAIKEGYKFYSYGDAMLIL

SEQ ID NO: 66624 - protein, 349 aa, Flavobacterium cheniae
  REGION 1..349: note = tr|A0A562KFB5|A0A562KFB5_9FLAO S-adenosylmethionine:tRNA ribosyltransferase-isomerase; OS = Flavobacterium cheniae OX=295428 GN=queA PE=3 SV=1
MKLSHFNFNLPNELLAEFPTENRDESRLMVVNRKTNTIEHKLFKDVIDYFDDGDVMVLNNTKVFPARLYGNKEKTGARIEVFLLRELNAEQRLWDVLVDPARKIRIGNKLYFGDDDSLVAEVIDNTTSRGRTLRFLYDGSYEEFREKLVELGETPIPKYIEREVTPEDAERYQTIYAKVEGAVAAPTAGLHFSKHLLKRLEIKGVDFAEVTLHVGLGTFNPVEVEDLSKHKMDSEEMIISQEACDIVNNAKAKKKKVCCVGTTAMRAMESSVSSQRTLNPYTGWTNKFIYPPYDFSLADCMITNFHTPKSTLLMMISAFCGHDLMKKAYEEAIKEKYRFYSYGDAMLII

SEQ ID NO: 66625 - protein, 349 aa, Flavobacterium chilense
  REGION 1..349: note = tr|A0A1M7E4G3|A0A1M7E4G3_9FLAO S-adenosylmethionine:tRNA ribosyltransferase-isomerase; OS = Flavobacterium chilense OX=946677 GN=queA PE=3 SV=1
MKLSHFQFNLPKELLAEFPAENRDESRLMVIDRQKQTIEHKMFKDVINYFDDGDVLILNNTKVFPARLYGNKEKTGARIEVFLLRELNSEQRLWDVLVDPARKIRIGNKLYFGDDDSLVAEVIDNTTSRGRTLRFLYDGSYEEFRNKLTELGETPIPKYINREVTAEDAERYQTIYAKEEGAVAAPTAGLHFSKHLLKKLEIKGVNFAEVTLHVGLGTFNPVEVEDLSKHKMDSEELIIKQEACDIVNEAKGKKKRICAVGTTSMRAIESSVSSQNTLNPYEGWTNKFIFPPHDFSIANCMITNFHTPKSTLLMMISAFCGHDLMKRAYEEAIKEEYKFYSYGDAMLIL

SEQ ID NO: 66626 - protein, 349 aa, unidentified
  source 1..349: note = Flavobacterium circumlabens
  REGION 1..349: note = tr|A0A4Y7U8B2|A0A4Y7U8B2_9FLAO S-adenosylmethionine:tRNA ribosyltransferase-isomerase; OS = Flavobacterium circumlabens OX=2133765 GN=queA PE=3 SV=1
MKLSHFQFNLPKELLAEFPAENRDESRLMVIDRQKQTIEHKMFKDVINYFDDGDVLILNNTKVFPARLYGNKEKTGARIEVFLLRELNSEQRLWDVLVDPARKIRIGNKLYFGDDDSLVAEVIDNTTSRGRTLRFLYDGSYEEFRNKLTELGETPIPKYINREVTAEDAERYQTIYAKEEGAVAAPTAGLHFSKHLLKKLEIKGINFAEVTLHVGLGTFNPVEVEDLSKHKMDSEELIIKQEACDIVNAAKVNKKRICAVGTTSMRAIESSVSSQNTLNPYEGWTNKFIFPPHDFSIANCMITNFHTPKSTLLMMISAFCGHDLMKRAYEEAIKEEYKFYSYGDAMLII

SEQ ID NO: 66627 - protein, 349 aa, Flavobacterium columnare
  REGION 1..349: note = tr|G8X5B5|G8X5B5_FLACA S-adenosylmethionine:tRNA ribosyltransferase-isomerase OS=Flavobacterium columnare (strain ATCC 49512 / CIP 103533 / TG 44/87) OX=1041826; GN = q ueA PE=3 SV=1
MKLSNFNFNLPAELLAEYPAENRDESRLMVVHRKTGEIEHKLFKDIIEYFDEGDVMVVNNTKVFPARLYGNKEKTGARIEVFLLRELNAEQRLWDVLVDPARKIRIGNKLYFGDDDSLVAEVIDNTTSRGRTLRFLYDGSYEEFRQKLVDLGETPIPKYINREVTEEDAERYQTIYAKEEGAVAAPTAGLHFSKHLMKRLEIKGINFAEVTLHVGLGTFNPVEVEDLSKHKMDSEEVLISDEACETVNKAKLNKKRVCAIGTTTMRAMESSVSSNKTLNSYQGWTNKFIFPPYDFSVADCMVTNFHTPKSTLLMMISAFCGHDLMMKAYKEAVEQKYRFYSYGDAMLIL

SEQ ID NO: 66628 - protein, 349 aa, Flavobacterium columnare
  REGION 1..349: note = tr|A0A246GAN7|A0A246GAN7_9FLAO S-adenosylmethionine:tRNA ribosyltransferase-isomerase; OS = Flavobacterium columnare OX=996 GN=queA PE=3 SV=1
MKLSNFNFNLPAELLAEYPAENRDESRLMVVHRKTGEIEHKLFKDIIEYFDEGDVMVVNNTKVFPARLYGNKEKTGARIEVFLLRELNAEQRLWDVLVDPARKIRIGNKLYFGDDDSLVAEVIDNTTSRGRTLRFLYDGSYEEFRQKLVDLGETPIPKYINREVTEEDAERYQTIYAKEEGAVAAPTAGLHFSKHLMKRLEIKGINFAEVTLHVGLGTFNPVEVEDLSKHKMDSEEVVISDEACEVVNKAKVGKKRVCAIGTTTMRAMESSVSSNKTLNPYQGWTNKFIFPPYDFSVADCMVTNFHTPKSTLLMMISAFCGHDLMMKAYKEAVEQKYRFYSYGDAMLIL

SEQ ID NO: 66629 - protein, 349 aa, unidentified
  source 1..349: note = Flavobacterium commune
  REGION 1..349: note = tr|A0A1D9P983|A0A1D9P983_9FLAO S-adenosylmethionine:tRNA ribosyltransferase-isomerase; OS = Flavobacterium commune OX=1306519 GN=queA PE=3 SV=1
MKLSHFNFDLPKELLAEFPAENRDEARLMVIDRKKQTIEHKMFKDVIDYFDDGDVMILNNTKVFPARLYGNKEKTGARIEVFLLRELNAEQRLWDVLVDPARKIRIGNKLYFGDDDSLVAEVIDNTTSRGRTLRFLYDGSYEEFRNKLTELGETPIPKYINREVTPEDAERYQTIYAKEEGAVAAPTAGLHFSKHLLKRLEIKGVNFAEVTLHVGLGTFNPVEVEDLSKHKMDSEELKITQEACDIVNEAKGKRKRVCAVGTTSMRAIESSVSSANTLNPYEGWTNKFIFPPHDFSVANCMITNFHTPKSTLLMMISAFCGHDLMKKAYDEAIKEKYKFYSYGDAMLIL

SEQ ID NO: 66630 - protein, 349 aa, unidentified
  source 1..349: note = Flavobacterium crassostreae
  REGION 1..349: note = tr|A0A1B9DZX2|A0A1B9DZX2_9FLAO S-adenosylmethionine:tRNA ribosyltransferase-isomerase; OS = Flavobacterium crassostreae OX=1763534 GN=queA PE=3 SV=1
MKLSHFQFDLPKELLAEFPSENRDEARLMVIDRKAQTIEHKMFKDVIDYFDDGDVLILNNTKVFPARLYGNKEKTGARIEVFLLRELNAEQRLWDVLVDPARKIRIGNKLYFGEDDSLVAEVIDNTTSRGRTLRFLYDGSYEEFRKKLTELGETPIPKYISRDVTPEDAERYQTIYAKEEGAVAAPTAGLHFSKHLLKKLEIKGIKFAEVTLHVGLGTFNPVEVEDLSKHKMDSEELKISQEACDIVNTAKSQKKRICTVGTTSMRAVESSVSSHATLNPFDGWTNKFVFPPHDFTIPTCMITNFHTPKSTLLMMVSAFCGHDLMKRAYAEAIEEKYKFYSYGDAMLII

SEQ ID NO: 66631 - protein, 349 aa, Flavobacterium croceum
  REGION 1..349: note = tr|A0A2S4NA46|A0A2S4NA46_9FLAO S-adenosylmethionine:tRNA ribosyltransferase-isomerase; OS = Flavobacterium croceum DSM 17960 OX=1121886 GN=queA; PE = 3 SV=1
MKLSNFNFNLPQELLAEFPAENRDESRLMVVNRKTKTIEHKLFKDIIDYFDDGDVMILNNTKVFPARMYGNKEKTGARIEVFLLRELNAEQRLWDVLVDPARKIRIGNKLYFGDDDSLVAEVIDNTTSRGRTLRFLYDGTYEEFREKLIELGETPIPKYINREVTPEDAERYQTIYAKEEGAVAAPTAGLHFSKHLLKRLEIKGVDFAEVTLHVGLGTFNPVEVEDLSKHKMDSEELKITQEACDIVNKAKAEKKKICCIGTTSMRAIESSVSSNRTLNPYDGWTNKFIYPPYDFSIADCMVTNFHTPKSTLLMMISAFCGHDLMKKAYEEAIKEGYKFYSYGDAMLII

SEQ ID NO: 66632 - protein, 349 aa, unidentified
  source 1..349: note = Flavobacterium crocinum
  REGION 1..349: note = tr|A0A2S1YGK7|A0A2S1YGK7_9FLAO S-adenosylmethionine:tRNA ribosyltransferase-isomerase; OS = Flavobacterium crocinum OX=2183896 GN=queA PE=3 SV=1
MKLSHFNFNLPKELLAEFPAENRDESRLMVIDRKKNTIEHKMFKDVINYFDDGDVLILNNTKVFPARLYGNKEKTGARIEVFLLRELNSEQRLWDVLVDPARKIRIGNKLYFGDDDSLVAEVIDNTTSRGRTLRFLYDGSYEEFRNKLTELGETPIPKYINRDVTPEDAERYQTIYAKEEGAVAAPTAGLHFSKHLLKKLEIKGVNFAEVTLHVGLGTFNPVEVEDLSKHKMDSEELIITQEACDIVNEGKAKKKRICAVGTTSMRAIESSVSSANTLNPYEGWTNKFIFPPHDFSIANCMITNFHTPKSTLLMMISAFCGHDLMKKAYEEAIKEGYKFYSYGDAMLIL

SEQ ID NO: 66633 - protein, 349 aa, Flavobacterium cucumis
  REGION 1..349: note = tr|A0A1M7ZVK0|A0A1M7ZVK0_9FLAO S-adenosylmethionine:tRNA ribosyltransferase-isomerase; OS = Flavobacterium cucumis OX=416016 GN=queA PE=3 SV=1
MKLSHFNFNLPEELLAEFPTENRDESRLMVVNRKTGTIEHKLFKDVIDYFDDGDVMVLNNTKVFPARLYGNKEKTGARIEVFLLRELNAEQRLWDVLVDPARKIRIGNKLYFGDDDSLVAEVIDNTTSRGRTLRFLYDGSYEEFREKLVELGETPIPKYINREVTPEDAERYQTIYAKEEGAVAAPTAGLHFSKHLLKRLEIKGVDFAEVTLHVGLGTFNPVEVEDLSKHKMDSEEMIITQEACDIVNNAKANKKKICCVGTTSMRAMESSVSSQRTLNPYTGWTNKFIYPPYDFSIADCMITNFHTPKSTLLMMISAFCGHDLMMKAYKEAIQEKYRFYSYGDAMLII

SEQ ID NO: 66634 - protein, 349 aa, unidentified
  source 1..349: note = Flavobacterium cupreum
  REGION 1..349: note = tr|A0A434A1F9|A0A434A1F9_9FLAO S-adenosylmethionine:tRNA ribosyltransferase-isomerase; OS = Flavobacterium cupreum OX=2133766 GN=queA PE=3 SV=1
MKLSHFQFNLPKELLAEFPAENRDESRLMVIDRQKQTIEHKMFKDVINYFDDGDVLILNNTKVFPARLYGNKEKTGARIEVFLLRELNSEQRLWDVLVDPARKIRIGNKLYFGDDDSLVAEVIDNTTSRGRTLRFLYDGSYEEFRNKLTELGETPIPKYINREVTAEDAERYQTIYAKEEGAVAAPTAGLHFSKHLLKKLEIKGVNFAEVTLHVGLGTFNPVEVEDLSKHKMDSEELIIKQEACDIVNTAKANKKRICAVGTTSMRAIESSVSSQNTLNPYEGWTNKFIFPPHDFSIANCMITNFHTPKSTLLMMISAFCGHDLMKRAYEEAIKEEYKFYSYGDAMLIL

SEQ ID NO: 66635 - protein, 349 aa, unidentified
  source 1..349: note = Flavobacterium cutihirudinis
  REGION 1..349: note = tr|A0A3D9FWM5|A0A3D9FWM5_9FLAO S-adenosylmethionine:tRNA ribosyltransferase-isomerase; OS = Flavobacterium cutihirudinis OX=1265740 GN=queA PE=3; SV = 1
MKLSHFNFNLPKELLAEFPAENRDESRLMVIDRKKNTIEHKMFKDVINYFDDGDVLILNNTKVFPARLYGNKEKTGARIEVFLLRELNSEQRLWDVLVDPARKIRIGNKLYFGDDDSLVAEVIDNTTSRGRTLRFLYDGSYEEFRNKLTELGETPIPKYINREVTAEDAERYQTIYAKEEGAVAAPTAGLHFSKHLLKKLEIKGVNFAEVTLHVGLGTFNPVEVEDLSKHKMDSEELIITQQACDIVNEGKTKKKRICAVGTTSMRAIESSVSSANTLNPYEGWTNKFIFPPHDFSIANCMITNFHTPKSTLLMMISAFCGHDLMKKAYDEAIKEGYKFYSYGDAMLIL

SEQ ID NO: 66636 - protein, 349 aa, unidentified
  source 1..349: note = Flavobacterium cyanobacteriorum
  REGION 1..349: note = tr|A0A255Z0R0|A0A255Z0R0_9FLAO S-adenosylmethionine:tRNA ribosyltransferase-isomerase; OS = Flavobacterium cyanobacteriorum OX=2022802 GN=queA PE=3; SV = 1
MKLSNFNFNLPKELLAEFPAENRDESRLMVVNRKTKTIEHRLFKDILEYFDEGDVMVLNNTKVFPARLYGNKEKTGARIEVFLLRELNSEQRLWDVLVDPARKIRIGNKLYFGDDDSLVAEVIDNTTSRGRTLRFLYDGSYEEFRNKLTELGETPIPKYINREVVPEDAERYQTIYAKEEGAVAAPTAGLHFSKHLLKRLEIKGINFAEITLHVGLGTFNPVEVEDLSKHKMDSEELMIKQEACDIVNKAKLNKKRVCAIGTTVMRAMESSVSSQKTLNPYVGWTNKFIFPPYDFSVADCMVTNFHTPKSTLLMMISAFMGHDLMKKAYEEAVNEKYRFYSYGDAMLIL

SEQ ID NO: 66637 - protein, 349 aa, Flavobacterium daejeonense
  REGION 1..349: note = tr|A0A0Q0S4B6|A0A0Q0S4B6_9FLAO S-adenosylmethionine:tRNA ribosyltransferase-isomerase; OS = Flavobacterium daejeonense OX=350893 GN=queA PE=3 SV=1
MKLSHFNFDLPKELLAEFPAENRDEARLMVIDRKKQTIEHRMFKDIIDYFDDGDVMILNNTKVFPARLYGNKEKTGARIEVFLLRELNAEQRLWDVLVDPARKIRIGNKLYFGDDDSLVAEVIDNTTSRGRTLRFLYDGSYEEFRNKLTELGETPIPKYINREVTPEDAERYQTIYAKEEGAVAAPTAGLHFSKHLLKRLEIKGVNFAEVTLHVGLGTFNPVEVEDLSKHKMDSEELKITQEACDIVNEAKAKRKRICAVGTTSMRAIESSVSSQNTLNPYEGWTNKFIFPPHDFSVANCMVTNFHTPKSTLLMMISAFCGHDLMKKAYEEAIKEKYKFYSYGDAMLIL

SEQ ID NO: 66638 - protein, 349 aa, unidentified
  source 1..349: note = Flavobacterium dankookense
  REGION 1..349: note = tr|A0A4R6Q944|A0A4R6Q944_9FLAO S-adenosylmethionine:tRNA ribosyltransferase-isomerase; OS = Flavobacterium dankookense OX=706186 GN=queA PE=3 SV=1
MKLSHFNFNLPTELLAEYPAENRDESRLMVVHRKTGQIEHKLFKDIIDYFDDGDVMILNNTKVFPARMYGNKEKTGARIEVFLLRELNAEQRLWDVLVDPARKIRIGNKLYFGDDDSLVAEVIDNTTSRGRTLRFLYDGSYEDFRIKLLELGETPIPKYINREVTDEDAERYQTIYAKEEGAVAAPTAGLHFSKHLLKRLEIKGIDFAEVTLHVGLGTFNPVEVEDLSKHKMDSEELKITQEACDIVNDAKAKKKKICCIGTTSMRAIESSVSSQRTLNPFDGWTNKFIFPPYDFSIADAMVTNFHTPKSTLLMMVSAFCGHDLMKKAYEEAIKEKYKFYSYGDAMLIL

SEQ ID NO: 66639 - protein, 349 aa, Flavobacterium defluvii
  REGION 1..349: note = tr|A0A1M5M4R7|A0A1M5M4R7_9FLAO S-adenosylmethionine:tRNA ribosyltransferase-isomerase; OS = Flavobacterium defluvii OX=370979 GN=queA PE=3 SV=1
MKLSHFNFNLPKELLAEFPAENRDESRLMVIDRKKNTIEHKMFKDVINYFDDGDVLILNNTKVFPARLYGNKEKTGARIEVFLLRELNSEQRLWDVLVDPARKIRIGNKLYFGDDDSLVAEVIDNTTSRGRTLRFLYDGSYEEFRNKLTELGETPIPKYINRDVTPEDAERYQTIYAKEEGAVAAPTAGLHFSKHLLKKLEIKGVNFAEVTLHVGLGTFNPVEVEDLSKHKMDSEELIITQAACDIVNEGKAKKKRICAVGTTSMRAIESSVSSANTLNPYEGWTNKFIFPPHDFSIANCMITNFHTPKSTLLMMISAFCGHDLMKKAYEEAIKEGYKFYSYGDAMLIL

SEQ ID NO: 66640 - protein, 349 aa, Flavobacterium degerlachei
  REGION 1..349: note = tr|A0A1H2XVQ7|A0A1H2XVQ7_9FLAO S-adenosylmethionine:tRNA ribosyltransferase-isomerase; OS = Flavobacterium degerlachei OX=229203 GN=queA PE=3 SV=1
MKLSQFQFDLPKELLAEFPSEHRDEARLMVIDRKKQTIEHKTFKDVIDYFDDGDVLILNNTKVFPARLYGNKEKTGARIEVFLLRELNAEQRLWDVLVDPARKIRIGNKLYFGDDDSLVAEVIDNTTSRGRTLRFLYDGSYEEFRKKLTELGETPIPKYISRDVTPEDADRYQTIYAKEEGAVAAPTAGLHFSKHLLKKLEIKGIKFAEVTLHVGLGTFNPVEVEDLSKHKMDSEELKITEEACDIVNDAKAKKKRICTVGTTSMRAVESSVSSHGTLNPFDGWTNKFVFPPHEFTIPTCMITNFHTPKSTLLMMVSAFCGHDLMKRAYEEAIKEEYKFYSYGDAMLII

SEQ ID NO: 66641 - protein, 349 aa, unidentified
  source 1..349: note = Flavobacterium endophyticum
  REGION 1..349: note = tr|A0A495MLM3|A0A495MLM3_9FLAO S-adenosylmethionine:tRNA ribosyltransferase-isomerase; OS = Flavobacterium endophyticum OX=1540163 GN=queA PE=3 SV=1
MKLSHFNFNLPKELLAEYPAENRDESRLMVVNRKTKTIEHKMFKDVIDYFEEGDVMVLNNTKVFPARLYGNKEKTGARIEVFLLRELNAEQRLWDVLVDPARKIRIGNKLYFGDDDSLVAEVIDNTTSRGRTLRFLYDGSYEEFRNKLTELGETPIPKYINREVTPEDAERYQTIYAKEEGAVAAPTAGLHFSKHLLKRLEIKGIDFAEVTLHVGLGTFNPVEVEDLSKHKMDSEELKITQEACDIVNEAKAKKKKICAVGTTSMRAIESSVSSAKTLNPYDGWTNKFIFPPHDFSIADCMITNFHTPKSTLLMMISAFTGHDLMKKAYEEAIKEGYKFYSYGDAMLIL

SEQ ID NO: 66642 - protein, 349 aa, unidentified
  source 1..349: note = Flavobacterium enshiense
  REGION 1..349: note = tr|V6S323|V6S323_9FLAO S-adenosylmethionine:tRNA ribosyltransferase-isomerase OS=Flavobacterium enshiense DK69 OX=1107311 GN=queA PE=3 SV=1
MKLSNFNFNLPAELLAEFPAENRDEARLMVVNRKTQTIEHKLFKDVLDYFGEGDVMVLNNTKVFPARLYGNKEKTGARIEVFLLRELNAEQRLWDVLVDPARKIRIGNKLYFGDDDSLVAEVIDNTTSRGRTLRFLYDGSYEEFRAKLLELGETPIPKYINREVTPEDAERYQTIYAKEEGAVAAPTAGLHFSKHLMKRLEIKGVEFAEITLHVGLGTFNPVEVEDLSKHKMDSEELKITQEACDIVNKAKLAKKRVCAVGTTTMRAMESSVSSSKTLNPYEGWTNKFIFPPYDFSVADCMITNFHTPKSTLLMMISAFCGHDLMRKAYDEAVKEKYKFYSYGDAMLIL

SEQ ID NO: 66643 - protein, 349 aa, unidentified
  source 1..349: note = Flavobacterium faecale
  REGION 1..349: note = tr|A0A2S1LC10|A0A2S1LC10_9FLAO S-adenosylmethionine:tRNA ribosyltransferase-isomerase; OS = Flavobacterium faecale OX=1355330 GN=queA PE=3 SV=1
MKLSHFQFDLPKELLAEFPSENRDEARLMVIDRKKQTIEHKMFKDVIDYFDDGDVMILNNTKVFPARLYGNKEKTGARIEVFLLRELNAEQRLWDVLVDPARKIRIGNKLYFGDDDSLVAEVIDNTTSRGRTLRFLYDGSYEEFRSKLTELGETPIPKYINRDVTPEDADRYQTIYAKEEGAVAAPTAGLHFSKHLLKRLEIKGIKFAEVTLHVGLGTFNPVEVEDLSKHKMDSEELKINQEACDIVNDAKVKKKRICAVGTTSMRAIESAVSSQATLNPFDGWTNKFIFPPHEFSIATCMITNFHTPKSTLLMMISAFCGHDLMRLAYDEAIKEEYKFYSYGDAMLII

SEQ ID NO: 66644 - protein, 349 aa, Flavobacterium flevense
  REGION 1..349: note = tr|A0A4Y4B4J0|A0A4Y4B4J0_9FLAO S-adenosylmethionine:tRNA ribosyltransferase-isomerase; OS = Flavobacterium flevense OX=983 GN=queA PE=3 SV=1
MKLSHFQFDLPKELLAEFPAENRDEARLMVIDRKKQTIEHKMFKDVIDYFDDGDVMILNNTKVFPARLYGNKEKTGARIEVFLLRELNAEQRLWDVLVDPARKIRIGNKLYFGDDDSLVAEVIDNTTSRGRTLRFLYDGSYEEFRNKLTELGETPIPKYINREVTPEDAERYQTIYAKEEGAVAAPTAGLHFSKHLLKRLEIKGVKFAEVTLHVGLGTFNPVEVEDLSKHKMDSEELKITQEACDIVNEAKGKRKRVCAVGTTSMRAIESSVSSQNTLNPFEGWTNKFIFPPHDFSVATCMITNFHTPKSTLLMMISAFCGHDLMKKAYEEAIKEKYKFYSYGDAMLII

SEQ ID NO: 66645 - protein, 349 aa, Flavobacterium fluvii
  REGION 1..349: note = tr|A0A1M5DPM2|A0A1M5DPM2_9FLAO S-adenosylmethionine:tRNA ribosyltransferase-isomerase; OS = Flavobacterium fluvii OX=468056 GN=queA PE=3 SV=1
MKLSHFQFNLPKELLAEFPAENRDESRLMVIDRKKQTIEHKTFKDVIDYFDEGDVLILNNTKVFPARLYGNKEKTGARIEVFLLRELNAEQRLWDVLVDPARKIRIGNKLYFGDDDSLVAEVIDNTTSRGRTLRFLYDGSYEEFRNKLTELGETPIPKYISRDVTPEDADRYQTIYAKEEGAVAAPTAGLHFSKHLLKKLEIKGVKFAEVTLHVGLGTFNPVEVEDLSKHKMDSEELKITQEACDVVNDAKAKRKRICAVGTTSMRAIESSVSSQRTLNPFDGWTNKFIFPPHDFSVATCMITNFHTPKSTLLMMISAFCGHDLMKKAYEEAIKEEYKFYSYGDAMLII

SEQ ID NO: 66646 - protein, 349 aa, unidentified
  source 1..349: note = Flavobacterium fontis
  REGION 1..349: note = tr|A0A1M4XRF1|A0A1M4XRF1_9FLAO S-adenosylmethionine:tRNA ribosyltransferase-isomerase; OS = Flavobacterium fontis OX=1124188 GN=queA PE=3 SV=1
MKLSHFNFHLPPELLAEFPAENRDESRLMVVHRSTGQIEHKLFKDIIDYFDDGDVMILNNTKVFPARMYGNKEKTGARIEVFLLRELNAEQRLWDVLVDPARKIRIGNKLYFGDDDSLVAEVIDNTTSRGRTLRFLYDGSYEEFRYKLKELGETPIPKYINREVTEEDAERYQTIYAKEEGAVAAPTAGLHFSKHLLKRLEIKGINFAEVTLHVGLGTFNPVEVEDLSKHKMDSEELRISQEACDTVNKAIENKRRVCCIGTTSMRAIESSVSSNRTLNPYDGWTNKFIFPPYDFSIANCMVTNFHTPKSTLLMMISAFCGHDLMKKAYEEAVKERYRFYSYGDAMLIL

SEQ ID NO: 66647 - protein, 349 aa, Flavobacterium frigidimaris
  REGION 1..349: note = tr|A0A1M5TWU3|A0A1M5TWU3_FLAFR S-adenosylmethionine:tRNA ribosyltransferase-isomerase; OS = Flavobacterium frigidimaris OX=262320 GN=queA PE=3 SV=1
MKLSHFQFNLPKELLAEFPAENRDESRLMVIDRQKQTIEHKMFKDVINYFDDGDVLILNNTKVFPARLYGNKEKTGARIEVFLLRELNSEQRLWDVLVDPARKIRIGNKLYFGDDDSLVAEVIDNTTSRGRTLRFLYDGSYEEFRNKLTELGETPIPKYISREVTAEDAERYQTIYAKEEGAVAAPTAGLHFSKHLLKKLEIKGINFAEVTLHVGLGTFNPVEVEDLSKHKMDSEELIIKQEACDIVNTAKANKKRICAVGTTSMRAIESSVSSQNTLNPFEGWTNKFIFPPHDFSIANCMITNFHTPKSTLLMMISAFCGHDLMKRAYEEAIKEEYKFYSYGDAMLII

SEQ ID NO: 66648 - protein, 349 aa, Flavobacterium frigoris
  REGION 1..349: note = tr|H7FMT6|H7FMT6_FLAFP S-adenosylmethionine:tRNA ribosyltransferase-isomerase OS=Flavobacterium frigoris (strain PS1) OX=1086011 GN=queA PE=3 SV=1
MKLSQFQFDLPKELLAEFPSEHRDEARLMVIDRKKQTIEHKTFKDVIDYFDDGDVLILNNTKVFPARLYGNKEKTGARIEVFLLRELNAEQRLWDVLVDPARKIRIGNKLYFGDDDSLVAEVIDNTTSRGRTLRFLYDGSYEEFRKKLTELGETPIPKYISRDVTPEDADRYQTIYAKEEGAVAAPTAGLHFSKHLLKKLEIKGIKFAEVTLHVGLGTFNPVEVEDLSKHKMDSEELKITEQACDIVNDAKAKKKRICTVGTTSMRAVESSVSSHGTLNPFDGWTNKFVFPPHEFTIPTCMITNFHTPKSTLLMMVSAFCGHDLMKRAYEEAIKEEYKFYSYGDAMLII

SEQ ID NO: 66649 - protein, 349 aa, Flavobacterium frigoris
  REGION 1..349: note = tr|A0A1H9E0Q5|A0A1H9E0Q5_FLAFI S-adenosylmethionine:tRNA ribosyltransferase-isomerase; OS = Flavobacterium frigoris OX=229204 GN=queA PE=3 SV=1
MKLSHFQFDLPKELLAEFPSEHRDEARLMVIDRKKQTIEHKTFKDVIDYFDDGDVLILNNTKVFPARLYGNKEKTGARIEVFLLRELNAEQRLWDVLVDPARKIRIGNKLYFGDDDSLVAEVIDNTTSRGRTLRFLYDGSYEEFRKKLTELGETPIPKYISRDVTPEDAERYQTIYAKEEGAVAAPTAGLHFSKHLLKKLEIKGIKFAEVTLHVGLGTFNPVEVEDLSKHKMDSEELKITQAACDIVNDAKVHKKRICTVGTTSMRAVESSVSSHGTLNPFDGWTNKFVFPPHEFTIPTCMITNFHTPKSTLLMMVSAFCGHDLMKRAYEEAIKEEYKFYSYGDAMLII

SEQ ID NO: 66650 - protein, 349 aa, Flavobacterium fryxellicola
  REGION 1..349: note = tr|A0A167TYT4|A0A167TYT4_9FLAO S-adenosylmethionine:tRNA ribosyltransferase-isomerase; OS = Flavobacterium fryxellicola OX=249352 GN=queA PE=3 SV=1
MKLSHFQFDLPKELLAEYPAENRDEARLMVIDRKKQTIEHKMFKDVIDYFDEGDVLILNNTKVFPARLYGNKEKTGARIEVFLLRELNSEQRLWDVLVDPARKIRIGNKLYFGDDDSLVAEVIDNTTSRGRTLRFLYDGSYEEFRNKLTELGETPIPKYISRDVTPEDAERYQTIYAKEEGSVAAPTAGLHFSKHLLKKLEIKGIKFAEVTLHVGLGTFNPVEVEDLSKHKMDSEELKISQEACDIVNGAKAKKKRICTVGTTSMRAVESSVSSQNTLNPFDGWTNKFVFPPHDFAIPTCMITNFHTPKSTLLMMVSAFCGHDLMKKAYAEAIEEKYKFYSYGDAMLII

SEQ ID NO: 66651 - protein, 349 aa, Flavobacterium gillisiae; identical to SEQ ID NO: 66649
  REGION 1..349: note = tr|A0A1H4CGP8|A0A1H4CGP8_9FLAO S-adenosylmethionine:tRNA ribosyltransferase-isomerase; OS = Flavobacterium gillisiae OX=150146 GN=queA PE=3 SV=1

SEQ ID NO: 66652 - protein, 349 aa, unidentified
  source 1..349: note = Flavobacterium gilvum
  REGION 1..349: note = tr|A0A085EJS7|A0A085EJS7_9FLAO S-adenosylmethionine:tRNA ribosyltransferase-isomerase; OS = Flavobacterium gilvum OX=1492737 GN=queA PE=3 SV=1
MKLSHFNFNLPKELLAEYPAENRDESRLMVVDRKKQTIEHKMFKDLIDYFDDGDVLILNNTKVFPARLYGNKEKTGARIEVFLLRELNAEQRLWDVLVDPARKIRIGNKLYFGDDDSLVAEVIDNTTSRGRTLRFLYDGSYEEFRNKLTELGETPIPKYINRDVTPEDAERYQTIYAKEEGAVAAPTAGLHFSKHLLKRLEIKGVKFAEVTLHVGLGTFNPVEVEDLSKHKMDSEELKITQEACDIVNAAKVAKKRICTVGTTSMRAVESSVSSQNTLNPYDGWTNKFVFPPHDFAIPNCMITNFHTPKSTLLMMVSAFCGHDLMKRAYEEAIKEQYRFYSYGDAMLII

SEQ ID NO: 66653 - protein, 349 aa, Flavobacterium glaciei
  REGION 1..349: note = tr|A0A562PL13|A0A562PL13_9FLAO S-adenosylmethionine:tRNA ribosyltransferase-isomerase; OS = Flavobacterium glaciei OX=386300 GN=queA PE=3 SV=1
MKLSHFQFDLPKELLAEYPAENRDESRLMVIDRKKGTIEHKMFKDVIDYFDDGDVLILNNTKVFPARLYGNKEKTGARIEVFLLRELNSEQRLWDVLVDPARKIRIGNKLYFGDDDSLVAEVIDNTTSRGRTLRFLYDGSYEEFRNKLTELGETPIPKYISRDVTPEDAERYQTIYAKEEGAVAAPTAGLHFSKHLLKKLEIKGIKFAEVTLHVGLGTFNPVEVEDLSKHKMDSEELKITQEACDIVNEAKAKKKRICTVGTTSMRAVESSVSSQNTLNPFDGWTNKFVFPPHDFTIPTCMITNFHTPKSTLLMMVSAFCGHDLMKKAYAEAIKEEYKFYSYGDAMLII

SEQ ID NO: 66654 - protein, 349 aa, Flavobacterium glycines
  REGION 1..349: note = tr|A0A1B9DN55|A0A1B9DN55_9FLAO S-adenosylmethionine:tRNA ribosyltransferase-isomerase; OS = Flavobacterium glycines OX=551990 GN=queA PE=3 SV=1
MKLSHFNFDLPKELLAEFPAENRDEARLMVIDRKKQTIEHRMFKDIIEYFDDGDVMILNNTKVFPARLYGNKEKTGARIEVFLLRELNAEQRLWDVLVDPARKIRIGNKLYFGDDDSLVAEVIDNTTSRGRTLRFLYDGSYEEFRNKLTELGETPIPKYINREVTPEDAERYQTIYAKEEGAVAAPTAGLHFSKHLLKRLEIKGVNFAEVTLHVGLGTFNPVEVEDLSKHKMDSEELKITQEACDIVNEAKAKRKRVCAVGTTSMRAIESSVSSQNTLNPYEGWTNKFIFPPHDFSVANCMITNFHTPKSTLLMMISAFCGHDLMKKAYEEAIKEKYKFYSYGDAMLIL

SEQ ID NO: 66655 - protein, 349 aa, Flavobacterium granuli
  REGION 1..349: note = tr|A0A1M5PRB8|A0A1M5PRB8_9FLAO S-adenosylmethionine:tRNA ribosyltransferase-isomerase; OS = Flavobacterium granuli OX=280093 GN=queA PE=3 SV=1
MKLSHFQFDLPKELLAEFPAENRDEARLMVIDRKKQTIEHKMFKDVIDYFDDGDVLILNNTKVFPARLYGNKEKTGARIEVFLLRELNAEQRLWDVLVDPARKIRIGNKLYFGDDDSLVAEVIDNTTSRGRTLRFLYDGSYEEFRNKLTELGETPIPKYISRDVTPEDAERYQTIYAKEEGAVAAPTAGLHFSKHLMKKLEIKGVKFAEVTLHVGLGTFNPVEVEDLSKHKMDSEELKITQEACDIVNEAKAKKKRICTVGTTSMRAVESSVSSQNTLNPFDGWTNKFVFPPHDFTIPTCMITNFHTPKSTLLMMVSAFCGHDLMKKAYEEAIKEKYKFYSYGDAMLII

SEQ ID NO: 66656 - protein, 349 aa, Flavobacterium haoranii
  REGION 1..349: note = tr|A0A1M6DDI0|A0A1M6DDI0_9FLAO S-adenosylmethionine:tRNA ribosyltransferase-isomerase; OS = Flavobacterium haoranii OX=683124 GN=queA PE=3 SV=1
MKLSHFNFNLPAELLAEFPAENRDESRLMVVHRKTGQIEHKMFKDIIDYFDDGDVMVLNNTKVFPARLYGNKEKTGARIEVFLLRELNAEQRLWDVLVDPARKIRIGNKLYFGDDDSLVAEVIDNTTSRGRTLRFLYDGSYEEFRQKLVDLGETPIPKYINREVTPEDADRYQTIYAKEEGAVAAPTAGLHFSKHLMKRLEIKGINFAEVTLHVGLGTFNPVEVEDLSKHKMDSEEMVITQEACDIVNQAKAKKSKVCCIGTTSMRAMESSVSSMKTLNPYVGWTNKFIYPPYDFSIADAMVTNFHTPKSTLLMMISAFCGHDLMKKAYDEAVKEGYKFYSYGDAMLIL

SEQ ID NO: 66657 - protein, 349 aa, Flavobacterium hercynium
  REGION 1..349: note = tr|A0A226GXA1|A0A226GXA1_9FLAO S-adenosylmethionine:tRNA ribosyltransferase-isomerase; OS = Flavobacterium hercynium OX=387094 GN=queA PE=3 SV=1
MKLSHFQFNLPKELLAEFPAENRDESRLMVIDRQKQTIEHKMFKDVINYFDDGDVLILNNTKVFPARLYGNKEKTGARIEVFLLRELNSEQRLWDVLVDPARKIRIGNKLYFGDDDSLVAEVIDNTTSRGRTLRFLYDGSYEEFRNKLTELGETPIPKYINREVTAEDAERYQTIYAKEEGAVAAPTAGLHFSKHLLKKLEIKGINFAEVTLHVGLGTFNPVEVEDLSKHKMDSEELIINQQACDIVNTAKAAKKRICAVGTTSMRAIESSVSSQNTLNPYEGWTNKFIFPPHDFSIANCMITNFHTPKSTLLMMISAFCGHDLMKRAYEEAIKEEYKFYSYGDAMLII

SEQ ID NO: 66658 - protein, 349 aa, Flavobacterium hibernum
  REGION 1..349: note = tr|A0A0D0EKR4|A0A0D0EKR4_9FLAO S-adenosylmethionine:tRNA ribosyltransferase-isomerase; OS = Flavobacterium hibernum OX=37752 GN=queA PE=3 SV=1
MKLSHFQFNLPKELLAEFPAENRDESRLMVIDRQKQTIEHKMFKDVINYFDDGDVLILNNTKVFPARLYGNKEKTGARIEVFLLRELNSEQRLWDVLVDPARKIRIGNKLYFGDDDSLVAEVIDNTTSRGRTLRFLYDGSYEEFRNKLTELGETPIPKYISRDVTPEDAERYQTIYAKEEGAVAAPTAGLHFSKHLLKKLEIKGVNFAEVTLHVGLGTFNPVEVEDLSKHKMDSEELIIKQEACDIVNDAKAKKKRICAVGTTSMRAIESSVSSQNTLNPYEGWTNKFIFPPHDFSIANCMITNFHTPKSTLLMMISAFCGHDLMKRAYEEAIKEGYKFYSYGDAMLII

SEQ ID NO: 66659 - protein, 349 aa, Flavobacterium hydatis
  REGION 1..349: note = tr|A0A086AU33|A0A086AU33_FLAHY S-adenosylmethionine:tRNA ribosyltransferase-isomerase; OS = Flavobacterium hydatis OX=991 GN=queA PE=3 SV=1
MKLSHFQFNLPKELLAEFPAENRDESRLMVIDRKKQTIEHKMFKDVINYFDDGDVLILNNTKVFPARLYGNKEKTGARIEVFLLRELNSEQRLWDVLVDPARKIRIGNKLYFGDDDSLVAEVIDNTTSRGRTLRFLYDGSYEEFRNKLTELGETPIPKYISRDVTPEDAERYQTIYAKEEGAVAAPTAGLHFSKHLLKKLEIKGVNFAEVTLHVGLGTFNPVEVEDLSKHKMDSEELIITEEACEIVNLAKQNKKRICAVGTTSMRAIESSVSSQNTLNPFEGWTNKFIFPPHDFSIANCMITNFHTPKSTLLMMISAFCGHDLMKRAYEEAIKEGYKFYSYGDAMLII

SEQ ID NO: 66660 - protein, 349 aa, Flavobacterium indicum
  REGION 1..349: note = tr|H8XSJ9|H8XSJ9_FLAIG S-adenosylmethionine:tRNA ribosyltransferase-isomerase OS=Flavobacterium indicum (strain DSM 17447 / CIP 109464 / GPTSA100-9) OX=1094466; GN = qu eA PE=3 SV=1
MKLSNFNFNLPDELLAEFPSENRDESRLMVVNRKTGTIEHKMFKDIIDYFDDGDVMVLNNTKVFPARLYGNKEKTGARIEVFLLRELNAEQRLWDVLVDPARKIRIGNKLYFGDDDSLVAEVIDNTTSRGRTLRFLYDGSYEEFRQKLVELGETPIPKYINREVTPEDAERYQTIYAKEEGAVAAPTAGLHFSKHLMKRLEIKGINFAEVTLHVGLGTFNPVEVEDLSKHKMDSEEMYVTQEACDIVNKAKANKKKVCCIGTTSMRAMESSVSSMKTLNPYVGWTNKFIYPPYDFSIADCMVTNFHTPKSTLLMMISAFCGHDLMMKAYKEAIEEKYRFYSYGDAMLII

SEQ ID NO: 66661 - protein, 349 aa, Flavobacterium johnsoniae
  REGION 1..349: note = sp|A5FMM5|QUEA_FLAJ1 S-adenosylmethionine:tRNA ribosyltransferase-isomerase OS=Flavobacterium johnsoniae (strain ATCC 17061 / DSM 2064 / UW101) OX=376686 GN=queA; PE = 3 SV=1
MKLSHFNFNLPKELLAEFPAENRDESRLMVIDRQKNTIEHKMFKDVINYFDDGDVLILNNTKVFPARLYGNKEKTGARIEVFLLRELNSEQRLWDVLVDPARKIRIGNKLYFGDDDSLVAEVIDNTTSRGRTLRFLYDGSYEEFRNKLTELGETPIPKYINRDVTPEDAERYQTIYAKEEGAVAAPTAGLHFSKHLLKKLEIKGVNFAEVTLHVGLGTFNPVEVEDLSKHKMDSEELIITQEACDIVNEGKAKKKRICAVGTTSMRAIESSVSSANTLNPYEGWTNKFIFPPHDFSIANCMITNFHTPKSTLLMMISAFCGHDLMKKAYEEAIKEGYKFYSYGDAMLIL

SEQ ID NO: 66662 - protein, 349 aa, Flavobacterium johnsoniae
  REGION 1..349: note = tr|A0A2W5RSM4|A0A2W5RSM4_FLAJO S-adenosylmethionine:tRNA ribosyltransferase-isomerase; OS = Flavobacterium johnsoniae OX=986 GN=queA PE=3 SV=1
MKLSHFNFNLPKELLAEYPAENRDESRLMVVNRKTKTIEHKMFKDIIDYFEEGDVMVLNNTKVFPARLYGNKEKTGARIEVFLLRELNAEQRLWDVLVDPARKIRIGNKLYFGDDDSLVAEVIDNTTSRGRTLRFLYDGSYEEFRNKLTELGETPIPKYINREVTPEDAERYQTIYAKEEGAVAAPTAGLHFSKHLLKRLEIKGIDFAEVTLHVGLGTFNPVEVEDLSKHKMDSEELKITQEACDIVNKAKANKKKVCAVGTTSMRAIESSVSSAKTLNPYDGWTNKFIFPPHDFSIADCMITNFHTPKSTLLMMISAFTGHDLMKKAYEEAIKEGYRFYSYGDAMLIL

SEQ ID NO: 66663 - protein, 349 aa, unidentified
  source 1..349: note = Flavobacterium kingsejongi
  REGION 1..349: note = tr|A0A2S1LN54|A0A2S1LN54_9FLAO S-adenosylmethionine:tRNA ribosyltransferase-isomerase; OS = Flavobacterium kingsejongi OX=1678728 GN=queA PE=3 SV=1
MKLSHFQFNLPKELLAEYPAENRDEARLMVVDRKNKTIEHKMFKDVIDYFDEGDVLVLNNTKVFPARLYGNKEKTGARIEVFLLRELNSEQRLWDVLVDPARKIRIGNKLYFGDDDSLVAEVIDNTTSRGRTLRFLYDGSYEEFRNKLTELGETPIPKYINREVTPEDAERYQTIYAKEEGAVAAPTAGLHFSKHLLKRLEIKGVDFAEVTLHVGLGTFNPVEVEDLSKHKMDSEELKVTQEACDIVNNAKAKKKKICAVGTTSMRALESSVSSAKTLNPFDGWTNKFIFPPHDFSIADCMITNFHTPKSTLLMMISAFTGHDLMKKAYEEAINEGYKFYSYGDAMLII

SEQ ID NO: 66664 - protein, 349 aa, unidentified
  source 1..349: note = Flavobacterium lacus
  REGION 1..349: note = tr|A0A328X0V1|A0A328X0V1_9FLAO S-adenosylmethionine:tRNA ribosyltransferase-isomerase; OS = Flavobacterium lacus OX=1353778 GN=queA PE=3 SV=1
MKLSHFQFNLPTELLAEYPAENRDESRLMVIDRAKKTIEHKTFKDIINYFDDGDVMIMNNTKVFPARLYGNKEKTGARIEVFLLRELNAEQRLWDVLVDPARKIRIGNKLYFGDDDSLVAEVIDNTTSRGRTLRFLYDGSYDEFRNKLTELGETPIPKYITREVTPEDEERYQTIYAKVEGAVAAPTAGLHFSKHLMKRLEIKGVDFAEVTLHVGLGTFNPVEVEDLSKHKMDSEELIITQQACDIVNNALTHKKRICCVGTTSMRAIESSVSSARTMNPFEGWTNKFIYPPYDFSIANCMVTNFHTPKSTLLMMISAFCGHDLMKKAYEEAIKEKYKFYSYGDAMLII

SEQ ID NO: 66665 - protein, 349 aa, Flavobacterium limicola
  REGION 1..349: note = tr|A0A495S3Q3|A0A495S3Q3_9FLAO S-adenosylmethionine:tRNA ribosyltransferase-isomerase; OS = Flavobacterium limicola OX=180441 GN=queA PE=3 SV=1
MKLSHFQFDLPKELLAEYPAENRDESRLMVIDRKKGTIEHKMFKDVIDYFDEGDVLILNNTKVFPARLYGNKEKTGARIEVFLLRELNSEQRLWDVLVDPARKIRIGNKLYFGDDDSLVAEVIDNTTSRGRTLRFLYDGSYEEFRNKLTELGETPIPKYISRDVTPEDAERYQTIYAKEEGAVAAPTAGLHFSKHLLKKLEIKGIKFAEVTLHVGLGTFNPVEVEDLSKHKMDSEELKITQEACDIVNEAKAKKKRICTVGTTSMRAVESSVSSQNTLNPFDGWTNKFVFPPHDFTIPTCMITNFHTPKSTLLMMVSAFCGHDLMKKAYAEAIEKEYKFYSYGDAMMII

SEQ ID NO: 66666 - protein, 349 aa, unidentified
  source 1..349: note = Flavobacterium limnosediminis
  REGION 1..349: note = tr|V6SS75|V6SS75_9FLAO S-adenosylmethionine:tRNA ribosyltransferase-isomerase OS=Flavobacterium limnosediminis JC2902 OX=1341181 GN=queA PE=3 SV=1
MKLSNFNFNLPAELLAEFPAENRDESRLMVVNRKTQTIEHKLFKDVLDYFGEGDVMVLNNTKVFPARLYGNKEKTGARIEVFLLRELNAEQRLWDVLVDPARKIRIGNKLYFGDDDSLVAEVIDNTTSRGRTLRFLYDGSYEEFRAKLLELGETPIPKYINREVTPEDAERYQTIYAKEEGAVAAPTAGLHFSKHLMKRLEIKGVEFAEVTLHVGLGTFNPVEVEDLSKHKMDSEELKITQEACDIVNKAKLNKKRVCAVGTTTMRAMESSVSSSKTLNSFEGWTNKFIFPPYDFSVADCMITNFHTPKSTLLMMISAFCGHDLMRKAYDEAIKEGYKFYSYGDAMLIL

SEQ ID NO: 66667 - protein, 349 aa, Flavobacterium lindanitolerans; identical to SEQ ID NO: 66662
  REGION 1..349: note = tr|A0A497V5S5|A0A497V5S5_9FLAO S-adenosylmethionine:tRNA ribosyltransferase-isomerase; OS = Flavobacterium lindanitolerans OX=428988 GN=queA PE=3; SV = 1

SEQ ID NO: 66668 - protein, 349 aa, unidentified
  source 1..349: note = Flavobacterium macacae
  REGION 1..349: note = tr|A0A3P3WAY0|A0A3P3WAY0_9FLAO S-adenosylmethionine:tRNA ribosyltransferase-isomerase; OS = Flavobacterium macacae OX=2488993 GN=queA PE=3 SV=1
MKLSHFQFNLPKELLAEYPAENRDESRLMVIDRKKQTIEHKMFKDVIDYFDEGDVMVLNNTKVFPARLYGNKEKTGARIEVFLLRELNAEQRLWDVLVDPARKIRIGNKLYFGDDDSLVAEVIDNTTSRGRTLRFLYDGSYEEFRGKLTELGETPIPKYINREVTPEDADRYQTIYAKEEGAVAAPTAGLHFSKHLLKKLEIKGIDFAEVTLHVGLGTFNPVEVEDLSKHKMDSEELKITQEACDIVNSAKERKKRICAVGTTSMRAIESSVSSARTLNPFDGWTNKFIFPPHDFSIADCMITNFHTPKSTLLMMISAFCGHDLMKRAYDEAIKEEYKFYSYGDAMLII

SEQ ID NO: 66669 - protein, 349 aa, unidentified
  source 1..349: note = Flavobacterium magnum
  REGION 1..349: note = tr|A0A2S0RDP3|A0A2S0RDP3_9FLAO S-adenosylmethionine:tRNA ribosyltransferase-isomerase; OS = Flavobacterium magnum OX=2162713 GN=queA PE=3 SV=1
MKLSHFNFNLPKELLAEFPAENRDESRLMVVNRKDKTIEHKMFKDIIDYFDEGDVMILNNTKVFPARLYGNKEKTGARIEVFLLRELNAEQRLWDVLVDPARKIRIGNKLYFGDDDSLVAEVIDNTTSRGRTLRFLYDGSYEEFRNKLTELGETPIPKYINREVVPEDAERYQTIYAKEEGAVAAPTAGLHFSKHLLKRLEIKGVNFAEVTLHVGLGTFNPVEVEDLSKHKMDSEELKITQEACDIVNEAKANRKRVCAIGTTSMRAIESSVSSAKMLNPYDGWTNKFIFPPHDFSIADCMVTNFHTPKSTLLMMISAFTGHDLMKKAYEEAIKEEYKFYSYGDAMLIL

SEQ ID NO: 66670 - protein, 349 aa, unidentified
  source 1..349: note = Flavobacterium marinum
  REGION 1..349: note = tr|A0A1H6K252|A0A1H6K252_9FLAO S-adenosylmethionine:tRNA ribosyltransferase-isomerase; OS = Flavobacterium marinum OX=1159016 GN=queA PE=3 SV=1
MKLSNFNFNLPPELLAEFPAENRDEARLMVVNRKAGTIEHKLFKDLIDYFDEGDVMVLNNTKVFPARLYGNKEKTGARIEVFLLRELNEEQRLWDVLVDPARKIRIGNKLYFGNDDSLVAEVIDNTTSRGRTLRFLYDGSYEEFRLKLRELGETPIPKYINREVTPEDEERYQTIYATEEGAVAAPTAGLHFSKHLLKRLEIKGVDFAKVTLHIGLGTFNPVEVEDLSKHKMDSEELIITQEACDIVNKAKANKKKICAVGTTSMRALESSVSSNQTLNPFEGWTNKFIFPPYDFSIADCMVTNFHMPKSTLLMMISAFTGHDLMMKAYDEAVKEGYKFYSYGDAMLIL

SEQ ID NO: 66671 - protein, 349 aa, Flavobacterium micromati
  REGION 1..349: note = tr|A0A1M5F9J8|A0A1M5F9J8_9FLAO S-adenosylmethionine:tRNA ribosyltransferase-isomerase; OS = Flavobacterium micromati OX=229205 GN=queA PE=3 SV=1
MKLSHFQFDLPKELLAEYPAENRDEARLMVIDRKKQTIEHKLFKDVIDYFDEGDVLILNNTKVFPARLYGNKEKTGARIEVFLLRELNSEQRLWDVLVDPARKIRIGNKLYFGDDDSLVAEVIDNTTSRGRTLRFLYDGSYEEFRNKLTELGETPIPKYISRDVTPEDAERYQTIYAKEEGSVAAPTAGLHFSKHLLKKLEIKGINFAEVTLHVGLGTFNPVEVEDLSKHKMDSEELKITQEACDIVNQAKAKKKRICTVGTTSMRAVESSVSSQNTLNPFDGWTNKFVFPPHDFAIPTCMITNFHTPKSTLLMMVSAFCGHDLMKRAYAEAIEEKYKFYSYGDAMLII

SEQ ID NO: 66672 - protein, 349 aa, unidentified
  source 1..349: note = Flavobacterium nitrogenifigens
  REGION 1..349: note = tr|A0A521D731|A0A521D731_9FLAO S-adenosylmethionine:tRNA ribosyltransferase-isomerase; OS = Flavobacterium nitrogenifigens OX=1617283 GN=queA PE=3; SV = 1
MKLSHFNFNLPKELLAEFPAENRDESRLMVIDRKKNTIEHKMFKDVINYFDDGDVLILNNTKVFPARLYGNKEKTGARIEVFLLRELNSEQRLWDVLVDPARKIRIGNKLYFGDDDSLVAEVIDNTTSRGRTLRFLYDGSYEEFRNKLTELGETPIPKYINREVTAEDAERYQTIYAKEEGAVAAPTAGLHFSKHLLKKLEIKGVNFAEVTLHVGLGTFNPVEVEDLSKHKMDSEELIITQEACDIVNEGKAKKKRICAVGTTSMRAIESSVSSANTLNPYEGWTNKFIFPPHDFSIANCMITNFHTPKSTLLMMISAFCGHDLMKKAYEEAIKEGYKFYSYGDAMLIL

SEQ ID NO: 66673 - protein, 349 aa, unidentified
  source 1..349: note = Flavobacterium noncentrifugens
  REGION 1..349: note = tr|A0A1G9B3B4|A0A1G9B3B4_9FLAO S-adenosylmethionine:tRNA ribosyltransferase-isomerase; OS = Flavobacterium noncentrifugens OX=1128970 GN=queA PE=3; SV = 1
MKLSHFNFNLPKELLAEYPAENRDESRLMVINREKKTIEHKMFKDVIDYFGDGDVLVLNNTKVFPARLYGNKEKTGARIEVFLLRELNSEQRLWDVLVDPARKIRIGNKLYFGDDDSLVAEVIDNTTSRGRTLRFLYDGSYEEFRNKLTELGETPIPKYISREVTPEDAERYQTIYAKEEGAVAAPTAGLHFSKHLLKRLEIKGVNFAEVTLHVGLGTFNPVEVEDLSKHKMDSEELIITQQACDIVNDAKIKKKRICAVGTTSMRAIESSVSSAKTLNPFEGWTNKFIFPPHDFSVANCMITNFHTPKSTLLMMVSAFCGHDLMKKAYEEAIKEGYKFYSYGDAMLIL

SEQ ID NO: 66674 - protein, 349 aa, Flavobacterium omnivorum
  REGION 1..349: note = tr|A0A1G7Y0I3|A0A1G7Y0I3_9FLAO S-adenosylmethionine:tRNA ribosyltransferase-isomerase; OS = Flavobacterium omnivorum OX=178355 GN=queA PE=3 SV=1
MKLSHFQFDLPKELLAEYPAENRDEARLMVIDRKKGTIEHKMFKDVIDYFDEGDVLILNNTKVFPARLYGNKEKTGARIEVFLLRELNSEQRLWDVLVDPARKIRIGNKLYFGDDDSLVAEVIDNTTSRGRTLRFLYDGSYEEFRNKLTELGETPIPKYISRDVTPEDAERYQTIYAKEEGSVAAPTAGLHFSKHLLKKLEIKGIKFAEVTLHVGLGTFNPVEVEDLSKHKMDSEELKISQEACDIVNGAKAKKKRICTVGTTSMRAVESSVSSQNTLNPFDGWTNKFVFPPHDFAIPTCMITNFHTPKSTLLMMVSAFCGHDLMKKAYAEAIEEGYKFYSYGDAMLII

SEQ ID NO: 66675 - protein, 349 aa, Flavobacterium oncorhynchi
  REGION 1..349: note = tr|A0A226HZP6|A0A226HZP6_9FLAO S-adenosylmethionine:tRNA ribosyltransferase-isomerase; OS = Flavobacterium oncorhynchi OX=728056 GN=queA PE=3 SV=1
MKLSHFNFNLPKELLAEFPAENRDESRLMVIDRQKQTIEHKMFKDVINYFDDGDVLILNNTKVFPARLYGNKEKTGARIEVFLLRELNSEQRLWDVLVDPARKIRIGNKLYFGDDDSLVAEVIDNTTSRGRTLRFLYDGSYEEFRNKLTELGETPIPKYISREVTAEDAERYQTIYAKEEGAVAAPTAGLHFSKHLLKKLEIKGVNFAEVTLHVGLGTFNPVEVEDLSKHKMDSEELIIRQEACDIVNEAKAKKKRICAVGTTSMRAIESSVSSANTLNPYEGWTNKFIFPPHDFSIANCMITNFHTPKSTLLMMISAFCGHDLMKKAYDEAIKEGYKFYSYGDAMLIL

SEQ ID NO: 66676 - protein, 349 aa, unidentified
  source 1..349: note = Flavobacterium pallidum
  REGION 1..349: note = tr|A0A2S1SGJ0|A0A2S1SGJ0_9FLAO S-adenosylmethionine:tRNA ribosyltransferase-isomerase; OS = Flavobacterium pallidum OX=2172098 GN=queA PE=3 SV=1
MKLSHFNFNLPKELLAEYPAENRDESRLMVINRKEKTIEHKMFKDIIDYFDEGDVMILNNTKVFPARLYGNKEKTGARIEVFLLRELNAEQRLWDVLVDPARKIRIGNKLYFGDDDSLVAEVIDNTTSRGRTLRFLYDGSYEEFRNKLTELGETPIPKYINREVVPEDAERYQTIYAKEEGAVAAPTAGLHFSKHLLKRLEIKGINFAEVTLHVGLGTFNPVEVEDLSKHKMDSEELKITQEACDVVNEAKSQKKRVCAVGTTSMRAIESSVSSAKLLNPYDGWTNKFIFPPHDFSIADCMVTNFHTPKSTLLMMISAFTGHDLMKKAYEEAIKENYKFYSYGDAMLIL

SEQ ID NO: 66677 - protein, 349 aa, Flavobacterium pectinovorum
  REGION 1..349: note = tr|A0A1M7P356|A0A1M7P356_9FLAO S-adenosylmethionine:tRNA ribosyltransferase-isomerase; OS = Flavobacterium pectinovorum OX=29533 GN=queA PE=3 SV=1
MKLSHFQFNLPKELLAEFPAENRDESRLMVIDRQKQTIEHKMFKDVINYFDDGDVLILNNTKVFPARLYGNKEKTGARIEVFLLRELNSEQRLWDVLVDPARKIRIGNKLYFGDDDSLVAEVIDNTTSRGRTLRFLYDGSYEEFRNKLTELGETPIPKYINREVTAEDAERYQTIYAKEEGAVAAPTAGLHFSKHLLKKLEIKGVNFAEVTLHVGLGTFNPVEVEDLSKHKMDSEELIIKQEACDIVNAAKVAKKRICAVGTTSMRAIESSVSSQNTLNPYEGWTNKFIFPPHDFSIANCMITNFHTPKSTLLMMISAFCGHDLMKKAYEEAIKEGYKFYSYGDAMLIL

SEQ ID NO: 66678 - protein, 349 aa, Flavobacterium pectinovorum
  REGION 1..349: note = tr|A0A502EPE7|A0A502EPE7_9FLAO S-adenosylmethionine:tRNA ribosyltransferase-isomerase; OS = Flavobacterium pectinovorum OX=29533 GN=queA PE=3 SV=1
MKLSHFQFNLPKELLAEFPAENRDESRLMVIDRQKQTIEHKMFKDVINYFDDGDVLILNNTKVFPARLYGNKEKTGARIEVFLLRELNSEQRLWDVLVDPARKIRIGNKLYFGDDDSLVAEVIDNTTSRGRTLRFLYDGSYEEFRNKLTELGETPIPKYINREVTAEDAERYQTIYAKEEGAVAAPTAGLHFSKHLLKKLEIKGINFAEVTLHVGLGTFNPVEVEDLSKHKMDSEELIIKQEACDIVNAAKIAKKRICAVGTTSMRAIESSVSSQNTLNPFEGWTNKFIFPPHDFSIANCMITNFHTPKSTLLMMISAFCGHDLMKRAYEEAIKEGYKFYSYGDAMLII

SEQ ID NO: 66679 - protein, 349 aa, Flavobacterium phragmitis; identical to SEQ ID NO: 66639
  REGION 1..349: note = tr|A0A1I1S419|A0A1I1S419_9FLAO S-adenosylmethionine:tRNA ribosyltransferase-isomerase; OS = Flavobacterium phragmitis OX=739143 GN=queA PE=3 SV=1

SEQ ID NO: 66680 - protein, 349 aa, Flavobacterium psychrolimnae; identical to SEQ ID NO: 66665
  REGION 1..349: note = tr|A0A366AW19|A0A366AW19_9FLAO S-adenosylmethionine:tRNA ribosyltransferase-isomerase; OS = Flavobacterium psychrolimnae OX=249351 GN=queA PE=3 SV=1

SEQ ID NO: 66681 - protein, 349 aa, Flavobacterium psychrophilum
  REGION 1..349: note = sp|A6GW82|QUEA_FLAPJ S-adenosylmethionine:tRNA ribosyltransferase-isomerase OS=Flavobacterium psychrophilum (strain JIP02/86 / ATCC 49511) OX=402612; GN = queA PE=3 SV= 1
MKLSHFQFNLPDELLAEYPAENRDESRLMVVNRAKGTIEHKMFKDVLDYFDEGDVLVLNNTKVFPARLYGNKEKTGARIEVFLLRELNAEQRLWDVLVDPARKIRIGNKLYFGDDDSLVAEVIDNTTSRGRTLRFLYDGSYEEFRNKLTELGETPIPKYISREVTPEDAERYQTIYAKEEGAVAAPTAGLHFSKHLMKRLEIKGIQFAEVTLHVGLGTFNPVEVEDLSKHKMDSEELKITQEACDIVNAAKERKSRICAVGTTSMRAIESSVSSARTLNPYDGWTNKFIFPPHDFSLATCMITNFHTPKSTLMMMISAFCGHDLMKEAYAEAIKEKYKFYSYGDAMLII

SEQ ID NO: 66682 - protein, 349 aa, Flavobacterium psychrophilum; identical to SEQ ID NO: 66681
  REGION 1..349: note = tr|A0A076NYU2|A0A076NYU2_FLAPS S-adenosylmethionine:tRNA ribosyltransferase-isomerase; OS = Flavobacterium psychrophilum OX=96345 GN=queA PE=3 SV=1

SEQ ID NO: 66683 - protein, 349 aa, Flavobacterium reichenbachii
  REGION 1..349: note = tr|A0A085ZKK4|A0A085ZKK4_9FLAO S-adenosylmethionine:tRNA ribosyltransferase-isomerase; OS = Flavobacterium reichenbachii OX=362418 GN=queA PE=3 SV=1
MKLSHFNFNLPKELLAEFPAENRDESRLMVIDRQKQTIEHKMFKDVINYFDDGDVLILNNTKVFPARLYGNKEKTGARIEVFLLRELNSEQRLWDVLVDPARKIRIGNKLYFGDDDSLVAEVIDNTTSRGRTLRFLYDGSYEEFRNKLTELGETPIPKYINREVTAEDAERYQTIYAKEEGAVAAPTAGLHFSKHLLKKLEIKGVNFAEVTLHVGLGTFNPVEVEDLSKHKMDSEELIINQEACDIVNEAKAKKKRICAVGTTSMRAIESSVSSQNTLNPYEGWTNKFIFPPHDFSIANCMITNFHTPKSTLLMMISAFCGHDLMKKAYDEAIKEGYKFYSYGDAMLII

SEQ ID NO: 66684 - protein, 349 aa, Flavobacterium resistens
  REGION 1..349: note = tr|A0A521EFQ6|A0A521EFQ6_9FLAO S-adenosylmethionine:tRNA ribosyltransferase-isomerase; OS = Flavobacterium resistens OX=443612 GN=queA PE=3 SV=1
MKLSHFNFNLPKELLAEFPAENRDESRLMVIDRKKNTIEHKMFKDVINYFDDGDVLILNNTKVFPARLYGNKEKTGARIEVFLLRELNSEQRLWDVLVDPARKIRIGNKLYFGDDDSLVAEVIDNTTSRGRTLRFLYDGSYEEFRNKLTELGETPIPKYINREVTAEDAERYQTIYAKEEGAVAAPTAGLHFSKHLLKKLEIKGVNFAEVTLHVGLGTFNPVEVEDLSKHKMDSEELIITQQACDIVNEGKAKKKRICAVGTTSMRAIESSVSSANTLNPYEGWTNKFIFPPHDFSIANCMITNFHTPKSTLLMMISAFCGHDLMKKAYDEAIKEGYKFYSYGDAMLIL

SEQ ID NO: 66685 - protein, 349 aa, Flavobacterium rivuli
  REGION 1..349: note = tr|A0A0A2M668|A0A0A2M668_9FLAO S-adenosylmethionine:tRNA ribosyltransferase-isomerase; OS = Flavobacterium rivuli WB 3.3-2 = DSM 21788 OX=1121895; GN = queA PE=3 SV=1
MKLSNFNFNLPKELLAEYPSENRDESRLMVIDRKTKTIEHRQFKDVIDYFGEGDVMVLNNTKVFPARLYGNKEKTGARIEVFLLRELNSEQRLWDVLVDPARKIRIGNKLYFGDDDSLVAEVIDNTTSRGRTLRFLYDGSYEEFRNKLTELGETPIPKYINREVEPEDAERYQTIYAKEEGAVAAPTAGLHFSKHLLKRLEIKGVDFAEITLHVGLGTFNPVEVEDLSKHKMDSEELIITQKACDIVNNAKAKKGKICAVGTTSMRGMESSVSSQRTLNPYVGWTNKFIFPPYDFSVADCMITNFHTPKSTLLMMISAFMGHDLMKRAYEEAIAEGYKFYTYGDAMLIL

SEQ ID NO: 66686 - protein, 349 aa, Flavobacterium saccharophilum
  REGION 1..349: note = tr|A0A1M6YX32|A0A1M6YX32_9FLAO S-adenosylmethionine:tRNA ribosyltransferase-isomerase; OS = Flavobacterium saccharophilum OX=29534 GN=queA PE=3 SV=1
MKLSHFQFNLPKELLAEFPAENRDESRLMVIDRQKQTIEHKMFKDVINYFDDGDVLILNNTKVFPARLYGNKEKTGARIEVFLLRELNSEQRLWDVLVDPARKIRIGNKLYFGDDDSLVAEVIDNTTSRGRTLRFLYDGSYEEFRNKLTELGETPIPKYINREVTAEDAERYQTIYAKEEGAVAAPTAGLHFSKHLLKKLEIKGVNFAEVTLHVGLGTFNPVEVEDLSKHKMDSEELIIKQEACDIVNEAKAKKKRICAVGTTSMRAIESSVSSQNTLNPYEGWTNKFIFPPHDFSIANCMITNFHTPKSTLLMMISAFCGHDLMKKAYDEAIKEGYKFYSYGDAMLII

SEQ ID NO: 66687 - protein, 349 aa, Flavobacterium saliperosum
  REGION 1..349: note = tr|A0A1G4VV63|A0A1G4VV63_9FLAO S-adenosylmethionine:tRNA ribosyltransferase-isomerase; OS = Flavobacterium saliperosum OX=329186 GN=queA PE=3 SV=1
MKLSNFNFNLPAELLAEYPAENRDEARLMVVNRKTQTIEHKLFKDVLEYFGEGDVMVLNNTKVFPARLYGNKEKTGARIEVFLLRELNAEQRLWDVLVDPARKIRIGNKLYFGDDDSLVAEVIDNTTSRGRTLRFLYDGSYEEFRAKLLELGETPIPKYINREVTPEDAERYQTIYAKEEGAVAAPTAGLHFSKHLMKRLEIKGVEFAEVTLHVGLGTFNPVEVEDLSKHKMDSEELKISQEACDIVNKAKVNKKRVCAVGTTTMRAMESSVSSSRTLNAFEGWTNKFIFPPYDFSVADCMITNFHTPKSTLLMMISAFCGHDLMRKAYDEAIKEGYKFYSYGDAMLIL

SEQ ID NO: 66688 - protein, 349 aa, Flavobacterium segetis
  REGION 1..349: note = tr|A0A1M5FTA8|A0A1M5FTA8_9FLAO S-adenosylmethionine:tRNA ribosyltransferase-isomerase; OS = Flavobacterium segetis OX=271157 GN=queA PE=3 SV=1
MKLSHFQFDLPKELLAEYPAENRDEARLMVIDRKKQTIEHKMFKDVIDYFDEGDVLILNNTKVFPARLYGNKEKTGARIEVFLLRELNSEQRLWDVLVDPARKIRIGNKLYFGDDDSLVAEVIDNTTSRGRTLRFLYDGSYEEFRNKLTELGETPIPKYISRDVTPEDAERYQTIYAKEEGSVAAPTAGLHFSKHLLKKLEIKGINFAEVTLHVGLGTFNPVEVEDLSKHKMDSEELKITQEACDIVNNAKAKKKRICTVGTTSMRAVESSVSSQNTLNPFDGWTNKFVFPPHDFTIPTCMITNFHTPKSTLLMMVSAFCGHDLMKRAYAEAIEEKYKFYSYGDAMLII

SEQ ID NO: 66689 - protein, 349 aa, unidentified
  source 1..349: note = Flavobacterium seoulense
  REGION 1..349: note = tr|A0A066WUC1|A0A066WUC1_9FLAO S-adenosylmethionine:tRNA ribosyltransferase-isomerase; OS = Flavobacterium seoulense OX=1492738 GN=queA PE=3 SV=1
MKLSHFNFDLPKELLAEFPAENRDEARLMVIDRKKQTIEHKMFKDVIDYFDDGDVMILNNTKVFPARLYGNKEKTGARIEVFLLRELNAEQRLWDVLVDPARKIRIGNKLYFGDDDSLVAEVIDNTTSRGRTLRFLYDGSYEEFRNKLTELGETPIPKYINREVTPEDAERYQTIYAKEEGAVAAPTAGLHFSKHLLKRLEIKGVNFAEVTLHVGLGTFNPVEVEDLSKHKMDSEELKITQEACDIVNEAKGKRKRVCAVGTTSMRAIESSVSSQNTLNPYEGWTNKFIFPPHDFSVATCMITNFHTPKSTLLMMISAFCGHDLMKKAYEEAIKEKYKFYSYGDAMLIL

SEQ ID NO: 66690 - protein, 349 aa, Flavobacterium sinopsychrotolerans; identical to SEQ ID NO: 66665
  REGION 1..349: note = tr|A0A1H8QS82|A0A1H8QS82_9FLAO S-adenosylmethionine:tRNA ribosyltransferase-isomerase; OS = Flavobacterium sinopsychrotolerans OX=604089 GN=queA; PE = 3 SV=1

SEQ ID NO: 66691 - protein, 349 aa, Flavobacterium sp.
  REGION 1..349: note = tr|A0A2N0HEA3|A0A2N0HEA3_9FLAO S-adenosylmethionine:tRNA ribosyltransferase-isomerase; OS = Flavobacterium sp. 5 OX=2035199 GN=queA PE=3 SV=1
MKLSHFQFNLPKELLAEYPAENRDESRLMVVDRKNQTITHKMFKDVIDYFDDGDVLILNNTKVFPARLYGNKEKTGARIEVFLLRELNAEQRLWDVLVDPARKIRIGNKLYFGDDDSLVAEVIDNTTSRGRTLRFLYDGSYEEFRNKLTELGETPIPKYINREVTPEDAERYQTIYAKEEGAVAAPTAGLHFSKHLLKRLEIKGIKFAEVTLHVGLGTFNPVEVEDLSKHKMDSEELKITQEACDIVNTAKAAKKRICTVGTTSMRAVESSVSSQNTLNPYDGWTNKFVFPPHDFSIPTCMITNFHTPKSTLLMMVSAFCGHDLMKRAYEEAIKEEYKFYSYGDAMLII

SEQ ID NO: 66692 - protein, 349 aa, Flavobacterium sp.
  REGION 1..349: note = tr|A0A0J0YD04|A0A0J0YD04_9FLAO S-adenosylmethionine:tRNA ribosyltransferase-isomerase; OS = Flavobacterium sp. ABG OX=1423322 GN=queA PE=3 SV=1
MKLSHFQFNLPKELLAEFPAENRDESRLMVIDRQKQTIEHKMFKDVINYFDDGDVLILNNTKVFPARLYGNKEKTGARIEVFLLRELNSEQRLWDVLVDPARKIRIGNKLYFGDDDSLVAEVIDNTTSRGRTLRFLYDGSYEEFRNKLTELGETPIPKYINREVTAEDAERYQTIYAKEEGAVAAPTAGLHFSKHLLKKLEIKGINFAEVTLHVGLGTFNPVEVEDLSKHKMDSEELIINQEACDIVNAAKANRKRICAVGTTSMRAIESSVSSQNTLNPYEGWTNKFIFPPHDFSIANCMITNFHTPKSTLLMMISAFCGHDLMKRAYEEAIKEEYKFYSYGDAMLII

SEQ ID NO: 66693 - protein, 349 aa, unidentified
  source 1..349: note = Flavobacterium spartansii
  REGION 1..349: note = tr|A0A1S1J8D4|A0A1S1J8D4_9FLAO S-adenosylmethionine:tRNA ribosyltransferase-isomerase; OS = Flavobacterium spartansii OX=1278819 GN=queA PE=3 SV=1
MKLSHFQFNLPKELLAEFPAENRDESRLMVIDRQKQTIEHKMFKDVINYFDDGDVLILNNTKVFPARLYGNKEKTGARIEVFLLRELNSEQRLWDVLVDPARKIRIGNKLYFGDDDSLVAEVIDNTTSRGRTLRFLYDGSYEEFRNKLTELGETPIPKYINREVTAEDAERYQTIYAKEEGAVAAPTAGLHFSKHLLKKLEIKGVNFAEVTLHVGLGTFNPVEVEDLSKHKMDSEELIIRQEACDIVNAAKTGRKRICAVGTTSMRAIESSVSSQNTLNPYEGWTNKFIFPPHDFSIANCMITNFHTPKSTLLMMISAFCGHDLMKRAYEEAIKEEYKFYSYGDAMLIL

SEQ ID NO: 66694 - protein, 349 aa, Flavobacterium subsaxonicum
  REGION 1..349: note = tr|A0A0A2MNI1|A0A0A2MNI1_9FLAO S-adenosylmethionine:tRNA ribosyltransferase-isomerase; OS = Flavobacterium subsaxonicum WB 4.1-42 = DSM 21790; OX = 1121898 GN=queA PE=3 SV =1
MKLSNFNFNLPKELLAEHPTENRDESKLMVINRKTKTIEHRLFKDVIEYFEEGDVMVLNNTKVFPARLYGNKEKTGARIEVFLLRELNSEQRLWDVLVDPARKIRIGNKLYFGDDDSLVAEVIDNTTSRGRTLRFLYDGSYEEFRNKLTELGETPIPKYINREVEPEDAERYQTIYAKEEGAVAAPTAGLHFSKHLLKRLEIKGIDFAEITLHVGLGTFNPVEVEDLSKHKMDSEELIISQEACDIVNKAKVNKHKICAVGTTSMRAMESSVSSARTLNPYVGWTNKFIFPPYDFSVADCMITNFHTPKSTLLMMISAFMGHDLMRKAYDEAIKEGYRFYTYGDAMLIL

SEQ ID NO: 66695 - protein, 349 aa, Flavobacterium succinicans
  REGION 1..349: note = tr|A0A1I4VJL5|A0A1I4VJL5_9FLAO S-adenosylmethionine:tRNA ribosyltransferase-isomerase; OS = Flavobacterium succinicans OX=29536 GN=queA PE=3 SV=1
MKLSHFNFNLPKELLAEYPAENRDESRLMVIDRKKQTIEHKMFKDVIDYFDDGDVMILNNTKVFPARLYGNKEKTGARIEVFLLRELNAEQRLWDVLVDPARKIRIGNKLYFGDDDSLVAEVIDNTTSRGRTLRFLYDGSYEEFRNKLTELGETPIPKYINREVNEDDAERYQTIYAKEEGAVAAPTAGLHFSKHLLKRLEIKGVKFAEVTLHVGLGTFNPVEVEDLSKHKMDSEELKITQEACDIVNEGKEKKKRICAVGTTSMRAVESAVSSQSTLNPFDGWTNKFIFPPHDFSIATCMITNFHTPKSTLLMMISAFCGHDLMKRAYEEAIKEEYKFYSYGDAMLII

SEQ ID NO: 66696 - protein, 349 aa, Flavobacterium succinicans
  REGION 1..349: note = tr|A0A199XV33|A0A199XV33_9FLAO S-adenosylmethionine:tRNA ribosyltransferase-isomerase; OS = Flavobacterium succinicans OX=29536 GN=queA PE=3 SV=1
MKLSHFNFNLPKELLAEFPAENRDESRLMVIDRKKQTIEHKMFKDVIDYFDDGDVLILNNTKVFPARLYGNKEKTGARIEVFLLRELNAEQRLWDVLVDPARKIRIGNKLYFGDDDSLVAEVIDNTTSRGRTLRFLYDGSYEEFRNKLTELGETPIPKYINREVTPEDADRYQTIYAKEEGAVAAPTAGLHFSKHLLKRLEIKGVKFAEVTLHVGLGTFNPVEVEDLSKHKMDSEELKITQEACDIVNDAKARKKRICTVGTTSMRAVESSVSSQNTLNPFDGWTNKFIFPPHDFSIATCMITNFHTPKSTLLMMISAFCGHDLMRKAYDEAIKEGYKFYSYGDAMLIL

SEQ ID NO: 66697 - protein, 349 aa, Flavobacterium suncheonense
  REGION 1..349: note = tr|A0A0A2MA21|A0A0A2MA21_9FLAO S-adenosylmethionine:tRNA ribosyltransferase-isomerase; OS = Flavobacterium suncheonense GH29-5 = DSM 17707; OX = 1121899 GN=queA PE=3 SV=1
MKLSNFNFNLPAELLAEFPAENRDEARLMVVNRKTQTIEHKLFKDILDYFDEGDVMVLNNTKVFPARLYGNKEKTGARIEVFLLRELNAEQRLWDVLVDPARKIRIGNKLYFGDDDSLVAEVIDNTTSRGRTLRFLYDGSYEEFRAKLLELGETPIPKYINREVTPEDAERYQTIYAKEEGAVAAPTAGLHFSKHLMKRLEIKGVEFAEVTLHVGLGTFNPVEVEDLSKHKMDSEEMIISQEACDVVNKAKLNKKRVCAIGTTTMRAMESSVSSSKTLNPFTGWTNKFIYPPYDFSVADCMVTNFHTPKSTLLMMISAFCGHDLMRKAYDEAIKEGYKFYSYGDAMLIL

SEQ ID NO: 66698 - protein, 349 aa, Flavobacterium swingsii
  REGION 1..349: note = tr|A0A1I0XTD7|A0A1I0XTD7_9FLAO S-adenosylmethionine:tRNA ribosyltransferase-isomerase; OS = Flavobacterium swingsii OX=498292 GN=queA PE=3 SV=1
MKLSHFQFNLPAELLAEYPAENRDESRLMVVDRQKGTIEHKMFKDVLEYFDEGDVLVLNNTKVFPARLYGNKEKTGARIEVFLLRELNAEQRLWDVLVDPARKIRIGNKLYFGDDDSLVAEVIDNTTSRGRTLRFLYDGSYEEFRAKLTELGETPIPKYISREVTPEDAERYQTIYAKEEGAVAAPTAGLHFSKHLLKRLEIKGVQFAEVTLHVGLGTFNPVEVEDLSKHKMDSEELKITQEACDIVNAAKVRKSRICAVGTTSMRAIESSVSSARTLNPYDGWTNKFIFPPHDFSLATCMITNFHTPKSTLMMMISAFCGHDLMKEAYAEAIKEKYKFYSYGDAMLII

SEQ ID NO: 66699 - protein, 349 aa, Flavobacterium terrae
  REGION 1..349: note = tr|A0A1M6BR83|A0A1M6BR83_9FLAO S-adenosylmethionine:tRNA ribosyltransferase-isomerase; OS = Flavobacterium terrae OX=415425 GN=queA PE=3 SV=1
MKLSNFNFNLPAELLAEYPAENRDESRLMVVNRKTGEIEHRLFKDIIEYFDEGDVMVVNNTKVFPARLYGNKEKTGARIEVFLLRELNAEQRLWDVLVDPARKIRIGNKLYFGDDDSLVAEVIDNTTSRGRTLRFLYDGSYEEFRQKLVDLGETPIPKYINREVNEDDAERYQTIYAKEEGAVAAPTAGLHFSKHLMKRLEIKGVDFAEVTLHVGLGTFNPVEVEDLSKHKMDSEELKITQEACDVVNKAKVSKKKVCAIGTTSMRAMESSVSSNKTLNPYEGWTNKFIFPPYDFSVADCMVTNFHTPKSTLLMMISAFCGHDLMMKAYKEAIEQKYRFYSYGDAMLIL

SEQ ID NO: 66700 - protein, 349 aa, Flavobacterium terrigena
  REGION 1..349: note = tr|A0A1H6WNM3|A0A1H6WNM3_9FLAO S-adenosylmethionine:tRNA ribosyltransferase-isomerase; OS = Flavobacterium terrigena OX=402734 GN=queA PE=3 SV=1
MKLSHFQFNLPEELLAEFPSENRDESRLMVVHRKTGEIEHKMFKDIIDYFDDGDVMVLNNTKVFPARLYGNKEKTGARIEVFLLRELNAEQRLWDVLVDPARKIRIGNKLYFGDDDSLVAEVIDNTTSRGRTLRFLYDGSYEEFREKLIELGETPIPKFINREVTPEDAERYQTIYAKEEGAVAAPTAGLHFSKHLMKRLEIKGINFAEVTLHVGLGTFNPVEVEDLSKHKMDSEEMVVTQEACDIINGARAKKRKVCCIGTTSMRAMESTVSSMRTLNPYTGWTNKFIYPPYDFSLADAMVSNFHTPKSTLLMMVSAFCGHDLMKKAYDIAIKEKYNFYSYGDAMLIL

SEQ ID NO: 66701 - protein, 349 aa, unidentified
  source 1..349: note = Flavobacterium tibetense
  REGION 1..349: note = tr|A0A365P294|A0A365P294_9FLAO S-adenosylmethionine:tRNA ribosyltransferase-isomerase; OS = Flavobacterium tibetense OX=2233533 GN=queA PE=3 SV=1
MKLSHFQFNLPEELLAEFPAENRDESRLMVIHRKTGLIEHKLFKDVLEYFNEGDVMVLNNTKVFPARLYGNKEKTGARIEVFLLRELNAEQRLWDVLVDPARKIRIGNKLYFGDDDSLVAEVIDNTTSRGRTLRFLYDGSYEEFRIKLTELGETPIPKYINREVTPEDAERYQTIYAKEEGAVAAPTAGLHFSKHLLKRLEIKGVDFAEVTLHVGLGTFNPVEVEDLSKHKMDSEEMIITQEACDIVNKAKVKKNKVCCVGTTSMRAMESSVSSQRTLNPYTGWTNKFIYPPYDFSIADAMITNFHTPKSTLLMMISAFCGHDLMKKAYAEAIEQKYKFYSYGDAMLIL

SEQ ID NO: 66702 - protein, 349 aa, unidentified
  source 1..349: note = Flavobacterium ummariense
  REGION 1..349: note = tr|A0A1I5AJA7|A0A1I5AJA7_9FLAO S-adenosylmethionine:tRNA ribosyltransferase-isomerase; OS = Flavobacterium ummariense OX=913024 GN=queA PE=3 SV=1
MKLSNFNFNLPNELLAEFPAENRDESRLMVVNRKTGTIEHKFFKDLIDYFDEGDVMVLNNTKVFPARLYGNKEKTGARIEVFLLRELNSEQRLWDVLVDPARKIRIGNKLYFGDDDSLVAEVIDNTTSRGRTLRFLYDGSYEEFRLKLRELGETPIPKYINRDVTPEDEDRYQTIYATEEGAVAAPTAGLHFSKHLLKRLEIKGVDFAKITLHIGLGTFNPVEVEDLSKHKMDSEELIITQEACDVVNKAKANKNKICAVGTTSMRALESSVSSNHTLNPYEGWTNKFIFPPYDFSIADCMITNFHMPKSTLLMMISAFTGHDLMMKAYDEAVKEGYKFYSYGDAMLIL

SEQ ID NO: 66703 - protein, 349 aa, unidentified
  source 1..349: note = Flavobacterium urocaniciphilum
  REGION 1..349: note = tr|A0A1H9C3C8|A0A1H9C3C8_9FLAO S-adenosylmethionine:tRNA ribosyltransferase-isomerase; OS = Flavobacterium urocaniciphilum OX=1299341 GN=queA PE=3; SV = 1
MKLSHFNFNLPEELLAEFPAENRDESRLMVVNRKTGEIEHKMFKDIIDYFDDGDVMVLNNTKVFPARLYGNKEKTGARIEVFLLRELNAEQRLWDVLVDPARKIRIGNKLYFGDDDSLVAEVIDNTTSRGRTLRFLYDGSYEEFREKLVELGETPIPKYINREVTPEDADRYQTIYAKEEGAVAAPTAGLHFSKHLMKRLEIKGINFAEVTLHVGLGTFNPVEVEDLSKHKMDSEEMIITQEACDIINAAKARKNKVCCVGTTSMRAMESSVSSMKTLNPYVGWTNKFIYPPYDFSLADCMITNFHTPKSTLLMMISAFCGHDLMRKAYDEALKEKYRFYSYGDAMLII

SEQ ID NO: 66704 - protein, 349 aa, Flavobacterium urumqiense
  REGION 1..349: note = tr|A0A1H5RUD9|A0A1H5RUD9_9FLAO S-adenosylmethionine:tRNA ribosyltransferase-isomerase; OS = Flavobacterium urumqiense OX=935224 GN=queA PE=3 SV=1
MKLSHFQFDLPKELLAEYPAENRDEARLMVIDRKKGTIEHKMFKDVIDYFDDGDVLILNNTKVFPARLYGNKEKTGARIEVFLLRELNSEQRLWDVLVDPARKIRIGNKLYFGDDDSLVAEVIDNTTSRGRTLRFLYDGSYEEFRNKLTELGETPIPKYISRDVTPEDAERYQTIYAKEEGAVAAPTAGLHFSKNLLKKLEIKGIKFAEVTLHVGLGTFNPVEVEDLSKHKMDSEELKITQEACDIVNDAKVKKKRICAVGTTSMRAAESAVSSQRTLNPFDGWTNKFVFPPHDFSIATCMITNFHTPKSTLLMMVSAFCGHDLMKKAYAEAIKEGYKFYSYGDAMLII

SEQ ID NO: 66705 - protein, 349 aa, Flavobacterium weaverense
  REGION 1..349: note = tr|A0A3M0ADZ9|A0A3M0ADZ9_9FLAO S-adenosylmethionine:tRNA ribosyltransferase-isomerase; OS = Flavobacterium weaverense OX=271156 GN=queA PE=3 SV=1
MKLSHFQFDLPKELLAEYPAENRDEARLMVIDRKKQTIEHKMFKDVIDYFDEGDVLILNNTKVFPARLYGNKEKTGARIEVFLLRELNSEQRLWDVLVDPARKIRIGNKLYFGDDDSLVAEVIDNTTSRGRTLRFLYDGSYEEFRNKLTELGETPIPKYISRDVTPEDAERYQTIYAKEEGAVAAPTAGLHFSKHLLKKLEIKGIKFAEVTLHVGLGTFNPVEVEDLSKHKMDSEELKITQEACDIVNDAKAKKKRICTVGTTSMRAVESSVSSHETLNPFDGWTNKFVFPPHEFTIPTCMITNFHTPKSTLLMMVSAFCGHDLMKKAYADAIEKEYKFYSYGDAMLII

SEQ ID NO: 66706 - protein, 349 aa, Flavobacterium xanthum; identical to SEQ ID NO: 66674
  REGION 1..349: note = tr|A0A1M7H482|A0A1M7H482_9FLAO S-adenosylmethionine:tRNA ribosyltransferase-isomerase; OS = Flavobacterium xanthum OX=69322 GN=queA PE=3 SV=1

SEQ ID NO: 66707 - protein, 349 aa, Flavobacterium xinjiangense
  REGION 1..349: note = tr|A0A1M7G2E8|A0A1M7G2E8_9FLAO S-adenosylmethionine:tRNA ribosyltransferase-isomerase; OS = Flavobacterium xinjiangense OX=178356 GN=queA PE=3 SV=1
MKLSHFQFDLPKELLAEFPAENRDEARLMVIDRKKGTIEHKMFKDVIDYFDDGDVLILNNTKVFPARLYGNKEKTGARIEVFLLRELNSEQRLWDVLVDPARKIRIGNKLYFGDDDSLVAEVIDNTTSRGRTLRFLYDGSYEEFRNKLTELGETPIPKYISRDVTPEDAERYQTIYAKEEGAVAAPTAGLHFSKNLLKKLEIKGIKFAEVTLHVGLGTFNPVEVEDLSKHKMDSEELKITQEACDIVNDAKVKKKRICAVGTTSMRAVESAVSSQRTLNPFDGWTNKFVFPPHDFSIATCMITNFHTPKSTLLMMVSAFCGHDLMKKAYAEAIKEGYKFYSYGDAMLII

SEQ ID NO: 66708 - protein, 349 aa, Flavobacterium xueshanense
  REGION 1..349: note = tr|A0A1I2E0D8|A0A1I2E0D8_9FLAO S-adenosylmethionine:tRNA ribosyltransferase-isomerase; OS = Flavobacterium xueshanense OX=935223 GN=queA PE=3 SV=1
MKLSHFQFDLPKELLAEYPAENRDEARLMVIDRKKGTIEHKMFKDVIDYFDEGDVLILNNTKVFPARLYGNKEKTGARIEVFLLRELNSEQRLWDVLVDPARKIRIGNKLYFGDDDSLVAEVIDNTTSRGRTLRFLYDGSYEEFRNKLTELGETPIPKYISRDVTPEDAERYQTIYAKEEGSVAAPTAGLHFSKHLLKKLEIKGIKFAEVTLHVGLGTFNPVEVEDLSKHKMDSEELKITQEACDIVNEAKAKKKRICTVGTTSMRAVESSVSSHNTMNPFDGWTNKFVFPPHEFTIPTCMITNFHTPKSTLLMMVSAFCGHDLMKKAYAEAIEEGYKFYSYGDAMLII

SEQ ID NO: 66709 - protein, 301 aa, Flavonifractor plautii
  REGION 1..301: note = tr|A0A096DEP6|A0A096DEP6_FLAPL S-adenosylmethionine:tRNA ribosyltransferase-isomerase; OS = Flavonifractor plautii 1_3_50AFAA OX=742738 GN=queA; PE = 3 SV=1
MHFFDLPTLLRPGDCLVLNDSRVLPARLLGHREPTGGAVEVLLLIDRGDKVWECLVRPGRKLKPGTRLSFGDGSLKAEVVEVCEGGNRLVRFEYEGIFLETLERLGKMPLPPYIKAELNDPERYQTVYSRAVGSAAAPTAGLHFTRALLEQVQEMGVKVCYVTLHVGLGTFRPVKEEEITDHEMHSEYCMISAETAETINRTKREGGRVICVGTTSCRTIESWAAEDGTLKECAGWTNIFIYPGYRFKALDCLITNFHLPESTLIMLVSALAGREHVLAAYKEAVEQRYRFFSFGDAMFIG

SEQ ID NO: 66710 - protein, 312 aa, Flavonifractor plautii
  REGION 1..312: note = tr|G9YNH4|G9YNH4_FLAPL S-adenosylmethionine:tRNA ribosyltransferase-isomerase OS=Flavonifractor plautii ATCC 29863 OX=411475 GN=queA PE=3 SV=1
MLDKETGATRHMHFFDLPTLLRPGDCLVLNDSRVLPARLLGHREPTGGAVEVLLLIDRGDKVWECLVRPGRKLKPGTRLSFGDGSLKAEVVEVCEGGNRLVRFEYEGIFLETLERLGKMPLPPYIKAELNDPERYQTVYSRAVGSAAAPTAGLHFTRALLEQVQEMGVKVCYVTLHVGLGTFRPVKEEEITDHEMHSEYCMISAETAETINRTKREGGRVICVGTTSCRTIESWAAEDGTLKECAGWTNIFIYPGYRFKALDCLITNFHLPESTLIMLVSALAGREHVLAAYKEAVEQRYRFFSFGDAMFIG

SEQ ID NO: 66711 - protein, 341 aa, Flavonifractor sp.
  REGION 1..341: note = tr|A0A1Y3XMI2|A0A1Y3XMI2_9FIRM S-adenosylmethionine:tRNA ribosyltransferase-isomerase; OS = Flavonifractor sp. An52 OX=1965642 GN=queA PE=3 SV=1
MKTSDFDFYLPEELIAQTPLEKRDSSRLLVLDKHTGETKHMHFFDLPTLLRPGDCLVLNDSRVLPARLIGHRDPGGGAVEVLLLIDRGNKTWECLVRPGRKMRPGTKVSFGEGQLTAEVTEVLEGGNRLVRFDYEGIFLEKLEQLGKMPLPPYIKAELQDPERYQTVYSREVGSAAAPTAGLHFTKELLKQVEDMGVRLAYVTLHVGLGTFRPVKEEDILDHEMHSEYCMISAETAETINRTRAEGGRVICVGTTSCRTIESWAAEDGTLKESAGWTNIFIYPGYKFKALDCLITNFHLPESTLIMLVSALAGREHILAAYKEAVEQKYRFFSFGDAMFIC

SEQ ID NO: 66712 - protein, 341 aa, Flavonifractor sp.
  REGION 1..341: note = tr|A0A1Y4WEW6|A0A1Y4WEW6_9FIRM S-adenosylmethionine:tRNA ribosyltransferase-isomerase; OS = Flavonifractor sp. An10 OX=1965537 GN=queA PE=3 SV=1
MKTADFDFYLPEELIAQTPLERRDASRLMVLDKETGATRHLHFYDLPTLLRPGDCLVLNDSRVLPARLIGHREPGGGAVEVLLLIDRGNKTWECLVRPGRKLKPGARVSFGNGELKAEVVEVCEGGNRLVRFEYEGIFLETLERLGKMPLPPYIKAELQDPERYQTVYSREAGSAAAPTAGLHFTPELLEQVRAMGVKTCFVTLHVGLGTFRPVKEEEITDHDMHSEYCMISAETAETINQTKREGGRVICVGTTSCRTIESWAAEDGTLKESAGWTKIFIYPGYRFKVLDGLITNFHLPESTLIMLVSALAGREHVLAAYNEAVEQKYRFFSFGDAMFIS

SEQ ID NO: 66713 - protein, 408 aa, Flectobacillus sp.
  REGION 1..408: note = tr|A0A267T276|A0A267T276_9BACT S-adenosylmethionine:tRNA ribosyltransferase-isomerase; OS = Flectobacillus sp. BAB-3569 OX=1509483 GN=queA PE=3 SV=1
MNELSITDIKLSDYTYELPDERIAKFPLSERDQSKLQVYHQGEITHTQFYQIADYLPEGSLLVFNNTKVIPARIHFQKPTGATIQIFLLHPIAPTAVINLAMEVSDSCIWECMIGNKKRFKKNDILQRTLLVNGNEVVVSAKLADEEQNHVELSWQNLSNDTPILFVDLIQSLGEIPLPPYLNRETESSDYETYQTVYSEKKGAVAAPTAGLHFTERVLQKLQQAGFKQDFLTLHVGAGTFQPIKVENIVEHRMHNEQIVFSRKNLQTLVQHEGPIIPVGTTSMRALESLYWFGVKLGKGDSDFLIEKLYPYHHTETLPSRQESFVTILNFMESNDIEELTGETEIFIFPGYQFKVCRGIITNYHQPESTLVLLIAALIGEDWRKVYQEAMEKDYRFLSYGDSSLLLP

SEQ ID NO: 66714 - protein, 350 aa, Flectobacillus sp.
  REGION 1..350: note = tr|A0A267T556|A0A267T556_9BACT S-adenosylmethionine:tRNA ribosyltransferase-isomerase; OS = Flectobacillus sp. BAB-3569 OX=1509483 GN=queA PE=3 SV=1
MKLSEFRFDLPQSLIALYPSENRGESRLMVVNRKTKQIEHKMFSDIINYFEDGDVMVTNNTKVFPARLFGQKEKTGAKIEVFLLRELNREHRLWDVLVDPARKIRVGNKLYFGDSDLVAEVIDNTTSRGRTIRFLYDGDHDALMKAIHELGETPLPDEIRFKRKVETSDEERYQTIYAEHVGAVAAPTAGLHFNKIIMKRMELKGVAFTPLTLHVGLGTFRQVDVEDLTKHKTDSENFFIPEDTCKLVNDGIDTNKRICAIGTTALKALESSVSADGHLKPIEGWTDKFIFPPYDFRIPNALLTNFHLPESILIMMTSAFGGYELIKEAYEIAIKEKYKFFSYGDAMLII

SEQ ID NO: 66715 - protein, 402 aa, Flexibacter flexilis
  REGION 1..402: note = tr|A0A1I1JSJ7|A0A1I1JSJ7_9BACT S-adenosylmethionine:tRNA ribosyltransferase-isomerase; OS = Flexibacter flexilis DSM 6793 OX=927664 GN=queA PE=3; SV = 1
MLDPIRKEDFLYTLPDEKIARFPLPQRDTAKLLVYRQGQIQHSQFRHLGEFLPPDSFLFFNNTKVIAARMAFQRDTGAHVEIFLLNPTEPTPVVALAMQQTGFCVWHCMIGNKKRLKTNEILTKNIQTETGQSLQLRAQLIDLENMLVRFEWSPADISFAQVVEQAGQMPLPPYLKRSEEAADKLRYQTVYAQNEGAVAAPTAGLHFTPAVFEDLQQRGMAHDYVTLHVSAGTFRPLQADNVLEHEMHAEQLIFSVKNLENLLANERIIAVGTTSMRALESLYWFGVKLLKTNDKDFRIDQYLPYQFEAASLPTRAQSLTAVLDFMKENNLEELGGQTQIYIVPSYEFKICKGIVTNYHQPESTLILLVAAFVGENWRKIYDEALNNDYRFLSFGDSSLLLP

SEQ ID NO: 66716 - protein, 348 aa, Flexibacter flexilis
  REGION 1..348: note = tr|A0A1I1DLJ7|A0A1I1DLJ7_9BACT S-adenosylmethionine:tRNA ribosyltransferase-isomerase; OS = Flexibacter flexilis DSM 6793 OX=927664 GN=queA PE=3; SV = 1
MKLSEFKFNLPSDLIALYPNENRDEARMLVLHRQTGKIEHKVFKDIIEYFNEGDVMVLNDTKVFPARLYGNKEKTGAKIEVSLLRELNKEYHLWDVIVDPARKIRVGNKLYFGDSDLVAEVIDNTTSRGRTIRFLYDGSDDEFYKTLDALGETPLPPQIRRKVEAADRDRYQTIYAQHTGAVAAPSAGMHFTRQVMKRLELKGVDITPITLHVGLGTFKKVEVEDLTKHKPESENFKVPEVTADKVNASLDVKKRVCAVGTTTLRALESSVSANARLKPNEGWTDRFIFPPYDFKIANALITNFHMPESTLLMMACAFGGYDKVMNAYQEAIKEKYRFFSYGDAMLII

SEQ ID NO: 66717 - protein, 359 aa, Flexibacter sp.
  REGION 1..359: note = tr|A0A2M7NHA0|A0A2M7NHA0_9BACT S-adenosylmethionine:tRNA ribosyltransferase-isomerase; OS = Flexibacter sp. CG_4_10_14_3_um_filter_32_15 OX=1975530; GN = queA PE=3 SV=1
MKAPGYKSTKRYKLSSFKFDLPQELTAQYPTDNRDDSRLMVVHRDTGVIEHKMFKDVLDYFGEGDKMIVNDTMVFPARLYGYKEKTNAKIEVFLLRELNPTSHLWDVLVDPARKIRVGNKLFFGEGELVAEVIDNTTSRGRTIRFLYDGEPEEFYKTLEELGETPLPREIGREAEESDKERYQTIFATQKGAVAAPTAGLHFTPQLQKRLQLQGTSFHPITLHLGLGMFRQVEVEDLTKHKMDSENFDVGEETVKAVNEAIDAKKKICAVGTTSLRALESSVSANDHLKPNGGWTDKFIFPPYEFKICNALISNFHYPQSTLLMMNCAFGGYDLVMEAYELAIKEKYRFFSYGDAMLII

SEQ ID NO: 66718 - protein, 343 aa, unidentified
  source 1..343: note = Flexilinea flocculi
  REGION 1..343: note = tr|A0A0S7BQE2|A0A0S7BQE2_9CHLR S-adenosylmethionine:tRNA ribosyltransferase-isomerase; OS = Flexilinea flocculi OX=1678840 GN=queA PE=3 SV=1
MKTTDFDYELPLERIAQTPLEPRDSSRLFVYDRKTGKIDHSHFYNLSDFLYPGDLLVLNQTRVLPARIYARKDGTGGLVEVLLLRRLGEQNWEALVGGKKVTQGKKLILSDEIQAEIVECYEGSRRLIHFSGSIDDFMKKNGQMPLPPYIHSRLDNPERYQTVYAHETGSAAAPTAGLHFTESLIEKIQEKGVRFTYVTLHVGLDTFQPVTEDDPEQHKIHQEWCELSPETAELIVQTKKAGHRVIAVGTTSARTLESAALAAKNAGSDACVIPISGDTGIYILPGYQFKAVDAMITNFHLPKSTLIMMVSAFAGRETILSLYRQAIDLQYRFFSFGDAMFLQ

SEQ ID NO: 66719 - protein, 106 aa, Flexistipes sinusarabici
  REGION 1..106: note = tr|A0A5D0MY44|A0A5D0MY44_FLESI S-adenosylmethionine:tRNA ribosyltransferase-isomerase (Fragment) OS=Flexistipes sinusarabici OX=2352; GN = FXF49_00410 PE=3 SV=1
YERINRLKKEGKNLIAVGTTTLRALESASHNGQLIKYGELSTNIFIKPGYSFKIIDKMITNFHLPKSTLFILMCALCGSDKMKFVYKHAVNENYRFFSYGDAMFIK

SEQ ID NO: 66720 - protein, 274 aa, Flexistipes sinusarabici
  REGION 1..274: note = tr|A0A5D0MPZ8|A0A5D0MPZ8_FLESI S-adenosylmethionine:tRNA ribosyltransferase-isomerase (Fragment) OS=Flexistipes sinusarabici OX=2352 GN=queA; PE = 3 SV=1
MKTPVDKFDFHLPENNIAQYPPDKRDESRLLIYDRESGEIKDSIFKDILSEITEKDFLVINNTKVLKARLFGRKETGGKIEILVLNIISPEECESITKGNIKKGDKIFLENSSAEILDTDTSGRRRILFSDNIYRIMEKEGHVPLPPYVKREDEKIDEKRYQTVYSSNPGSIAAPTAGLHFTDELMKKIKQKGVEVLEITLNVGIGTFRPIKTKYIEDHQMHEEYFHIPQNTYERINRLKKEGKNLIAVGTTTLRALESASHNGQLIKYGELST

SEQ ID NO: 66721 - protein, 351 aa, Flexivirga sp.
  REGION 1..351: note = tr|A0A3M9M1Q2|A0A3M9M1Q2_9MICO S-adenosylmethionine:tRNA ribosyltransferase-isomerase; OS = Flexivirga sp. BO-16 OX=2294115 GN=EFY87_16795 PE=3 SV=1
MTTLAVQPRTEFVRPAEQTAPAPAEHRGLPRDGVRMLVGTRDGIEHVTFDRLPDQLNAGDLVVVNNSATMPWQVDARLDGAGEVVLHAATPLDDGSWVVELRSAPDASRAILDARVGDHLEVGALVVTLRAAYPFASSPTGYGNRLWRAGVDADLGAYLARAGRPISYGYLDHRYPLSDYQSVFATVPGSAEMPSAGRPFTPEVVTRLVAAGIGLAPVTLHTGVSSQEAGEGPQAERFEVPDATARQVNATRAAGGRVIAVGTTVTRALESAVARDGTVAGTTGWTERVVTRADPPRVVNGLITGWHDPQASHLLLVEAVAGEELTQAAYDAAVCEGYQWHEFGDSALLLP

SEQ ID NO: 66722 - protein, 342 aa, unidentified
  source 1..342: note = Floricoccus penangensis
  REGION 1..342: note = tr|A0A1E8GFG5|A0A1E8GFG5_9LACT S-adenosylmethionine:tRNA ribosyltransferase-isomerase; OS = Floricoccus penangensis OX=1859475 GN=queA PE=3 SV=1
MNTNDFDFELPEELIAQTPLENRSESRLLVIDRESETMQDKHFYDIIDELEPGDALVMNNTRVLPARLFGVKPDTGGHVELLLLKNIEGDKWETLAKPAKRLRVGSKVSFGDGRLVATVTEELEHGGRIVEFEYDGIFLETLESLGEMPLPPYIHEKLEDQERYQTVYAKENGSAAAPTAGLHFTPELLKKIEDKGVNLVELTLHVGLGTFRPVSVDNVDEHEMHSEFYQLSEDAAAKLNEVKASGGRIVAVGTTSIRTLETIGTKFNGEIKADSGWTNIFIKPGYEFKVVDAFSTNFHLPKSTLVMLVSAFAGRDFVLDAYKHAVDEKYRFFSFGDAMFVK

SEQ ID NO: 66723 - protein, 342 aa, unidentified
  source 1..342: note = Floricoccus tropicus
  REGION 1..342: note = tr|A0A1E8GQQ9|A0A1E8GQQ9_9LACT S-adenosylmethionine:tRNA ribosyltransferase-isomerase; OS = Floricoccus tropicus OX=1859473 GN=queA PE=3 SV=1
MNTNDFDFELPEELIAQTPLENRSESRLLVIDRESGTMQDKHFYDIIDELEPGDALVMNNTRVLPARLFGVKPDTGGHVELLLLKNIEGDKWETLAKPAKRLRVGSKVSFGDGRLVATVTEELEHGGRIVEFEYDGIFLETLESLGEMPLPPYIHEKLEDQERYQTVYAKENGSAAAPTAGLHFTPELLKKIEDKGVNLVELTLHVGLGTFRPVSVDNVDEHEMHSEFYQLSEDAAAKLNEVKANGGRIVAVGTTSIRTLETIGTKFNGEIKADSGWTNIFIKPGYEFKVVDAFSTNFHLPKSTLVMLVSAFAGRDFVLDAYKHAVDEKYRFFSFGDAMFVK

SEQ ID NO: 66724 - protein, 337 aa, Fluoribacter bozemanae
  REGION 1..337: note = tr|A0A0W0RJQ3|A0A0W0RJQ3_FLUBO S-adenosylmethionine:tRNA ribosyltransferase-isomerase; OS = Fluoribacter bozemanae OX=447 GN=queA PE=3 SV=1
MNKQDFYFDLPPELIAQYPLAHRSDSRLLIYNRQKDEYGHYQFREIADFLNPGDLLVMNDSKVIPARLYGHKTTGGKVELLVERITGEFTFLAHIKASKALKAGSIIKLEHNKELEVLDRKDDLFICKADIDVLQLLNGIGHIPLPPYITRNDEILDQDRYQTVYAKYEGSVAAPTAGLHFDESVLSSLHSRGVAVAYLTLHVGAGTFRPVRCDNIKDHKMHSEQFTISPELCAAVHATKAAGNRVIAVGTTALRSLESAAQNGVLTACSRDTDIFIYPGYEFKICDGLMTNFHLPESTLLMLVSAFIGHKQAMKLYQEAIKKRYRFFSYGDTSLLL

SEQ ID NO: 66725 - protein, 337 aa, Fluoribacter dumoffii
  REGION 1..337: note = tr|A0A377G8P8|A0A377G8P8_9GAMM S-adenosylmethionine:tRNA ribosyltransferase-isomerase; OS = Fluoribacter dumoffii OX=463 GN=queA PE=3 SV=1
MNKQDFYFDLPPELIAQYPLANRSDSRLLIYNRQKEEYGHYQFREIADFLNPGDLLVMNDSKVIPARLYGHKTTGGKVELLVERITGEFTFLAHIKASKALKAGSIIQLEQNKELEILDRQDDLFVCKADMDVLTLLNGIGHIPLPPYITRNDENLDQDRYQTVYAKYEGSVAAPTAGLHFDEAVLSSVRSRGVSVAYLTLHVGAGTFRPVRCEDIKDHKMHSERFTIGAELCEAVHSTKAAGNRVIAVGTTAMRSLESAAQNGTLTPCSRDTDIFIYPGYEFKICDGLMTNFHLPESTLLMLVSAFIGHKQAMKLYQEAIEKKYRFFSYGDTSLLL

SEQ ID NO: 66726 - protein, 337 aa, Fluoribacter gormanii
  REGION 1..337: note = tr|A0A377GHC8|A0A377GHC8_9GAMM S-adenosylmethionine:tRNA ribosyltransferase-isomerase; OS = Fluoribacter gormanii OX=464 GN=queA PE=3 SV=1
MNKQDFYFDLPPELIAQYPLANRSDSRLLIYNRKNGEYGHRQFREIADFLNPGDLLVMNDSKVIPARLYGHKTTGGKVELLVERITGEFTFLAHIKASKALRSGSTIQLEQGKEIKVLDRQDDLFLCQADMDVLNLLNGIGHIPLPPYITRSDETLDQNRYQTVYAKYEGSVAAPTAGLHFDEHVLSSVRSRGVTVAYLTLHVGAGTFRPVRCDNIKDHKMHSERFTISPELCEAVHATKAAGNRVIAVGTTTLRSLESAAQNGALTPCSRDTDIFIFPGYEFKICDGLMTNFHLPESTLLMLVSAFIGHKQAMMLYQEAIEKRYRFFSYGDTSLLL

SEQ ID NO: 66727 - protein, 354 aa, unidentified
  source 1..354: note = Fluviibacterium aquatile
  REGION 1..354: note = tr|A0A4R6B1F4|A0A4R6B1F4_9RHOB S-adenosylmethionine:tRNA ribosyltransferase-isomerase; OS = Fluviibacterium aquatile OX=2552766 GN=queA PE=3 SV=1
MTLDDFDFDLPEDLIATRPAQPRSSARLLVAHGEDVIDANVGDLPGFLRPGDRLVLNDTRVLPVRLTGIRSRETVSGSGEARIEVTLLEPQADSSWTALVKPLRKLRDGERIVFTDDLSAVMLGRTEDGAARLDLTLTGDALEAELAEAGAMPLPPYIAAKRPADAQDLVDYQSVFARRTGAVAAPTASLHFDEALLSSIEAAGVDFTHVTLHVGAGTFLPVKVDDPAEHKMHAEWGEITPAAAAEIEATRAAGGRIIPVGTTALRLLETAARKTGRVEPMAEPTDIFIYPGFEFRAADGLMTNFHLPKSTLMMLVSALMGTDRMRNVYAHAIAQRYRFFSYGDASLLLPRGPV

SEQ ID NO: 66728 - protein, 348 aa, unidentified
  source 1..348: note = Fluviicoccus keumensis
  REGION 1..348: note = tr|A0A4V2G650|A0A4V2G650_9GAMM S-adenosylmethionine:tRNA ribosyltransferase-isomerase; OS = Fluviicoccus keumensis OX=1435465 GN=queA PE=3 SV=1
MQLTDFSYELPDELIARFPLAERSASRLLHLAADGLQHRMVRDLASLLQPGDLLVFNDTRVLAARLFGQKSSGGKVEVLVERIVADDTALVHLRASKSPKPGARLTFAEGKVRADMLERVDDLFKLKFSRPVREVLAEHGEMPLPPYLGRTVEASDSERYQTVYSKPEKTASVAAPTAGLHFDEALLASLRERGCDFAYVTLHVGAGTFQPVRAADIREHRMHAEWLSVPPETVEAIRRTRERGGRVVAVGTTSVRALESAAQAHGGELQAWSGDTQIFIYPGYDWRVVDVLFTNFHLPESTLLMLVSAFAGRDRVMAAYQAAVENRYRFFSYGDAMLLERPGVNHAV

SEQ ID NO: 66729 - protein, 349 aa, Fluviicola sp.
  REGION 1..349: note = tr|A0A1G0C702|A0A1G0C702_9FLAO S-adenosylmethionine:tRNA ribosyltransferase-isomerase; OS = Fluviicola sp. RIFCSPHIGHO2_12_FULL_43_24 OX=1798019; GN = queA PE=3 SV=1
MKLSEFSFDLPDELIAEYPSPNRDEAKLMVIHRETGKIEHRLFKDIINYFTDGDVMIMNNTRVFPARMYGNKEKTGAKIEVFLLRELNRESLLWDVLVDPARKIRIGNKLYFGEDDSLVAEVIDNTTSRGRTLRFLFDGPYEEFKAKITELGETPLPKYIKREVEESDEDRYQTIYAKEEGAVAAPTAGLHFSRELLKRLELKGVNFAEVTLHVGLGTFRPVEVEDLTKHKMDSEQVIIDKKCADIVNIGKQNKKRICAVGTTSMRAIETSVSTDGMLKPYDGWTNKFIFPPYEFSIADCMITNFHTPLSTLLMMISAFVGHDLMMEAYQTAIKEKYKFYSYGDAMLIL

SEQ ID NO: 66730 - protein, 349 aa, Fluviicola sp.
  REGION 1..349: note = tr|A0A2G2F1G3|A0A2G2F1G3_9FLAO S-adenosylmethionine:tRNA ribosyltransferase-isomerase; OS = Fluviicola sp. OX=1917219 GN=queA PE=3 SV=1
MKLSQFQFDLPDELIAEYPAENRDESRLMVIHRDTGEIEHKMFKDIIDYIDEEDVLVMNNTKVFPARMYGNKEKTGAKIEVFLLRELNKETLLWDVLVDPARKIRIGNKLYFGEDESLVAEVIDNTTSRGRTLRFLFDGSYEEFKEKITELGETPLPKYIKRDVEESDEERYQTIYAKEIGAVAAPTAGLHFSRQLMKRLELKGVNFAEVTLHIGLGTFRPVEVEDLTKHKMDSEQAFIDQKCADEVNKAKRNKKKVIAVGSTAMRSIETSVSTEGMLKPYEGWTNKFIFPPYEFSIADALITNFHTPLSTLLMMVSAFGGHELMMGAYKEAVKEKYRFYSYGDAMLIL

SEQ ID NO: 66731 - protein, 352 aa, Fluviicola taffensis
  REGION 1..352: note = tr|F2IK25|F2IK25_FLUTR S-adenosylmethionine:tRNA ribosyltransferase-isomerase OS=Fluviicola taffensis (strain DSM 16823 / NCIMB 13979 / RW262) OX=755732 GN=queA; PE = 3SV=1
MNKMKLSEFSFDLPDELIAEYPSEHRDEARLMVIHRETGKIEHRLFKDIINYFGEGDVMIMNNTRVFPARMYGNKEKTGAKIEVFLLRELNRESLLWDVLVDPARKIRIGNKLYFGDDDSLVAEVIDNTTSRGRTLRFLFDGPYEEFKAKITELGETPLPKYIKREVEETDEERYQTIYAKEEGAVAAPTAGLHFSRELLKRLELKGINFAEVTLHVGLGTFRSVEVEDLTKHKMDSEQVIITDKAARIVNEAKKNKKRVCAIGTTSMRAVETSVSTDNMLKAFDGWTNKFIFPPYDFSIADSLVTNFHTPLSTLLMMISAFCGHDLMMEAYHEAIKEKYKFYSYGDAMLIL

SEQ ID NO: 66732 - protein, 336 aa, Fodinibius salinus
  REGION 1..336: note = tr|A0A5D3YLE2|A0A5D3YLE2_9BACT S-adenosylmethionine:tRNA ribosyltransferase-isomerase; OS = Fodinibius salinus OX=860790 GN=queA PE=3 SV=1
MSYTLSDFDYDLPDERIAQEPAHPRDHARLLVYDRATGEITDDRFYNLLEYLPQQTTLVLNNSKVKKCRLLFDEGKKEVFILERLNNKTVRAMVRPGKKFKKGKTTQLTDDISATVIDIDDEGIRTLELSPSLDHPAYSQHKYTPFPPYIEQNESLSEEYQTVYADSQESGASKAAPTAGLHFSDKLLSDITASSISRAEVTLHVGLGTFAPVKTETIEEHTMHSEWFEITEQTADKLQKADHITAVGTTSVRVLETCLRQQDQFSAINMDTDIFIRPGFEFQATDALITNFHLPKSTLLMLVAAFTGYEEMQKIYQHAIDGEYRFYSFGDAMLIL

SEQ ID NO: 66733 - protein, 348 aa, Fodinibius salinus
  REGION 1..348: note = tr|A0A5D3YKT4|A0A5D3YKT4_9BACT S-adenosylmethionine:tRNA ribosyltransferase-isomerase; OS = Fodinibius salinus OX=860790 GN=queA PE=3 SV=1
MKLTDFKFETEDFNVPEKPVSPRDAAKLMVLDREEQTISHEKFSDIHKYLDEGDVLVYNDTKVFPARLKGKKEKTDADIEVFLLRELVPENMLWDVLVEPARKIRIGNKLYFGPNLMAEVIDNTTSRGRTIRFLFEGSNEELYEILDNIGEMPLPPYIEREADEDDKEEYQTIFAKERGSVAAPFAAMHFTEELVEKLEDKGVQMLPITMHIGWGTFRPCEVEDLTKHRTDSENYYLSEETSEKINEALLSEDNRVVACGTTAVRTIETSITASGISKPGTGWTDEFIFPPYQFNVTEGVITNFHRPESTMLMLGAAFAGYDFLMEAYEEAQENDYRFFAFGDAMIII

SEQ ID NO: 66734 - protein, 342 aa, Fontibacillus panacisegetis
  REGION 1..342: note = tr|A0A1G7Q5A1|A0A1G7Q5A1_9BACL S-adenosylmethionine:tRNA ribosyltransferase-isomerase; OS = Fontibacillus panacisegetis OX=670482 GN=queA PE=3 SV=1
MNVELYDFDLPEELIAQTPLTDRSASRLLTLNKNDGSVEHHTFSDILEYLRPGDTLVLNDTRVIPARLFGVKEDTGAKAEVLLLKNLGEDCWEALVKPGKKLKTGSVIVFSDELKATIESEGEMGGRVLRFLYTGIFNEILDRLGQMPLPPYIKERLEDQERYQTVYSKHEGSAAAPTAGLHFTESLLQQISDQGIDIAFVTLHVGLGTFRPMSVDRVEDHVMHEEYYVLPQETADLLNATKARGGRVVAVGTTSARTLETVAQKCGNGPVVKSSGWTGIFIYPGYEFGLVDALITNFHLPKSTLVMLVSALAGRENILNAYKEAIEQKYRFFSFGDAMFIY

SEQ ID NO: 66735 - protein, 342 aa, unidentified
  source 1..342: note = Fontibacillus phaseoli
  REGION 1..342: note = tr|A0A369BP74|A0A369BP74_9BACL S-adenosylmethionine:tRNA ribosyltransferase-isomerase; OS = Fontibacillus phaseoli OX=1416533 GN=queA PE=3 SV=1
MNVDLYDFELPEELIAQTPLVERSASRLLTLNKRDGGIRHQLFSDIVEYLQPGDTLVLNDTRVIPARLFGVKEDTGAKAEVLLLKSLGDDRWEALVKPGKKLKIGAVIIFGEELKATIESEGDMGGRVLRFAYQGIFNEILDRLGQMPLPPYIKEKLDDRERYQTVYSKHEGSAAAPTAGLHFTESLLEDIRAKGIDIAFVTLHVGLGTFRPMSVNRVEDHVMHEEYYVLPQETADLLNETQARGGRIIAVGTTSARTLETVAQKCGDGPVVKSSGWTGIFIYPGYEFGLVDAMITNFHLPKSTLVMLVSALAGRENILKAYQEAIERKYRFFSFGDAMFIY

SEQ ID NO: 66736 - protein, 342 aa, unidentified
  source 1..342: note = Fonticella tunisiensis
  REGION 1..342: note = tr|A0A4V3ERV5|A0A4V3ERV5_9CLOT S-adenosylmethionine:tRNA ribosyltransferase-isomerase; OS = Fonticella tunisiensis OX=1096341 GN=queA PE=3 SV=1
MKVQDFYFDLPEELIAQEPLPERDMSRLMVLHKSDGRVEHKIFRDIIEYLDEGDCLVLNNSRVIPARLYGIKEDTGANMEFVLLKRIDKDKWETLVKPGKKAKIGSRFVFGEGELKCTVLDSTEAGGRIIEFEYQGVFEQILDKLGQMPLPPYIKKRLEDKERYQTVYSKIEGSAAAPTAGLHFTKELLQKIEEKGVKIAYITLHVGLGTFRPVKVQNIEEHQMHAEFYMIDEENAEIINSAKRNGKRIISVGTTSCRTLETAANEDGYVRPGSGWTDIFIYPGYRFKILDNLITNFHLPESTLIMLVSALAGREKIINAYRIAVEERYRFFSFGDAMFITD

SEQ ID NO: 66737 - protein, 344 aa, unidentified
  source 1..344: note = Fontimonas thermophila
  REGION 1..344: note = tr|A0A1I2K5X4|A0A1I2K5X4_9GAMM S-adenosylmethionine:tRNA ribosyltransferase-isomerase; OS = Fontimonas thermophila OX=1076937 GN=queA PE=3 SV=1
MRRSDFDYVLPPELIAQHPAERRSASRLLHVGPGDVLDDRQMTDLPDLLAPGDLLVFNDTRVIPARVFGIKPTGGRVEILVERVLDAQEFLAQLGASKKPKPGSQILVGADERLTVMGREDDLFRLRYEGADGVMAFLERAGQMPLPPYIAHAPSAEDRERYQTIFAREPGAVAAPTAGLHFDTPLLEALRARGIATATLTLHIGAGTFQPVRVENISEHRMHAEWYRIDAPLCAAIEAARARGGRVVAVGTTVTRALESAALEQGRERTVAPISGETRLFITPGFRFRIIDRLLTNFHLPQSTLLMLVCAFGGRERMLRAYDHAVAQRYRFFSYGDAMLIDPV

SEQ ID NO: 66738 - protein, 341 aa, Formivibrio citricus
  REGION 1..341: note = tr|A0A1I4WU79|A0A1I4WU79_9NEIS S-adenosylmethionine:tRNA ribosyltransferase-isomerase; OS = Formivibrio citricus OX=83765 GN=queA PE=3 SV=1
MQVSDFDYFLPERLIAQFPPAERGASRLLHVDGSRLEDVFFSDLPRFLCAGDLLVFNDTKVVKARLFGKKGSGGQIEALVERVLDRHTALAHVRASKAPKPGTKLIFAENWVAEMVERRGDLFLLRFAGEESVLDILEAAGLLPLPPYITHTPDDEDAKRYQTVYARDPGAVAAPTAGLHFTDALLEKIRAAGVQTAFVTLHVGAGTFQPVRVENVAEHVMHHERYSIPAETCELIRKTREAGGRVIAVGTTSLRALEAASRNGLLAEPEGDTDIFITPGYQFRVVDRLITNFHLPKSTLLMLVAAFAGYDTIMAAYRHAIAGEYRFFSYGDAMLLERARA

SEQ ID NO: 66739 - protein, 349 aa, Formosa agariphila
  REGION 1..349: note = tr|T2KI41|T2KI41_FORAG S-adenosylmethionine:tRNA ribosyltransferase-isomerase OS=Formosa agariphila (strain DSM 15362 / KCTC 12365 / LMG 23005 / KMM 3901); OX = 1347342GN=queA PE=3 SV=1
MKLSHFNFNLPPELLAEDPSENRDESRLMVLDRKNQTIEHKQFKDIINYFDEDDVMILNDTKVFPARLFGNKEKTGARIEVFLLRELNEEQRLWDVLVDPARKIRIGNKLYFGDDDTLVAEVIDNTTSRGRTLRFLYDGSYTEFRNKLKILGETPLPKYIQREVKPEDEERYQTIYAKKEGAVAAPTAGLHFSKHLLKRLEIKGVKFADVTLHVGLGTFNPVEVEDLSKHKMDSEEAIIEEKAVNIINTGIKEKRRVCAVGTTSMRAIESSVSSHGTLNEFDGWTNKFIFPPYDFSIANCMITNFHTPKSTLLMMVSAFAGHDFLKRAYDEAVKEGYKFYSYGDAMLII

SEQ ID NO: 66740 - protein, 349 aa, Formosa algae
  REGION 1..349: note = tr|A0A2K2ZED7|A0A2K2ZED7_9FLAO S-adenosylmethionine:tRNA ribosyltransferase-isomerase; OS = Formosa algae OX=225843 GN=queA PE=3 SV=1
MKLSHFNFKLPDELLAEDPCENRDESRLMVLDRKNQTIEHKQFKDIINYFDEDDVMILNDTKVFPARLFGNKEKTGARIEVFLLRELNEEQRLWDVLVDPARKIRIGNKLYFGDDDTLVAEVIDNTTSRGRTLRFLYDGSYTEFRNKLKILGETPLPKYIKREVKPEDEERYQTIYAKHEGAVAAPTAGLHFSKHLLKRLEIKGVKFADVTLHVGLGTFNPVEVEDLSKHKMDSEEVIIEEKAVNTINTGIKEKRRVCAVGTTSMRAIESSVSSHGTLNEFDGWTNKFIFPPYDFSIANCMITNFHTPKSTLLMMVSAFAGHDFIKRAYEEAVKEEYKFYSYGDAMLII

SEQ ID NO: 66741 - protein, 349 aa, Formosa sp.
  REGION 1..349: note = tr|A0A2E0I2X4|A0A2E0I2X4_9FLAO S-adenosylmethionine:tRNA ribosyltransferase-isomerase; OS = Formosa sp. OX=2018467 GN=queA PE=3 SV=1
MKLSHFSFELPEEFLAEYPSEQRDEARLMVLNREKQTIEHKQFKDLINYFDEDDVMVLNNTKVFPARLFGNKEKTGARIEVFLLRELNPEQRLWDVLVDPARKIRIGNKLYFGEDESLVAEVIDNTTSRGRTLRFLFDGSYDEFRSKLNELGQTPLPKYIKRDVEPEDEIRYQTIYAKNEGAVAAPTAGLHFSKHLLKRLEIKGINFAEVTLHVGLGTFNPVEVEDLSKHKMDSEEIIIDTNATKSINLALKEKRKICAVGTTVMRSIESSVSSSGTLNDYSGWTNKFIFPPYDFSIANCMITNFHTPKSTLLMMTAAFGGYDFIMKAYEEAVKEKYKFYSYGDAMLIL

SEQ ID NO: 66742 - protein, 349 aa, Formosa sp.
  REGION 1..349: note = tr|A0A5D0GGT5|A0A5D0GGT5_9FLAO S-adenosylmethionine:tRNA ribosyltransferase-isomerase; OS = Formosa sp. 1494 OX=2592046 GN=queA PE=3 SV=1
MKLSHFNFNLPEELLAEYPSENRDESRLMVLNREKQTIEHKMFKDLIDYFDKDDVMILNNTKVFPARLFGNKEKTGARIEVFLLRELNEEQRLWDVLVDPARKIRIGNKLYFGEGESLVAEVIDNTTSRGRTLRFLYDGSYRDFRLKLRELGETPLPKYIKREVEPEDEERYQTIFAKNEGAVAAPTAGLHFSKHLLKRLEIKGVNLAEVTLHVGLGTFNPVEVEDLSKHKMDSEEIIIKKDAVDIINTAIKNRKRVCAVGTTAMRSIESSVSSSGTLNEFDGWSNKFIFPPYDFSIANCMITNFHTPKSTLLMMASAFAGHDFIKKAYDEAIKEKYKFYSYGDAMLII

SEQ ID NO: 66743 - protein, 349 aa, Formosa spongicola
  REGION 1..349: note = tr|A0A316DWR5|A0A316DWR5_9FLAO S-adenosylmethionine:tRNA ribosyltransferase-isomerase; OS = Formosa spongicola OX=570520 GN=queA PE=3 SV=1
MKLSHFSFDLPEELLAEYPSEHRDESRLMVLNREKQTIEHKMFKDLIDYFDKDDVMILNNTKVFPARLFGNKEKTGARIEVFLLRELNEEQRLWDVLVDPARKIRIGNKLYFGEGESLVAEVIDNTTSRGRTLRFLYDGSYRDFRMKLQELGETPLPKYIKRDVEPEDEERYQTIYAKNEGAVAAPTAGLHFSKHLLKRLEIKGINFAEVTLHVGLGTFNPVEVEDLSKHKMDSEEIIIKKDAVDIINTGIKTKRRVCAVGTTAMRSIESAVSSSGTLNEFDGWSNKFIFPPYDFSIANCMITNFHTPKSTLLMMASAFAGHDFIKKAYDEAIKEKYKFYSYGDAMLII

SEQ ID NO: 66744 - protein, 342 aa, unidentified
  source 1..342: note = Fournierella massiliensis
  REGION 1..342: note = tr|A0A4R1R0E2|A0A4R1R0E2_9FIRM S-adenosylmethionine:tRNA ribosyltransferase-isomerase; OS = Fournierella massiliensis OX=1650663 GN=queA PE=3 SV=1
MLKKDFWFDLPQELIAQEPCSPRDAARLMCLDRSNDQIQHRVFRDLVDLLEPGDLLVVNNSKVLPARLIGQKEHTGAVCELLLLHQESNDVWECLARPGKRLKPGMRILFGDGSLIATIQETKEDGNKLVSFEYNTQTLYEKLDEFGKMPLPPYITKQLEDQSQYQTVYAKELGSAAAPTAGLHFTPELMQRLQDKGIKITEVTLHVGLGTFRPVKEDEIEDHLMHSEWYSVSEETARLINETKEAGHRVIAVGTTSCRTLESVAAKYGKIQACSGDTSIFLYPGCKFLCLDGLITNFHLPESTLIMLVSAFYGYEKTMAAYKTAVEQRYRFFSFGDAMLIL

SEQ ID NO: 66745 - protein, 338 aa, unidentified
  source 1..338: note = Francisella adeliensis
  REGION 1..338: note = tr|A0A2Z4XYD1|A0A2Z4XYD1_9GAMM S-adenosylmethionine:tRNA ribosyltransferase-isomerase; OS = Francisella adeliensis OX=2007306 GN=queA PE=3 SV=1
MKTDDFDYTLPEELIASYPLESRDASRLLKLSKQTGDIIDHKFTDFIDFVTDKDLLIFNDSKVMLARLYGKKTTGAKLEFLVEKIKTPKIFETHIKSNRSPAIGSEIFIEDTPAKVLEKDGSVYLLELQGDADIYQIMNEFGHIPLPQYMKREDEEFDAERYQTVYAKDLGSVAAPTAGLHFSDELMQAIKDKGVDTAYITLHVGSGTFKPVQVDDVNNHKMHSEVISVSEEVCEKIRQTKVNGGRVIAIGTTSVRSLETAGQSGQIEGYQGETDIFLYPGKKFNVVDAMITNFHLPKSTLIMLVSAFADKEKIMKAYEHAIENKYRFFSYGDAMFIC

SEQ ID NO: 66746 - protein, 338 aa, unidentified
  source 1..338: note = Francisella endosymbiont
  REGION 1..338: note = tr|A0A1X1BF78|A0A1X1BF78_9GAMM S-adenosylmethionine:tRNA ribosyltransferase-isomerase; OS = Francisella endosymbiont of Ornithodoros moubata; OX = 1981171 GN=queA PE=3 SV= 1
MKTDDFDYKLPEELIASYPLENRDASRLLKLNKQTGEIADHKFTDFIDFITPKDLLVLNNSKVMLACLYGSKTTGAKVEYLIERIKTPKVFEAHIKANRSPAVGSEIYIEDTLAKVLDKDGGMYLLELQGDEDIYQLMEEFGHIPLPPYMKREDEEFDAERYQTVYAKDLGSVAAPTAGLHFSQQLMQQIKAKGVDIAYIVLHVGSGTFKPVQVDDVESHKMHAEVISVPADVCQKIRQTKANGGRVIAIGTTSVRSLETAGQNGQIGTYQGETDIFLYPGKKFNVVDAMITNFHLPKSTLIMLVSAFANKHKIMQAYHHAIAKKYRFFSYGDAMFIY

SEQ ID NO: 66747 - protein, 338 aa, Francisella halioticida
  REGION 1..338: note = tr|A0A2Z2L0R1|A0A2Z2L0R1_9GAMM S-adenosylmethionine:tRNA ribosyltransferase-isomerase; OS = Francisella halioticida OX=549298 GN=queA PE=3 SV=1
MKTDDFDYKLLEELIASYPLENRDASKLLKLNKQTGQIADHKFTDFLDFITSKDLLIFNNSRVMLARLYGKKATGAKLEYLIEKIKSPKVFETHIKANRSPAIGSEIYVQDTLAKVLEKDGGMYLLELVGNKDIYRLMNEFGHIPLPPYMKREDEEFDAERYQTVYAKDLGSVAAPTAGLHFSEELMQQIKDKGVDIAYVTLHVGSGTFKPVQVDDVNNHKMHSEVISVPEDVCEKVRQTKVNGGRVIAIGTTSVRSLETAGQNGKIKSYQGETDIFLYPGKKFNIVDAMVTNFHLPKSTLIMLVSAFADKQKIMKAYEHAIIKKYRFFSYGDAMFIY

SEQ ID NO: 66748 - protein, 338 aa, Francisella hispaniensis
  REGION 1..338: note = tr|F4BGL1|F4BGL1_9GAMM S-adenosylmethionine:tRNA ribosyltransferase-isomerase OS=Francisella hispaniensis; OX = 622488 GN=queA PE=3 SV=1
MKTDDFDYKLPEELIASYPLENRDASKLLKLNRQTGEIADHKFTDLIDFITPKDLLVFNNSKVMLARLYGSKTTGAKLEYLIERIKTPKLFETHIKANRSPAIGSEIYVEDTLAKVLDKDGGMYLLEIQGDKDIYHLMEEFGHIPLPPYMKREDEEFDAERYQTVYAKDLGSVAAPTAGLHFSQQLMQQIKDKGIDIAYITLHVGSGTFKPVQVDNVESHKMHAEVISVPADVCEKIRQTKANGGRVIAIGTTSVRSLETAGQNGQIEPYQGETDIFLYPGKKFNVVDAMITNFHLPKSTLIMLVSAFADKHKIMQAYHHAIAQKYRFFSYGDAMFIY

SEQ ID NO: 66749 - protein, 338 aa, Francisella hispaniensis
  REGION 1..338: note = tr|A0A153JSC1|A0A153JSC1_9GAMM S-adenosylmethionine:tRNA ribosyltransferase-isomerase; OS = Francisella hispaniensis FSC454 OX=1088883 GN=queA PE=3; SV = 1
MKTDDFDYKLPEGLIASYPLENRDASRLLKLNKKTGEIADHKFTDLIDFITPKDLLVFNNSKVMLARLYGSKTTGAKLEYLIERIKTPKLFETHIKANRSPAIGSEIYVEDTLAKVLDKDGGMYLLEIQGDKDIYHLMEEFGHIPLPPYMKREDEEFDAERYQTVYAKDLGSVAAPTAGLHFSQQLMQQIKDKGIDIAYITLHVGSGTFKPVQVDNVESHKMHAEVISVPADVCEKIRQTKANGGRVIAIGTTSVRSLETAGQNGQIEPYQGETDIFLYPGKKFNVVDAMITNFHLPKSTLIMLVSAFADKHKIMQAYHHAIAQKYRFFSYGDAMFIY

SEQ ID NO: 66750 - protein, 338 aa, unidentified
  source 1..338: note = Francisella marina
  REGION 1..338: note = tr|A0A5C2BYZ3|A0A5C2BYZ3_9GAMM S-adenosylmethionine:tRNA ribosyltransferase-isomerase; OS = Francisella marina OX=2249302 GN=queA PE=3 SV=1
MRTDDFDYKLPEELIASYPLENRDASRLLKLNKQTGEILDYKFTDFIDFINPEDLLIFNNSKVMLARLYGEKTTGAKLEYLIERVKTPKIFETHIKANRSPTIGSEIYVQDTLAKVLEKDGGMYLLELQGNKDIYQLMEEFGHIPLPPYMKRDDEEFDAERYQTVYAKDLGSVAAPTAGLHFSEELIRQIKAKGTDIAYITLHVGSGTFKPVQVDDVNNHKMHSEVISVPEEVCNKIRQTKANGGRVIAIGTTSVRSLETAGQSGEIEPYQGETDIFLYPGKKFHVVDAMITNFHLPKSTLIMLVSAFTDKEKIMKAYEHAIASKYRFFSYGDAMFIF

SEQ ID NO: 66751 - protein, 338 aa, Francisella noatunensis
  REGION 1..338: note = tr|I2B0M3|I2B0M3_FRANT S-adenosylmethionine:tRNA ribosyltransferase-isomerase OS=Francisella noatunensis subsp. orientalis (strain Toba 04) OX=1163389 GN=queA PE=3 S V=1
MKTDDFDYKLPEELIACYPLDKRDESRLLKLNKDTGEIRDFIFKDFFEFITPKDLLVFNNSKVMLARLYGEKTTGGKLEFLIEKIKSPKVFETHIKANRSPVAGMEIYVQDTLAKVLEKDGGMYLLELQGEKDIYQLMEEFGHIPLPPYMKRDEEAFDAERYQTVYAKDLGSVAAPTAGLHFSEELMQQIKAKGVDIAYITLHVGSGTFKPVQVDDVNNHKMHAEVISVSEDVCEKIRQTKANGGRVIAIGTTSVRSLETAGQSGEIQPYQGQTDIFLYPGKKFNIVDAMITNFHLPKSTLIMLVSAFSDKEKVMKAYEHAIAEKYRFFSYGDAMFIF

SEQ ID NO: 66752 - protein, 338 aa, Francisella noatunensis; identical to SEQ ID NO: 66751
  REGION 1..338: note = tr|A0A5C1RU75|A0A5C1RU75_9GAMM S-adenosylmethionine:tRNA ribosyltransferase-isomerase; OS = Francisella noatunensis subsp. orientalis OX=299583; GN = queA PE=3 SV=1

SEQ ID NO: 66753 - protein, 338 aa, unidentified
  source 1..338: note = Francisella novicida
  REGION 1..338: note = tr|A0A2L1CHT5|A0A2L1CHT5_FRANO S-adenosylmethionine:tRNA ribosyltransferase-isomerase; OS = Francisella novicida OX=264 GN=queA PE=3 SV=1
MKTDDFDYKLPEELIASYPLENRDASRLLKLNKQTGEIADYKFTDFIDFISPGDLLVFNNSKVMLARLYGSKTTGAKLEYLIERIKTPKLFETHIKANRSPAIGSEIYVEDTLAKVLDKDGGMYLLEIQGVKDIYQLMEEFGHIPLPPYMKRDDEEFDAERYQTVYAQDLGSVAAPTAGLHFSKELMQQIKDKGVDIAYITLHVGSGTFKPVQVDDVESHKMHAEVISVPVEVCQKIRQTKANGGRVIAIGTTSVRSLETAGQNGQIEPYQGETDIFLYPGKKFNVVDAMITNFHLPKSTLIMLVSAFADKEKIIKAYEHAIAERYRFFSYGDAMFIF

SEQ ID NO: 66754 - protein, 338 aa, unidentified
  source 1..338: note = Francisella persica
  REGION 1..338: note = tr|A0A0K2JRZ4|A0A0K2JRZ4_9GAMM S-adenosylmethionine:tRNA ribosyltransferase-isomerase; OS = Francisella persica ATCC VR-331 OX=1086726 GN=queA PE=3; SV = 1
MKTDDFNYKLPEELIARYPLKNRDASRLLKLNKQTGEIADHKFTDFIDFITPKDLLIFNNSKVMLARLYGSKTTGAKLEYLIERIKTPKVFETHIKANRSPAIGSEIYIEDTLAKVLDKDGVMYLLELQGDKDIYQLMEEFGHIPLPPYMKREDEEFDAERYQTVYAKDLGSVAAPTAGLHFSQQLMRQIKAKGVGIAYITLHVGSGTFKPVKVDDIESHKMHAEVISVPADVCQKIRQTKANGGRVIAIGTTSVRSLETAGQNGQIETYQGETDIFLYPGKKFNVIDAVITNFHLPKSTLIILISAFADKHKIMQAYHHAIAKKYRFFSYGDAMFIY

SEQ ID NO: 66755 - protein, 338 aa, Francisella philomiragia
  REGION 1..338: note = tr|A0A0B6D0U3|A0A0B6D0U3_9GAMM S-adenosylmethionine:tRNA ribosyltransferase-isomerase; OS = Francisella philomiragia OX=28110 GN=queA PE=3 SV=1
MKTDDFDYKLPEELIASYPLENRDASRLLKLNKQTGDIVDHKFTDFIDFINPKDLLVFNNSKVMLARLYGEKTTGAKLEYLIERVKTPKIFETHIKANRSPAIGSEIYVQDTLAKVLEKDGGMYLLELQGDKDIYQLMEEFGHIPLPPYMKRGDEEFDAERYQTVYAKDLGSVAAPTAGLHFSEKLMQQIKAKGVDIAYITLHVGSGTFKPVQVDDVNNHKMHAEVISVSEAVCEKIRQTKANGGRVIAIGTTSVRSLETAAQSGEIQPYQGETDIFLYPGKKFNVVDAMITNFHLPKSTLIMLVSAFADKEKIMKAYEHAIAEKYRFFSYGDAMFIF

SEQ ID NO: 66756 - protein, 338 aa, Francisella philomiragia
  REGION 1..338: note = sp|B0TYS6|QUEA_FRAP2 S-adenosylmethionine:tRNA ribosyltransferase-isomerase OS=Francisella philomiragia subsp. philomiragia (strain ATCC 25017) OX=484022 GN=queA; PE = 3 SV=1
MRTDDFDYKLPEELIASYPLENRDASRLLKLNKQTGEILDHKFTDFIDFINPEDLLIFNNSKVMLARLYGEKITGAKLEYLIERVKTPKIFETHIKANRSPAIGSEIYVQDTLAKILEKDGGMYLLELQGNKDIYQLMEEFGHIPLPPYMKRDDEEFDAERYQTVYAKDLGSVAAPTAGLHFSEELMQQIKAKGTDIAYITLHVGSGTFKPVQVDDVNNHKMHSEVISVSEDVCEKIRQTKANGGRVIAIGTTSVRSLETAGQSGEIQPYQGETDIFLYPGKKFNIVDAMITNFHLPKSTLIMLVSAFADKEKIMKAYEHAIAEKYRFFSYGDAMFIF

SEQ ID NO: 66757 - protein, 339 aa, Francisella sp.
  REGION 1..339: note = tr|A0A2W6SQW8|A0A2W6SQW8_9GAMM S-adenosylmethionine:tRNA ribosyltransferase-isomerase; OS = Francisella sp. OX=2047875 GN=queA PE=3 SV=1
MQLHDFDFDLPPKLIAQVPAKNREDSRLLVCQKNVMTDSMFRDIGLYFQAGDVLVLNNTKVMKARLQGKKASGGQIEVLVEKVLDTTTALCLLKASHAPKETSMIYFAYNISARIIKRQNDLFYLKFKLPLTEVINAIGHLPLPPYIHHEANQYDEARYQTVFSRHEGAIAAPTAGLHFTAEILDKLKVKGVSIVELTLHVGAGTFQPIRTENIEVHRMHKEWFSIPSATAKIINQALLEKRRICAVGTTSLRALESAFATGKIKKLTQETDIFIRPGYRFQVVDRLLTNFHLPKSTLIILVSAFAGLQNIKNIYAHAIKERYRFFSYGDCMLLERSQN

SEQ ID NO: 66758 - protein, 338 aa, Francisella sp.
  REGION 1..338: note = tr|A0A097EN54|A0A097EN54_9GAMM S-adenosylmethionine:tRNA ribosyltransferase-isomerase; OS = Francisella sp. FSC1006 OX=1547445 GN=queA PE=3 SV=1
MKTDDFDYKLPEELIASYPLENRDASRLLKLSKQTGEIVDHKFTDFIDFINEGDLLVFNNSKVMLARLYGEKITGAKLEYLIEKVKTPKLFETHIKANRAPAVGSEIYVQDTPAIVLEKDGGMYLLELQGEKDIYQLMEEFGHIPLPPYMKRDDEEFDAERYQTVYAKDLGSVAAPTAGLHFSDELMQQIKAKGVDTAYITLHVGSGTFKPVQVDDVNNHKMHSEVISVPEDVCEKIRQTKANDGRVIAIGTTSVRSLETAGQSGEIQPYQGETDIFLYPGKKFNVVDAMITNFHLPKSTLIMLVSAFADKEKIMKAYEHAIASKYRFFSYGDAMFIY

SEQ ID NO: 66759 - protein, 340 aa, Francisella tularensis
  REGION 1..340: note = sp|Q5NFL9|QUEA_FRATT S-adenosylmethionine:tRNA ribosyltransferase-isomerase OS=Francisella tularensis subsp. tularensis (strain SCHU S4 / Schu 4) OX=177416; GN = queA P E=3 SV=1
MFMKTDDFDYKLPEELIASYPLENRDASRLLKLNKQTGEIADYKFTDFIDFINPGDLLVFNNSKVMLARLYGSKTTGAKLEYLIERIKTPKLFETHIKANRSPAIGSEIYVEDTLAKVLDKDGGMYLLEIQGDKDIYQLMEEFGHIPLPPYMKRDDEEFDAERYQTVYAQDLGSVAAPTAGLHFSKELMQQIKDKGVDIAYITLHVGSGTFKPVQVDDVESHKMHAEVISVPVEVCQKIRQTKENGGRVIAIGTTSVRSLETAGQNGQIEPYQGETDIFLYPGKKFNVVDAMITNFHLPKSTLIMLVSAFADKEKIIKAYEHAIAERYRFFSYGDAMFIF

SEQ ID NO: 66760 - protein, 338 aa, Francisella tularensis
  REGION 1..338: note = sp|A0Q7A0|QUEA_FRATN S-adenosylmethionine:tRNA ribosyltransferase-isomerase OS=Francisella tularensis subsp. novicida (strain U112) OX=401614 GN=queA PE=3 SV=1
MKTDDFDYKLPEELIASYPLENRDASRLLKLNKQTGEIADHKFTDFIDFISPGDLLVFNNSKVMLARLYGSKTTGAKLEYLIERIKNPKLFETHIKANRSPAIGSEIYVEDTLAKVLDKDGGMYLLEIQGDKDIYQLMEEFGHIPLPPYMKRDDEEFDAERYQTVYAQDLGSVAAPTAGLHFSKELMQQIKNKGVDIAYITLHVGSGTFKPVQVDDVESHKMHAEVISVPVEVCQKIRQTKENGGRVIAIGTTSVRSLETAGQNGQIEPYQGETDIFLYPGKKFNVVDAMITNFHLPKSTLIMLVSAFADKEKIIKAYEHAIAERYRFFSYGDAMFIY

SEQ ID NO: 66761 - protein, 356 aa, unidentified
  source 1..356: note = Franconibacter pulveris
  REGION 1..356: note = tr|A0A0J8VTE8|A0A0J8VTE8_9ENTR S-adenosylmethionine:tRNA ribosyltransferase-isomerase; OS = Franconibacter pulveris OX=435910 GN=queA PE=3 SV=1
MRVADFSFELPESLIAHYPQPQRSACRLLSLDGPTGQLTHGTFTDLLDKLKPGDLLVFNNTRVIPARLYGRKASGGKIELLVERMLDETRVLAHIRASKAPKPGAELLLGDDESVQATMVARHDALFEVKFNDERPVLDILNAIGHMPLPPYIERPDEEADRELYQTVYSQKPGAVAAPTAGLHFDEPLLAALREKGIEMAFVTLHVGAGTFQPVRVDSIEDHIMHSEYAEVPQDVVDAVLAAKARGNNVVAVGTTSVRSLESAAQAAKNSLIEPFFGDTQIFIYPGYQWKVVDALVTNFHLPESTLIMLVSAFAGYQHTMRAYKEAVKAEYRFFSYGDAMFITHNPQAVNERPGE

SEQ ID NO: 66762 - protein, 343 aa, unidentified
  source 1..343: note = Frankia asymbiotica
  REGION 1..343: note = tr|A0A1V2I7P0|A0A1V2I7P0_9ACTN S-adenosylmethionine:tRNA ribosyltransferase-isomerase; OS = Frankia asymbiotica OX=1834516 GN=BL253_21210 PE=3 SV=1
MSAVAFDLPTGLEASAPPERRDGVRLLVARADGVRHARFDEFGEHLAPGDLVVVNTSAMLPAAVSGSRHGGRSGDRAVVVHFATALDDGDWVVEVRESDPAATGPVNDLRPGERIALPSGVWLTVRAAHPAGQDRLWRASVPVDGGVVPYLRHVGRPIRYAYVPDPQPMDAYRTVFGRDPGSAEMPSAGRPFSTGLVTDLVTRGILVAPVLLHTGVSSQEPGEPPQPERFRVDAHTARLVNATRRWGGRVVAVGTTATRALESAAGPDGAVRAAAGWTDLVLGPGRPARTVTGLVTGWHAPGASHLDLLEAVAGPDLVATAYREALRERYLWHEFGDSCLLLP

SEQ ID NO: 66763 - protein, 368 aa, unidentified
  source 1..368: note = Frankia inefficax
  REGION 1..368: note = tr|E3J490|E3J490_FRAIE S-adenosylmethionine:tRNA ribosyltransferase-isomerase OS=Frankia inefficax (strain DSM 45817 / CECT 9037 / EuI1c) OX=298654; GN = FraEuI1c_5020PE=3 SV=1
MTGPSAAGATRTAPPTGVLGGTAEHGHDVTGTVVFDLPAGLEAAAPPPSRDGVRLLVARPGDLRHARFSDLGDQLAPGDLVVVNTSGTLPAAVAGVRAGGETVAVHFATALDDGDWVVEVRPAGEAVTGPVADLRPGEQLALPAGVRLTVRGPHPAGQRRLWRAYVPVDGGVVAYLAHVGRPIRYSYVPDPQPIEAYRTVFGRDPGSAEMPSAGRPFSTELVTDLVSRGIGVTPVLLHTGVSSQEPGEPPQPERFRVGPQTARLVNATRRWGGRVVAVGTTVTRALESAAAPDGTVRPTAGWTDLVLGPDRPARAVTGLVTGWHAPGASHLDLLVAVAGPSLVADAYREAVRARYLWHEFGDSCLLLP

SEQ ID NO: 66764 - protein, 356 aa, Frankia sp.
  REGION 1..356: note = tr|A0A1S1RXR8|A0A1S1RXR8_9ACTN S-adenosylmethionine:tRNA ribosyltransferase-isomerase; OS = Frankia sp. BMG5.36 OX=1834512 GN=BCD48_08290 PE=3 SV=1
MSAVAFDLPTGLEASAPPERRDGVRLLVARPNGVRHARFDEFGEHLAPGDLVVVNTSAMLPAAVSGSRHGDRAGNRAVVVHFATALDDGDWVLEVRAADPAGVPAGSAKPIWEVGTGPVDDLRRGERIALPHGVWLTVHAPHPAGQDRLWRASVPIDGGVVPYLRHVGRPIRYAYVLDPQPMDAYRTVFGRDPGSAEMPSAGRPFSTDLVTDLVTRGILVAPVLLHTGVSSQEPGEPPQAERFRVDAHTARLVNATRRWGGRVVAVGTTATRALESATGPDGTVRAAAGWTDLVLDPRRAARTVTGLVTGWHAPGASHLDLLEAVAGPDLVAAAYREALRERYLWHEFGDSCLLLP

SEQ ID NO: 66765 - protein, 342 aa, Frankia sp.
  REGION 1..342: note = tr|A0A4R1D566|A0A4R1D566_9ACTN S-adenosylmethionine:tRNA ribosyltransferase-isomerase; OS = Frankia sp. BMG5.11 OX=222540 GN=queA PE=3 SV=1
MRVDLFDFELPPELIALRPAAPRDAARLLVVQGAEAFADRIVRDLPTLLNPGDVLVFNDTRVIPAQLEGRRGEARIGATLHKRIDLRRWQAFVRNAKRLREGDTVVFGADVAAVAEARHPDGSWTLAFAGDEPVEVLLERAGRMPLPPYIAGKRPTDQRDRSDYQTMFAARDGAVAAPTAALHFTPELIAALEAAGVAREILTLHVGAGTFLPVKADDTDDHAMHAEWGRIDAPTAARLNAAREAGGRVIAVGTTSLRLLESATGQDGIIRDFAGDTSIFITPGYRFRAVDGLMTNFHLPKSTLFMLVSALMGRERMQAVYARAIESGYRFYSYGDSSLLLP

SEQ ID NO: 66766 - protein, 337 aa, unidentified
  source 1..337: note = Frankiales bacterium
  REGION 1..337: note = tr|A0A3A3ZMA1|A0A3A3ZMA1_9ACTN S-adenosylmethionine:tRNA ribosyltransferase-isomerase; OS = Frankiales bacterium YIM 75000 OX=2339232; GN = D5H78_01430 PE=3 SV=1
MSALRFELPAALSATVPPEVRGVPRDGVRLLVADGQGLRHRAFHEIGEVLRPGDLLVVNTSATLPAAVDGTLDGRPVTVHLSTRRDDGTWLVEVRPPGRATGPLGGDLAGARVDLPGPAALHLGAPHGRLWQAAVTARGGAEEVMRRHGRPVSYAYVEGRWPLSAYQTAFARVPGSAEMPSAARPFTPELVTELVADGVAVAPVVLHCGVSSLEEGEGALPERYAVPPATARLVATTRAAGGRVVAVGTTVVRALETAAAGTGTVAPSAGWTDLVLGPDRPARVVDGLVTGWHAPGASHLSLLEAVVGPERVAAAYASALREGYLWHEFGDSALLLR

SEQ ID NO: 66767 - protein, 360 aa, unidentified
  source 1..360: note = Frankineae bacterium
  REGION 1..360: note = tr|A0A1G8QJV9|A0A1G8QJV9_9ACTN S-adenosylmethionine:tRNA ribosyltransferase-isomerase; OS = Frankineae bacterium MT45 OX=1882833; GN = SAMN05444157_1472 PE=3 SV=1
MTALLQKPSTIFRLTDDLTAAEPPEQRGLSRDGVRLLVAEHSADGTDRVIHRRFRELPEYLRAGDLLVVNTSATLAGEIDGTWRGGAPVVVHFATELDDGSWVVELRSAPDGATPLLAAGVGDEILLPRRVSLRLLEPYGGRTASPTGEGNRLWRGDVRSASRLAAYLARYGRPISYGYLSRHWPLSDYQTVFSREPGSAEMPSAGRPFTTELVTDLVRRGIGVAPITLHTGVSSQDAGEPPQPERFAVSASTARLVNQTRLAGGRVVAVGTTVTRALESAADAAGEVRPAAGWTEHIVGGENPARVVTGLITGLHNPEASHLLLVESIAGARLTQLAYDAAVAERYLWHEFGDSCLLLP

SEQ ID NO: 66768 - protein, 344 aa, Frateuria aurantia
  REGION 1..344: note = tr|H8L5Z0|H8L5Z0_FRAAD S-adenosylmethionine:tRNA ribosyltransferase-isomerase OS=Frateuria aurantia (strain ATCC 33424 / DSM 6220 / NBRC 3245 / NCIMB 13370) OX=76743 4 GN=queA PE=3 SV=1
MDKSDFDFELPPGLIAQAPLAQRSASRLLWLNPDDGHIEDKVFRDLPTFCQPGDLLVFNNTKVLPARLHGHKPSGGAVEIMIERVCGTHEVIAQLRASKKPREGGEIVLADGSRATMQGREGSFFRLRFDTALDDLLPRVGKMPLPPYITRQADDSDDSRYQTVYAREPGAVAAPTAGLHFDQALLDQLSGQGIEFGYVTLHVGAGTFQPVREGRLEDHVMHREYLEVDTDLVERIAATRARGNRVIAVGTTVVRALESATVDGKLGAYAGETQIFIYPGYRITSIDGLVTNFHLPQSTLLMLISALAGRDRIMQAYQHAVAAGYRFFSYGDAMLILPGSAAEV

SEQ ID NO: 66769 - protein, 344 aa, Frateuria sp.
  REGION 1..344: note = tr|A0A0Q9PCV0|A0A0Q9PCV0_9GAMM S-adenosylmethionine:tRNA ribosyltransferase-isomerase; OS = Frateuria sp. Soil773 OX=1736407 GN=queA PE=3 SV=1
MKKSDFDFALPPELIAQAPLAERSASRLLLLDVPAQSMADRHFRELPEFLRPGDLLVFNDTRVLPARLYGRKETGGAVEILIERVTGAHEAIVQLGVSKKPKTGGRIELADGSHAVVLGREEAFFRLRFESPEPLERLLSRLGEMPLPPYIERHANASDMERYQTVFAREPGAVAAPTAGLHFDEPMLDALRARGVDSGYVTLHVGAGTFQPMRAEEVQDHVMHREWLNVGAELVERIRRTRAGGGRVIAVGTTVVRALESATVDGRLHPFAGETQIFIFPGYRFSSIDGLITNFHLPQSTLLMLVSALAGREFILDAYRHAVAQRYRFFSYGDAMLILPHGCV

SEQ ID NO: 66770 - protein, 342 aa, Frateuria terrea
  REGION 1..342: note = tr|A0A1H6XW84|A0A1H6XW84_9GAMM S-adenosylmethionine:tRNA ribosyltransferase-isomerase; OS = Frateuria terrea OX=529704 GN=queA PE=3 SV=1
MKKSDFDFDLPPELIAQAPLPERSASRLLWLDPATCTLADRQFRELPSFLRAGDLLVFNDTRVLPARLYGRKDSGGAVEILIERVTGAHEATVQLGVSKKPKQGGRIELGDGSHATVLGRDGAFFRLRFESPEPLEGLLSKLGEMPLPPYIERHADAADLERYQTVYAREPGAVAAPTAGLHFDEPLLARLRELGVDSGYVTLHVGAGTFQPMRVQDIHQHTMHREWLNVGAALVEKVRRTRAAGGRVIAVGTTVVRALEAASRDGQLQPFAGETQIFIFPGYRITSIDGLVTNFHLPQSTLLMLVSALAGREFVLEAYRHAVRERYRFFSYGDAMLILPRT

SEQ ID NO: 66771 - protein, 361 aa, unidentified
  source 1..361: note = Frederiksenia canicola
  REGION 1..361: note = tr|A0A3N4XFN3|A0A3N4XFN3_9PAST S-adenosylmethionine:tRNA ribosyltransferase-isomerase; OS = Frederiksenia canicola OX=123824 GN=queA PE=3 SV=1
MLVSDFHFDLPDELIARYPTAERTASRLLYLNGETGLFQDQHFTDLLSHLNAGDLLIFNNTRVIPARLYGRKASGGKLEVLVERVLDAHRCLAHIRASKSPKIDTEIWLGEDKLGEGNGFKATMVARHDALFELHFAAEQPLFDLLQQAGHMPLPPYIDRPDEDTDQERYQTVYSQVLGAVAAPTAGLHFDENTLQKIAEKGVNTAFVTLHVGAGTFQPVRVESIEDHKMHAEYAEVSQEVVDKILATKANGKRVICVGTTSVRSIESAAQAAEASGQLIAPFYADTAIFLHPGKSFRIVDALVTNFHLPESTLIMLVSAFAGYRQCMNAYRHAVEAKYRFFSYGDAMFITKNANALNDTP

SEQ ID NO: 66772 - protein, 384 aa, unidentified
  source 1..384: note = Fremyella diplosiphon
  REGION 1..384: note = tr|A0A1Z4MEJ3|A0A1Z4MEJ3_MICDP S-adenosylmethionine:tRNA ribosyltransferase-isomerase; OS = Fremyella diplosiphon NIES-3275 OX=1973485 GN=queA PE=3; SV = 1
MEQQLTPAALTPNSNNDVVNTELDRSLSAYDYELPPELIAQNPAIPRDSSRLLVVNSRSIHHIFRDLPHLLKAGDLLVMNNTSVIPARLYGRKATGAEIEVLLLEERQYNCWLALVKPGKRFKVGSKIIFEPRGALKQGSKGAGGDEEVNSSLSLTATVLETDPATGGRLLQFDVPGEVPLVQILEVFGEVPLPPYITASEATDEQYQTVYAQHPGAIAAPTAGLHFTPELLENLRDRGINQAFITLHVGVGTFRPVEVEDVTTHQMHEEWIEVPAATVEQIRATKAAGGRVIAVGTTAVRSLEGAAQSGELQPFCGKTNLFIYPGYQWRVVDGLITNFHLPRSSLLMLVSALIGRERLLNLYQEAIAARYRFYSFGDAMLILP

SEQ ID NO: 66773 - protein, 368 aa, unidentified
  source 1..368: note = Fretibacterium sp.
  REGION 1..368: note = tr|A0A3P1Y5B0|A0A3P1Y5B0_9BACT S-adenosylmethionine:tRNA ribosyltransferase-isomerase; OS = Fretibacterium sp. OH1220_COT-178 OX=2491047 GN=queA; PE = 3 SV=1
MSSSVQRALVHEDLFDLNAYDYPLPEDRIAQMPAEPRDSSRLLDWRVGDGRVEHRRFRDILEFLRPNDLLVLNDTRVLPARLLGRRLPGGGGVELLLLSPCSQDFQTWKALVRPGRKLHPGAEVLVGDRKIGIEALAEGGTRIVRVGSGREDVLSFLDAFGRMPLPPYIHGDGDWKEAYQTVFALREGSVAAPTASLHFTRKLLEDIDALGVRRAWVTLHVGLGTFRPVRSADIRDHDIHDEYCEIPRATALAIRECRAAGGRVVAAGTTVARTLESMSDGNGVRSGRMDTRLFIYPGFEFRVVDALITNFHLPKSSLLMLVAAFAAGLGGWRGEEERALSALHEVYALAVAEGYRFFSFGDAMLLHR

SEQ ID NO: 66774 - protein, 342 aa, unidentified
  source 1..342: note = Frischella perrara
  REGION 1..342: note = tr|A0A318N7A3|A0A318N7A3_FRIPE S-adenosylmethionine:tRNA ribosyltransferase-isomerase; OS = Frischella perrara OX=1267021 GN=queA PE=3 SV=1
MQLSDFHFDLPNELIARYPLENRSECRLLCLDGPSGQLENGIFTDILDKLHEGDLLVFNNTRVIPARLYGRKASGGKIEILVERILDNNRVLAHVKASKSPKVGAELLLGEHDQYQITMLARHDALFELQFPDDVLTILNQIGHIPLPPYIDRPDDEHDREVYQTVYNKVPGAVAAPTAGLHFDDGLLNQLKQKGVEMAFVTLHVGAGTFQPVRVDNITDHVMHAEYAQVPQEVVDAVLACKARGKRVIAVGTTSVRALESAAQKTGHIAPFFADTRIFIYPGYHFNVVDALITNFHLPESTLIMLVSAFAGYENTMHAYQQAVQERYRFFSYGDAMFITKK

SEQ ID NO: 66775 - protein, 342 aa, unidentified
  source 1..342: note = Frischella perrara
  REGION 1..342: note = tr|A0A0A7S2Q0|A0A0A7S2Q0_FRIPE S-adenosylmethionine:tRNA ribosyltransferase-isomerase; OS = Frischella perrara OX=1267021 GN=queA PE=3 SV=1
MQLSDFHFDLPNELIARYPLENRSECRLLCLDGPSGQLENGIFTDILDKLHEGDLLVFNNTRVIPARLYGRKASGGKIEILVERILDNNRVLAHVKASKSPKVGAELLLGEHDQYQITMLARHDALFELQFPDDVLTILNQIGHIPLPPYIDRPDDEHDREVYQTVYNKVPGAVAAPTAGLHFDDGLLNQLKQKGVEMAFVTLHVGAGTFQPVRVDHITDHVMHAEYAQVPQEVVDAVLACKARGKRVIAVGTTSVRALESAAQKTGHIAPFFADTRIFIYPGYHFNVVDALITNFHLPESTLIMLVSAFAGYENTMHAYQQAVQERYRFFSYGDAMFITKK

SEQ ID NO: 66776 - protein, 341 aa, unidentified
  source 1..341: note = Frisingicoccus caecimuris
  REGION 1..341: note = tr|A0A4R2M0H3|A0A4R2M0H3_9FIRM S-adenosylmethionine:tRNA ribosyltransferase-isomerase; OS = Frisingicoccus caecimuris OX=1796636 GN=queA PE=3 SV=1
MKTSDFYYDLPEELIAQDPLTDRSSSRLMILDKETGDIRHKIFKDIIDELNPEDCLVINDTKVIPARLHGVKEDTGAHIEVLLLKRKSDSVWETLVKPGKKARPGARISFGDGLLVGEVMEVVEEGNRLIRFEYDGIFEEILDQLGEMPLPPYISHKLQDKNRYQTVYAKHEGSAAAPTAGLHFTEELLDAIQKKGVRIARVTLHVGLGTFRPVKVEDVNDHHMHSEFYMIGQEAADIINDTKRRGGRVISVGTTSTRTLESVADEQGFVRETSGWTEIFIYPGYRFKCIDALITNFHLPESTLLMLVSALAGKEAILNAYETAVKEGYRFFSFGDAMFIE

SEQ ID NO: 66777 - protein, 353 aa, Fructobacillus durionis
  REGION 1..353: note = tr|A0A1I1F344|A0A1I1F344_9LACT S-adenosylmethionine:tRNA ribosyltransferase-isomerase; OS = Fructobacillus durionis OX=283737 GN=queA PE=3 SV=1
MTEAPHYQLSDFDYDLPEELIAQTPLKDRSSSRLLVLNALTGAYEDKHFYDIIDYLNPGDALVMNNSRVLPARLHGIRPTTGGHAEVLLLRQDHDDVWEVLVKPAKKSPVGSTIVFGDDPENPVMTGTIVKELEHGGRYIEFSYQGIFMERLEELGEMPLPPYIKEKLDDQERYQTVYSKVDGSAAAPTAGLHWTPELLQKVADKGVELVELTLHVGLGTFRPVDEENIEDHKMHSEFYQLSEEAAEKLNKVRANGGRVVATGTTSIRTLETIGTKFHGDLKADSGWTDIFIKPGYDWQVVDAFITNFHLPKSTLVMLVAAFTGRDNILNAYKHAVADKYRFFSFGDAMFVHK

SEQ ID NO: 66778 - protein, 345 aa, Fructobacillus ficulneus
  REGION 1..345: note = tr|A0A0K8MHL7|A0A0K8MHL7_9LACT S-adenosylmethionine:tRNA ribosyltransferase-isomerase; OS = Fructobacillus ficulneus OX=157463 GN=queA PE=3 SV=1
  VARIANT 323..333: note = Xaa can be any naturally occurring amino acid
MTEEKHYQLADFDYDLPQELIAQTPLKDRDTSRLLVLNAETGAYEDRHFYDILDYLNPGDALVMNNSRVLPARLHGIRPETGGHAEVLLLRQDHDDVWETLVKPAKKSPIGSTILFGDDPENPVMTGIIVGELEHGGRYVEFTYNGIFMERLNELGEMPLPPYIKEKLADQERYQTVYSKVDGSAAAPTAGLHWTPELLQKVANKGVDLVELTLHVGLGTFRPVEEENIEDHQMHSEFYQLTAEAAAQLNATRARGGRIVATGTTSIRTLETIGSKFEGEIQADSGWTDIFIKPGYQWQVVDAFITNFHLPKSTLVMLVAAFXXXXXXXXXXXPRTHPQCLPACG

SEQ ID NO: 66779 - protein, 353 aa, Fructobacillus fructosus
  REGION 1..353: note = tr|A0A3F3HXN0|A0A3F3HXN0_9LACT S-adenosylmethionine:tRNA ribosyltransferase-isomerase; OS = Fructobacillus fructosus KCTC 3544 OX=930946 GN=queA; PE = 3 SV=1
MGDAPHYQLSDFDYDLPEELIAQTPLKDRSSSRLLVLNALTGNYEDKHFYDILEYLNPGDALVMNNSRVLPARLHGVRPSTGGHAEVLLLRQDHDDVWEVLVKPAKKSPVGSTIVFGDDPKHPVMTGTIVKELDHGGRYIQFDYQGIFMERLEELGEMPLPPYIKEKLDDQERYQTVYSKVDGSAAAPTAGLHWTPELLQKVADKGVELVELTLHVGLGTFRPVDEENIEDHQMHSEFYQLSAEAAAKLNKVRSNGGRIVATGTTSIRTLETIGTKFNGELQADSGWTDIFIKPGYHWQVVDAFITNFHLPKSTLVMLVAAFTGRDNILKAYQHAVLDKYRFFSFGDAMFVHK

SEQ ID NO: 66780 - protein, 353 aa, Fructobacillus pseudoficulneus
  REGION 1..353: note = tr|A0A3F3GTG4|A0A3F3GTG4_9LACT S-adenosylmethionine:tRNA ribosyltransferase-isomerase; OS = Fructobacillus pseudoficulneus OX=220714 GN=queA PE=3; SV = 1
MTEEKHYQLSDFDYHLPQELIAQTPLKDRDTSRLLVLNADTGAYEDKHFYDILEYLQPGDALVMNNSRVLPARLHGVRPETGGHAEVLLLRQDHDDVWETLVKPAKKSPIGSTIVFGDDPAHPVMTATVVGELEHGGRFVEFSYDGIFMERLNELGEMPLPPYIKEKLDDQERYQTVYSKVDGSAAAPTAGLHWTPELLQKVADKGVDLVELTLHVGLGTFRPVEEDNIEDHKMHSEFYQLSEDAAAKLNQTRARGGRIVATGTTSIRTLETIGSKFAGEIQADSGWTDIFIKPGYQWQVVDAFITNFHLPKSTLVMLVAAFTGRENILNAYEHAVEEKYRFFSFGDAMYIHR

SEQ ID NO: 66781 - protein, 353 aa, Fructobacillus sp.
  REGION 1..353: note = tr|A0A0J5PCR2|A0A0J5PCR2_9LACT S-adenosylmethionine:tRNA ribosyltransferase-isomerase; OS = Fructobacillus sp. EFB-N1 OX=1658766 GN=queA PE=3 SV=1
MTEEKHYQLSDFDYDLPQELIAQTPLKERDTSRLLVLNAETGAYEDRHFYDILDYLNPGDALVMNNSRVLPARLHGIRPETGGHAEVLLLRQDHGDVWETLVKPAKKSPIGSTILFGDDPEKPVMTATIVGELEHGGRYVEFSYDGIFMERLNELGEMPLPPYIKKKLADQERYQTVYSKVDGSAAAPTAGLHWTPELLQKVADKGVELVELTLHVGLGTFRPVEEENIEDHQMHSEFYQLSAEAAATLNKVRKQSGRIVATGTTSIRTLETIGSKFDGQLQADSGWTEIFIKPGYQWRVVDAFITNFHLPKSTLVMLVAAFTGRENILNAYHHAVEAKYRFFSFGDAMFIHK

SEQ ID NO: 66782 - protein, 353 aa, Fructobacillus tropaeoli
  REGION 1..353: note = tr|A0A3F3HDJ6|A0A3F3HDJ6_9LACT S-adenosylmethionine:tRNA ribosyltransferase-isomerase; OS = Fructobacillus tropaeoli OX=709323 GN=queA PE=3 SV=1
MTEEKHYQLSDFDYDLPQELIAQTPLKERDTSRLLVLNAETGAYEDRHFYDILDYLNPGDALVMNNSRVLPARLHGIRPETGGHAEVLLLRQDHGDVWETLVKPAKKSPIGSTILFGDDPENPVMTATIVGELEHGGRYVEFSYDGIFMERLNELGEMPLPPYIKEKLADQERYQTVYSKVDGSAAAPTAGLHWTPELLQKVADKGVELVELTLHVGLGTFRPVEEENIEDHQMHSEFYQLSAEAADTLNKVREQGGRIVATGTTSIRTLETIGSKFDGQLQADSGWTDIFIKPGYKWQVVDAFITNFHLPKSTLVMLVAAFTGRENILNAYHHAVEAKYRFFSFGDAMFIHK

SEQ ID NO: 66783 - protein, 377 aa, unidentified
  source 1..377: note = Fuerstia marisgermanicae
  REGION 1..377: note = tr|A0A1P8WA34|A0A1P8WA34_9PLAN S-adenosylmethionine:tRNA ribosyltransferase-isomerase; OS = Fuerstia marisgermanicae OX=1891926 GN=queA PE=3 SV=1
MVDPDPKNVDPDLDHIAAWQFELPPELIAARPTSQRDGGRLLVVRRQTGQIEHRQIVDLPNILQTGDRLVFNNTKVLPARLFGFRTSTGGRWEGLFLEQTDDKRWRITGQTRGRLLEDECLTIVQATEFSPSRTIDDYSAAETLQLRLVERCSDGSWLAEPDLNLQTLQLLEEFGTLPLPPYIGRKVADSADSERYQTVFASQTGAIAAPTAGLHFTPGLLSMCSARGISRSEVTLHVGIGTFRPVSTDRLSEHQMHSEWCRLTAESAADINTTKASGNNVVAVGTTSVRTLEASAAEVMSRDGSLVEWQGATNLFIQPGFRFRAVDQLLTNFHLPGSTLIVLVAALAGYDLTMEAYRKAVEEKYRFYSYGDAMLIL

SEQ ID NO: 66784 - protein, 363 aa, unidentified
  source 1..363: note = Fulvimarina manganoxydans
  REGION 1..363: note = tr|A0A1W1YLD9|A0A1W1YLD9_9RHIZ S-adenosylmethionine:tRNA ribosyltransferase-isomerase; OS = Fulvimarina manganoxydans OX=937218 GN=queA PE=3 SV=1
MRVDLFDFDLPEERIALRPAEPRESARLLQVAPSGLTDRRVADLPDCLRPDDILVFNDTRVIPAQLVGIRRREGLPEGQGVAEIEATLHMRLGPEKWAAFVRPAKRLRPGDRIVFGHEGETCLHGSLQANVEERGEAGEAVLAFDLSGPVLDEAIAAVGHVPLPPYIASKRPEDAQDRTDYQTVYAKDPGAVAAPTAGLHFTPSLFVALKARGVSTEFLTLHVGAGTFLPVKAETTEDHRMHAEIGHIDAALATRLTDAKRAGRRIVSVGTTSLRLLESAAEPDGTIKPFSGPTDIFITPGYRFRAVDALMTNFHLPRSTLFMLVSAFSGLERMRAAYTHAIGAGYRFYSYGDACLLERATDA

SEQ ID NO: 66785 - protein, 358 aa, Fulvimarina pelagi
  REGION 1..358: note = tr|Q0G038|Q0G038_9RHIZ S-adenosylmethionine:tRNA ribosyltransferase-isomerase OS=Fulvimarina pelagi HTCC2506 OX=314231 GN=queA PE=3 SV=1
MRVDLFDFELPPERIALRPAEPRESAMLLGVSLTGLSDLRIADLPALIEPGDVLVFNDTKVIPAQLFGTRVREDSRDGEGVAQVEATLHMRLSPGSWAAFVRPGKRIKVGDTLVFASDDAETLAAEVTARGEGGEATLTFEHSGPDLDAAIAAVGHVPLPPYIAARRGDDARDWTDYQTIYAREAGAVAAPTAGLHFTDNLLEKLHERGVATEFLTLHVGAGTFLPVKADDTEDHRMHAEIGTIDAAMADRLNAARSAGGRIISVGTTSLRLLESAAGDDGRIAPFTGPTDIFITPGYRFKAVDRLMTNFHLPRSTLFMLVSAFCGLERMRRAYEHAIENGYRFYSYGDACLLDRIEE

SEQ ID NO: 66786 - protein, 358 aa, Fulvimarina pelagi; identical to SEQ ID NO: 66785
  REGION 1..358: note = tr|A0A0P0ZAL9|A0A0P0ZAL9_9RHIZ S-adenosylmethionine:tRNA ribosyltransferase-isomerase; OS = Fulvimarina pelagi OX=217511 GN=queA PE=3 SV=1

SEQ ID NO: 66787 - protein, 362 aa, Fulvimarina sp.
  REGION 1..362: note = tr|A0A2E1H803|A0A2E1H803_9RHIZ S-adenosylmethionine:tRNA ribosyltransferase-isomerase; OS = Fulvimarina sp. OX=1969479 GN=queA PE=3 SV=1
MRVDLFDFELPEERIALRPAVPREAARLLHVGPGDRLADHHVGDLPDLLEPGDVLVFNDTRVIPARLSGVRRREGAVAGEGVARIEATLHMRMAPDRWKAFLRPAKRVKLGDRIVFGSEADNACLLAGLAATVEERGEGGETTLRFELEGPALDEAIAAVGHMPLPPYIASKRAEDAADLADYQTIFARESGAVAAPTAGLHFTPELMARLETRGLLTEFLTLHVGAGTFLPVKAEDTDEHKMHAEIGVVDAATAARLNAVRQKGGRLVAVGTTSLRLLESATGEDGVIRPFAGPTDIFITPGYRFRAVDRLVTNFHLPRSTLFMLVSAFSGLEAMRAAYAHAVDSGYRFYSYGDACLLERA

SEQ ID NO: 66788 - protein, 363 aa, Fulvimarina sp.
  REGION 1..363: note = tr|A0A371X7D9|A0A371X7D9_9RHIZ S-adenosylmethionine:tRNA ribosyltransferase-isomerase; OS = Fulvimarina sp. 85 OX=2293836 GN=queA PE=3 SV=1
MKVDLFDFELPPERIALRPASPRESARLLEVRADGLSDRTIADLPDLLNPGDILVFNDTRVIPAQLVGMRTREGNREGEGTARIDTTLHMRLAGDRWAAFVRPAKRVKPGDSIVFSRGEAEPLRAEVSERGEAGEAVLVFERSGPDLDAAIAAVGHVPLPPYIAAKRGEDEQDRTDYQTIYAKDPGAVAAPTAGLHFTETLLETLRKRGIETAFLTLHVGAGTFLPVKADDTSDHRMHAEIGHIDRATADRLNAVRNAGGRIVAVGTTSLRLLESAAGEDGIIAPFSGATDIFITPGYRFRAIDRLLTNFHLPRSTLFMLVSALSGTKRMHAAYAHAIASGYRFYSYGDACLLDRIPEDIARP

SEQ ID NO: 66789 - protein, 343 aa, Fulvimonas soli
  REGION 1..343: note = tr|A0A316II69|A0A316II69_9GAMM S-adenosylmethionine:tRNA ribosyltransferase-isomerase; OS = Fulvimonas soli OX=155197 GN=queA PE=3 SV=1
MKKSDFDFHLPPELIAQAPLPERSASRLLVLDVPARSLADRMFRELPALLRKGDLLVFNDTRVLPARLHGRKESGGAVEILIERVTGAHEAIVQLGVSKKPKEGGRIALGDGSLATVLGREDAFFRLRFESPEPLERLLAKLGEMPLPPYIARHADASDLERYQTVYAREPGAVAAPTAGLHFDEALLGSLRDMGVEFGYVTLHVGAGTFQPVRTENIHEHRMHREWLNVGASLVEKIRRTRAAGGRVIAVGTTVVRALESATVDGELRPFAGETQIFIFPGYRITSIDGLVTNFHLPQSTLLMLVSALAGREFVLEAYRHAVERRYRFFSYGDAMLVLPRGA

SEQ ID NO: 66790 - protein, 404 aa, unidentified
  source 1..404: note = Fulvivirga imtechensis
  REGION 1..404: note = tr|L8JXP8|L8JXP8_9BACT S-adenosylmethionine:tRNA ribosyltransferase-isomerase OS=Fulvivirga imtechensis AK7; OX = 1237149 GN=queA PE=3 SV=1
MLDKELPEIRLQDYKYDLPEERIAKFPLKERKDSKLLVYQTGNIEHTHFHQLEKHIPENTSLFFNDTRVIPARLHFKKETGAHIEVFLLEPVSPTRDVAQSMWVKDNCQWKCLVGNLKKWKDDQALTLILPVGNEEVTLKAFVADRSLQLVTFEWSGDHTFVDIIQAAGKIPLPPYINREVSDEDKERYQTIYSHHAGAVAAPTAGLHFSDQILKNLKAKGVSLNYLTLHVSAGTFQPVKEENVLHHPMHSEQIVVTMDNIDALLSNDQVIAVGTTSMRTLESLYWYGVKILLKKDAKFIIEKLLPYEFDCARLPEPQEAFKVIKRWMQQNNLHTIIGNTEIFIFPGYEFKVCKGLITNYHLPGSTLILLVAAFIGEDWRKVYKEALDNEYRFLSYGDSSLLMP

SEQ ID NO: 66791 - protein, 320 aa, unidentified
  source 1..320: note = Fulvivirga imtechensis
  REGION 1..320: note = tr|L8JZY3|L8JZY3_9BACT S-adenosylmethionine:tRNA ribosyltransferase-isomerase OS=Fulvivirga imtechensis AK7; OX = 1237149 GN=queA PE=3 SV=1
MVVHKDTKEIEHRSFKDIVEYFGDGDVLVTNDTQVFPARLYGNKEKTGAKIEVFLLRELNQEMHLWDVLVDPARKIRVGNKLYFGEGDLVAEVIDNTTSRGRTIRFLYDGSDEEFYKTIDSLGETPLPKYIKRETEPEDRERFQTIYAKHKGAVAAPTAGLHFTRQLLKRLEIKNVKMSAITLHIGLGTFRPVDVEDLTKHKMDSENFRVSEETVSTVNHALDNKKRVCAVGTTSMRALESSVSANGRLKPKEGWTDKFIFPPYDFKICNAMITNFHMPESTLLMMASAFGGYDLIMKAYETAIKEKYRFLTYGDAMLII

SEQ ID NO: 66792 - protein, 414 aa, Fulvivirga sp.
  REGION 1..414: note = tr|A0A553F5W0|A0A553F5W0_9BACT S-adenosylmethionine:tRNA ribosyltransferase-isomerase; OS = Fulvivirga sp. M361 OX=2594266 GN=queA PE=3 SV=1
MTQDLPNIDLKKFQYNLPEEKIAKFPLKERSDSKLLCYQKGTIEHHQFKDISELLPENATLFFNNTRVIPARLHFFKETGALIEVFLLEPVSPTPDVASAMLIKGQCQWKCMIGNLKKWKDNIPLSLYLDEVLTISASIVDRDEQIVEFNWKSDHSFVDLLQLAGKIPLPPYIRREVSETDKERYQTVYSAQEGAVAAPTAGLHFDNKVLANLHLKGIKTDYLTLHVSAGTFQPIKSDNIMKHPMHHEQVTVTKANLESIMASDDIIAVGTTSLRTLESLYWYGVDLLLKNKQDFHIEKLRPYVLNESLPNAKTAIKAVLDHMTDTELDEISGSTEIFIFPGYSFKICNGLVTNYHLPGSTLILLIAAFIGEDWRKVYEEALQNNYRFLSYGDSSLLIPSSSSGQGNEKKLSLF

SEQ ID NO: 66793 - protein, 348 aa, Fulvivirga sp.
  REGION 1..348: note = tr|A0A553FG59|A0A553FG59_9BACT S-adenosylmethionine:tRNA ribosyltransferase-isomerase; OS = Fulvivirga sp. M361 OX=2594266 GN=queA PE=3 SV=1
MKLSEFKFDLPTGLVALYPAENRDESRLMVLHRDSGEIEHKVFKDIVNYFDEGDVMVSNDTMVFPARLYGNKEKTGAKIEVFLLRELNEEMHLWDVLVDPARKIRVGNKLYFGDGDLVAEVIDNTTSRGRTIRFLFDGTDEEFYKTIENLGETPLPKYIKRDTEPEDKDRFQTIYAKNKGAVAAPTAGLHFTRQLLKRLEIKGVEMDHITLHIGLGTFRPVDVEDLTKHKMDSENFNVGDHTVEKVNLALDSKKKVCAVGTTTMRALESSVSANNRLKPRTGWTDKFIFPQYDFKICSAMVTNFHMPESTLLMMAAAFGGYELVMEAYQVAMKEKYRFLTYGDAMLIV

SEQ ID NO: 66794 - protein, 340 aa, Fusibacter sp.
  REGION 1..340: note = tr|A0A4Q1ZVZ3|A0A4Q1ZVZ3_9FIRM S-adenosylmethionine:tRNA ribosyltransferase-isomerase; OS = Fusibacter sp. A1 OX=2283630 GN=queA PE=3 SV=1
MKTSDFYFDLPDEQIAQTPLENRSSSKLMVLNRKNHTIEHKVFKDILDHLNKGDCLVLNNTRVLPARLFGQKDTGATVEFLLLTRTGTDEWECLVKPGRKAKVGAKFVFGDDRLRGEIIGLGEEGTRIIKFEYEGVFEAVLDELGTMPLPPYITEKLEDSERYQTVYNKHSGSAAAPTAGLHFTDELMKAIEEKGVKLAYVTLHVGLGTFRPVKVDDVNDHQMHAEWYELDEPNAQIIKEAKMTGNRIVAVGTTSTRTLETIGSNHGEVAPCSGWTDIFIYPGYEFKIVDALITNFHLPESTLLMLISALYDKEEIMKAYQVAVAMNYRFFSFGDAMFIE

SEQ ID NO: 66795 - protein, 340 aa, Fusibacter sp.
  REGION 1..340: note = tr|A0A1B6BFV5|A0A1B6BFV5_9FIRM S-adenosylmethionine:tRNA ribosyltransferase-isomerase; OS = Fusibacter sp. 3D3 OX=1048380 GN=queA PE=3 SV=1
MRTKDFYFDLPEALIAQVPLEDRSESRLMVLDRQTGDVTHKIFKEIQAYLKSGDCLVLNNTKVIPARLFGTKDTGAVIEFLLLKRISERRWETLVKPGRKAKIGATFTFGAGQLTCEVVAIGDEGSRIIEFMYEGIFETILDELGNMPLPPYITAKLDDPKRYNTVYAKHDGSAAAPTAGLHFTEALMTSLKAQGVKIAYVTLHVGLGTFRPVKVDDVLNHKMHSEFYMLDAENAELINRTKAEGGRVISVGTTSTRTIETIANEYGKLVEASGWTEIFIYPGYEFKVIDGLITNFHLPESTLIMLVSALSSKEHVLKAYEIAVAEQYRFFSFGDAMLIL

SEQ ID NO: 66796 - protein, 341 aa, unidentified
  source 1..341: note = Fusicatenibacter saccharivorans
  REGION 1..341: note = tr|A0A174R2Q1|A0A174R2Q1_9FIRM S-adenosylmethionine:tRNA ribosyltransferase-isomerase; OS = Fusicatenibacter saccharivorans OX=1150298 GN=queA PE=3; SV = 1
MKTSDFYYDLPKELIAQDPLEDRSASRLMHLDKTTGEYKHGHFRDILQYLKPGDCLVINDTKVIPARLYGSKVGTDAAIEILLLKRKENDIWETLVKPGKKCKVGTVISFGDGILTGEVVDIVDEGNRLIQFHYEGIFEEILDQLGEMPLPPYITHKLQDKNRYQTVYAKHEGSAAAPTAGLHFTKELLQQVQDAGVKIAHVTLHVGLGTFRPVKVEDVTQHHMHSEFYVVEEDQAKLINDTKANGGRVISVGTTSCRTLESATGEDGILRAGSGWTEIFIYPGYHFKMIDGLITNFHLPESTLVMLVSALAGKEHIMAAYEEAVREKYRFFSFGDAMIIE

SEQ ID NO: 66797 - protein, 341 aa, unidentified
  source 1..341: note = Fusicatenibacter saccharivorans
  REGION 1..341: note = tr|A0A174K4W2|A0A174K4W2_9FIRM S-adenosylmethionine:tRNA ribosyltransferase-isomerase; OS = Fusicatenibacter saccharivorans OX=1150298 GN=queA PE=3; SV = 1
MKTSDFYYDLPKELIAQDPLEDRSASRLMHLNKETGEYEHGHFRDILKYLKPGDCLVINDTKVIPARLYGSKVGTDAAIEILLLKRRENDIWETLVKPGKKCKVGTVISFGDGILTGEVVDIVDEGNRLIQFHYDGIFEEILDQLGEMPLPPYITHKLQDKNRYQTVYAKHEGSAAAPTAGLHFTKELLQQVQDAGVKIAHVTLHVGLGTFRPVKVEDVTQHHMHSEFYVVEEDQAKLINDTKAAGGRVIAVGTTSCRTLESATGEDGILKAGSGWTEIFIYPGYCFKMIDGLITNFHLPESTLVMLVSALAGKEHIMAAYEEAVREKYRFFSFGDAMMIE

SEQ ID NO: 66798 - protein, 344 aa, unidentified; identical to SEQ ID NO: 66178
  source 1..344: note = Fusicatenibacter sp.
  REGION 1..344: note = tr|A0A174NSV7|A0A174NSV7_9FIRM S-adenosylmethionine:tRNA ribosyltransferase-isomerase; OS = Fusicatenibacter sp. 2789STDY5834925 OX=1806509 GN=queA; PE = 3 SV=1

SEQ ID NO: 66799 - protein, 340 aa, unidentified
  source 1..340: note = Fusobacteria bacterium
  REGION 1..340: note = tr|A0A432I9X0|A0A432I9X0_9BACT S-adenosylmethionine:tRNA ribosyltransferase-isomerase; OS = Fusobacteria bacterium OX=2060921 GN=queA PE=3 SV=1
MLLSDYDYNLPEELIGQTPTMPRDHSRLLVVDKTKKTTEHKKFYDILNYLKKGDVLVRNSTKVIPARLIGKKESGAVMEVFLLKRLELNKWECLVRRAKKLKIDQSIIFGDGQLKATLKEVKEDGNRILEFEFDGIFEEIIHELGQMPLPPYITEKLEDGDRYQTVYAEKGESVAAPTAGLHFTKELFEKIAEKGVEIVDVYLEVGLGTFRPVQTENVLDHKMHSETFEVPQKTAEVVNKAKSEGRRIIAVGTTSIRTLESATNENGELLPISGDTEIFIYPGYKFKIVDALITNFHLPKSTLLMLVSALSEKDFIFKVYEEAVKEKYKFFSFGDAMFIY

SEQ ID NO: 66800 - protein, 340 aa, unidentified
  source 1..340: note = Fusobacteriaceae bacterium
  REGION 1..340: note = tr|A0A349GRN7|A0A349GRN7_9FUSO S-adenosylmethionine:tRNA ribosyltransferase-isomerase; OS = Fusobacteriaceae bacterium OX=2053555 GN=queA PE=3 SV=1
MLLSDYDYYLPKELIGQTPTMPRDHSRLLVVNKTKKEIEHKSFFNILEYLNKGDVLVRNSTKVIPARLIGKKESGAVMEVFLLKRLELNRWECLVRRAKKLKLDQTIIFGDGELKATLKEVKEDGNRILEFIFDGVFEEIIDELGQMPLPPYITEKLEDGDRYQTVYAEKGESVAAPTAGLHFTDELFEKIVKKGVEVVDVYLEVGLGTFRPVQTENVLEHKMHSETFEVPEKTAEVVNRAKAEGRRIIAVGTTSIRTLESATDSCGKLVATSGNTEIFIYPGYDFKIVDALITNFHLPKSTLLMLVSALSEKDFMFSVYENAVKEKYKFFSFGDAMFIY

SEQ ID NO: 66801 - protein, 252 aa, unidentified
  source 1..252: note = Fusobacteriia bacterium
  REGION 1..252: note = tr|A0A1W9W0K6|A0A1W9W0K6_9BACT S-adenosylmethionine:tRNA ribosyltransferase-isomerase (Fragment) OS=Fusobacteriia bacterium 4572_74 OX=1972457; GN = B6227_03315 PE=3 SV =1
MLLSDYDYHLPKELIGQTPTMPRDHSRLLVVDKTKKEIEHKKFYNILDYLNEGDVLVRNSTKVIPARLIGKKESGAVMEVFLLKRLGLNKWECLVRRAKKLKLDQTIIFGDGQLNATLKEVKDDGNRILEFTFDGIFEEIIHELGQMPLPPYITEKLEDGDRYQTVYAEKGESVAAPTAGLHFTEELFEKIAQKGIEIVDVYLEVGLGTFRPVQTENVLEHKMHSETFEVPEKTAEVVNRAKAEGRRIVAVG

SEQ ID NO: 66802 - protein, 340 aa, unidentified
  source 1..340: note = Fusobacteriia bacterium
  REGION 1..340: note = tr|A0A1W9TIC2|A0A1W9TIC2_9BACT S-adenosylmethionine:tRNA ribosyltransferase-isomerase; OS = Fusobacteriia bacterium 4572_132 OX=1971640 GN=queA; PE = 3 SV=1
MKLTEYDYNLPEEFIAQEPVSPRDSSKLMVLNKEKETIEHKHFYDIIDYLKKGDLLVMNSTKVIPARLMGRKKTGGFAEIFLLNRIDINNWECLVRPGRRLKEGTKVYFGKNKLIATIIKRKENGNRVVAFEYDGIFEEILDELGEMPLPPYIKAELKEKDRYQTVYAQKGESVAAPTAGLHFTQELLTKIKEKGVEIAEVFLEVGLGTFRPVKTENVLEHQMHEEKYEVPVDAAEKINRAKREGRRVIAVGTTSVRTLESASEKKNEIIAKKESTDIFIYPGYEFKIVDAIITNFHLPKSTLIMLISAFAKKDFIFEAYEKAIKDKYRFFSFGDAMFIY

SEQ ID NO: 66803 - protein, 351 aa, Fusobacterium canifelinum
  REGION 1..351: note = tr|A0A3P1URF2|A0A3P1URF2_9FUSO S-adenosylmethionine:tRNA ribosyltransferase-isomerase; OS = Fusobacterium canifelinum OX=285729 GN=queA PE=3 SV=1
MKKLRKRKMSTYLSDYDYFLPEELIGQKPREPRDSAKLMLIDRKNESVEHKNFYNIIDYLQKGDVLVRNATKVIPARIFGHKDTGGVLEILLIKRITLDTWECLLKPAKKLKLGQKLYIGENKELIAELLEIKEDGNRILKFYHEGSFEEILDKLGSMPLPPYITSKLENKDRYQTVYAQRGESVAAPTAGLHFTEELLKKILDKGVEIVDIFLEVGLGTFRPVQTENVLEHKMHEESFEISEKVAKIINEAKVEGRRIISVGTTATRALESSVDENGKLIAQKKDTGIFIYPGYKFKIVDALITNFHLPKSTLLMLVSAFYDREKMLEIYNLAVKEKYHFFSFGDSMFIY

SEQ ID NO: 66804 - protein, 343 aa, Fusobacterium equinum
  REGION 1..343: note = tr|A0A133NB58|A0A133NB58_9FUSO S-adenosylmethionine:tRNA ribosyltransferase-isomerase; OS = Fusobacterium equinum OX=134605 GN=queA PE=3 SV=1
MSTKLHDYDYHLPEELIGQTPREPRDHAKLLLVNRDTKTIEDKYFYDILDYLQKGDVLVRNSTKVIPARLYGQKETGGILEVFLVKRKDLDTWECLLKPAKKLKLGQKIYIGPNSELVAELLEIQEDGNRILKFSYEGSFEENLDRLGTMPLPPYIVEKLEDQEMYQTVYAKRGESVAAPTAGLHFTEELLQKIQEKGIEIVDIYLEVGLGTFRPVQTEDVLDHKMHEELFEIPEEAAQKINQAKAEGRRIISVGTTTTRALESSVDENGILLAQKKNTGIFIYPGYQFQIVDALITNFHLPKSTLLMLVSAFSEREFILEIYQHAVEEKYHFFSFGDAMFIY

SEQ ID NO: 66805 - protein, 343 aa, Fusobacterium gonidiaformans
  REGION 1..343: note = tr|E5BGK9|E5BGK9_9FUSO S-adenosylmethionine:tRNA ribosyltransferase-isomerase OS=Fusobacterium gonidiaformans 3-1-5R OX=469605 GN=queA PE=3 SV=1
MSTKLHDYDYHLPEELIGQTPREPRDHAKLLLVNRDTKTIEDKYFYDILDYLQKGDVLVRNSTKVIPARLYGQKETGGILEVLLVKRKDLDTWECLLKPAKKLKLGQKIYIGPNSELVAELLEIQEDGNRILKFSYEGSFEENLDRLGTMPLPPYIVEKLEDQEMYQTVYAKRGESVAAPTAGLHFTEELLQKIQEKGIEIVDIYLEVGLGTFRPVQTEDVLDHKMHEELFEIPEEAAQKINQAKAEGRRIISVGTTTTRALESSVDENGILLAQKKNTGIFIYPGYQFQIVDALITNFHLPKSTLLMLVSAFSEREFILEIYQHAVEEKYHFFSFGDAMFIY

SEQ ID NO: 66806 - protein, 343 aa, unidentified
  source 1..343: note = Fusobacterium hwasookii
  REGION 1..343: note = tr|A0A0S2ZQE5|A0A0S2ZQE5_9FUSO S-adenosylmethionine:tRNA ribosyltransferase-isomerase; OS = Fusobacterium hwasookii ChDC F174 OX=1307442 GN=queA; PE = 3 SV=1
MSTYLSDYDYFLPEELIGQKPREPRDSAKLMLIDRKNESIEHKNFYNIIDYLQKGDILVRNATKVIPARIFGHKDTGGVLEILLIKRITLDTWECLLKPAKKLKLGQKLYIGENKELIAELLEIKEDGNRILKFYHEGSFEEILDKLGSMPLPPYITSKLENKDRYQTVYAQRGESVAAPTAGLHFTEELLKKILDKGVEIVDIFLEVGLGTFRPVQTENVLEHKMHEESFEISEKVAKIINEAKTEGRRIISVGTTATRALESSVDENGKLIAQKKDTGIFIYPGYKFKIVDALITNFHLPKSTLLMLVSAFYDREKMLEIYNLAVKEKYHFFSFGDSMFIY

SEQ ID NO: 66807 - protein, 343 aa, unidentified
  source 1..343: note = Fusobacterium hwasookii
  REGION 1..343: note = tr|J8S3E1|J8S3E1_9FUSO S-adenosylmethionine:tRNA ribosyltransferase-isomerase OS=Fusobacterium hwasookii ChDC F128 OX=1216362 GN=queA PE=3 SV=1
MSTYLSDYDYFLPEELIGQKPREPRDSAKLMLIDKKNESIEHKNFYNIIDYLQKGDILVRNATKVIPARIFGHKDTGGVLEILLIKRITLDTWECLLKPAKKLKLGQKLYIGENKELIAELLEIKEDGNRILKFYHEGSFEEILDKLGSMPLPPYITSKLENKDRYQTVYAQRGESVAAPTAGLHFTEELLKKIIDKGVEIVDIFLEVGLGTFRPVQTENVLEHKMHEESFEISEKVAKIINEAKVEGRRIISVGTTATRALESSVDENGKLIAQKKDTGIFIYPGYKFKIVDALITNFHLPKSTLLMLVSAFYDREKMLEIYNLAVKEKYHFFSFGDSMFIY

SEQ ID NO: 66808 - protein, 343 aa, Fusobacterium mortiferum
  REGION 1..343: note = tr|C3WA27|C3WA27_FUSMR S-adenosylmethionine:tRNA ribosyltransferase-isomerase OS=Fusobacterium mortiferum ATCC 9817 OX=469616 GN=queA PE=3 SV=1
MSTKLHDYDYHLPEELIGQEPREPRDHARLMLVDKTNKKIEHKHFYDIIDYLQEGDILVRNSTKVIPARLFGHKETGGVLEILLIKRINLDTWECLLKPAKKLKLGQKLYMGQNSELVAELIEIKDDGNRVLKFTYEGAFEEVLDKLGNMPLPPYIVETLKEKERYQTVYAQRGESVAAPTAGLHFTKELLEKIEKKGIKIVDIFLEVGLGTFRPVQTEDVLDHKMHEEIFEIPQEAADIINKGKAEGRRIISVGTTSTRALESSVDENGKVIAQKASTDIFIYPGYEFKVIDALITNFHLPKSTLLMLVSAFSSREFMLSVYETAVKEKYHFFSFGDAMFIY

SEQ ID NO: 66809 - protein, 343 aa, Fusobacterium mortiferum
  REGION 1..343: note = tr|A0A414PZS4|A0A414PZS4_FUSMR S-adenosylmethionine:tRNA ribosyltransferase-isomerase; OS = Fusobacterium mortiferum OX=850 GN=queA PE=3 SV=1
MSTKLHDYDYHLPEELIGQEPREPRDHARLMLVDKTNKKIEHKHFYDIIDYLQEGDILVRNSTKVIPARLFGHKETGGVLEILLIKRINLDTWECLLKPAKKLKIGQKLYVGQNSELVAELIEIKDDGNRVLKFTYEGAFEEVLDKLGNMPLPPYIVETLKEKERYQTVYAQRGESVAAPTAGLHFTKELLEKIEKKGIKIVDIFLEVGLGTFRPVQTEDVLDHKMHEEIFEIPQEAADIINKGKAEGRRIISVGTTSTRALESSVDENGKVIAQKASTDIFIYPGYEFKVIDALITNFHLPKSTLLMLVSAFSSREFMLSVYETAVKEKYHFFSFGDAMFIY

SEQ ID NO: 66810 - protein, 341 aa, Fusobacterium naviforme
  REGION 1..341: note = tr|A0A2P8EPB2|A0A2P8EPB2_9FUSO S-adenosylmethionine:tRNA ribosyltransferase-isomerase; OS = Fusobacterium naviforme OX=77917 GN=queA PE=3 SV=1
MDVSEFNYELPEELIAQDPLEDRSASRLLVLHRESGEREHRHFRDILEYLRKGDCLVINDTKVIPARLIGAKEGTGAKIEVLLLTRKEDNIWETLVKPGKKCRIGTVISFGDGLLRGKVVGQTEDGNRFIQFFYEGIFEEILDQLGQMPLPPYIRHQLKDKNRYQTVYAEHEGSAAAPTAGLHFTKELLEEIRSAGVDIVHVTLHVGLGTFRPVKEKDILKHHMHSEYYIVTQEAADRINAAKAAGGRIICVGTTSCRTLESAADEHGILHAKSDWTNIFIYPGYRFKILDCLITNFHLPESTLVMLVSALAGREQILAAYEEAVRERYRFFSFGDAMFID

SEQ ID NO: 66811 - protein, 343 aa, Fusobacterium necrogenes
  REGION 1..343: note = tr|A0A377GWA9|A0A377GWA9_9FUSO S-adenosylmethionine:tRNA ribosyltransferase-isomerase; OS = Fusobacterium necrogenes OX=858 GN=queA PE=3 SV=1
MSTKLHDYDYHLPEELIGQEPREPRDHARLMLVDKTNKKIEHKHFYDIIDYLQEGDILVRNSTKVIPARLFGHKETGGVLEILLIKRINLDTWECLLKPAKKLKLGQKLYVGQNSELVAELIEIKDDGNRVLKFTYEGAFEEVLDKLGNMPLPPYIVETLKEKERYQTVYAQRGESVAAPTAGLHFTKELLEKIEKKGIKIVDIFLEVGLGTFRPVQTEDVLDHKMHEEIFEIPQEAADIINKGKAEGRRIISVGTTSTRALESSVNENGKVIAQKASTDIFIYPGYEFKVIDALITNFHLPKSTLLMLVSAFSSRKFMLSVYETAVKEKYHFFSFGDAVFIY

SEQ ID NO: 66812 - protein, 343 aa, Fusobacterium necrophorum
  REGION 1..343: note = tr|A0A0E2V1F3|A0A0E2V1F3_9FUSO S-adenosylmethionine:tRNA ribosyltransferase-isomerase; OS = Fusobacterium necrophorum DJ-2 OX=1441737 GN=queA PE=3; SV = 1
MSTKLQDYDYDLPEELIGQSPREPRDHAKLLLINRKTKKLEDKYFYDILDYLQKGDVLVRNSTKVIPARLYGQKETGGVLEVLLVKRKDLDTWECLLKPAKKLKLGQKIWIGPNAELVAELLEIQEDGNRILKFSYQGSFEENLDRLGTMPLPPYIVEKLEDQEMYQTVYAKRGESVAAPTAGLHFTKELLEKIQEKGIEIVDIYLEVGLGTFRPVQTEDVLNHKMHEELFEIPPEAAEKINRAKAEGRRIISVGTTTTRALESSVDENGILLAQKKNTDIFIYPGYRFQMVDALITNFHLPKSTLLMLVSAFSEREFMLDVYHHAVEQEYHFFSFGDAMFIY

SEQ ID NO: 66813 - protein, 343 aa, Fusobacterium necrophorum
  REGION 1..343: note = tr|A0A017H6F9|A0A017H6F9_9FUSO S-adenosylmethionine:tRNA ribosyltransferase-isomerase; OS = Fusobacterium necrophorum subsp. funduliforme B35; OX = 1226633 GN=queA PE=3 SV =1
MSTKLQDYDYDLPEELIGQSPREPRDHAKLLLIDRKTKKLEDKYFYDILDYLQKGDVLVRNSTKVIPARLYGQKETGGVLEVLLVKRKDLDTWECLLKPAKKLKLGQKIWIGPNAELVAELLEIQEDGNRILKFSYQGSFEENLDRLGTMPLPPYIVEKLEDQEMYQTVYAKRGESVAAPTAGLHFTKELLEKIQEKGIEIVDIYLEVGLGTFRPVQTEDVLNHKMHEELFEIPPEAAEKINRAKAEGRRIISVGTTTTRALESSVDENGILLAQKKNTDIFIYPGYRFQMVDALITNFHLPKSTLLMLVSAFSEREFMLDVYHHAVEQEYHFFSFGDAMFIY

SEQ ID NO: 66814 - protein, 351 aa, Fusobacterium nucleatum
  REGION 1..351: note = sp|Q8R620|QUEA_FUSNN S-adenosylmethionine:tRNA ribosyltransferase-isomerase OS=Fusobacterium nucleatum subsp. nucleatum (strain ATCC 25586 / CIP 101130 / JCM 8532 /LMG 13131) OX=190304 GN=queA PE=3 SV=1
MKKLRKRKMSTYLSDYDYFLPEELIGQKPREPRDSAKLMLIDRKNGSVEHKNFYNIIDYLQKGDILVRNATKVIPARIFGHKDTGGVLEILLIKRITLDTWECLLKPAKKLKLGQKLYIGENKELIAELLEIKEDGNRILKFYYEGSFEEILDKLGSMPLPPYITRKLENKDRYQTVYAQRGESVAAPTAGLHFTEELLNKILDKGVEIVDIFLEVGLGTFRPVQTVNVLEHKMHEESFEISEKVAKIINEAKAEGRRIISVGTTATRALESSVDENGKLIAQKKDTGIFIYPGYKFKIVDALITNFHLPKSTLLMLVSAFYDREKMLEIYNLAVKEKYHFFSFGDSMFIY

SEQ ID NO: 66815 - protein, 222 aa, Fusobacterium nucleatum
  REGION 1..222: note = tr|Q7P5C7|Q7P5C7_FUSNV S-adenosylmethionine:tRNA ribosyltransferase-isomerase OS=Fusobacterium nucleatum subsp. vincentii ATCC 49256 OX=209882 GN=FNV0706 PE=3 SV=1
MKKLRKKKMSTYLSDYDYFLPEELIGQKPREPRDSAKLMLIDRKTGSIEHKHFYNIVDYLQKGDVLVRNATKVIPARIFGHKDTGGVLEILLIKRISLDTWECLLKPAKKLKLGQKLYIGENKELIAELLEIKEDGNRILKFYYEGSFEEILDKLGSMPLPPYITRKLENKDRYQTVYAQRGESVAAPTAGLHFTEELLKKILDKGVVIVDNFFKKSRIGHF

SEQ ID NO: 66816 - protein, 343 aa, Fusobacterium periodonticum
  REGION 1..343: note = tr|K1GMG5|K1GMG5_9FUSO S-adenosylmethionine:tRNA ribosyltransferase-isomerase OS=Fusobacterium periodonticum D10 OX=620833 GN=queA PE=3 SV=1
MSTYLSDYDYFLPEELIGQKPREPRDSAKLMLINRKTGEIEHKHFYNIIDYLQKGDVLVRNATKVIPARIYGHKESGGVLEVLLIKRISIDTWECLLKPAKKLKLGQKLYIGENKELIAELLEIKEDGNRILKFYYEGSFEAVLDKLGSMPLPPYITRKLENKDRYQTVYAQRGESVAAPTAGLHFTEELLKKISEKGIEIVDIFLEVGLGTFRPVQTENVLEHKMHEESFEISEKAAKTINEAKAQGRRIISVGTTATRALESSVDENGKLIAQKKDTGIFIYPGYQFKIVDALITNFHLPKSTLLMLVSALYDREKMLEIYNLAVKEEYHFFSFGDSMFIY

SEQ ID NO: 66817 - protein, 351 aa, Fusobacterium periodonticum
  REGION 1..351: note = tr|A0A2D3LWR6|A0A2D3LWR6_9FUSO S-adenosylmethionine:tRNA ribosyltransferase-isomerase; OS = Fusobacterium periodonticum OX=860 GN=queA PE=3 SV=1
MKKLRKMKMSTYLSDYDYFLPEELIGQKPREPRDSAKLMLINRKTGEIEHKHFYNIIDYLQKGDVLVRNATKVIPARIYGHKESGGVLEVLLIKRISIDTWECLLKPAKKLKLGQKLYIGENKELIAELLEIKEDGNRILKFYYEGSFEEVLDKLGSMPLPPYITRKLENKDRYQTVYAQRGESVAAPTAGLHFTEELLKKISEKGIEIVDIFLEVGLGTFRPVQTENVLEHKMHEESFEISEKAAKAINEAKAQGRRIISVGTTATRALESSVDENGKLIAQKKDTGIFIYPGYQFKIVDALITNFHLPKSTLLMLVSALYDREKMLEIYKLAVKEEYHFFSFGDSMFIY

SEQ ID NO: 66818 - protein, 343 aa, Fusobacterium sp.
  REGION 1..343: note = tr|X8GWI1|X8GWI1_9FUSO S-adenosylmethionine:tRNA ribosyltransferase-isomerase OS=Fusobacterium sp. CM22; OX = 936563 GN=queA PE=3 SV=1
MSTYLSDYDYFLPEELIGQKPREPRDSAKLMLIDRKTGSIEHKNFYNIIDYLQKGDVLVRNATKVIPARIFGHKDTGGVLEILLIKRITLDTWECLLKPAKKLKLGQKLYIGENKELIAELLEIKEDGNRILKFYHEGSFEEILDKLGSMPLPPYITSKLENKDRYQTVYAQRGESVAAPTAGLHFTEELLKKILDKGVEIVNVFLEVGLGTFRPVQTENVLEHKMHEESFEISEKAAKIINEAKTEGRRIISVGTTATRALESSVDENGKLIAQKKDTGIFIYPGYKFKIVDALITNFHLPKSTLLMLVSAFYDREKMLEIYNLAVKEKYHFFSFGDSMFIY

SEQ ID NO: 66819 - protein, 343 aa, Fusobacterium sp.
  REGION 1..343: note = tr|R5X791|R5X791_9FUSO S-adenosylmethionine:tRNA ribosyltransferase-isomerase OS=Fusobacterium sp. CAG:649; OX = 1262900 GN=queA PE=3 SV=1
MSTYLNDYDYFLPEELIGQKPREPRDSAKLMLINRKTGSIEHKHFYNIVDYLQKGDVLVRNATKVIPARIFGHKDTGGVLEILLVKRISLDTWECLLKPAKKLKLGQKLYIGENKELIAELLEIKEDGNRILKFYHEGSFEEILDKLGSMPLPPYITRKLENKDRYQTVYAQRGESVAAPTAGLHFTEELLKKILDKGVEIVDIFLEVGLGTFRPVQTVNVLEHKMHEESFEISEKAAKIINEAKTEGRRIISVGTTATRALESSVDENGKLIAQKKDTGIFIYPGYEFKIVDALITNFHLPKSTLLMLVSAFYDREKMLEIYNLAVKEKYHFFSFGDSMFIY

SEQ ID NO: 66820 - protein, 343 aa, Fusobacterium ulcerans
  REGION 1..343: note = tr|A0A2P1S1D4|A0A2P1S1D4_9FUSO S-adenosylmethionine:tRNA ribosyltransferase-isomerase; OS = Fusobacterium ulcerans OX=861 GN=queA PE=3 SV=1
MSTLLSDYDYHLPEKLIGQQPREPRDHARLMLVNRKNESIEHKKFYDIIDYLNEGDILVRNSTKVIPARLFGHKETGGVLEILLIKRIDLDTWECLLKPAKKLKVGQKLFIGHGNELIGELLEIKDDGNRIIKFTYEGAFEEVLDRLGKMPLPPYIVEALKEKDRYQTVYAIKGESVAAPTAGLHFTKELLEKIEKKGIKIVDIFLEVGLGTFRPVQTENVLEHKMHEEVYEIPQEAADIINEGKKNGKRIISVGTTSTRALESAVDENGLVKALKGSTEIFIYPGFEFKVIDALITNFHLPKSTLLMLVSALSSREFMLKVYDIAVKEEYHFFSFGDAMFIY

SEQ ID NO: 66821 - protein, 343 aa, Fusobacterium ulcerans
  REGION 1..343: note = tr|H1PRM8|H1PRM8_9FUSO S-adenosylmethionine:tRNA ribosyltransferase-isomerase OS=Fusobacterium ulcerans 12-1B OX=457404 GN=queA PE=3 SV=1
MSTLLSDYDYHLPEKLIGQQPREPRDHARLMLVNRKNESIEHKRFYDIIDYLNEGDILVRNSTKVIPARLFGHKETGGVLEILLIKRIDLDTWECLLKPAKKLKVGQKLFIGHGNELIGELLEIKDDGNRIIKFTYEGAFEEVLDRLGKMPLPPYIVEALKEKDRYQTVYAIRGESVAAPTAGLHFTKELLEKIEKKGIKIVDIFLEVGLGTFRPVQTENVLEHKMHEEVYEIPQEAADIINEGKKNGKRIISVGTTSTRALESAVDENGLVKALKGSTEIFIYPGFEFKVIDALITNFHLPKSTLLMLVSALSSREFMLKVYDIAVKEEYHFFSFGDAMFIY

SEQ ID NO: 66822 - protein, 343 aa, Fusobacterium varium
  REGION 1..343: note = tr|A0A414TUJ2|A0A414TUJ2_FUSVA S-adenosylmethionine:tRNA ribosyltransferase-isomerase; OS = Fusobacterium varium OX=856 GN=queA PE=3 SV=1
MSTLLSDYDYNLPEELIGQQPREPRDHARLMLVNRKNESIEHKKFYEIIDYLNEGDILVRNSTKVIPARLFGHKETGGVLEILLIKRIDLDTWECLLKPAKKLKIGQKLFIGHGNELIGELLEIKDDGNRIIKFTYEGAFEEVLDRLGKMPLPPYIVEALKEKDRYQTVYAIKGESVAAPTAGLHFTKELLEKIEKKGIKIVDIFLEVGLGTFRPVQTENVLEHKMHEEVFEIPQEAADIINEGKRNGKRIISVGTTSTRALESAVDENGMVKAQKGSTEIFIYPGYKFKVIDALITNFHLPKSTLLMLVSALSSREFMLKVYDIAVKEEYHFFSFGDAMFIY

SEQ ID NO: 66823 - protein, 343 aa, Fusobacterium varium
  REGION 1..343: note = tr|C6JN24|C6JN24_FUSVA S-adenosylmethionine:tRNA ribosyltransferase-isomerase OS=Fusobacterium varium ATCC 27725 OX=469618 GN=queA PE=3 SV=1
MSTLLSDYDYNLPEELIGQQPREPRDHARLMLVNRKNESIEHKKFYEIIDYLNEGDILVRNSTKVIPARLFGHKETGGVLEILLIKRIDLDTWECLLKPAKKLKIGQKLFIGHGNELIGELLEIKDDGNRIIKFTYEGAFEEVLDRLGKMPLPPYIVEALKEKDRYQTVYAIKGESVAAPTAGLHFTKELLEKIEKKGIKIVDIFLEVGLGTFRPVQTENVLEHKMHEEVFEIPQEAADIINEGKRNGRRIISVGTTSTRALESAVDENGMVKAQKGSTEIFIYPGYKFKVIDALITNFHLPKSTLLMLVSALSSREFMLKVYDIAVKEEYHFFSFGDAMFIY

SEQ ID NO: 66824 - protein, 349 aa, Gaetbulibacter sp.
  REGION 1..349: note = tr|A0A2G5GNH8|A0A2G5GNH8_9FLAO S-adenosylmethionine:tRNA ribosyltransferase-isomerase; OS = Gaetbulibacter sp. 4G1 OX=1891971 GN=queA PE=3 SV=1
MKLSHFGFELPEELLAEYPAENRDESRLMVLNRKEQTIEHKMFKDIIDYFDEEDVLVLNNTKVFPARLYGNKEKTGARIEVFLLRELNEEQRLWDVLVDPARKIRIGNKLYFGDDDTLVAEVIDNTTSRGRTLRFLYDGSYNEFRRKLTELGETPLPKYIKRDVEPEDENRYQTIFAKNEGAVAAPTAGLHFSRHLLKRLEIKGVDFAEVTLHVGLGTFNPVEVEDLSKHKMDSEELSINEKAVNIVNTAKNNKKRVCAVGTTAMRAIESAVSSNGELNEFEGWTNKFIFPPYDFSIANCMITNFHTPKSTLLMMVSAFAGHDFIKRAYEEAVKEKYKFYSYGDAMLII

SEQ ID NO: 66825 - protein, 349 aa, Gaetbulibacter sp.
  REGION 1..349: note = tr|A0A2G5KU47|A0A2G5KU47_9FLAO S-adenosylmethionine:tRNA ribosyltransferase-isomerase; OS = Gaetbulibacter sp. 5U11 OX=1889780 GN=queA PE=3 SV=1
MKLSHFNFELPEELLAEYPAENRDESRLMVLNRKEQTIEHKMFKDLIEYFDEKDVMILNNTKVFPARLFGNKEKTGARIEVFLLRELNQEQRLWDVLVDPARKIRIGNKLYFGDDETLVAEVIDNTTSRGRTLRFLYDGSYQEFRIKLQELGETPLPKYIKREVEPEDEDRYQTIYAKEEGAVAAPTAGLHFSKHLLKRLEIKGVDFAEVTLHVGLGTFNPVEVEDLSKHKMDSEELKIEAKAVEVINNAKKDKRRICAVGTTAMRAIESSVSSSGTLNEIEGWTNKFIFPPYDFSIANAMITNFHTPKSTLLMMVSAFAGHDFMKKAYEEAVKEKYKFYSYGDAMLII

SEQ ID NO: 66826 - protein, 347 aa, unidentified
  source 1..347: note = Gaiellales bacterium
  REGION 1..347: note = tr|A0A419GRP5|A0A419GRP5_9ACTN S-adenosylmethionine:tRNA ribosyltransferase-isomerase; OS = Gaiellales bacterium OX=2093372 GN=queA PE=3 SV=1
MLTDELDYDLPPELIAQHPVYPRDHSRLLVYDRGTDAITHRSLPDLLAYLDPGDALVYNDSRVLMARVAAVRPTGGRTELLFLRRRHPRVWEALARPSARLREGMSLSLEQSIPLVKGIEARDIFTLMENLGGGRWLVENRSGKPMEELLEEVGRAPLPPYIREELGDPGRYQTVYAREHGSAAAPTAGLHFTPELIASIEGAGVAVLPLTLHVGLDTFRPVAEHDLELHEIHREYYRVPAATRDGVESARAAGGKVVAVGTTTVRGLETVFQDPGAPLEGDTSLFILPGFRFRAVDALMTNFHLPRSTLLALVMAFAGVAETRRLYSEAIRQSYRFYSFGDAMLML

SEQ ID NO: 66827 - protein, 349 aa, unidentified
  source 1..349: note = Galbibacter marinus
  REGION 1..349: note = tr|K2P035|K2P035_9FLAO S-adenosylmethionine:tRNA ribosyltransferase-isomerase OS=Galbibacter marinus; OX = 555500 GN=queA PE=3 SV=1
MKLSNFNFELPKELLAEYPSEDRDEARLMVLHRKEQKIEHKLFKDVIDYFDEGDVMVLNNTKVFPARLFGNKEKTGARIEVFLLRELNEEQRLWDVLVDPARKIRIGNKLYFGDDESLVAEVIDNTTSRGRTLRFLYDGSYEEFRDKLNELGETPLPKYIKRDVEPEDEERYQTIYAKAEGAVAAPTAGLHFSKHLLKRLEIKGIDFAELTLHVGLGTFNPVEVEDLSKHKMDSEELFIDNKAASIVNNAKNGKRKICAIGTTAMRGLESSVSSNHMLNPYEGWTNKFIFPPYDFSIANCMITNFHTPKSTLLMMISAFAGHDFVMKAYKEAIKEEYKFYSYGDAMLIL

SEQ ID NO: 66828 - protein, 354 aa, Gallaecimonas pentaromativorans
  REGION 1..354: note = tr|A0A3N1PJ53|A0A3N1PJ53_9GAMM S-adenosylmethionine:tRNA ribosyltransferase-isomerase; OS = Gallaecimonas pentaromativorans OX=584787 GN=queA PE=3; SV = 1
MQRADFHFDLPEDLIARHPMPERSASRLLMLDGPTGSVAHRHFTDLLGQLEPGDLLVFNNTRVIPARLFGQKASGGKIEALVERVLDDKRVLAHVRSSKSPKEGSALVFDDGVTATMAARHDALFELVFDGEETVLSILERIGHMPLPPYIDRPDDAADRERYQTVYNEKPGAVAAPTAGLHFDEPLLEKIRAKGVETAFVTLHVGAGTFQPVRADNIFEHKMHSEYAEVPQAVVDAVNACKARGGRVIAVGTTSVRSLESAAQAAQKAGTELAPFASDTDIFIYPGYRFLVVDGLVTNFHLPESTLIMLVSAFAGYNETLAAYREAVAERYRFFSYGDAMFITKNPEAKGPGA

SEQ ID NO: 66829 - protein, 354 aa, unidentified
  source 1..354: note = Gallaecimonas xiamenensis
  REGION 1..354: note = tr|K2IWR0|K2IWR0_9GAMM S-adenosylmethionine:tRNA ribosyltransferase-isomerase OS=Gallaecimonas xiamenensis 3-C-1 OX=745411 GN=queA PE=3 SV=1
MQRADFHFDLPEHLIARHPMAERSASRLLMLDGPSGALRHGRFTDLLEELKEGDLLVFNNTRVIPARLFGQKASGGKLEVLVERVLDDKRVLAHVRSSKSPKPGTELVFDEGVKALMVARHDALFELAFEGEDGVLAILERIGHMPLPPYIDRPDDAADRERYQTVYNEKPGAVAAPTAGLHFDEPLLVALAAKGVETAFVTLHVGAGTFQPVRADSIFEHKMHSEYAEVPQAVVDAVKACKARGGRVIAVGTTSVRSLESAAQAAEQAGTELAPFASDTDIFIYPGYRFLVVDGLVTNFHLPESTLIMLVSAFAGYSETLAAYREAVNQEYRFFSYGDAMFITKNPEAKGPGA

SEQ ID NO: 66830 - protein, 356 aa, Gallibacterium anatis
  REGION 1..356: note = tr|A0A0E3CD77|A0A0E3CD77_9PAST S-adenosylmethionine:tRNA ribosyltransferase-isomerase; OS = Gallibacterium anatis OX=750 GN=queA PE=3 SV=1
MRVSDFYFDLPDELIARYPQKERTASRLLKLDGNSGEFSHHHFKDVLDFVNEGDLLVFNNTRVIPARMYGCKSSGGKVEVLVERVLDEKSCLAHVRASKAPKEGSELILGEDKLGEGNGVRARMVGRSDSLFHLQFDIEGSLLDTLQQIGHIPLPPYIDRPDEDADQERYQTVYSKVPGAVAAPTAGLHFDEELLAALRAKGVKMAFVTLHVGAGTFQPVRVENIEDHHMHSEYAEVPQEVVDAVLATKAAGKRVIAVGTTSVRSLESAALAAEEKQSTQLIEPFFADTAIFIYPGKKFRVVDCLITNFHLPESTLIMLVSAFAGYDNIMRAYRNAVENRYRFFSYGDAMFLIKKN

SEQ ID NO: 66831 - protein, 356 aa, Gallibacterium anatis
  REGION 1..356: note = tr|F4HEB4|F4HEB4_GALAU S-adenosylmethionine:tRNA ribosyltransferase-isomerase OS=Gallibacterium anatis (strain UMN179) OX=1005058 GN=queA PE=3 SV=1
MRVSDFYFDLPDELIARYPQKERTASRLLKLDGNSGEFSHHHFKDVLDFVNEGDLLVFNNTRVIPARMYGRKSSGGKVEVLVERVLDQKSCLAHIRASKAPKEGSELILGEDKLGEGNGVRARMVGRSDSLFHLQFDIEGSLLDTLQQIGHIPLPPYIDRPDEDADQERYQTVYSKIPGAVAAPTAGLHFDEELLAALRAKGVKMAFVTLHVGAGTFQPVRVENIEDHHMHSEYAEVPQEVVDAVLATKAAGKRVIAVGTTSVRSLESAALAAEEKQSMQLIEPFFADTAIFIYPGKKFRVVDCLITNFHLPESTLIMLVSAFAGYDNIMRAYRNAVENRYRFFSYGDAMFLIKKN

SEQ ID NO: 66832 - protein, 357 aa, unidentified
  source 1..357: note = Gallibacterium genomosp.
  REGION 1..357: note = tr|A0A1A7PBE8|A0A1A7PBE8_9PAST S-adenosylmethionine:tRNA ribosyltransferase-isomerase; OS = Gallibacterium genomosp. 1 OX=155515 GN=queA PE=3 SV=1
MRVSDFYFDLPDELIARYPQKERSASRLLKLDGNSGEFSHHHFKDVLDFVNEGDLLVFNNTRVIPARMYGRKSSGGKVEVLIERVLDQKSCLAHIRASKAPKEGSEIILGEDKLGEGKGIRAIMIGRSDALFHLQFDIESDLLDILQQIGHIPLPPYIDRPDEDADQERYQTVYSKIPGAVAAPTAGLHFDEALLNALKAKGVKMAFVTLHVGAGTFQPVRVENIEQHHMHAEYAEVPQSVVDAVLATKVAGKRVIAVGTTSVRSLESAALAAEEKQSKQLIDPFFADTTIFLYPGKKFRVVDALITNFHLPESTLIMLVSAFAGYDNIMRAYRSAVENRYRFFSYGDAMFLIKKQS

SEQ ID NO: 66833 - protein, 356 aa, unidentified
  source 1..356: note = Gallibacterium genomosp.
  REGION 1..356: note = tr|A0A0A2XMP9|A0A0A2XMP9_9PAST S-adenosylmethionine:tRNA ribosyltransferase-isomerase; OS = Gallibacterium genomosp. 2 OX=155517 GN=queA PE=3 SV=1
MRVSDFYFDLPDELIARYPQKERSASRLLKLDGNSGEFSHHHFKDVLDFVNEGDLLVFNNTRVIPARMYGRKSSGGKVEVLVERVLDQKSCLAHIRASKAPKEGSELILGEDKLGEGNGVRARMVGRSDSLFHLQFDIEGSLLDTLQQIGHIPLPPYIDRPDEDADQERYQTVYSKVPGAVAAPTAGLHFDEELLAALRAKGVKMAFVTLHVGAGTFQPVRVENIEDHHMHSEYAEVPQEVVDAVLATKAAGKRVIAVGTTSVRSLESAALAAEEKQSTQLIEPFFADTAIFIYPGKKFRVVDCLITNFHLPESTLIMLVSAFAGYDNIMRAYRNAVENRYRFFSYGDAMFLIKKN

SEQ ID NO: 66834 - protein, 362 aa, Gallibacterium salpingitidis
  REGION 1..362: note = tr|A0A1A7Q1E6|A0A1A7Q1E6_9PAST S-adenosylmethionine:tRNA ribosyltransferase-isomerase; OS = Gallibacterium salpingitidis OX=505341 GN=queA PE=3 SV=1
MRVADFYFDLPDELIARYPQKERTASRLLNLDGNSGEFSHHHFKDVLSFVEEGDLLVFNNTRVIPARIYGRKSSGGKLEVLIERVLDDKSCLAHVRASKAPKEGSELILGEDKLGEGNGIRVEMLGRQDALFHLRFAIEGSLFDVLQQIGHIPLPPYIDRSDEDADQERYQTVYSKVPGAVAAPTAGLHFDDELLAALRAKGGKMAFVTLHVGAGTFQPVRVENIEDHHMHAEYAEVPQEVVDAVLATKAAGKRVIAVGTTSVRSLESAALAAEQQQSKQLLEPFFADTTIFIYPGKKFRVVDCLITNFHLPESTLIMLVSAFAGYDNIMRAYRNAVENRYRFFSYGDAMFLIKKDNPSSMK

SEQ ID NO: 66835 - protein, 344 aa, unidentified
  source 1..344: note = Gallionella capsiferriformans
  REGION 1..344: note = tr|D9SJB0|D9SJB0_GALCS S-adenosylmethionine:tRNA ribosyltransferase-isomerase OS=Gallionella capsiferriformans (strain ES-2) OX=395494 GN=queA PE=3 SV=1
MRTDEFDFALPDGLIAQHPPEKRGASRLLCVHDGILEDSQFVDLLQKVAPGDLLVLNDTRVIRARLFGIKRSGGKIEVMVERVLNNHEVLAQVRASKSPPTGSYVLLAGELSVEVMGRAGEFYHLRFCAEEPVLELLERYGRLPLPPYITHAAEAEDETRYQTVFARQSGAVAAPTAGLHFDDAMLEALQDKGVKIAYVTLHVGAGTFQPVRAEWLSEHIMHSECYQISQATVDAIEQTHAAGGRVVAVGTTSLRALESAAASGELQSGAGETRIFITPGYRFRVVDVLLTNFHLPKSTLLMLVSAFGGMSEMRAAYLHAVAQQYRFFSYGDAMLIEKSVSGES

SEQ ID NO: 66836 - protein, 356 aa, Gallionella sp.
  REGION 1..356: note = tr|A0A3D2H4G9|A0A3D2H4G9_9PROT S-adenosylmethionine:tRNA ribosyltransferase-isomerase; OS = Gallionella sp. OX=2052161 GN=queA PE=3 SV=1
MRTDEFDFVLPEGLIAQHPPEKRGASRLLCVHDGILEDSQFVDLLQKVAPGDLLVLNDTRVIRARLFGIKRSGGKIEVMVERVLNSHEVLAQVRASKSPPAGSYLLLSTDGAPQEGSAPDAGLSVEVLGRAGEFYHLRFCAEEPVLELLERYGRLPLPPYITHAAEEEDETRYQTVFARQSGAVAAPTAGLHFDDAMLQALQDKGVKIAYVTLHVGAGTFQPVRAEWLSEHVMHSECYQISQATVDAIEQTHEAGGRVVAVGTTSLRALESAAASGELQSGAGETRIFITPGYRFRVVDVLLTNFHLPKSTLLMLVSAFGGMNEMRAAYLHAVAQQYRFFSYGDAMLIEKSVSSES

SEQ ID NO: 66837 - protein, 184 aa, Gallionella sp.
  REGION 1..184: note = tr|A0A522X8C1|A0A522X8C1_9PROT S-adenosylmethionine:tRNA ribosyltransferase-isomerase (Fragment) OS=Gallionella sp. OX=2052161 GN=EPN14_04910; PE = 3 SV=1
GAVAAPTAGLHFDDAMLQALRDKGVQTAYITLHVGAGTFQPVRAEHLHEHTMHSERYEIPQATVDAIAQTRAVNGRVIAVGTTGLRALESAARSGGPQAGSGETKIFITPGYRFRVVDMLLTNFHLPKSTLLMLVCAFGGMEQMLAAYRHAVEHEYRFFSYGDAMLIERDDVGRAPPAAKINVG

SEQ ID NO: 66838 - protein, 331 aa, unidentified
  source 1..331: note = Gallionellaceae bacterium
  REGION 1..331: note = tr|A0A1J4TL60|A0A1J4TL60_9PROT S-adenosylmethionine:tRNA ribosyltransferase-isomerase (Fragment) OS=Gallionellaceae bacterium CG1_02_60_325; OX = 1805162 GN=AUJ80_02405PE=3 SV=1
LPQHLIAQHPPAQRGASRLLHVGAAGIADRLFADLPALLRPHDLLVLNDTRVLKARLFGQKETGGQVEVMVERILGEHEVLAQVRASKTPKLGSQLLLADAVTVTVLGREGEFFHLRFEGDTPVTDLLERHGKLPLPPYITHAADDEDEERYQTVFAREQGAVAAPTAGLHFDEAMLQTLRDKDVNLGYVTLHVGAGTFQPVRAEKIKDHIMHSERYTVPQATVDAIAMAQANGGRVVSVGTTSLRALESAAAGGALQAGSGDTDIFITPGYRFRMVDVLLTNFHLPRSTLLMLVCAFGGPEQMFAAYRHAVAREYRFFSYGDAMLIEKEQ

SEQ ID NO: 66839 - protein, 339 aa, unidentified
  source 1..339: note = Gallionellaceae bacterium
  REGION 1..339: note = tr|A0A521Q6V1|A0A521Q6V1_9PROT S-adenosylmethionine:tRNA ribosyltransferase-isomerase; OS = Gallionellaceae bacterium OX=2052162 GN=queA PE=3 SV=1
MRTDEFDFALPVHLIAQHPPGQRGASRLLRVGKGILENRKFADLQTLLGENDLLVLNDTRVLKARLFGEKGSGGKVEVLVERVLGEHEVLAQVRASKTPKPGSHFVLAEKIRVQVLGRAGEFFHLCFEDEEAVATLLERYGHLPLPPYITHAAGDEDEMRYQTVFAREPGAVAAPTAGLHFDEGMLQNLRNKGVDIAYVTLHVGAGTFKPVRAEHIKEHVMHSERYTVPPATVDAIARTREKGGRVIAVGTTSLRALESAAADGELKAGSGDTDIFITPGYQFKVVDVLLTNFHLPRSTLLMLVCAFGGMDKLLAAYRHAVANEYRFFSYGDAMLIERE

SEQ ID NO: 66840 - protein, 340 aa, unidentified
  source 1..340: note = Gallionellales bacterium
  REGION 1..340: note = tr|A0A2M7C434|A0A2M7C434_9PROT S-adenosylmethionine:tRNA ribosyltransferase-isomerase; OS = Gallionellales bacterium CG03_land_8_20_14_0_80_55_15; OX = 1974017 GN=queA PE= 3 SV=1
MRTEEFDFALPECLIAQHPPECRGASRLLCVRGDTLEDRQFADLLQRVRPNDVLVLNDTRVIKARLFGSKSSGGKIEVLVERVLNEHEVLAQVRASKSPKAGSHLLLAGELEVEVLGREGEFFHLRFVAETAVLELLARFGRLPLPPYITHAAEQQDEARYQTVFAREAGAVAAPTAGLHFDEAMLQALRDKGVKIAYVTLHVGAGTFQPVRAEYVREHQMHSECYEIPQATVEAIARAREEGGRVVAVGTTSLRALESAAASGELKAGTGETRIFITPGYRFRVVEVLLTNFHLPKSTLLMLVSAFGGMAQIRAAYRHAVEQEYRFFSYGDAMLIERKP

SEQ ID NO: 66841 - protein, 340 aa, unidentified; identical to SEQ ID NO: 66840
  source 1..340: note = Gallionellales bacterium
  REGION 1..340: note = tr|A0A2M8DWG9|A0A2M8DWG9_9PROT S-adenosylmethionine:tRNA ribosyltransferase-isomerase; OS = Gallionellales bacterium CG_4_9_14_0_8_um_filter_55_61; OX = 1974015 GN=queA PE =3 SV=1

SEQ ID NO: 66842 - protein, 346 aa, unidentified
  source 1..346: note = Unknown
  REGION 1..346: note = tr|E1VLQ3|E1VLQ3_9GAMM S-adenosylmethionine:tRNA ribosyltransferase-isomerase OS=gamma proteobacterium HdN1; OX = 83406 GN=queA PE=3 SV=1
MQRSDFHFELPAELIASHPAQERTGSRLLVVDRKQHALHDRQFPDLLDWLEPGDLLVFNNTRVIPARLFGQKETGGQVEILVERLLSARKCLAHVRASKSPKPGSAIQVGAYQLRVIARHDALFELALETATNAPDKRPAELTDLLEQEGHIPLPPYIDRADEPRDRERYQTVYSKVPGAVAAPTAGLHFDQAFLERLRERGVRMAHVTLHVGAGTFQPVRAENILEHHMHSEWLQVSPEAVDLVRATKAAGKRVIAVGTTSVRSLETAARNGEIAPYEGDTDIFIYPGYSFRVVDALITNFHLPESTLIMLVSALAGREFVLQAYAHAIAQRYHFFSYGDAMLIV

SEQ ID NO: 66843 - protein, 346 aa, unidentified
  source 1..346: note = Unknown
  REGION 1..346: note = tr|A0A2U0AJ07|A0A2U0AJ07_9GAMM S-adenosylmethionine:tRNA ribosyltransferase-isomerase; OS = gamma proteobacterium symbiont of Ctena orbiculata; OX = 1968598 GN=queA PE=3 S V=1
MQLSDFDYILPEELIAQFPHKERSGSRLLGLLPGEMEPRDLMFADLPTLLNPGDLLVLNNTRVMRARLYGSKLSGGKVEVMIERILEPNLALAHLRASKSPKPGTQLELGDDNQLVEVAGREGDLFILRSSAGDFYDLMNKHGHMPLPPYISREDRAVDMDRYQTVYAERPGAVAAPTAGLHFDQAMLQTLEEMGVGRTTVTLHVGAGTFQPVRVSNLDEHVMHKEYIEVDETVCRKIHQTRQQGGRVVAVGTTCVRSLEAASGGGAIEPYQGDTRLFIKPGYRFRSVDAMITNFHLPQSTLLMLVAAFAGYDRIMHAYQHAIAERYRFFSYGDAMFLTPAAESVG

SEQ ID NO: 66844 - protein, 139 aa, unidentified
  source 1..139: note = Gammaproteobacteria bacterium
  REGION 1..139: note = tr|A0A480BT67|A0A480BT67_9GAMM S-adenosylmethionine:tRNA ribosyltransferase-isomerase; OS = Gammaproteobacteria bacterium OX=1913989 GN=DCZ11_06010; PE = 3 SV=1
MHQPCGRFAPSPTGPLHLGSLLAAVGSFLAARAAGGRVVAVGTTALRLLESVAAADGSLEAFAGETKLFILPGYRFKIVDLLMTNFHLPRSTLFMLVSALRSTDEMKRAYAHAVAAKYRFYSYGDACLIYGAPMNGTKT

SEQ ID NO: 66845 - protein, 341 aa, unidentified
  source 1..341: note = Gammaproteobacteria bacterium
  REGION 1..341: note = tr|A0A1G0I3T2|A0A1G0I3T2_9GAMM S-adenosylmethionine:tRNA ribosyltransferase-isomerase; OS = Gammaproteobacteria bacterium RIFCSPHIGHO2_12_FULL_43_28 OX=1798287 GN=queAPE=3 SV=1
MKLSDFQFELPADLIARYPEKRRSESRLLCLDQGEGIAHRRFYQLVELLQPGDLLVFNDTKVIPARIFGQKTTGGQVEILVERILDETRLLAQVRVSKPPKIGDELLFPEHIRLRVIGKQDQFYELSYEAGDRTILAVVEHIGHIPLPPYMQREPDETDKVRYQTVYAKFKGSVAAPTAGLHFDEALLQTLKEKQIDMAYLTLHIGAGTFMPVRVPNLLEHKMHAEYLDVSSFLCEKIKATKARGKRVVAVGTTSLRALESASQSGEIKPYQGETNIFIYPGYQFRTADALITNLHLPGSTLLMLVSAFAGHKKVMHAYRAAVANRYRFYSYGDAMWMVRA

SEQ ID NO: 66846 - protein, 343 aa, Garciella nitratireducens
  REGION 1..343: note = tr|A0A1T4K1Q3|A0A1T4K1Q3_9FIRM S-adenosylmethionine:tRNA ribosyltransferase-isomerase; OS = Garciella nitratireducens DSM 15102 OX=1121911 GN=queA; PE = 3 SV=1
MNKKDFYFDLPKELIAQTPLKERDASRLLVLDKDTGKIEHKQFRDIINYLERGDTLILNNSRVIPARLFGVREDTHSKVEILLLKRVKNKKDCWEALVKPGKKARIGHRIVFGEGLLIGEVVDIIEDGTRIIHFLYEGVFEQILDQLGTMPLPPYIKEQLEDQERYQTIYSKVEGSAAAPTAGLHFTEYIFKELKKKGVNIAFITLHVGLGTFRPVKEEKIEEHKMHSEYYEISQDIVDLIYKTKTSGKRVIAVGTTTVRTLETAVTKAGEIKSSSGWTDIFIYPGYQFKIIDGMITNFHLPESTLLMLVSAFAGRDKILNAYHEAVKNKYRFFSLGDAMLIK

SEQ ID NO: 66847 - protein, 399 aa, unidentified
  source 1..399: note = Geitlerinema sp.
  REGION 1..399: note = tr|K9S8Y6|K9S8Y6_9CYAN S-adenosylmethionine:tRNA ribosyltransferase-isomerase OS=Geitlerinema sp. PCC 7407; OX = 1173025 GN=queA PE=3 SV=1
MGNRGKKLPFVGARPAGTFVMGARLVSVDLGGDRPTSAMTSTQSPRDWQLAAYEYDLPEDRIAQNPVEPRDHARLLALTSPTEHRHHHFYDLPDLLQPGDLLVLNNTRVIPARLYGRKPEGAQVEVLLLEEQGRDRWLALVRPGKRLKPGARILFGPEEAPTLTAEVLATDEATGGRVLQFAVPEGRSLLTLLEDLGEMPLPPYITDSQAAPERYQTIYGDRPGAVAAPTAGLHFTPELLERLAERGIDRTFVTLHVGVGTFRPVEVDDITTHQMHGEWIDVPAETVKKIQETQARGGRVIAVGTTAVRSLEGAAHGGVLQPFEGKTNLFIYPGYRWRVVDGLITNFHLPGSSLLMLVSALVGRDRLMEIYQEAIAQAYRFYSFGDAMIILPEARRSGG

SEQ ID NO: 66848 - protein, 349 aa, Gelidibacter algens
  REGION 1..349: note = tr|A0A1A7R057|A0A1A7R057_9FLAO S-adenosylmethionine:tRNA ribosyltransferase-isomerase; OS = Gelidibacter algens OX=49280 GN=queA PE=3 SV=1
MKLSHFSFKLPEELLAEHPAENRDEARLMVLDRKNKTIEHKLFKDVIDYFDEGDVMILNNTKVFPARLYGNKEKTGARIEVFLLRELNEEQRLWDVLVDPARKIRIGNKLYFGDDETLVAEVIDNTTSRGRTLRFLYDGSYKEFRQKLTELGETPLPKYIKRDVEPEDEERYQTIFAKNEGAVAAPTAGLHFSKHLLKRLEIKGIDFAEITLHVGLGTFNPVEVEDLSKHKMDSEEAFVDQKAADIVNNAKTKKKRVCAVGTTAMRAVESSVSSSGTLNEFSGWTNKFIFPPYEFSIANCMITNFHTPKSTLLMMVSAFAGHDFMKKAYEEAVKEKYRFYTYGDAMLII

SEQ ID NO: 66849 - protein, 349 aa, Gelidibacter gilvus
  REGION 1..349: note = tr|A0A4Q0XBQ9|A0A4Q0XBQ9_9FLAO S-adenosylmethionine:tRNA ribosyltransferase-isomerase; OS = Gelidibacter gilvus OX=59602 GN=queA PE=3 SV=1
MKLSHFNFKLPEELLAEHPTEIRDESRLMVLDRKKQTIEHKTFKDIIDYFDEGDVMVLNNTKVFPARLYGNKEKTGARIEVFLLRELNEEQRLWDVLVDPARKIRIGNKLYFGDDETLVAEVIDNTTSRGRTLRFLYDGSYKEFRQKLTLLGETPLPKYIKREVEPEDEERYQTIFAKNEGAVAAPTAGLHFSKHLLKRLEIKGIEFAEVTLHVGLGTFNPVEVEDLSKHKMDSEEAFVTQQAADIVNDAKTRKKRVCAVGTTAMRAIESSVSSSGTLNEFSGWTNKFIFPPYEFSIANCMITNFHTPKSTLLMMASAFAGHDFIKKAYDEAIKEKYRFYTYGDAMLII

SEQ ID NO: 66850 - protein, 349 aa, Gelidibacter salicanalis
  REGION 1..349: note = tr|A0A5C7ADE9|A0A5C7ADE9_9FLAO S-adenosylmethionine:tRNA ribosyltransferase-isomerase; OS = Gelidibacter salicanalis OX=291193 GN=queA PE=3 SV=1
MKLSHFNFKLPEELLAEHPAEHRDEARLMVLDRKNKTIEHKLFKDIIDYFDEGDVMILNNTKVFPARLYGNKEKTGARIEVFLLRELNEEQRLWDVLVDPARKIRIGNKLYFGDDETLVAEVIDNTTSRGRTLRFLYDGSYKEFRKKLTELGETPLPKYIKRDVEPEDEERYQTIFAKNEGAVAAPTAGLHFSKHLLKRLEIKGIDFAEVTLHVGLGTFNPVEVEDLSKHKMDSEEAFVDQKAADIVNNAKTKKKRVCAVGTTAMRAVESSVSSSGTLNEFSGWTNKFIFPPYEFSIANCMITNFHTPKSTLLMMVSAFAGHDFMKEAYEEAVKEKYRFYTYGDAMLII

SEQ ID NO: 66851 - protein, 349 aa, unidentified
  source 1..349: note = Gelidibacter sediminis
  REGION 1..349: note = tr|A0A4V6Q4Q6|A0A4V6Q4Q6_9FLAO S-adenosylmethionine:tRNA ribosyltransferase-isomerase; OS = Gelidibacter sediminis OX=1608710 GN=queA PE=3 SV=1
MKLSHFNFKLPEELLAEHPSEHRDEARLMVLDRKNKTIEHKLFKDVIDYFDEGDVMILNNTKVFPARLYGNKEKTGARIEVFLLRELNEEQRLWDVLVDPARKIRIGNKLYFGDDETLVAEVIDNTTSRGRTLRFLYDGSYKEFRKKLTELGETPLPKYIKREVEPEDEERYQTIFAKNEGAVAAPTAGLHFSKHLLKRLEIKGIDFAEVTLHVGLGTFNPVEVEDLSKHKMDSEEAFVDQKAADIVNNAKTKKKRVCAVGTTAMRAIESSVSSSGTLNEFSGWTNKFIFPPYEFSIANCMITNFHTPKSTLLMMVSAFAGHDFMKQAYEEAVKEKYRFYTYGDAMLII

SEQ ID NO: 66852 - protein, 341 aa, Gemella asaccharolytica
  REGION 1..341: note = tr|A0A133ZT76|A0A133ZT76_9BACL S-adenosylmethionine:tRNA ribosyltransferase-isomerase; OS = Gemella asaccharolytica OX=502393 GN=queA PE=3 SV=1
MKLENFDYKLPNELIAQHPMDKRDESRLLVVDKDTDQYQHKKFYNLIDYLNSGDTLVLNDTRVMPARLFGKKITTGALIEILLLKNKSNDVWECLVKPAKRVAVGTIVDFNGIMRAECIEAKDDGFRYFKFTYEGIFQEKLEILGTMPLPPYIKEQLKDNERYQTVYSKNLGSAAAPTAGLHFTKQLLNDIKEKGINVCYITLHVGIGTFRPVVVNEVENHKMHSEFYQIDEKTAEIINETKKNNKKIIAVGTTTIRTLETVAKNNNGKIVSSSGFTDIFIYPGFKFRCVDSLVTNFHLPKSTLIMLVSAFYNREKILNIYNIAVKEKYRFFSFGDAMLIH

SEQ ID NO: 66853 - protein, 342 aa, Gemella bergeri
  REGION 1..342: note = tr|U2QIR2|U2QIR2_9BACL S-adenosylmethionine:tRNA ribosyltransferase-isomerase OS=Gemella bergeri ATCC 700627 OX=1321820 GN=queA PE=3 SV=1
MKLEEFNFNLPEELIAQTPLLKRDTSRLLMVDRKNNDYKHKVFSDIIDYFNPGDTLVLNNTRVMPARLYGGKKGTGAAIEVLLLKTKEHNIWECLVKPAKRIKIGSIVSFGDGVMEAECIKVMDDGFRYFRFSYEGIFQERLDELGTMPLPPYIKERLIDKERYQTVYSKEIGSSAAPTAGLHFTEELLKKIKEKGVNIAYLTLHVGLGTFRPVVTENIEDHDMHSEYYTIDEETANIIDETKKRGNKVFSVGTTSTRTLETIARDNNGKIVAASGWTNIFIYPGFEFECVDGLITNFHLPKSSLIMLVSAFYDREKVLELYKIAVDNKYRFFSFGDAMMII

SEQ ID NO: 66854 - protein, 342 aa, Gemella haemolysans
  REGION 1..342: note = tr|A0A134A2R7|A0A134A2R7_9BACL S-adenosylmethionine:tRNA ribosyltransferase-isomerase; OS = Gemella haemolysans OX=1379 GN=queA PE=3 SV=1
MKLEQFDFYLPEELIAQTPLLKRDTSKLLCVDRKNNSHEHKVFSDIIDYFNPGDTLVLNNTRVMPARLYGAKKDTGAAIEVLLLKNLGHNDWECLVKPAKRIKEGSIVSFGDGIMEAVCTKVLDDGFRHFEFIYEGIFQERLDELGTMPLPPYIKERLTDKERYQTVYSKEVGSSAAPTAGLHFTKELLEKIKEKGINIAYLTLHVGLGTFRPVAVENIEEHDMHSEYYTLDENTAKIINNTKENGGRVFSVGTTSTRTLETIARDNNGKIVAASGWTNIFIYPGFEFKCVDGLITNFHLPKSSLIMLVSAFYDREKVIELYNIAVENKYRFFSFGDAMIII

SEQ ID NO: 66855 - protein, 342 aa, Gemella haemolysans
  REGION 1..342: note = tr|F3A176|F3A176_9BACL S-adenosylmethionine:tRNA ribosyltransferase-isomerase OS=Gemella haemolysans M341; OX = 562981 GN=queA PE=3 SV=1
MKLEQFDFYLPEELIAQTPLLKRDTSKLLCVDRKNNTHEHKVFSDIIDYFNPGDTLVLNNTRVMPARLYGAKKDTGAAIEVLLLKNLGHNDWECLVKPAKRIKEGSIVSFGDGIMEAVCTKVLDDGFRHFEFVYEGIFQERLNELGTMPLPPYIKERLTDKERYQTVYSKEVGSSAAPTAGLHFTNELLDRIKEKGVNIAYLTLHVGLGTFRPVAVENIEDHDMHSEYYTLDEKTAELINKTKENEGRVFSVGTTTTRTLETIARDNNGKIVAASGWTNIFIYPGFEFKCVDGLITNFHLPKSSLIMLVSAFYDREKVIELYNIAVENKYRFFSFGDAMIII

SEQ ID NO: 66856 - protein, 342 aa, Gemella morbillorum
  REGION 1..342: note = tr|A0A2X4R0W4|A0A2X4R0W4_9BACL S-adenosylmethionine:tRNA ribosyltransferase-isomerase; OS = Gemella morbillorum OX=29391 GN=queA PE=3 SV=1
MKLEQFDFYLPEELIAQTPLLKRDTSKLLCIDKKENNYEHKTFSDIIDYFEAGDTLVLNNTRVMPARLYGQKKDTGAAIEVLLLKNEVDNIWECLVKPAKRIKIGSVVSFGDGIMEAICTRVLDDGFRYFEFKYEGIFQERLDELGTMPLPPYIKERLTDKERYQTVYSKEVGSSAAPTAGLHFTNELLDKIRAKGVNVAYLTLHVGLGTFRPVAVENIEEHDMHSEYYTLDEKTAEIINKTKENNGRIFSVGTTTTRTLETIARDNNGKIVAASGWTNIFIYPGFKFKCVDGLITNFHLPKSSLIMLVSAFYEREKILDLYKIAVENKYRFFSFGDAMIIV

SEQ ID NO: 66857 - protein, 342 aa, Gemella morbillorum
  REGION 1..342: note = tr|E5V238|E5V238_9BACL S-adenosylmethionine:tRNA ribosyltransferase-isomerase OS=Gemella morbillorum M424; OX = 562982 GN=queA PE=3 SV=1
MKLEQFDFYLPEELIAQTPLLKRDTSKLLCIDKKENNYEHKTFSDIIDYFEAGDTLVLNNTRVMPARLYGQKKDTGAAIEVLLLKNEVDNIWECLVKPAKRIKIGSVVSFGDGIMEAICTRVLDDGFRYFEFKYEGIFQERLDELGTMPLPPYIKERLTDKERYQTVYSKEVGSSAAPTAGLHFTNELLDKIKAKGVNVAYLTLHVGLGTFRPVAVENIEEHDMHSEYYTLDEKTAEIINKTKENNGRIFSVGTTTTRTLETIARDNNGKIVAASGWTNIFIYPGFKFKCVDGLITNFHLPKSSLIMLVSAFYEREKILDLYKIAVENKYRFFSFGDAMIIV

SEQ ID NO: 66858 - protein, 342 aa, Gemella sanguinis
  REGION 1..342: note = tr|A0A2N6SH22|A0A2N6SH22_9BACL S-adenosylmethionine:tRNA ribosyltransferase-isomerase; OS = Gemella sanguinis OX=84135 GN=queA PE=3 SV=1
MKLEEFDFYLPEELIAQTPLLKRDTSKLLTINRKENTYEHKVFSDIIDYFNPGDTLVLNNTRVMPARLYGQKKDTGAAIEVLLLKNKEHNMWECLVKPAKRIKVGSIVSFGDGIMEAECVKVLDDGFRYFEFKYEGIFQERLDELGTMPLPPYIKERLTDKERYQTVYSKEVGSSAAPTAGLHFTNELLDKIKQKGVNIVYLTLHVGLGTFRPVSVENIEDHDMHSEYYTLDEETANVINETKKNGGRVFSVGTTSTRTLETIARDNDGEIVPASGWTNIFIYPGFEFKCVDGLITNFHLPKSSLIMLVSAFYNREKVLELYKIAVENKYRFFSFGDAMIII

SEQ ID NO: 66859 - protein, 342 aa, Gemella sp.
  REGION 1..342: note = tr|A0A533I0M5|A0A533I0M5_9BACL S-adenosylmethionine:tRNA ribosyltransferase-isomerase; OS = Gemella sp. OX=1966354 GN=queA PE=3 SV=1
MKLEQFDFYLPEELIAQTPLLKRDTSKLLCVDRKNNSHEHKVFSDIIDYFNSGDTLVLNNTRVMPARLYGAKKDTGAAIEVLLLKNLGHNDWECLVKPAKRIKEGSIVSFGDGIMEAVCTKVLDDGFRHFEFIYEGIFQERLDELGTMPLPPYIKERLTDKERYQTVYSKEVGSSAAPTAGLHFTNELLEKIKEKGVNIAYLTLHVGLGTFRPVAVENIEEHDMHSEYYTLDEETAKIINRTKENGGRVFSVGTTSTRTLETIARDNNGKIVAASGWTNIFIYPGFEFKCVDGLITNFHLPKSSLIMLVSAFYDREKVIELYNIAVKNKYRFFSFGDAMIII

SEQ ID NO: 66860 - protein, 342 aa, Gemella sp.
  REGION 1..342: note = tr|A0A0X8KLB3|A0A0X8KLB3_9BACL S-adenosylmethionine:tRNA ribosyltransferase-isomerase; OS = Gemella sp. oral taxon 928 OX=1785995 GN=queA PE=3 SV=1
MKLEEFNFNLPEELIAQTPLLKRDTSKLLMVDRKNNNYKHKVFSDIIDYFNPGDTLVLNNTRVMPARLYGEKKGTGAAIEVLLLKTKEHNIWECLVKPAKRIKIGSIVSFGDGVMEAECIKVMDDGFRYFKFSYEGIFQERLDELGTMPLPPYIKERLIDKERYQTVYSKEIGSSAAPTAGLHFTEELLKKIKEKGVNIAYLTLHVGLGTFRPVVTENIEDHDMHSEYYTIDEETANIINETKKRCNKVFSVGTTSTRTLETIARDNNGKIVAASGWTNIFIYPGFEFKCVDGLITNFHLPKSSLIMLVSAFYSREKVLELYKIAVDNKYRFFSFGDAMMII

SEQ ID NO: 66861 - protein, 348 aa, Geminicoccus sp.
  REGION 1..348: note = tr|A0A2D6C0V4|A0A2D6C0V4_9PROT S-adenosylmethionine:tRNA ribosyltransferase-isomerase; OS = Geminicoccus sp. OX=2024832 GN=queA PE=3 SV=1
MRLSDFDFSLPEALIAQRPVYPRAAARLLQVRGDGSRVDRTFADLAACLRDGDLLVFNNSQVFASRLIGQRERDGQRFNGRIEVTLVAETDEPTLWVCYARPGKKLEPGDGLFFGDWLSAVVEAKDGADIKLRFDAQGADLLETIDALGHMPLPPYIRRAKGGENSDREDYRTFCGRKMGSLAAPTASLHFDEETLESLRTARALEVAEVRLDVGLGTFAPIRSDDISDHQMHHESCALDADNAALIASARAEGRRVVAVGTTVLRALESLRGQAGAMSTDIFLKPGDDFHVVDALITNFHLPQSTLFMLVCAFSGTDAMKAAYDHAIAAEYRFFSYGDGCFLERPTG

SEQ ID NO: 66862 - protein, 348 aa, Geminicoccus sp.
  REGION 1..348: note = tr|A0A2E3IRK0|A0A2E3IRK0_9PROT S-adenosylmethionine:tRNA ribosyltransferase-isomerase; OS = Geminicoccus sp. OX=2024832 GN=queA PE=3 SV=1
MRLSDFDFNLPEALIAQRPVYPRAAARLLQVRGDGSRVDRTFADLAACLCDGDLLVFNNSQVFASRLIGQRERDGQRFGGRIEVTLVAETDEPALWVCYARPGKKLEPGDGLYFSDRLSTVVEAKDGADIKLRFDAQGADLLETIDALGHMPLPPYIRRAKGGENSDREDYRTFCGRKKGSLAAPTASLHFDEETLESLRAARALEVAEVRLDVGLGTFAPIRSDDISDHQMHHESCALDADNAALIASARAEGRRVVAVGTTVLRALESLRGQAGAMSTDIFLKPGDDFHVVDALITNFHLPQSTLFMLVCAFSGTEAMKAAYDHAIAAEYRFFSYGDGCLLERPTG

SEQ ID NO: 66863 - protein, 348 aa, unidentified
  source 1..348: note = Geminocystis sp.
  REGION 1..348: note = tr|A0A0D6ANL3|A0A0D6ANL3_9CHRO S-adenosylmethionine:tRNA ribosyltransferase-isomerase; OS = Geminocystis sp. NIES-3709 OX=1617448 GN=queA PE=3 SV=1
MNLDRQLSSYDYYLPPELIAQNPVTPRDSSRLLTVKSNNTIEHTIFCNLPDLLLPGDLLVLNDTRVIPARLYGKKSTGAEVEVLLVEERQNNCWLGLVKPGKRFSLGSEIIFSDDLKAIVIGKDDITGGRFLQFEVSKSQSFWEILDRIGNIPFPPYVTNSQANPQQYQTIYAEKQGAIAAPTAGLHFTEKLLRELKKRQINIATVTLHVGIGTFRPVEVEDILTHQMHHESIELNQKTVDLITKTKKAGRNVIAVGTTVVRTLEGAYKNQKVLKPFSGKTDLFIYPGYEFKVIDGLITNFHLPKSSLLMLVSALIGREKLMSIYEEAIKEKYRFYSFGDAMFILNDR

SEQ ID NO: 66864 - protein, 354 aa, unidentified
  source 1..354: note = Geminocystis sp.
  REGION 1..354: note = tr|A0A0D6AK35|A0A0D6AK35_9CHRO S-adenosylmethionine:tRNA ribosyltransferase-isomerase; OS = Geminocystis sp. NIES-3708 OX=1615909 GN=queA PE=3 SV=1
MNLDQQLSSYDYFLPPNLIAQNPVSPRDSSRLLVVKSEGKIDHSIFCNLPDFLLPGDLLVLNDTRVIPARLYGKKSTGAQVEVLLVEETTNNCWLALVKPGKRFSIGSEILFGDSSLLKATVVGKDKSTGGRFLQFQINESQSFWEILDQVGNIPFPPYVTESQANPQQYQTIYAEKQGAIAAPTAGLHFTQKLLTELQQRQINIATVTLHVGIGTFRPVEVENILTHEMHQEWIEINQNTIDAIKATKEKGRKVIAVGTTVVRTLEGAYKHQQKLAPFSGKTDLFIYPGYEFKVIDGLITNFHLPKSSLLMLVSALIGRKRLMSIYQEAIEEKYRFYSFGDGMFIMPNQNIES

SEQ ID NO: 66865 - protein, 341 aa, Gemmata obscuriglobus
  REGION 1..341: note = tr|A0A2Z3HC12|A0A2Z3HC12_9BACT S-adenosylmethionine:tRNA ribosyltransferase-isomerase; OS = Gemmata obscuriglobus OX=114 GN=queA PE=3 SV=1
MHFFDYHLPEHLIAQHPAAERDAARLLVVRRDTQRIQHHIFRDLPELLSPGDLVVLNDTRVLPARVVGRREATGGKWEGLFLRATETGLWEMLAQTRGYPEVGTVFVTDTGLRLVLRGRTADRHWLMQPEAEGTPPEILSTYGHIPLPPYIRKGREDAGDRERYQTVYAGAAAGSVAAPTAGLHFTPAVFDRLTARGIGTARVTLHVGLGTFAPVKEDDPTKHAIHHEWCAVPQGTVDTIRDTKARGGRVVAIGTTTTRTLESAARPDGLRSFCGETGLFIHEPFEFRAVDALVTNFHLPRTTLLLLVGALAGDELLARAYAEAVTCEYRFFSYGDAMLVL

SEQ ID NO: 66866 - protein, 342 aa, Gemmata sp.
  REGION 1..342: note = tr|A0A142XU28|A0A142XU28_9BACT S-adenosylmethionine:tRNA ribosyltransferase-isomerase; OS = Gemmata sp. SH-PL17 OX=1630693 GN=queA PE=3 SV=1
MHFFDYYLPEHLIAQHPAAERDSARLLVVRRSENSITHHTFRDLPDLLSPGDLVVLNDTRVLPARVVGRREQTGGKWEGLFLRTTEDGSWEMLAQTRGYPEIGTAFVTDTNLRLVLCGRTAERHWLMRPDEEGTPPELLGRYGHIPLPPYIRKGREETADRERYQTVYASGNAAGSVAAPTAGLHFTPALFDRLAAKGIGTARVTLHVGLGTFAPVKEEDPTKHVIHSEWCAVTQDVVDAIRATKERGGRVVAVGTTTTRTLETAARSGTPQPFCGETNLFIHEPFEFRAISALVTNFHLPRTTLLLLVGAFTGSELLQRAYAEAVANEYRFFSYGDAMLVL

SEQ ID NO: 66867 - protein, 341 aa, unidentified
  source 1..341: note = Gemmataceae bacterium
  REGION 1..341: note = tr|A0A5C1AI65|A0A5C1AI65_9BACT S-adenosylmethionine:tRNA ribosyltransferase-isomerase; OS = Gemmataceae bacterium PX52 OX=2598579 GN=queA PE=3 SV=1
MHPLFFDYDLPERLIAQEPTARRDDARLLVVRRGTQALEHRHVRDLPQLLRAGDRLVLNDTRVLPARLIGERANTGGKWEGLFLRDRDGEWELMAKTRGYPKLGERIVTDTGLSLTLIGRTSDKHWLMRPDATGSALELLQKFGQIPLPPYIRKGRAGEPDAERYQTVYARAAGSVAAPTAGLHFTPELFAALSQAGVGRASVTLHVGLGTFAPIKSDDPTQHEMHSEWCEVPATTVEAIRQTKAAGGRVIAVGTTTARTLESAALPGELQAFIGETNIFIHPPFAFRVLDGLLTNFHLPRTTLLLLVQALAGSELLQRAYEEAIREEYRFYSYGDAMLVL

SEQ ID NO: 66868 - protein, 338 aa, unidentified
  source 1..338: note = Gemmataceae bacterium
  REGION 1..338: note = tr|A0A4V0I5H8|A0A4V0I5H8_9BACT S-adenosylmethionine:tRNA ribosyltransferase-isomerase; OS = Gemmataceae bacterium OX=2052164 GN=queA PE=3 SV=1
MHFDYHLPEHLIAQHPAARRDGSRLLVVRRATGTLEHRTFRDLPELLSPGDLLVLNDTKVLPARVVGRRESTGGKWEGLFLRERDGLWEMLAQTRSYPEPGSAFVTDTGLRLTLRGRTDDRHWLMEPDPPGPPAEVLGRYGRIPLPPYIRKGTAGDADAERYQTVYAAHAGSVAAPTAGLHFTQEVFDRLAARGIGTARVTLHVGLGTFAPVKADDPAKHAIHREWCEVTQGTVDAIAATKARGGRVVAVGTTTTRTLESAAREGELKTFSGETDLYILPGFAFRVVDALVTNFHLPRTTLLLLVGALAGTDLLGTAYAEAVAREYRFYSYGDAMLVL

SEQ ID NO: 66869 - protein, 352 aa, unidentified
  source 1..352: note = Gemmatimonadaceae bacterium
  REGION 1..352: note = tr|A0A2E0DR24|A0A2E0DR24_9BACT S-adenosylmethionine:tRNA ribosyltransferase-isomerase; OS = Gemmatimonadaceae bacterium OX=2026741 GN=queA PE=3 SV=1
  VARIANT 15: note = Xaa can be any naturally occurring amino acid
  VARIANT 48: note = Xaa can be any naturally occurring amino acid
  VARIANT 78: note = Xaa can be any naturally occurring amino acid
  VARIANT 87: note = Xaa can be any naturally occurring amino acid
  VARIANT 106: note = Xaa can be any naturally occurring amino acid
  VARIANT 197: note = Xaa can be any naturally occurring amino acid
  VARIANT 206: note = Xaa can be any naturally occurring amino acid
  VARIANT 222: note = Xaa can be any naturally occurring amino acid
  VARIANT 348: note = Xaa can be any naturally occurring amino acid
MSDKVSDYHYELPRXLIAQRPAKRRDEARLLVVPEIGPFGHHTIRDLXSLVRPGDLLVVNESKVLPARLNGQKTTGAXAEVLLLKPXGLGEDEDPALWEALVRPGXKLRAGHVVEIGDELSVEILEVLPSGNRLVRLKSDLDIETAIERNGSMPLPPYIDREIEPSDRDRYQTVYARTGGSVAAPTAGLHFTNDLLXEFETKGIKXTAITLHVGLGTFRPVXAEHPSGHPMHIERYFIPESAIEAVERTKRDGGRVWAVGTTAVRALESAARDDGSLRPGWAQTDLFIWPPYNFRVVDGLLTNFHLPRSTLIMLVAAFGGYERTMAAYEEAVRERYLFYSYGDAMLVXPSCG

SEQ ID NO: 66870 - protein, 354 aa, unidentified
  source 1..354: note = Gemmatimonadaceae bacterium
  REGION 1..354: note = tr|A0A2E5WI42|A0A2E5WI42_9BACT S-adenosylmethionine:tRNA ribosyltransferase-isomerase; OS = Gemmatimonadaceae bacterium OX=2026741 GN=queA PE=3 SV=1
MNLDDLDFHLPDELIALHPTSQRDGSRLLILDRCKGDLTDSRFPHLLSHLRADDVLVLNETRVVPVRLLTRKPSTGGLVELLVLGRAPGEGWMAMAKPLKGLVAGKILEASSGLQLEVIDRVEDRLHFRIVGHDDTGVDPTGLDTFFQLTGDIGQIPLPPYIRRSPVEADSQRYQTVFARTNGSIAAPTAGLHFSETLLGQIQRAGVTIERLLLHVGAGTFAPVRAADPRQHRVEAEYFRLEPEAAERIMKRRAAGGRVVAVGTTSVRALETCAKTGTLKSGEGWTDLVITPDHRFKLVDAMITNFHLPRSSLMMLVSAFAGSEHIRKAYQHAVGAGYRFYSYGDAMFIHGDRR

SEQ ID NO: 66871 - protein, 346 aa, unidentified
  source 1..346: note = Gemmatimonadales bacterium
  REGION 1..346: note = tr|A0A524H593|A0A524H593_9BACT S-adenosylmethionine:tRNA ribosyltransferase-isomerase; OS = Gemmatimonadales bacterium OX=2448054 GN=queA PE=3 SV=1
MTADRLLRTADFAYHLPPELIAQTPGTERGDSRLLVVRRPSRGLQDLGFAALPDLIPPGDLLVLNSTRVRHARLLGTRPSGAPAEVLLIHPSTDGSWLAIGKPGSALREGKRITLGAGAEIETLEVLPDGERRVRFVGMPADQAIARYGRLPLPPYIDRDPDAQDEVRYQTVYADREGSVAAPTAGLHFTEAMLGSLRGRGVRIVSLDLEVGPGTFRPVEEEDIAAHPMHPERYDIPADVAAAVRDARSRGAAVWAVGTTVVRALESAAQDDGTVAEGAAETRLLISPGYDFKVVNHLVTNFHLPRSTLLMLVAAFAGYDTMMAAYRHAVEARYRFYSYGDAMCIL

SEQ ID NO: 66872 - protein, 347 aa, unidentified
  source 1..347: note = Gemmatimonadales bacterium
  REGION 1..347: note = tr|A0A524IVJ9|A0A524IVJ9_9BACT S-adenosylmethionine:tRNA ribosyltransferase-isomerase; OS = Gemmatimonadales bacterium OX=2448054 GN=queA PE=3 SV=1
MGERTSDYEYHLPADLIASRPTPARDGSRLLVVDSTGVFTDRMFPDLVDYISPGDALVLNQTRVFPARLIGRKPTGAGAEVLLVRPRPDLDPSGALFEALVRPGGKLKPGRIVEFAAEFRAVIEDSARGGARIVRLEGDGDPWELIERHGHVPLPPYIARDDDEADRERYQTVFATHRGSVAAPTAGLHFTPELLDRIEGLGIHLVRITLHVGVGTFRPVSAARPEDHELHSEWYRVESEAARILNEVRDTGGRIWAVGTTSVRTLESVLGSDGRFRADEGWTDLFIRPPYEFRAVDALVTNFHLPRSSLLMLVSALAGRERILAAYDHAVAEGYRFYSYGDAMVIP

SEQ ID NO: 66873 - protein, 348 aa, unidentified
  source 1..348: note = Gemmatimonadetes bacterium
  REGION 1..348: note = tr|A0A1Q7E460|A0A1Q7E460_9BACT S-adenosylmethionine:tRNA ribosyltransferase-isomerase; OS = Gemmatimonadetes bacterium 13_1_40CM_66_11 OX=1805195; GN = queA PE=3 SV=1
MHRLSDFDYDLPSEQIAQHPLPDRSASRLLVLDRASGDIRHQYFRDLPGLIPPRDVLVINTSRVIPARLRGKRDGGRGTGTGGDAEILLVRELPDRTWLAMGHPGGKLKPGRRVTFGDDSVVEIVEVLGGGLRRVRFVGALDARATLAQYGEVPLPPYIRRAPDAADRERYQTVYAAHDGSVAAPTAGLHFTPELLADIYTRQVRVASLDLHVGPGTFKPVETEDISQHPMHAEAYDITPGAAEWINHALERKRGVWGVGTTVVRALESAVDSAGLVGPGSGETALFIRPPYEFKVVTHLITNFHLPRSTLLMLVCAFGGYEHVMAAYREAVREGYRFYSYGDAMLII

SEQ ID NO: 66874 - protein, 332 aa, unidentified
  source 1..332: note = Gemmatimonadetes bacterium
  REGION 1..332: note = tr|A0A1Q7AC83|A0A1Q7AC83_9BACT S-adenosylmethionine:tRNA ribosyltransferase-isomerase; OS = Gemmatimonadetes bacterium 13_2_20CM_2_69_23 OX=1805204; GN = queA PE=3 SV=1
MPAGRIAQHPLPDRAASRLLVLDRSTGAIRHAQFRDIVELVAPEDVLVLNVSRVIPARLHGKRETGNVAELLVVRELPDGSWLAMGHPGGKLKPGRTVRFGDDSAAEIVEMLGGGLRRVKFVGALDARATLAKYGETPLPPYIRRPPVPEDRARYQTVYAAHDGSVAAPTAGLHFTAELVDRVRASGTAVATLDLHVGPGTFKPVEVDDLAGHALHAEPYAVSAESATTINGRREAGGRIWAVGTTVVRALETCADARGAIRPGAGETSLFIYPPYPFRAVDRLLTNFHLPRSTLLMLVCAFGGYDNVMRAYGEAVRQGYRFYSYGDAMAIV

SEQ ID NO: 66875 - protein, 369 aa, Gemmatimonas aurantiaca
  REGION 1..369: note = tr|A0A3D4VC47|A0A3D4VC47_9BACT S-adenosylmethionine:tRNA ribosyltransferase-isomerase; OS = Gemmatimonas aurantiaca OX=173480 GN=queA PE=3 SV=1
MTAPSNPHGSADPAADVLPELRRVDGDRTADYDYELPEERIAQLPVEPRDASRLLVVDRESGSLTHRQFRDVVSLIPAGDAVVLNTTKVFRARLLGHRESGGPAEILLLRHLRDAHYEAMIHPGGKLRPGRTVTIAPGFTVEIVDTTPRRTRIVKLHAPEFSSVQSAIEQHGHIPLPPYIERSDTDADAARYQTIYAAQAGSVAAPTAGLHFTDDLLATLDARGVERVNVLLHVGAGTFRPVSDDDPSQHVMHEEWCEVTPDAAARLNAVRARGGKIWAVGTTSVRTIETAATPDGVIHPYIGETNIFLRPPYQFRGVDHLITNFHLPRSTLIMLVAAFAGYDLTMQAYRTAVAEQYRFYSYGDAMVLL

SEQ ID NO: 66876 - protein, 353 aa, Gemmatimonas aurantiaca
  REGION 1..353: note = tr|C1A610|C1A610_GEMAT S-adenosylmethionine:tRNA ribosyltransferase-isomerase OS=Gemmatimonas aurantiaca (strain T-27 / DSM 14586 / JCM 11422 / NBRC 100505); OX = 37906 6 GN=queA PE=3 SV=1
MLPELRRVDGDRTADYDYELPEERIAQLPVEPRDASRLLVVDRESGSLTHRQFRDVVSLIPAGDAVVLNTTKVFRARLLGHRESGGPAEILLLRHLRDAHYEAMIHPGGKLRPGRTVTIAPGFTVEIVDTTPRRTRIVKLHAPEFSSVQSAIEQHGHIPLPPYIERSDTDADAARYQTIYAAQAGSVAAPTAGLHFTDDLLATLDARGVERVNVLLHVGAGTFRPVSDDDPSQHVMHEEWCEVTPDAAARLNAVRARGGKIWAVGTTSVRTIETAATPDGVIHPYIGETNIFLRPPYQFRGVDHLITNFHLPRSTLIMLVAAFAGYDLTMQAYRTAVAEQYRFYSYGDAMVLL

SEQ ID NO: 66877 - protein, 360 aa, unidentified
  source 1..360: note = Gemmatimonas phototrophica
  REGION 1..360: note = tr|A0A143BHY5|A0A143BHY5_9BACT S-adenosylmethionine:tRNA ribosyltransferase-isomerase; OS = Gemmatimonas phototrophica OX=1379270 GN=queA PE=3 SV=1
MTLPSDSVGVSPPKGARTSDYDYELPEARIAQRPVEPRDASRLLVVDRTTGGVSHRTFRDVLGLIPEGDAIVLNTTKVFRARLLGHRESGGPAEILLLRPAEGHADGVHFEAMIHPGGKLRPGRVVTIADGFKVEIVDTTPRRTRIVKLHTDGDPLAAIETHGHVPLPPYIERADEAGDVNRYQTVYAREAGSVAAPTAGLHFTDDLLAQMQAKGVERVNVLLHVGAGTFRPVSDEDPSQHLMHDEWCEVTPEAADRLNAVRARGNKIWVVGTTGVRTLETATDAHGIVQPYTGDTNIFLRPPYQFRGVDHLITNFHLPKSTLVMLVAAFAGYEQTMHAYRVAVENEYRFYSYGDAMCII

SEQ ID NO: 66878 - protein, 342 aa, Gemmatimonas sp.
  REGION 1..342: note = tr|A0A0S8B581|A0A0S8B581_9BACT S-adenosylmethionine:tRNA ribosyltransferase-isomerase; OS = Gemmatimonas sp. SG8_28 OX=1703357 GN=queA PE=3 SV=1
MRVDDFDFTFPPEAVAQRPLADRSASRLLVLSRRSGAVEHRRFRDVPELLAPGDVLVLNASRVIPARLYGRRDSGRPAEILLVQEEPSGTWLAMVHPGGKLKAGRHLTFEDGWTGEIVDVLGGGLRRIRFDGPHPTRVLLERHGTVPLPPYIDRSPDAADRERYQTVYATSDGSVAAPTAGLHFTPEVLARVTERGIRIVEILLHVGPGTFKPVDVDDPARHRMHAERYEVPDVAATVINETRSAGGRVWAVGTTAARTLETVVRPDGSVAAGVGWTDLFIYPPYRFGAIDALLTNFHLPRSTLIMLVAAFAGHGATMAAYRTAIEQGYRLFSYGDAMAIVP

SEQ ID NO: 66879 - protein, 343 aa, Gemmatimonas sp.
  REGION 1..343: note = tr|A0A0S8HDP5|A0A0S8HDP5_9BACT S-adenosylmethionine:tRNA ribosyltransferase-isomerase; OS = Gemmatimonas sp. SM23_52 OX=1703359 GN=queA PE=3 SV=1
MRTADFDYPLDERLIAQRPLPARDSSRMLLVRRLGATLEDRTFRDLISLFSPGDVLVLNDTRVFPARLLGHKPTGAAAEVLLIEAIDPAGLRWRALVRPGGKLKPGRIVRAGEELEVAIEDCGAGGERIVRLITPLPATEALTRYGHVPLPPYIRRADDESDRVRYQTVYARESGSVAAPTAGLHFSESLLAAIERHGVEITSVTLHVGPGSFRPVDASDPAEHHLDGEWYRVAVSTAGTINRVRERGGRVWAVGTTTVRALETVAADDGVIEPGEGTTDLFIRPGFRFRAVDCLITNFHLPRSTLLMLVAAFAGYELTMHAYRHAQQQGYRFYSYGDAMAVI

SEQ ID NO: 66880 - protein, 349 aa, unidentified
  source 1..349: note = Gemmatirosa kalamazoonesis
  REGION 1..349: note = tr|W0RI54|W0RI54_9BACT S-adenosylmethionine:tRNA ribosyltransferase-isomerase OS=Gemmatirosa kalamazoonesis; OX = 861299 GN=queA PE=3 SV=1
MPERPGNRTSDFDFELPERLVAQTPLERRDASRLMVVDRAAGTIAHRTFADLPSLMAAGDALVLNTTRVFRARLLGRRDSGAPAEVMLLRAQDDDPAVFEAMVHPGAKLKPGRRVVVADDLEVEILGTSGRGTRFVRLHAHGDPMEAVERNGHVPLPPYIHRTDATADVQRYQTVYARERGSVAAPTAGLHFTPELLDAIAARGVRRVDVVLHVGAGTFKPVAVEDPAEHVMHSEWYAVSAAAAAAVNAARAAGGRVWAVGTTSARTLESAANDDGTVRAESRDTALFIRPGYRFKAVDRLITNFHLPRSTLLMLVAAMVGYDLAMHAYRVAVEEGYRFYSYGDAMVIL

SEQ ID NO: 66881 - protein, 342 aa, Gemmiger formicilis
  REGION 1..342: note = tr|A0A1T4WNC6|A0A1T4WNC6_9FIRM S-adenosylmethionine:tRNA ribosyltransferase-isomerase; OS = Gemmiger formicilis OX=745368 GN=queA PE=3 SV=1
MLKKDFWYDLPKELIAQEPADPRDAARLMVLDRKNDKILHSVFHELPHYLEKGDLLVVNNSKVLPARLMGTKVPTGAVCELLLLRQVKGDTWECLARPGKRMQPGTKVEFGDGSLTAVVDETLPDGNKYVTFTYDTETLYEKLDEFGKMPLPPYITKQLEDQSQYQTVYAKELGSAAAPTAGLHFTPQLMDTIRSRGVNIAEVTLHVGLGTFRPVNEESIEDHQMHSEWYSVSEETAKLINETRAAGHRVIAVGTTSCRTLESVWAKYGKIVPCSGNTSIFIYPGIELKAIDGLITNFHLPESTLIMLIAAFYGYDKTMAAYKVAVEEKYRFFSFGDAMFIR

SEQ ID NO: 66882 - protein, 342 aa, Gemmiger sp.
  REGION 1..342: note = tr|A0A1Y3XQY1|A0A1Y3XQY1_9FIRM S-adenosylmethionine:tRNA ribosyltransferase-isomerase; OS = Gemmiger sp. An50 OX=1965639 GN=queA PE=3 SV=1
MLKKDFWFDLPQELIAQEPCSPRDAARLMCLDRSNDQIQHRIFRDLVDLLEPGDLLVVNNSKVLPARLIGQKEHTGAVCELLLLRQESNDVWECLARPGKRLKPGMRILFGDGSLVATIQETKEDGNKLVSFQYDTQTLYEKLDEFGKMPLPPYITKQLEDQSQYQTVYAKELGSAAAPTAGLHFTPELMQKLKEKGIGITEVTLHVGLGTFRPVKEDEIEDHLMHSEWYSVSEETARLINETKEAGHRVIAVGTTSCRTLESVAAKYGKIQACSGDTSIFLYPGCKFLCLDGLITNFHLPESTLIMLVSAFYGYEKTMAAYKTAVEQRYRFFSFGDAMLIL

SEQ ID NO: 66883 - protein, 341 aa, Gemmiger sp.
  REGION 1..341: note = tr|A0A1Y4TMW2|A0A1Y4TMW2_9FIRM S-adenosylmethionine:tRNA ribosyltransferase-isomerase; OS = Gemmiger sp. An120 OX=1965549 GN=queA PE=3 SV=1
MLKKDFWFDLPPEQIAQEPAEPRDAARLMVLGRQDGHIEHRVFHDLPDLLHAGDLLVVNNSKVLPARLIGSKDTGAVCELLLLHQVKGDEWECLAKPGKRLKEGAVIHFGDGSLTARILQTLPDGNKRVEFSYDTATLYEKLDQFGRMPLPPYITKQLEDQSQYQTVYAKELGSAAAPTAGLHFTPELLDTLQKMGVGVTQVTLHVGLGTFRPVKEDDILDHVMHSEWYSVSEENAEAIRRTKANGGRVIAVGTTSCRTLEAVAEKYGEIRACCGDTDIFLYPGKPFRCIDGLITNFHLPESTLIMLVAGFCGYENTMHAYKVAVEEKYRFFSFGDAMLIL

SEQ ID NO: 66884 - protein, 348 aa, Gemmobacter aquatilis
  REGION 1..348: note = tr|A0A1H8BHN6|A0A1H8BHN6_9RHOB S-adenosylmethionine:tRNA ribosyltransferase-isomerase; OS = Gemmobacter aquatilis OX=933059 GN=queA PE=3 SV=1
MKLSDFDFHLPEELIATRPAKPRPAARLLLAEGEAIRDLHVADLVDIFRPGDRLVLNNTKVIPARLTGQRQRQSAQGPVVAKVEITLLEPTAAGGWRALAKPLRKLAAGEVIVFSDQLSAEVVQKGETEVELRFNLAGDDFDAALAEAGQMPLPPYIAAKRAPDAQDRDDYQTVFARHSGAVAAPTASLHFDADLLAALRARGVEFTEVTLHVGAGTFLPVKVEDVTTHRMHAEWGEVTEAAAAAINATKAAGGRVIPVGTTALRLIESAGRGGQMQAWRGTTDIFIYPGFRFQIADALMTNFHLPKSTLLMLVSALMGKDRMMRVYDHAIRHGYRFFSYGDASLLIP

SEQ ID NO: 66885 - protein, 349 aa, unidentified
  source 1..349: note = Gemmobacter caeni
  REGION 1..349: note = tr|A0A2T6BBA3|A0A2T6BBA3_9RHOB S-adenosylmethionine:tRNA ribosyltransferase-isomerase; OS = Gemmobacter caeni OX=589035 GN=queA PE=3 SV=1
MKLADFDFDLPEHLIATRPVKPRPAARLLLAEGEAIRDLHVRDLVTLLRPGDRLVLNNTKVIPARLNGTRWRDTGQGRVSAKVEITLLEPVASGGWRALAKPLRKLAQGEVIVFSDQLSAQVSRKGETDLVLEFNLTGPDFDAALAAAGQMPLPPYIAAKRAPDAQDHQDYQTVFARHSGAVAAPTASLHFDAGLLAALRARGVEFTEVTLHVGAGTFLPVKVEDVTTHRMHAEWGEVTEAAVAEIAATKAAGGRVIPVGTTALRLIESAAQGGALAPWRGETDIFIYPGFTFRVADGLMTNFHLPRSTLMMLVAALMGRDRILRVYDHAISEGYRFFSYGDASLLLPG

SEQ ID NO: 66886 - protein, 349 aa, unidentified
  source 1..349: note = Gemmobacter intermedius
  REGION 1..349: note = tr|A0A444M9G9|A0A444M9G9_9RHOB S-adenosylmethionine:tRNA ribosyltransferase-isomerase; OS = Gemmobacter intermedius OX=1553448 GN=queA PE=3 SV=1
MKLDDFDYHLPEDLIATRPAKPRTAAKFLICEGDGMRDLHVSDLPSVLRPGDRLVLNNTKVIPARLTGRRLRESAQGLVEAKIEITLMEPQPDGAWRAMAKPLRKLKEGEVIRFGERLSASVLQKSDEDVVLSFDAEGDALEAALAEVGTMPLPPYIAAKRAPDAQDNDDYQTVFARVSGAVAAPTASLHFTPELMEELRAMGVGFTEVTLHVGAGTFLPVKVENIETHKMHAEWGQVTDKAAAEINATKAAGGRIIAVGTTALRLIESAATDEGLQPWTGETDIFIRPGFRFRVADGLMTNFHLPKSTLLMLVSALMTKERIDRIYAHAVEQRYRFFSYGDSSLLLPG

SEQ ID NO: 66887 - protein, 349 aa, unidentified
  source 1..349: note = Gemmobacter lutimaris
  REGION 1..349: note = tr|A0A398BSE9|A0A398BSE9_9RHOB S-adenosylmethionine:tRNA ribosyltransferase-isomerase; OS = Gemmobacter lutimaris OX=2306023 GN=queA PE=3 SV=1
MKLSDFDFDLPEHLIATRPVKPRPAARLLLAEGDAIRDLHVRDLVTLLKPGDRLVLNNTKVIPARLSGTRWRESAQGRVSAKVEITLLEPVASGGWRALAKPLRKLAEGEEIVFSDRLAASVATKGDTDVVLEFNLTGPDFDAALAAAGQMPLPPYIAAKRAPDAQDHQDYQTVFARHSGAVAAPTASLHFDADLLAALRARGVDFTEVTLHVGAGTFLPVKVEDVTTHRMHAEWGEVSDAAVAEITATKAAGGRVIPVGTTALRLIESAAQGGKLAPWRGETDIFIYPGFTFRVADGLMTNFHLPKSTLMMLVSALMGRDRILRIYDHAISSGYRFFSYGDASLLLPG

SEQ ID NO: 66888 - protein, 350 aa, unidentified
  source 1..350: note = Gemmobacter megaterium
  REGION 1..350: note = tr|A0A1N7NTJ5|A0A1N7NTJ5_9RHOB S-adenosylmethionine:tRNA ribosyltransferase-isomerase; OS = Gemmobacter megaterium OX=1086013 GN=queA PE=3 SV=1
MKLDDFDYHLPEHLIATRPARPRSAARLLVARGDAIADAHVHDLCAALRPGDRLVLNNTKVIPARLTGRRLRNSAQGMVEAKVEITLMEPVPSGGWRALARPLRKLKEGERIVFSERLSALVVARGAEDVVLDFDLNGADFDAALAEAGTMPLPPYIAALRAPDAQDDQDYQPVFARHSGAVAAPTASLHFDEDLLAALAAMGVAFTEVTLHVGAGTFLPVKVDDVTTHRMHSEWGEVTERAAAEINATRAAGGRIIPVGTTALRLIESAAGDDGLMPWQGETDIFIYPGYRFRIADGLMTNFHLPKSTLLMLVSALMGKDRIDRIYAHAVAQGYRFFSYGDASLLLPKG

SEQ ID NO: 66889 - protein, 352 aa, Gemmobacter sp.
  REGION 1..352: note = tr|A0A4S3MQE2|A0A4S3MQE2_9RHOB S-adenosylmethionine:tRNA ribosyltransferase-isomerase; OS = Gemmobacter sp. CC-PW-75 OX=1445661 GN=queA PE=3 SV=1
MKLSDFDFDLPEALIATRPARPRTSARLLLAEGDRFTDLHVRDLVDVFRKGDLLVLNNTRVIPARLTGQRTRQTGQGPVTAKVEITLLEAAAAGGWRALAKPLRKLDAGELIRFSDALSATVAEKGDTDLRLEFNLTGEDFDAALAEAGAMPLPPYIAARRAPDEQDRDDYQTVFARHAGAVAAPTASLHFDEALLRALADKGVEFAEVTLHVGAGTFLPVKVEDVTTHRMHAEWGEVTPEAAAAIAAAKARGGRVIPVGTTALRLIETAARDGQIAPWRGDTDIFIYPGFRFHVTDALMTNFHLPKSTLLMLVSALMGKDRIDRIYAHAVASGYRFFSYGDASLLIPESGR

SEQ ID NO: 66890 - protein, 347 aa, Gemmobacter sp.
  REGION 1..347: note = tr|A0A2S0UKT9|A0A2S0UKT9_9RHOB S-adenosylmethionine:tRNA ribosyltransferase-isomerase; OS = Gemmobacter sp. HYN0069 OX=2169400 GN=queA PE=3 SV=1
MKLSDFDFDLPDELIATRPARPRTHARLLLAQGDSIEDRHVYDLPDIFRPGDRLVLNNTRVIPARLTGTRARGEAVAKVEITLLEPQATGWRALAKPLRKVNAGEVIRFSDALSATVAEKSETDLRLVFNLTGDDFDAALAEAGAMPLPPYIAAKRAPDAQDRDDYQTVFARHAGAVAAPTASLHFDAALLQRLADMGVTFTEVTLHVGAGTFLPVKVEDVTTHRMHAEWGEVTPKAAAEINATKAAGGRIIPVGTTALRLIESAGRSGKVEPWVGPTDIFIYPGFRFQITDALMTNFHLPKSTLMMLVSALMGQDRIRRIYDHAVTSRYRFFSYGDSSLLVPPRGR

SEQ ID NO: 66891 - protein, 345 aa, Geoalkalibacter ferrihydriticus
  REGION 1..345: note = tr|A0A1G9PXP3|A0A1G9PXP3_9DELT S-adenosylmethionine:tRNA ribosyltransferase-isomerase; OS = Geoalkalibacter ferrihydriticus OX=392333 GN=queA PE=3; SV = 1
MHLNDFNFELPEHLIAQHPAQQRDGSRLMTLDRAAGSLHPGYFPDVVGAFRPGDLLVINDTRVIPARLLGRKVSGGRIEVFLVRRLVGEDETWLCLTRSSKPARPGTRVLFEGGLEGEVLGADEQEPGQRRVRFKVQGEFLQVLEKVGRMPLPPYISRPDHNLDRERYQTVFAQEPGAVAAPTAGLHFTEPILRQLREVGVDICPLTLHVGPGTFLPVRVDDIRDHRMHAEHYRVPVATAEAVNRAKQQGRRVFALGTTATRVLEFALDDAGRLLPGEGVSDLFIYPGFRFRVVDGLITNFHLPRSTLLMLVCAFAGRELTLEAYRRAVEEQFRFFSYGDCMLIL

SEQ ID NO: 66892 - protein, 345 aa, Geoalkalibacter ferrihydriticus; identical to SEQ ID NO: 66891
  REGION 1..345: note = tr|A0A0C2HUX9|A0A0C2HUX9_9DELT S-adenosylmethionine:tRNA ribosyltransferase-isomerase; OS = Geoalkalibacter ferrihydriticus DSM 17813 OX=1121915; GN = queA PE=3 SV=1

SEQ ID NO: 66893 - protein, 343 aa, Geoalkalibacter subterraneus
  REGION 1..343: note = tr|A0A0B5FS33|A0A0B5FS33_9DELT S-adenosylmethionine:tRNA ribosyltransferase-isomerase; OS = Geoalkalibacter subterraneus OX=483547 GN=queA PE=3 SV=1
MQLSDFSFDLPDELIAQHPHQQRDGSRLMILDRGALSVSVGRFADLSQFFQAGDLLVVNDTRVIPARLLGHKESGGRIEVFLSRQVPLPGTVWQCLMRSSKTPRPGTRLFFDDNLRGVVLEGDQPPHRLIRFEFEGDFYQTLDRVGQVPLPPYIKRSPDEDDPERYQTVFGANPGAVAAPTAGLHFTRKTFDELQRIGVEIHALTLHVGLGTFLPVRVENVLEHRMHAEHFQVSHETAAAVNQARSEGRRIFALGTTTTRVLEYALDANGRLRAGEGASDLFIYPGFEFRMVDALITNFHLPQSTLLMLVSAFAGRDFVLNAYRQAVAEQFRFFSYGDCMLIL

SEQ ID NO: 66894 - protein, 342 aa, Geobacillus galactosidasius
  REGION 1..342: note = tr|A0A226QMA9|A0A226QMA9_9BACI S-adenosylmethionine:tRNA ribosyltransferase-isomerase; OS = Geobacillus galactosidasius OX=883812 GN=queA PE=3 SV=1
MKIDLFDFELPEELIAQTPLLNRDASRLMVLDKKTGEIHHETFRNILSYLHKGDCLVLNDTRVMPARLYGEKENTGANIEVLLLKQLEGDRWETLVKPAKRVKVGTEITFGDGRLKATCVDTLEHGGRILEFSYQGIFYEVLEQLGEMPLPPYIKEKLDDPERYQTVYAREVGSAAAPTAGLHFTEQLLDDIRAKGVHIAFITLHVGLGTFRPVNVENIEEHDMHAEFYQMTEKTARLLNEVRQQGGRIIAVGTTSTRTLETIASKHNGAFVAESGWTDIFIYPGYEFKAIDGLVTNFHLPKSTLIMLVSALAGRENILRAYNAAVKERYRFFSFGDAMLII

SEQ ID NO: 66895 - protein, 342 aa, Geobacillus kaustophilus; identical to SEQ ID NO: 63693
  REGION 1..342: note = tr|A0A4D7QGZ9|A0A4D7QGZ9_GEOKU S-adenosylmethionine:tRNA ribosyltransferase-isomerase; OS = Geobacillus kaustophilus NBRC 102445 OX=1220595 GN=queA; PE = 3 SV=1

SEQ ID NO: 66896 - protein, 342 aa, Geobacillus kaustophilus
  REGION 1..342: note = sp|Q5KWR3|QUEA_GEOKA S-adenosylmethionine:tRNA ribosyltransferase-isomerase OS=Geobacillus kaustophilus (strain HTA426) OX=235909 GN=queA PE=3 SV=1
MKVDLFDFHLPEELIAQTPLPDRAASRLMVLDKRTGAIRHETFRNIISYLNPGDCLVLNDTRVMPARLYGEKEETGGTVEVLLLKQLDGDRWETLVKPGKRVKPGTKLTFGEGKLEAVCLDTLEHGGRVLEFSYDGLFYEVLAELGEMPLPPYIKEKLDDPERYQTVYAREIGSAAAPTAGLHFTEELLDAIREKGVHIVFITLHVGLGTFRPVQVDDVEKHDMHAEFYQMSEETAETLNRVREQGGRIIAVGTTSTRTLETIAGKHNGRFVAESGWTDIFIYPGYEFKGIDGLVTNFHLPKSTLIMLVSALAGRENILHAYQVAVKERYRFFSFGDAMLII

SEQ ID NO: 66897 - protein, 342 aa, Geobacillus lituanicus
  REGION 1..342: note = tr|A0A223DUL9|A0A223DUL9_9BACI S-adenosylmethionine:tRNA ribosyltransferase-isomerase; OS = Geobacillus lituanicus OX=169283 GN=queA PE=3 SV=1
MKVDLFDFHLPEELIAQTPLPDRAASRLMVLDKRTGAIRHETFRNIISYLNPGDCLVLNDTRVMPARLYGEKAETGGTVEVLLLKQLDGDRWETLVKPGKRVKPGTKLTFGGGKLQAVCLDTLEHGGRVLEFSYDGLFYEVLAELGEMPLPPYIKEKLDDPERYQTVYAREIGSAAAPTAGLHFTEELLEDIRQKGVHIVFITLHVGLGTFRPVQVDEVEKHDMHAEFYQMSEETAETLNRVREQGGRIIAVGTTSTRTLETIAGKHNGRFVAESGWTDIFIYPGYEFKGIDGLVTNFHLPKSTLIMLVSALAGRENILHAYQVAVKERYRFFSFGDAMLII

SEQ ID NO: 66898 - protein, 342 aa, unidentified
  source 1..342: note = Geobacillus proteiniphilus
  REGION 1..342: note = tr|A0A1Q5TA34|A0A1Q5TA34_9BACI S-adenosylmethionine:tRNA ribosyltransferase-isomerase; OS = Geobacillus proteiniphilus OX=860353 GN=queA PE=3 SV=1
MKVDLFDFHLPEELIAQTPLPDRAASRLMVLDKRTGAIRHETFRNIISYLNPGDCLVLNDTRVMPARLYGEKAETGGTVEVLLLKQLDGDRWETLVKPGKRVKPGTKLTFGEGKLQAVCLDTLEHGGRVLEFSYDGLFYEVLAELGEMPLPPYIKEKLDDPERYQTVYAREIGSAAAPTAGLHFTEELLDAIREKGVHIVFITLHVGLGTFRPVQVDEVEKHDMHAEFYQMSEETAETLNRVREQGGRIIAVGTTSTRTLETIAGKHNGRFVAESGWTDIFIYPGYEFKGIDGLVTNFHLPKSTLIMLVSALAGRENILHAYEVAVKERYRFFSFGDAMLII

SEQ ID NO: 66899 - protein, 342 aa, Geobacillus sp.
  REGION 1..342: note = tr|L8A0X3|L8A0X3_9BACI S-adenosylmethionine:tRNA ribosyltransferase-isomerase OS=Geobacillus sp. GHH01; OX = 1233873 GN=queA PE=3 SV=1
MKVDLFDFHLPEELIAQTPLPDRAASRLMVLDKRTGAIRHETFRNIISYLNPGDCLVLNDTRVMPARLYGEKEETGGTVEVLLLKQLDGDRWETLVKPGKRVKPGTKLTFGGGKLEAVCLDTLEHGGRVLEFSYDGLFYEVLAELGEMPLPPYIKEKLDDPERYQTVYAREIGSAAAPTAGLHFTEELLDAIREKGVHIVFITLHVGLGTFRPVQVDEVEKHDMHAEFYQMSEETAETLNRVREQGGRIIAVGTTSTRTLETIAGKHNGRFVAESGWTDIFIYPGYEFKGIDGLVTNFHLPKSTLIMLVSALAGRENILHAYQVAVKERYRFFSFGDAMLII

SEQ ID NO: 66900 - protein, 342 aa, Geobacillus sp.
  REGION 1..342: note = sp|C5D5E6|QUEA_GEOSW S-adenosylmethionine:tRNA ribosyltransferase-isomerase OS=Geobacillus sp. (strain WCH70) OX=471223 GN=queA PE=3 SV=1
MKIDLFDFDLPEELIAQTPLPNRDASRLMVLDKKTGEIRHETFRNILSYLHEGDCLVLNDTRVMPARLYGEKENTGANIEVLLLKQLEGDRWETLVKPAKRVKVGTEITFGDGRLKATCVDTLEHGGRILEFSYQGIFYEVLEQLGEMPLPPYIKEKLDDPERYQTVYAREVGSAAAPTAGLHFTEQLLDDIRAKGVHIAFITLHVGLGTFRPVSVENIEEHDMHAEFYQMTEETARLLNEVRQQGGRIIAVGTTSTRTLETIASKHNGAFVAESGWTDIFIYPGYEFKAIDGLVTNFHLPKSTLIMLVSALAGRENILRAYNAAVKERYRFFSFGDAMLII

SEQ ID NO: 66901 - protein, 342 aa, Geobacillus stearothermophilus; identical to SEQ ID NO: 66899
  REGION 1..342: note = tr|A0A0K2H650|A0A0K2H650_GEOSE S-adenosylmethionine:tRNA ribosyltransferase-isomerase; OS = Geobacillus stearothermophilus 10 OX=272567 GN=queA; PE = 3 SV=1

SEQ ID NO: 66902 - protein, 342 aa, Geobacillus stearothermophilus
  REGION 1..342: note = tr|A0A250E1K6|A0A250E1K6_GEOSE S-adenosylmethionine:tRNA ribosyltransferase-isomerase; OS = Geobacillus stearothermophilus OX=1422 GN=queA PE=3 SV=1
MKVDLFDFHLPEELIAQTPLPDRAASRLMVLDKRTGAIRHETFRNIISYLNPGDCLVLNDTRVMPARLYGEKAETGGTVEVLLLKQLDGDRWETLVKPGKRVKPGTKLTFGGGKLQAVCLDTLEHGGRVLEFSYDGLFYEVLAELGEMPLPPYIKEKLDDPERYQTVYAREIGSAAAPTAGLHFTEELLEAIREKGVHIVFITLHVGLGTFRPVQVDEVEKHDMHAEFYQMSEETAETLNRVREQGGRIIAVGTTSTRTLETIAGKHNGRFVAESGWTDIFIYPGYEFKGIDGLVTNFHLPKSTLIMLVSALAGREHILHAYEVAVKERYRFFSFGDAMLII

SEQ ID NO: 66903 - protein, 342 aa, Geobacillus subterraneus
  REGION 1..342: note = tr|A0A146CUS2|A0A146CUS2_9BACI S-adenosylmethionine:tRNA ribosyltransferase-isomerase; OS = Geobacillus subterraneus OX=129338 GN=queA PE=3 SV=1
MRVDLFDFYLPEELIAQTPLPDRAASRLMVLDKRTGAIRHETFRNIISYLHPGDCLVLNDTRVMPARLYGEKAETGGTVEVLLLKPLDGDRWETLVKPGKRVKPGTKLVFGDGKLQAVCLDTLEHGGRVLEFSYEGLFYEVLAELGEMPLPPYIKERLDNPERYQTVYAREIGSAAAPTAGLHFTEELLDAIRERGVHIAFITLHVGLGTFRPVQVDDVEKHDMHAEFYQMSEETAAILNRVRADGGRIIAVGTTSTRTLETIAGKHNGRFVAESGWTDIFIYPGYEFKGIDGLVTNFHLPKSTLIMLVSALAGREHILHAYEVAVKERYRFFSFGDAMLIM

SEQ ID NO: 66904 - protein, 342 aa, Geobacillus thermocatenulatus
  REGION 1..342: note = tr|A0A226QBW8|A0A226QBW8_9BACI S-adenosylmethionine:tRNA ribosyltransferase-isomerase; OS = Geobacillus thermocatenulatus OX=33938 GN=queA PE=3 SV=1
MKVDLFDFHLPEELIAQTPLPDRAASRLMVLDKRTGAIRHETFRNIISYLNPGDCLVLNDTRVMPARLYGEKEETGGTAEVLLLKQLDGDRWETLVKPGKRVKPGTKLTFGEGKLEAVCLDTLEHGGRVLEFSYDGLFYEVLAELGEMPLPPYIKEKLDDPERYQTVYAREIGSAAAPTAGLHFTEELLDAIREKGVHIVFITLHVGLGTFRPVQVDDVEKHDMHAEFYQMSEETAETLNRVREQGGRIIAVGTTSTRTLETIAGKHNGRFVAESGWTDIFIYPGYEFKGIDGLVTNFHLPKSTLIMLVSALAGRENILHAYQVAVKERYRFFSFGDAMLII

SEQ ID NO: 66905 - protein, 342 aa, Geobacillus thermodenitrificans
  REGION 1..342: note = sp|A4IRB0|QUEA_GEOTN S-adenosylmethionine:tRNA ribosyltransferase-isomerase OS=Geobacillus thermodenitrificans (strain NG80-2) OX=420246 GN=queA PE=3; SV = 1
MKVDLFDFHLPEELIAQTPLPDRAASRLMVLDKQTGAIRHETFRNIISYLHPGDCLVLNDTRVMPARLYGEKAETGGMVEVLLLKQLDGDRWETLVKPGKRVRPGTKLVFGGGKLQAVCLDTLEHGGRVLEFSYEGLFYQVLAELGEMPLPPYIKEKLDNPERYQTVYAREIGSAAAPTAGLHFTEELLDAIREKGIHIAFITLHVGLGTFRPVQVDDIEKHNMHAEFYQMSEETAAILNRVRANGGRIIAVGTTSTRTLETIANRHDGRFAAESGWTDIFIYPGYEFKAIDGLVTNFHLPKSTLIMLVSAFAGREHILHAYEVAVKEQYRFFSFGDAMLII

SEQ ID NO: 66906 - protein, 344 aa, Geobacillus thermodenitrificans
  REGION 1..344: note = tr|A0A1W6VX88|A0A1W6VX88_GEOTD S-adenosylmethionine:tRNA ribosyltransferase-isomerase; OS = Geobacillus thermodenitrificans OX=33940 GN=queA_2 PE=3; SV = 1
MKVSELDFYLPPKLLARKPREIDGQSRSDSRMLVIFKDNGQINHSFVKNIGDYLEEGDLIVLNNSKTMNAVFKGRSIDGAFLEIALCSQIKPKTWLASVSTPNVEKYLNVEFKVSDELHFIVRSKSKKINNFYVVDFVYDGELYELSVKYGRPIISNYTERQWDLKYYQNEFATIAGSVEMPAAGRHFTNELLSSLKRKGINIAYITLHTGLSSLTIEEENIEDHVMYEEYYSISKETADLINSTKMRGKKVIAIGTTVTRTLESAVDVNNRVQSKTDWTDLYIYPGYQFKIVDGILTNFHGPRTSRIALAAAFTKPEYLMNAYQEAIAEGYLFYEFGDATLII

SEQ ID NO: 66907 - protein, 342 aa, Geobacillus thermoleovorans; identical to SEQ ID NO: 66896
  REGION 1..342: note = tr|G8N3I2|G8N3I2_GEOTH S-adenosylmethionine:tRNA ribosyltransferase-isomerase OS=Geobacillus thermoleovorans CCB_US3_UF5 OX=1111068 GN=queA PE=3 SV=1

SEQ ID NO: 66908 - protein, 338 aa, Geobacillus thermoleovorans
  REGION 1..338: note = tr|A0A098KZP7|A0A098KZP7_GEOTH S-adenosylmethionine:tRNA ribosyltransferase-isomerase; OS = Geobacillus thermoleovorans B23 OX=1406857 GN=queA PE=3; SV = 1
MFDFHLPEELIAQTPLPDRAASRLMVLDKRTGAIRHETFRNIISYLNPGDCLVLNDTRVMPARLYGEKEETGGTVEVLLLKQLDGDRWETLVKPGKRVKPGTKLTFGEGKLEAVCLDTLEHGGRVLEFSYDGLFYEVLAELGEMPLPPYIKEKLDDPERYQTVYAREIGSAAAPTAGLHFTEELLDAIREKGVHIVFITLHVGLGTFRPVQVDDVEKHDMHAEFYQMSEETAETLNRVREQGGRIIAVGTTSTRTLETIAGKHNGRFVAESGWTDIFIYPGYEFKGIDGLVTNFHLPKSTLIMLVSALAGRENILHAYQVAVKERYRFFSFGDAMLII

SEQ ID NO: 66909 - protein, 342 aa, unidentified
  source 1..342: note = Geobacillus zalihae
  REGION 1..342: note = tr|A0A1V9CK42|A0A1V9CK42_9BACI S-adenosylmethionine:tRNA ribosyltransferase-isomerase; OS = Geobacillus zalihae OX=213419 GN=queA PE=3 SV=1
MKVDLFDFHLPEELIAQTPLPDRAASRLMVLDKRTGAIRHETFRNIISYLNPGDCLVLNDTRVMPARLYGEKEETGGTVEVLLLKQLDGDRWETLVKPGKRVKPGTKLTFGEGKLEAVCLDTLEHGGRVLEFSYDGLFYEVLAELGEMPLPPYIKEKLDDPERYQTVYAREIGSAAAPTAGLHFTEELLDAIREKGVHIVFITLHVGLGTFRPVQVDDVEKHDMHAEFYQMSEETAETLNRVRDQGGRIIAVGTTSTRTLETIAGKHNGRFVAESGWTDIFIYPGYEFKGIDGLVTNFHLPKSTLIMLVSALAGRENILHAYQVAVKERYRFFSFGDAMLII

SEQ ID NO: 66910 - protein, 343 aa, Geobacter argillaceus
  REGION 1..343: note = tr|A0A562WQX2|A0A562WQX2_9DELT S-adenosylmethionine:tRNA ribosyltransferase-isomerase; OS = Geobacter argillaceus OX=345631 GN=queA PE=3 SV=1
MRLDDFDYELPAELIAQEPLARRDTARLMLLDRASGALDERTVSAFPDLLNSGDLLVLNDTRVIPARLLGRKESGGRVEIFLVRRTPEEGECWLCLLRSSKPSRPGTCILLADGMTATVTAQVDEGTWTVSFAPAEAFSDWLERHGQMPLPPYIRRGAGAHDRQRYQTVFARQAGAVAAPTAGLHFTPELLDAVRSRGVTVATLTLHVGLGTFQPVRVDNILEHRMHREFYRIPEETAREVARRKREGGRIVTVGTTTTRALEHASREDGTVRAGAGEADIFIYPGYRFRVVDALLTNFHLPKSTLLMLVSAFAGKDMVFAAYEEAIRRRFRFFSYGDAMFIY

SEQ ID NO: 66911 - protein, 341 aa, Geobacter bemidjiensis
  REGION 1..341: note = sp|B5EFX9|QUEA_GEOBB S-adenosylmethionine:tRNA ribosyltransferase-isomerase OS=Geobacter bemidjiensis (strain Bem / ATCC BAA-1014 / DSM 16622) OX=404380 GN=queA; PE = 3SV=1
MFLSDFDYELPPELIAQHPASRRDASRLLTLDRLSGAIGEATVASIAAQFLPGDLLVLNDTRVIPARLHGHKESGGAVEIFLVRRVAGEPECWSCLIKASKSPKNGCRVVFPGGVTATVLERDGGDWRVLFEGSDDFMAWLEQTGSMPLPPYIKRAPEGEDLERYQTVFAREKGAVAAPTAGLHFTPAILDEIRGRGVEIVSVTLHVGLGTFMPIRVEDLSEHTMHRELYRIPQETAAAIRRTKERGGRVVALGTTSLRALEHAAASGEVAAGEREADIFILPGYRFRVVDALITNFHLPKSTLFMLVCAFAGKEAMLEAYREAVSRRFRFFSYGDAMFIG

SEQ ID NO: 66912 - protein, 343 aa, Geobacter daltonii
  REGION 1..343: note = sp|B9M5N6|QUEA_GEODF S-adenosylmethionine:tRNA ribosyltransferase-isomerase OS=Geobacter daltonii (strain DSM 22248 / JCM 15807 / FRC-32) OX=316067 GN=queA PE=3 SV=1
MQLKDFNYHLPPELIAQEPAHRRESARLMTLDRKSGEIGEGVVADIAEYFVAGDLLVINDTKVIPARLLGRKETGGKAEVFLVRRRDEAGQVWQCLIKCSKSPAPGSLILLSEGVTARIVERSEHDTWIVSFSPEEGFLDRLEMIGSMPLPPYIHRPANVIDGERYQTVFARERGAVAAPTAGLHFTESLLQKIRARGVDILPLTLHVGLGTFMPVRVKDLSEHRMHREYYRIPETTAKAVTDRKKAGKRVIALGTTTTRALEHAAAEDGSLDAKEGEADIFIVPGYAFKTVDALITNFHLPESTLLMLVSAFAGRDRLFNAYAEAVRRKFRFFSYGDAMFIY

SEQ ID NO: 66913 - protein, 341 aa, Geobacter lovleyi
  REGION 1..341: note = sp|B3E2S1|QUEA_GEOLS S-adenosylmethionine:tRNA ribosyltransferase-isomerase OS=Geobacter lovleyi (strain ATCC BAA-1151 / DSM 17278 / SZ) OX=398767 GN=queA PE=3 SV=1
MLVKEYSFTLPDELIARYPANQRDGSRLMVLDRQTAARSEIAFSQIVEWLRPDDLLVLNDTKVIPARLFGQKETGGRIELFLVEPVGDACWRCLLRSSKRCRTGQSIRLAEGVTAEVVEQLGEQDWLIRFHGSDDFESWLQRVGQMPIPPYLNRESEELDRVRYQTVYASESGAVAAPTAGLHFTQELLERIQEKGIRLARVTLHVGLGTFQPVRVERVQDHVIHRERYRLPSETAAAVTETRARGGRVIAVGTTACRTLEYAADNAGHLQAGQGEADIFIYPGYRFKVVDALLTNFHLPESTLLMLVSAFGGKEFILSAYEAAVNRQFRFYSYGDAMLIV

SEQ ID NO: 66914 - protein, 343 aa, Geobacter metallireducens
  REGION 1..343: note = sp|Q39XD1|QUEA_GEOMG S-adenosylmethionine:tRNA ribosyltransferase-isomerase OS=Geobacter metallireducens (strain GS-15 / ATCC 53774 / DSM 7210) OX=269799 GN=queA; PE = 3 SV=1
MRVDDFDYELPPELIAQEPLDRRDATRLMTVDRLKGEVGEVSFREITRLFRPGDLLVVNDTRVIPARFFGVKESGGRVEVFLERRLAAVGERWQCLLRSSKPSRPGTRIVLAEGVSAEVIGRSDGDTWCVSFTPVTGFDEWLERNGAMPLPPYIRRSAADADRERYQTVFSRQRGAVAAPTAGLHFTPELLDELRERGVEIATLTLHVGLGTFMPIRVERVEEHRMHRERYIIPSATADAVNARKGGKGRVIALGTTTCRTLEHAARDDGRVAAGAGETGIFIYPGYHFKTVDALITNFHLPKSTLLMLVSAFAGKELLFRAYHEAVTRRFRFFSYGDAMFVH

SEQ ID NO: 66915 - protein, 341 aa, Geobacter pelophilus
  REGION 1..341: note = tr|A0A1W7QQD9|A0A1W7QQD9_9DELT S-adenosylmethionine:tRNA ribosyltransferase-isomerase; OS = Geobacter pelophilus OX=60036 GN=queA PE=3 SV=1
MFLSDFDYELPPELIAQHPASRRDGARLLTLERSSGAIGEGTVAGIAAHFLPGDLLVLNDTRVIPARLHGNKESGGGVEIFLVRRVPGEPECWSCLIKASKSPKDGCRVILPGGVTATVLGRDGGDWRVLFEGSPDFMSWLEQTGSMPLPPYIKRAPEGEDLERYQTVFAREKGAVAAPTAGLHFTPAILDEIRERGVEIAPVTLHVGLGTFMPVRVEDLSQHTMHRELYRIPQETAAAIRRTKERGGRVVALGTTSLRALEHAAASGELEAGEREADIFILPGYRFRVVDALITNFHLPKSTLFMLVCAFAGKEAMLKAYREAVSRRFRFFSYGDAMFIG

SEQ ID NO: 66916 - protein, 343 aa, Geobacter pickeringii
  REGION 1..343: note = tr|A0A0B5BEU7|A0A0B5BEU7_9DELT S-adenosylmethionine:tRNA ribosyltransferase-isomerase; OS = Geobacter pickeringii OX=345632 GN=queA PE=3 SV=1
MLVDDFAYPLPPELVAQEPLPRRDATRLMTVDRARGEIGERPFREIAALFAPGDLLVVNDTRVIPARLHGRKESGGKVEIFLVRRLPAEGERWLCLLRSSKPSRPGTVVSLAEGVTATVVSRVDGDTWEVAFSPDEGFDAWLDRVGAMPLPPYIRRESGDYDRERYQTVFACNRGAVAAPTAGLHMTDDLLAELRGGGVEVAPLTLHVGLGTFMPIRVKSIEEHRMHRERYAIPESTARAVAERKRNGGRVVALGTTVCRTLEQAAAADGTVPAGEGEAGIFIYPGYRFKTVDALITNFHLPKSTLLMLVSAFAGKELLFRAYGEAVARRFRFFSYGDAMFVS

SEQ ID NO: 66917 - protein, 343 aa, unidentified
  source 1..343: note = Geobacter soli
  REGION 1..343: note = tr|A0A0C1QTH0|A0A0C1QTH0_9DELT S-adenosylmethionine:tRNA ribosyltransferase-isomerase; OS = Geobacter soli OX=1510391 GN=queA PE=3 SV=1
MLVTEFDYHLPPELIAQEPLGQRDATRLMTVERDGGRIGEIPFRGIAGLLRPGDLLVINDTRVIPARLHGRKESGGKTEIFLVQRRPGDDETWHCLIRSSKPPRPGVTVLLPEGVRAVVREPGEGETWLVSFTPGEGFQEWLDRNGAMPLPPYIRRGADAADRDRYQTVFARNRGAVAAPTAGLHMTAGLLDEIAGRGVRVVPVTLHVGLGTFMPIRVERLEDHRMHRERYHISPATAEAVNGCRRAGGRVIALGTTVCRTLEQAAAADGTIAAGEGEADIFIYPGYRFKAVDALITNFHLPKSTLLMLVSAFAGRDLLFRAYGEAVAGRFRFFSYGDAMFIF

SEQ ID NO: 66918 - protein, 342 aa, Geobacter sp.
  REGION 1..342: note = tr|A0A212PD44|A0A212PD44_9DELT S-adenosylmethionine:tRNA ribosyltransferase-isomerase; OS = Geobacter sp. DSM 9736 OX=1277350 GN=queA PE=3 SV=1
MHLDTFDYQLPPELIAQEPLSRRDAARLLVLRRSHGTVTETVFSGIVSLLRPGDLLVLNDTRVIPARLIGSKESGGRTEIFLVRRLAGPGEVWQCLLRASKSPRPGQMIRLPHGVTAQVVERQDETWRVAFSPEEGFEEWLDRAGQMPLPPYIRRSSADLDQERYQTVFGRNRGAVAAPTAGLHMTPELLNELVARGIAIASVTLHVGLGTFLPVRVDDIREHRMHRELCSIPIATADAVAETRRKGGRVVALGTTVCRALEHASDEAGVLVPGETEADIFIYPGYRFRIVDALITNFHLPKSTLLMLVSAFAGKDFLLEAYAQAVERQFRFFSYGDAMFIE

SEQ ID NO: 66919 - protein, 343 aa, Geobacter sp.
  REGION 1..343: note = tr|A0A399I3N2|A0A399I3N2_9DELT S-adenosylmethionine:tRNA ribosyltransferase-isomerase; OS = Geobacter sp. OX=46610 GN=queA PE=3 SV=1
MDLEEFDFHLPSELIAQVPAARRDAARLMTLDRTTGKIGETVFSEIQGLFRPGDLLVVNDTRVIPARLLGCKESGGRVEVFLVRRVPGDRELWHCLIRASKSPKPGTVLLLAEGMTARVESRGEGDIWQVAFAPVEDFSPWLERNGSMPLPPYIRRAAEEHDRERYQTVFARAKGAVAAPTAGLHMTPELFAALAADGVEIATVTLHVGLGTFMPIRVENLDDHRMHREEYIIPEKTALAISQRKRDGGRVVALGTTTTRALEHAAGDDGTVTAGAGEADIFIRPGYNFKVIDALITNFHLPKSTLLMLVSAFAGKDLLLEAYGEAVRRQFRFYSYGDAMMIW

SEQ ID NO: 66920 - protein, 343 aa, Geobacter sulfurreducens
  REGION 1..343: note = sp|Q749X2|QUEA_GEOSL S-adenosylmethionine:tRNA ribosyltransferase-isomerase OS=Geobacter sulfurreducens (strain ATCC 51573 / DSM 12127 / PCA) OX=243231 GN=queA; PE = 3SV=1
MLVTEFDYHLPPELIAQEPLVQRDATRLMTVERDGGGIGEIPFRGIVDLFRPGDLLVINDTRVIPARLLGRKESGGKTEIFLVRRRPGDHETWHCLIRSSKPPRPGVTVLLPEGVRAVVREPGDGETWLVSFTPGEGFQEWLDRNGAMPLPPYIRREADAADRDRYQTVFARNRGAVAAPTAGLHMTAGLLDEIAGRGVRVAPVTLHVGLGTFMPIRVERLEDHRMHRERYHIPPATADAINGCRREGGRVIALGTTVCRTLEQAAAADGTIAAGEGEADIFIYPGYRFKAVDALITNFHLPKSTLLMLVSAFAGRDLLFRAYGEAVARRFRFFSYGDAMFIF

SEQ ID NO: 66921 - protein, 343 aa, Geobacter sulfurreducens; identical to SEQ ID NO: 66920
  REGION 1..343: note = tr|A0A0D5N4Z9|A0A0D5N4Z9_GEOSN S-adenosylmethionine:tRNA ribosyltransferase-isomerase; OS = Geobacter sulfurreducens OX=35554 GN=queA PE=3 SV=1

SEQ ID NO: 66922 - protein, 341 aa, Geobacter thiogenes
  REGION 1..341: note = tr|A0A1T4RQ72|A0A1T4RQ72_9DELT S-adenosylmethionine:tRNA ribosyltransferase-isomerase; OS = Geobacter thiogenes OX=115783 GN=queA PE=3 SV=1
MLVSDFSFELPDELIARYPMPQRDDSRLLVLERQQHTLTEARFKQITDWLQPDDLLVVNDTRVIPARLFGNKETGGRVELFLVEPQPDACWRCLLRASKACKLGQMIILSQGVTARVVDRLGEQDWLIRFHGTDDFDGWLQQIGQMPIPPYLNRPSEELDRERYQTVYAAESGAVAAPTAGLHFTPQLLDRIKQKGVQLAAVTLHVGLGTFQPVRVERVQDHIIHRERYSIPPETAAAVAATKQRGGRVIAVGTTACRTLEYAADAAGQVHAGKGEADIFIYPGYGFKVVDALITNFHLPESTLLMLVSAFAGQKFVLDAYRRAVQEKYRFYSYGDAMLIV

SEQ ID NO: 66923 - protein, 343 aa, Geobacter uraniireducens
  REGION 1..343: note = sp|A5GEQ5|QUEA_GEOUR S-adenosylmethionine:tRNA ribosyltransferase-isomerase OS=Geobacter uraniireducens (strain Rf4) OX=351605 GN=queA PE=3 SV=1
MQLNDFDYYLPTELIAQQPAQNRDASRLMTLDRVNGELNETIISEIAALFRDGDLLVINDTRVIPARLLGKKESGGRVEVFLVRRLLEPGEVWQCLIKASKSPKPGSLIILSEGVVARVLERSELDTWAVSFSPVEGFLDRLERIGSMPLPPYIRRSAGDDDRERYQTVFARAKGAVAAPTAGLHFTDALLQKIRQQGVEIAPLTLHVGLGTFMPVRVDDLKDHRMHREYYFIPEATARAVNARKNDGGRVVALGTTTTRALEHAAAGNGSVQPGEGEADIFICPGYTFKVVDALITNFHLPKSTLLMLVSALAGKDRLFNAYNEAVNRNFRFFSYGDAMFIY

SEQ ID NO: 66924 - protein, 342 aa, unidentified
  source 1..342: note = Geobacteraceae bacterium
  REGION 1..342: note = tr|A0A1G0M5S7|A0A1G0M5S7_9DELT S-adenosylmethionine:tRNA ribosyltransferase-isomerase; OS = Geobacteraceae bacterium GWC2_55_20 OX=1798317 GN=queA; PE = 3 SV=1
MLVKDFTFDLPAELIARYPAPERDGSRLMLLNRETGAIAETVFRDIGQYLDSGDLLVMNDTRVIPARLFGTKLSGGKVEVFLLRRLVDSDQWECMLRGSKKFRPGQQILFGSGMTAIVNSRCGTENWLIDFSGCEPFDAWLDREGHIPLPPYLQREDCASDRERYQTVVARNSGAVAAPTAGLHFTAGLLDQLAARGIATAFLTLHTGLGTFQPVRVERVQEHRIHCERYSIPPETVAVIRRTKAAGGRVIAVGTTTARTLEYSAGLAGGLDAGAGEADIFIYPGYRFKVVDALITNFHLPESTLLMLVSAFAGREFVLDAYKNAVACGFRFYSYGDAMFIY

SEQ ID NO: 66925 - protein, 343 aa, unidentified
  source 1..343: note = Geobacteraceae bacterium
  REGION 1..343: note = tr|A0A1G0MQP4|A0A1G0MQP4_9DELT S-adenosylmethionine:tRNA ribosyltransferase-isomerase; OS = Geobacteraceae bacterium GWC2_53_11 OX=1798316 GN=queA; PE = 3 SV=1
MLVKDFTFHLPQDLIARHPSAQRDGSRLMLLDRSSGAIAEDTFNHLDAYLKPGDLLVMNDTRVIPARLFGRKPTGGKVEIFLLRRVAGTHEQWECLCKSSKSLQTGQEVQLEAGMVATVLSRSDSDNWLVGFSGNEPFEIWLEREGHMPLPPYLQRDDSTVDRERYQTVIAREPGAVAAPTAGLHFTHEMLALLASQGVNTAFLTLHTGLGTFQPVRVERVEDHQIHTERYVIPAETAEAVNRTKAAGGRVIAVGTTSARTLEYSALQSGHVVAGSGEANIYIYPGYRFNVIDALITNFHLPESTLLMLVSALAGREFVLEAYREAVQRGFRFYSYGDAMFIS

SEQ ID NO: 66926 - protein, 339 aa, unidentified
  source 1..339: note = Geodermatophilus africanus
  REGION 1..339: note = tr|A0A1H3GPC3|A0A1H3GPC3_9ACTN S-adenosylmethionine:tRNA ribosyltransferase-isomerase; OS = Geodermatophilus africanus OX=1137993; GN = SAMN05660209_01957 PE=3 SV=1
MSALAMGAEAAAPPERRGLARDQVRLMAVRPDGITETTFRDLPEMLEPGDLVVVNTSATLPARLDVRRADGVRAPLHVATTLDDGDWVVELRRPDNDGPDRGVEPGTVLDLPGGVRLRLVEGFPAPARASRLWRARPDPAVPAVGHLQRHGTPIRYGYLGAAVPLADAQNVYATEPGSAENASAGRPFTDRVLVRLMARGVPVVPVVLHAGVSSPELHEPPAPERYRVPEVTARLVNATRAAGSRVVAVGTTVTRALETATGEDGVTRAAAGWTDLVLGPDRPARVVTGLLTGLHAPDASHLLLLEAVAGREPVDRAYARAVTGGYLWHEFGDTMLFLP

SEQ ID NO: 66927 - protein, 345 aa, unidentified
  source 1..345: note = Geodermatophilus amargosae
  REGION 1..345: note = tr|A0A1I6XB64|A0A1I6XB64_9ACTN S-adenosylmethionine:tRNA ribosyltransferase-isomerase; OS = Geodermatophilus amargosae OX=1296565; GN = SAMN05660657_00338 PE=3 SV=1
MTAVAVSTGAVPMGAEATEPPERRGLTRDGVRLMAVRPGSLTHARFTDLPGLLEPGDLVVVNTSATLPARLTARRADGTGTPVHVSTTLDDGTWVVEVRRPGDDGPETGLEPGATLTLPGGVRLVLRDGFPDPARPGRLWRAAADPAVAVPAYLARHGEPVRYRHLRGPLVLDDVQNVYATEPGSAENASAGRPFTDRLLVRLLARGVPVVPLVLHAGVSSPELHEPPAPERYRVPEVTARLVTATRAAGQRVVAIGTTVTRALETVTGEDGVTRPGEGWTDLVLGPDRPVRAVTGLVTGLHEPEASHLLLLEAVAGRDLVERAYAAAAGAYLWHEFGDSMLFLP

SEQ ID NO: 66928 - protein, 340 aa, unidentified
  source 1..340: note = Geodermatophilus aquaeductus
  REGION 1..340: note = tr|A0A521FRH0|A0A521FRH0_9ACTN S-adenosylmethionine:tRNA ribosyltransferase-isomerase; OS = Geodermatophilus aquaeductus OX=1564161; GN = SAMN06273567_11453 PE=3 SV=1
MTALAVPMGAEATEPPERRGLSRDGVRLMAVRPGSLTHARFADLPGLLEPGDLVVVNTSATLPARLTARRADGTTTPVHVSTTLDDGTWVVEVRRPGDDGPESGLEPGAALDLPGGVRLVLRGGFPDPARPGRLWRAVATPAVAVPAYLARHGEPVRYRHLRGPLALGDVQNVYATEPGSAENASAGRPFTDRLLVRLMARGVPVVPLVLHAGVSSPELHEPPAPERYRVPEVTARLVTATRAAGRRVVAVGTTVTRALETATGDDGVTRPGEGWTDLVLGPDRPVRAVTGLVTGLHEPEASHLLLLEAVAGRDLVRRAYDAAAGTYLWHEFGDSMLFLP

SEQ ID NO: 66929 - protein, 341 aa, unidentified
  source 1..341: note = Geodermatophilus dictyosporus
  REGION 1..341: note = tr|A0A1I5N5L9|A0A1I5N5L9_9ACTN S-adenosylmethionine:tRNA ribosyltransferase-isomerase; OS = Geodermatophilus dictyosporus OX=1523247; GN = SAMN05660464_2301 PE=3 SV=1
MTAFALPPGSEATEPPEHRGLSRDGVRLMAVRPGSTTAARFSDLPGLLEPGDLLVVNTSATLAARLEARRADGRVVPLHVSTALDDGSWVVEVRRPGNDGPETGLEPGTALDLPGGVRLRLRTGFPDPARPSRLWRARVEPAVALVPYLTEHGQPVRYGYLRAPVRLADAQNVYATEPGSAENASAGRPFTDRLLVRLLARGVPVVPLVLHAGVSSPELHEPPAPERYRVPEVTARLVNATRAAGRRVVAVGTTATRALETVTGEDGVTRPGEGWTDLVLGPDRAARAVTGLVTGLHAPEASHLLLLQAVAGADLVAAAYRVATADGWLWHEYGDSMLFLP

SEQ ID NO: 66930 - protein, 346 aa, unidentified
  source 1..346: note = Geodermatophilus nigrescens
  REGION 1..346: note = tr|A0A1M5DFA6|A0A1M5DFA6_9ACTN S-adenosylmethionine:tRNA ribosyltransferase-isomerase; OS = Geodermatophilus nigrescens OX=1070870; GN = SAMN05444351_0347 PE=3 SV=1
MTAAAASHAPVPMGSVATGPPERRGLTRDGVRLLAVRPGSLTSARFRDLPDLLEPGDLLVVNTSATLPARLTARRADGSPTPLHVSTTLDDGSWVVEVRRPDDDGPETRLEPGTALYLPGGVRLVLRAGFPDPGTPERLWRAHATPAVAVPAYLARHGEPVRYGYLTAPVALADVRNVYATEPGSAENASAGRPFTDRLLVRLMARGVPVVPLVLHAGVSSPEVYEPSAPERYRVPEVTARLVTATRDAGRRVVAVGTTVTRALETVTGEDGVTRPGEGWTDLVLGPERPARAVTGLLTGLHAPEASHLQLLRSVAGGDLVARAYRAAAEGGYLWHEFGDSMLFLP

SEQ ID NO: 66931 - protein, 344 aa, unidentified
  source 1..344: note = Geodermatophilus normandii
  REGION 1..344: note = tr|A0A317QFF3|A0A317QFF3_9ACTN S-adenosylmethionine:tRNA ribosyltransferase-isomerase; OS = Geodermatophilus normandii OX=1137989 GN=JD79_00816; PE = 3 SV=1
MTATTSRGAVPMGAEATEPPERRGTTRDGVRLMAVRPGSLTHARFSDLPGLLDPGDLVVVNTSATLPARLTARRADGTTTPVHLSTTLDDGTWVVEVRRPGDDGPETGLEPGAALTLPGGVRLVLRAGFPDPARPGRLWRAAATPAVAVPAYLARHGAPVRYRHLRGPLALDDVQNVYATEPGSAENASAGRPFTDRLLVRLVARGIPVVPLVLHAGVSSPELHEPPAPERYRVPEVTARLVTATRAAGRRVVAVGTTVTRALETVTGTDGVTRPGEGWTDLVLGPGRPVRAVTGLVTGLHEPEASHLLLLEAVAGRDPVERAYAAAAGTYLWHEFGDSMLFLP

SEQ ID NO: 66932 - protein, 341 aa, Geodermatophilus obscurus
  REGION 1..341: note = tr|A0A1I5EKF6|A0A1I5EKF6_9ACTN S-adenosylmethionine:tRNA ribosyltransferase-isomerase; OS = Geodermatophilus obscurus OX=1861 GN=SAMN05660359_01522; PE = 3 SV=1
MTALTVPVGAAATVPPERRGLARDGVRLMAVRPHVLTSARFSDLPDLLEPGDLVVVNTSGTLPARLTARRTDGATTPVHVSTTLDDGAWVVEVRRPTDDGPETGVEPGTALDLPGGVRLVLRAGFPDPGRPGRLWRAHASPAVSVPGYLARYGRPVRYGHLGAAVDLADVQNVYATEPGSAENASAGRPFTERLLVRLVARGVPVVPLVLHAGVSSPELHEPPAPERYRVPEVTARLVTATRAAGRRVVAVGTTVTRALETVTGEDGVTRPGEGWTDLVLGPDRPARAVTGLVTGLHEPEASHLLLLQAVAGPDLVARAYDAAVAGGYLWHEFGDSMLFLP

SEQ ID NO: 66933 - protein, 338 aa, Geodermatophilus obscurus
  REGION 1..338: note = tr|A0A1M7V0T6|A0A1M7V0T6_9ACTN S-adenosylmethionine:tRNA ribosyltransferase-isomerase; OS = Geodermatophilus obscurus OX=1861 GN=SAMN05660350_04882; PE = 3 SV=1
MTTFAMGAEASAPPERRGLARDGVRLMAVRPGGITETTFRDLPELLEPGDLVVNTSATLPARLDVRRADGIRAPLHVSTTLDDGDWVVELRRPDNDGPDRGVEPGTVLDLPGGVRLRLLEGFPDPARASRLWRARPDPDVPAAELLRRHGTPIRYGHLGAAVPLADAQNVYATEPGSAENASAGRPFTDRVLVRLMARGVPVVPVVLHAGVSSPELHEPPMAERYRVPEVTARLVDATREAGRRVVAVGTTVTRALETATGEDGVTRPAAGWTDLVLGPDRPARAVTGLLTGLHAPDASHLLLLEAVAGRELVDEAYARAAASGYLWHEFGDTMLFLP

SEQ ID NO: 66934 - protein, 339 aa, unidentified
  source 1..339: note = Geodermatophilus poikilotrophus
  REGION 1..339: note = tr|A0A1I0F647|A0A1I0F647_9ACTN S-adenosylmethionine:tRNA ribosyltransferase-isomerase; OS = Geodermatophilus poikilotrophus OX=1333667; GN = SAMN04488546_2737 PE=3 SV=1
MTAVAMGAEASAPPERRGLARDGVRLMAVRPGGLTETTFRDLPELLEPGDLVVVNTSATLPARLDVRRADGVGAPLHVSTTLDDGDWVVELRRPHNDGPDRGVEPGTVLDLPGGVRLRLLEGFPTPARASRLWRARPDPDVPAAELLRRHGTPIRYGHLSAAVPLADAQNVYATDPGSAENASAGRPFTDRVLVRLMARGVPVVPVVLHAGVSSPELHEPPVPERYRVPEVTARLVNATRAAGSRVVAVGTTVTRALETATGEDGVTRTAAGWTDLVLGPDRPARVVTGLLTGLHAPDASHLLLLEAVAGRELVDEAYARAAAGGYLWHEFGDTMLFLP

SEQ ID NO: 66935 - protein, 342 aa, Geodermatophilus ruber
  REGION 1..342: note = tr|A0A1I4D7C3|A0A1I4D7C3_9ACTN S-adenosylmethionine:tRNA ribosyltransferase-isomerase; OS = Geodermatophilus ruber OX=504800 GN=SAMN04488085_104250; PE = 3 SV=1
MTVTFPLPPDREAPAPPEHRGLPRDGVRLMTVRPGGIAEGVFHDLPDHLEPGDLVVVNTSAPLPARLDVRRADGVLTPLHVSTSLDDGEWVVEVRRPDNDGPDRGVEPGTELALPGGVRLRLLAGFPDPTRPGRLWRARPTPATPAPEHLRRYGQPIRYGYLRGAVPLAAAQNVYATEPGSAENASAGRPFTEHLLVRLMARGIPVVPVVLHAGVSSPELHEPPAPERFRVPEGTARLVRSTREAGRRVVAVGTTVTRALETATGEDGLTRAAAGWTDLVLGPDRPARVVNGLVTGLHAPDASHLLLLEAVAGRALVEGAYARAVGGDYLWHEYGDTMLFLP

SEQ ID NO: 66936 - protein, 339 aa, unidentified
  source 1..339: note = Geodermatophilus sabuli
  REGION 1..339: note = tr|A0A285EFD5|A0A285EFD5_9ACTN S-adenosylmethionine:tRNA ribosyltransferase-isomerase; OS = Geodermatophilus sabuli OX=1564158; GN = SAMN06893097_105114 PE=3 SV=1
MSSLTMGREATAPPEHRGLPRDGVRMMVVRPDGLLDTTFRDLPGHLEPGDLLVVNTSATLPARLEARRADGTSTPLHVSTALDDGDWVVEVRRPGNDGPDRGVEPGTVLDLPGGVTLRLLAGFPDPARPSRLWRARPEPPVPMAEHLRRYGQPIRYGYLTAVPTLADAQNVYATEPGSAENASAGRPFTERLLVRLMARGVVVAPVVLHAGVSSPELHEPPAPERFRVPEVTARLVASTRRAGRRVVAVGTTVTRALESATGEDGVTSPAAGWTDLVLGPDRPARAVTGLVTGLHAPDASHLLLLEAVAGRDLVDRAYARAATGAYLWHEYGDTMLFLP

SEQ ID NO: 66937 - protein, 350 aa, unidentified
  source 1..350: note = Geodermatophilus saharensis
  REGION 1..350: note = tr|A0A239IIS5|A0A239IIS5_9ACTN S-adenosylmethionine:tRNA ribosyltransferase-isomerase; OS = Geodermatophilus saharensis OX=1137994; GN = SAMN04488107_4353 PE=3 SV=1
MTALLPMGTPATVPPERRGLARDGVRLLAVAPGRTTSAHFSDLPDLLDPGDLLVVNTSATLPARLTARRADGATTPLHVSTTLDDGSWVVEVRRRTDDGPETGLEPGAALDLPGGVRLVLRDGFPDPAAPRRLWRAHATPAVGVPAYLARYGRPVHYAHLTAPVSLADVRNVYATEPGSAENASAGRPFTDRLLVRLVARGVPVVPLVLHAGVSSPELHEPPAPERYRVPEVTARLVTATRAAGRRVVAVGTTVTRALETVTGDDGVTRPGEGWTDLVLGPDRPARAVSGLLTGLHEPEASHVLLLEAVAGPELVARGYRAAVDGGYLWHEFGDSMLFLPGGGPATDRRG

SEQ ID NO: 66938 - protein, 334 aa, unidentified
  source 1..334: note = Geodermatophilus siccatus
  REGION 1..334: note = tr|A0A1G9TWL5|A0A1G9TWL5_9ACTN S-adenosylmethionine:tRNA ribosyltransferase-isomerase; OS = Geodermatophilus siccatus OX=1137991; GN = SAMN05660642_02676 PE=3 SV=1
MGAEAAAPPERRGLARDGVRLMTVRPDGITETVFRDLPELLEPGDLVVVNTSATLPARLDVRRADGVRAPLHVATTLDDGDWVVELRRPGNDGPDRGVEPGTLLDLPGAVRLRLVEAFPAPARASRLWRARPDPAVPAAEHLQRHGVPIRYGYLGAAVPLADAQNVYATEPGSAENASAGRPFTDRVLVRLMARGVPVVPVVLHAGVSSPELHEPPAPERYRVPEVTARLVNATRAAGSRVVAVGTTVTRALETATGEDGVTRPAAGWTDLVLGPDRPARVVTGLLTGLHAPDASHLLLLESVAGRELVDRAYARAVAGGYLWHEFGDTMLFLP

SEQ ID NO: 66939 - protein, 339 aa, Geodermatophilus sp.
  REGION 1..339: note = tr|A0A366ZM76|A0A366ZM76_9ACTN S-adenosylmethionine:tRNA ribosyltransferase-isomerase; OS = Geodermatophilus sp. TF02-6 OX=2250575 GN=DQ238_12700; PE = 3 SV=1
MSAPVMGAEAPAPPERRGLARDGVRLMVVRPGDVRDAVFRDLPDVLDPGDLVVVNTSATLPARLDVRRADGVLTPLHVSTTLDDSDWVVEVRRPGNDGPDRGVEPGTALELPGGVRLRLVEGFPDPARPSRLWRARTEPDVSAVEHLARHGQPIRYGYLDGAVPLADAQNVYATEPGSAENPSAGRPFTDRLLVRLMARGVPVVPLVLHAGVSSPELHEPPAPERFRVPEVTARLVNGTRAAGRRVVAVGTTVTRALETATGEDGVTRPAEGWTDLVLDPDRPVWAVTGLLTGLHAPDASHLLLLQAVAGRALVADAYARAVAGGYLWHEYGDTMLFLP

SEQ ID NO: 66940 - protein, 367 aa, Geodermatophilus sp.
  REGION 1..367: note = tr|A0A372J5H7|A0A372J5H7_9ACTN S-adenosylmethionine:tRNA ribosyltransferase-isomerase; OS = Geodermatophilus sp. LHW52908 OX=2303986 GN=D0Z06_06410; PE = 3 SV=1
MTAAPPPGPAATTPPPGPAATTPPPGPAATTPPPGPAATTPPEDRGLARDGVRLLVARPDRLTPVTFRDLPAHLAPGDLVVVNTSATLPARLDVRRADGTRAPLHVSTRLDDGDWVVELRRPGNDGPDRGVEPGTVLDLPGGVRLRLLAGFPDPARPTRLWRARPEPAVALPGYLHRHGSPVRYGYLSRPVPLAAAQNVYATEPGSAENASAGRPFTDRVLVRLMARGVPVVPVTLHAGVSSPELHEPPAPERFRVPEVTARLVRATREAGGRVVAVGTTVTRALESATGEDGVLRAATGWTDLVLGPERPARVVTGLVTGLHAPDASHLLLLQAVAGRDLVERAYAAVSGGGWLWHEYGDTMLFLP

SEQ ID NO: 66941 - protein, 341 aa, unidentified
  source 1..341: note = Geodermatophilus telluris
  REGION 1..341: note = tr|A0A1G6LFA0|A0A1G6LFA0_9ACTN S-adenosylmethionine:tRNA ribosyltransferase-isomerase; OS = Geodermatophilus telluris OX=1190417; GN = SAMN05660690_1361 PE=3 SV=1
MTAFALPPGSEATEPPEHRGLSRDGVRLMAVRPGSTTAARFRDLPDLLEPGDLLVVNTSATLAARLEARRADGRVVPLHVSTALDDGSWVVEVRRPGNDGPETGLEPGTELGLPGGVRLRLRTGFPDPARPSRLWRAHVTPAVALVPYLAEHGQPVRYGYLRAPVRLAEAQNVYATEPGSAENASAGRPFTDRLLVRLLARGVPVVPLVLHAGVSSPELHEPPAPERYRVPEVTARLVNATRAAGRRVVAVGTTATRALETVTGDDGVTRPGEGWTDLVLGPDHPARAVTGLVTGLHAPEASHLLLLHAVAGTELVDTAYRAATAGGWLWHEYGDSMLFLP

SEQ ID NO: 66942 - protein, 341 aa, unidentified
  source 1..341: note = Geodermatophilus tzadiensis
  REGION 1..341: note = tr|A0A2T0TRA5|A0A2T0TRA5_9ACTN S-adenosylmethionine:tRNA ribosyltransferase-isomerase; OS = Geodermatophilus tzadiensis OX=1137988 GN=LY71_110146; PE = 3 SV=1
MTAFALPPGSEATEPPEHRGLSRDGVRLMAVRPGSTTAARFADLPDLLEPGDLLVVNTSATLAARLDARRADGRVVPLHVSTALDDGSWVVEVRRPGNDGPETGLEPGTELDLPGGVRLRLRTGFPDPARPSRLWRARVEPAVALVPYLAEHGQPVRYGYLRAPVRLAEAQNVYATEPGSAENASAGRPFTDRLLVRLLARGVPVVPLVLHAGVSSPELHEPPAPERYRVPEVTARLVNATRAAGRRVVAVGTTATRALETVTGEDGVTRPGEGWTDLVLGPDRPARAVTGLVTGLHAPEASHLLLLQAVAGPDLVAAAYRVATAGGWLWHEYGDSMLFLP

SEQ ID NO: 66943 - protein, 349 aa, Geofilum rubicundum
  REGION 1..349: note = tr|A0A0E9LWU6|A0A0E9LWU6_9BACT S-adenosylmethionine:tRNA ribosyltransferase-isomerase; OS = Geofilum rubicundum JCM 15548 OX=1236989 GN=queA PE=3; SV = 1
MKLSKFKYKLPEELIALHPSPNRDESRLMVINRATGKIEHKVFKDLINYFSINDVLVFNDTKVFPARLYGNKEKTGAEIEVFLLRELNQDQRLWDVLVDPARKIRIGNKLYFGDDDSLVAEVIDNTTSRGRTLRFLYDGPYEDFKKTLYSLGETPLPKFIKREVEPEDSERYQTIFAKNEGAVAAPTAGLHFSRELLKRLEIKGSHFAYVTLHVGLGNFRTVDVEDLTKHKMDSEQIFISEEATKVINNAKDQKQRVCAVGTTVMRTLESSVSTYGHVKPFEGWTNKFIFPAYDFQVANSMISNFHLPYSTLLMMSAAFGGYDLIMKAYKVAVKEKYRFGTYGDAMLIL

SEQ ID NO: 66944 - protein, 400 aa, Geofilum rubicundum
  REGION 1..400: note = tr|A0A0E9LZT4|A0A0E9LZT4_9BACT S-adenosylmethionine:tRNA ribosyltransferase-isomerase; OS = Geofilum rubicundum JCM 15548 OX=1236989 GN=queA PE=3; SV = 1
MSIPQINISDYDYQLPTGRIAKYPLENRDQSKLLVYKNLHISHTRFFNLPEQLPHNSLLVFNNTKVIRARLEFFKSTGARIELFCLEPYEPSDAALAFQSLGEVQWQCMVGNQKKWKEGSLFATSQTTQGDIQVVATLIKKLSDGAIIQFKWDDAAITFSEIMEGMGQTPIPPYLEREAEDIDTERYQTVYSKYQGSVAAPTAGLHFTDEVLETLAQRNISLIELTLHVGAGTFKPVKTDTIDQHEMHTEHFEVTVNALRQIAEHDGPVIAVGTTSVRTLESIYRAAILLSQNRPHQNVQQWDGFEQVSDMPKAEALKLLIRHLHSQQQPAFKASTSIIITPGYQFKVIDGLITNFHQPRSTLLLLIAALIDENWKAVYDYALNNDFRFLSYGDSSLLLR

SEQ ID NO: 66945 - protein, 346 aa, Geomicrobium sp.
  REGION 1..346: note = tr|A0A061N936|A0A061N936_9BACL S-adenosylmethionine:tRNA ribosyltransferase-isomerase; OS = Geomicrobium sp. JCM 19055 OX=1460649 GN=queA PE=3 SV=1
MKVKDFDFDLPEELIAQTPLEQRDTSKLLMLDADDGSVRHETFQHIVSMFEPGDCLVLNDTKVIPARVFGTKEQGGANIECLLLKDEGNDTWEALVKPAKRVKVGTTISFGDGRLKATCTEILAHGGRKLSFSYEGVFLEVLESLGEMPLPPYITERLEEQDRYQTVFAKRSGAAAAPTAGLHFTEQLLGELKDRGVNICYITLHVGLGTFRPVSVDTIEEHDMHAEFYEMNDATATVLNEAKSAGRSIVACGTTSARTLETIVNEHEAFTACSGWTDIFIFPGYEWKAIDGLITNFHLPKSTLMMLVSAFSSREHIMNAYKEAIAKRYRFFSFGDAMVMKKGINN

SEQ ID NO: 66946 - protein, 343 aa, Geomicrobium sp.
  REGION 1..343: note = tr|A0A061NMD8|A0A061NMD8_9BACL S-adenosylmethionine:tRNA ribosyltransferase-isomerase; OS = Geomicrobium sp. JCM 19037 OX=1460634 GN=queA PE=3 SV=1
MRVDDFDFELPEELIAQTPLKERDQSRLLVLETPGGALHHTHFTHIEEELNDGDCLVLNNTKVLPARLFGTKENGGANIECLLLKEQSDDTWEALVKPAKRVKEGTTISFGDGRLQAVCTNVLPHGGRELSFSYDGIFLEVLESLGEMPLPPYITETLEERDRYQTVYATQTGAAAAPTAGLHFTEALLNRLRAKGVQICYITLHVGLGTFRPVSVEKIEDHDMHKEFYEMDEDTARRLNDAKRNGNRIIACGTTSARTLETIACEREAFAPCSGWTNIFIYPGYEWKAVDSLITNFHLPKSTLMMLVSALAGRDEIMAAYTSAIEHRYRFFSFGDAMFIKRS

SEQ ID NO: 66947 - protein, 341 aa, unidentified
  source 1..341: note = Geomonas terrae
  REGION 1..341: note = tr|A0A4S1CHL5|A0A4S1CHL5_9DELT S-adenosylmethionine:tRNA ribosyltransferase-isomerase; OS = Geomonas terrae OX=2562681 GN=queA PE=3 SV=1
MRLSDFDYELPPELIAQHPASRRDASRLLTLDRASGAVAETTIAAIAGEFRAGDLLILNDTRVIPARLKGQKETGGAVEVFLVRRLPGADEIWSCLIKASRSPGEGTRILLPGGVTATVVSREDGEWQVLFEGAADFMGWVEGAGSMPLPPYIKRQPEGEDLERYQTVFAREKGAVAAPTAGLHFTPELLDEIRSRGVQIASVTLHVGLGTFMPVRVEELSEHTMHRERYRIPEETAAAIRRTKEAGGRVIALGTTSLRALEHAAASGELVAGEREADIFILPGYRFRVVDALITNFHLPKSTLFMLVCAFAGKETMLHAYGEAVKRRFRFFSYGDAMFIS

SEQ ID NO: 66948 - protein, 366 aa, unidentified
  source 1..366: note = Georhizobium profundi
  REGION 1..366: note = tr|A0A3Q8XP98|A0A3Q8XP98_9RHIZ S-adenosylmethionine:tRNA ribosyltransferase-isomerase; OS = Georhizobium profundi OX=2341112 GN=queA PE=3 SV=1
MRVDLFDFDLPDERIALRPAVPRDSARLLGVDPNAQTPLSDHIVSDLPALLEPGDALVFNDTKVIPAQFEGLRRRPGPDGADVTVGVSATLHMRAASDRWWAFVKPGKRVKHGDRIEFGGSTDTCLVGRLDATVIEKGEGGEVLLAFDLDGPALDEAIMSVGHVPLPPYIASKRPEDAQDRADYQTIYAREDGAVAAPTAGLHFTDELLSALEERGVERHFVTLHVGAGTFLPVKADTTEDHRMHAEIGHVSAATADALNAVRARGGRIVSVGTTSLRLLESAASEDGKIEPWSGATDIFITPGYRFRAVDMLMTNFHLPRSTLFMLVSAFAGLETMRAAYAHAIANEYRFYSYGDSSLLKKADHE

SEQ ID NO: 66949 - protein, 341 aa, unidentified
  source 1..341: note = Geosporobacter ferrireducens
  REGION 1..341: note = tr|A0A1D8GPI7|A0A1D8GPI7_9CLOT S-adenosylmethionine:tRNA ribosyltransferase-isomerase; OS = Geosporobacter ferrireducens OX=1424294 GN=queA PE=3; SV = 1
MQKKDFYFDLPPELIAQTPLQNRDASRLMLLNKRTGEIEHRHFKEIIKFLNPGDCLVLNNTRVIPARLFGVRENSGAQIEFLLLKRIHDNQWETLVKPGKRAKIGDTIIFGEGLLKAKIIALAEEGARVVEFEYSGIFEEILDQLGTMPLPHYIKESLADKERYQTVYAKHEGSAAAPTAGLHFTQELLQAIQEKGVEIAFVTLHVGLGTFRPVKADNILDHKMHGEYYVMTEETAEKINKTKENGGRVIAVGTTSIRTLESIANDYGSIRPCSGWTEIFIYPGYSFKVVDCLITNFHLPESTLIMLVSALSTREIILNAYNEAVQQQYRFFSFGDAMFIY

SEQ ID NO: 66950 - protein, 341 aa, Geosporobacter subterraneus
  REGION 1..341: note = tr|A0A1M6BR53|A0A1M6BR53_9CLOT S-adenosylmethionine:tRNA ribosyltransferase-isomerase; OS = Geosporobacter subterraneus DSM 17957 OX=1121919; GN = queA PE=3 SV=1
MQTKDFYFDLPPELIAQTPLQNRDESRLMLLNKRTGNIEHRQFKDIIEILNPGDCLVLNNTRVIPARLFGIRENGSAQVEFLLLKRIKDNQWEILVKPGKRAKVGDTIVFNEGLLKAKIIGLAEEGTRIVEFEYDGIFEEILDKLGTMPLPHYIKERLEDKERYQTVYAKHEGSAAAPTAGLHFTQELLHAIQQKGIEIAFITLHVGLGTFRPVKADNILEHKMHGEFYIMTEETAEKINRTKENGGRIIAVGTTSVRTLESIAADHGEIKPCSGWTEIFIYPGFSFKVVDCLITNFHLPESTLIMLVSALSTREIILNAYKEAVTQRYRFFSFGDAMFIY

SEQ ID NO: 66951 - protein, 342 aa, Geothermobacter ehrlichii
  REGION 1..342: note = tr|A0A5D3WKL7|A0A5D3WKL7_9DELT S-adenosylmethionine:tRNA ribosyltransferase-isomerase; OS = Geothermobacter ehrlichii OX=213224 GN=queA PE=3 SV=1
MRLDDFNFDLPEELIAQQPVEKRDASRLLVVDRAGDLIAHRRFPDLVDYLAAGDCLILNDTRVMPARLQGRKETGGQVEVLLVRRIGDDESWLCLTRSSRPVRPGVDIVFAPDVRAEVVRDQGDGFRILRFHCPGSFRQVLDEIGGLPLPPYIRRQPEPADWERYQTVVARNEGAVAAPTAGLHFTPEVLERIRNRGCHVCTLTLHVGIGTFLPVRCDDIRQHRMHEEFYDIPPETAATVARVRENGGRVIAVGTTVTRALEDAARKSGRVEAGCGFSDLFIYPGFEFRVVDALVTNFHLPKSTLLMLVSAFAGRERILRAYREAVALRYRFFSYGDCMLIL

SEQ ID NO: 66952 - protein, 343 aa, Geothermobacter sp.
  REGION 1..343: note = tr|A0A1X0Y8S8|A0A1X0Y8S8_9DELT S-adenosylmethionine:tRNA ribosyltransferase-isomerase; OS = Geothermobacter sp. EPR-M OX=1969733 GN=queA PE=3 SV=1
MRLEDFDFQLPEEQIAQHPVARRDGSRLLVMSRNATAIRHQQFPDIVDYFRPGDCLVLNDTRVIPARLQGNKQSGGRIEVFLVRQLSTEPPEWLCLTRCSRTPRPGVCLDLGEGLRAEILDGGDAPLQRLRFDCDGSFSDALQRLGKIPLPPYIRREALPADAERYQTVFARTEGAVAAPTAGLHFTPEILDQLKGRGVEVCSLTLHVGLGTFFPVRCENIAEHRMHSEAYSIPRQTADAIARTRAAGGRVIALGTTTTRALEHAVTADGTVAAGDGMSDLFIYPGFRFRVIDGLVTNFHLPKSTLLMLVSAFAGRNFVLAAYRQAVQHGYRFFSYGDCMLIL

SEQ ID NO: 66953 - protein, 343 aa, Geothermobacter sp.
  REGION 1..343: note = tr|A0A2K2HBS0|A0A2K2HBS0_9DELT S-adenosylmethionine:tRNA ribosyltransferase-isomerase; OS = Geothermobacter sp. HR-1 OX=654845 GN=queA PE=3 SV=1
MRLEDFDFQLPEEQIAQHPVAQRDGSRLLVLSRNATAIRHQQFPDIVDYFRPGDCLVLNDTRVIPARLQGNKQSGGRIEVFLVRQLSAEPPEWLCLTRCSRTPRPGVCLDLGEGLRAEILDGGEAPLQRLRFDCDGSFSDALQRLGKIPLPPYIRREALPADAERYQTVFARAEGAVAAPTAGLHFTPEILDQLKGRGVEVCSLTLHVGLGTFFPVRCENIAEHRMHSEAYSIPRQTADAIARTRAAGGRVIALGTTTTRALEHAVTADGTVAAGDGMSDLFIYPGFRFRVIDGLVTNFHLPKSTLLMLVSAFAGRNFVLAAYRQAVQHGYRFFSYGDCMLIL

SEQ ID NO: 66954 - protein, 336 aa, Geotoga petraea
  REGION 1..336: note = tr|A0A1G6JCJ6|A0A1G6JCJ6_9BACT S-adenosylmethionine:tRNA ribosyltransferase-isomerase; OS = Geotoga petraea OX=28234 GN=queA PE=3 SV=1
MYKISDYDYDLPKEMIAQTPAEPRDKCKLMVLDKKTGDIEHKIFKDVIDYLEPGDVLVVNNTKVIPARIYGQKTTGAKVEILLLEKTDEKNSWKCLVKPGGKIKVNTEILFSEKLTGIVTHHNNDGSRIIEFVGEDIWNEINRIGETPLPPYITKKIDDDSKYQTKYAKKEGAVAAPTAGLHFTEELLQKIRDKGIQIEEVTLHVGLGTFRPIDVEDIRDHKIHEEFYEVKQETYEKIKKAKKEGNNIVAVGTTVVRTLESIALDDKLMGKTGIYIYPPYKFKIVDKLITNFHLPKSSLLLLVSAFSDKEIIMKSYEEAKKENYRFFSFGDAMLLK

SEQ ID NO: 66955 - protein, 336 aa, Geotoga petraea
  REGION 1..336: note = tr|A0A4Z0W279|A0A4Z0W279_9BACT S-adenosylmethionine:tRNA ribosyltransferase-isomerase; OS = Geotoga petraea OX=28234 GN=queA PE=3 SV=1
MYKISDYDYDLPKEMIAQTPAEPRDECKLMVLDKKTGDTEHKIFKDVIDYLEPGDVLVVNNTKVIPARIYGQKTTGAKVEILLLEKTEEKNSWKCLVKPGGKIKVNTEILFSEKLTGIVTHHNNDGSRIIEFVGEDIWNEINRIGETPLPPYITKKIDDDSKYQTKYAKKEGAVAAPTAGLHFTEELLQKIRDKGIQIEEVTLHVGLGTFRPIDVEDIRDHKIHEEFYEVKQETYEKIKKAKKEGNNIVAVGTTVVRTLESIALDDKLMGKTGIYIYPPYKFKIVDKLITNFHLPKSSLLLLVSAFSDKEIIMKSYEEAKKENYRFFSFGDAMLLK

SEQ ID NO: 66956 - protein, 338 aa, Geovibrio thiophilus
  REGION 1..338: note = tr|A0A410K1Z6|A0A410K1Z6_9BACT S-adenosylmethionine:tRNA ribosyltransferase-isomerase; OS = Geovibrio thiophilus OX=139438 GN=queA PE=3 SV=1
MKTPAELFDFPLPEELIAQHPPETRGASRLLLADRKGSVQDLLFRDITELITDEYFIVINNTRVMNARLEGFKPTGGRVEVFLLNKTSSDSFTALTGGKVKEGTEVTVGEAVIRIEKFLDDGLRMIRFLTHSPEEVMERWGHVPLPPYIRRNDSEEDKIRYQTVYAKEAKSVAAPTAGLHFTEDTLNGLRNKGVEILEVSLDVGIGTFRPMKADHLEDHRMHTERYHVSSETADRINSLRKSGKKLICVGTTAMRTMESVTDGNGTVHAGSGETDIFIKPGYSFKAADALITNFHLPKSTLFVLVCAFAGRESMLNAYAHAVAERYRFFSYGDAMFIR

SEQ ID NO: 66957 - protein, 356 aa, Gibbsiella quercinecans
  REGION 1..356: note = tr|A0A250AYG7|A0A250AYG7_9ENTR S-adenosylmethionine:tRNA ribosyltransferase-isomerase; OS = Gibbsiella quercinecans OX=929813 GN=queA PE=3 SV=1
MRVADFSFELPESLIARYPQAERSACRLLQLDGPTGELTHGVFTDLLNQLEAGDLLVFNNTRVIPARVFGRKASGGKIEVLVERVLDEHRVLAHVRASKAPKAGAELLLGDDESINATMVARHDTLFELRFNDDRDVFTLLNAVGHMPLPPYIDRPDEDADRELYQTVYSEKPGAVAAPTAGLHFDEPLLAALREKGVEMAFVTLHVGAGTFQPVRVETIEDHVMHAEYAEVPQEVVDAVLACKARGKRVVAVGTTSVRSLESAAAASQDAPIAPFFGDTRIFIYPGYHYQVIDALVTNFHLPESTLIMLVSAFAGYQNTMHAYRQAVAEQYRFFSYGDAMFISRNPQAEQETVGA

SEQ ID NO: 66958 - protein, 373 aa, Giesbergeria anulus
  REGION 1..373: note = tr|A0A1H9LKM1|A0A1H9LKM1_9BURK S-adenosylmethionine:tRNA ribosyltransferase-isomerase; OS = Giesbergeria anulus OX=180197 GN=queA PE=3 SV=1
MTDFSAPVSSAFTLSDFDFELPPEHIAQHPAPERSASRLLDGRGVQPVDRIFRELPGLLRAGDLLVFNDTRVLKARIFGEKASGGKLELLIERVLSDHEVVAHMKVSKKPQPGATLHMAGGCNGGGFDAVLLGRYPDENGPLFRFALHGPAHESAWDLMERHGHLPLPPYIERQQAEGNDPNAAQDAQRYQTVFARAPGAVAAPTAALHFDEEVLAALAAQGIEHASVTLHVGAGTFQPVKTENLAEHQMHSEWYEVPLATLAALERCRQRGGRVVAVGTTTVRTLESWARSGQTSGDTNIFITPGFEFQVVNLLLTNFHLPKSTLMMLVSAFAGYAPVMGLYHYAIKRNYRFFSYGDAMLLERRAAGDAGAT

SEQ ID NO: 66959 - protein, 346 aa, unidentified
  source 1..346: note = Gilliamella apicola
  REGION 1..346: note = tr|A0A066TCS4|A0A066TCS4_9GAMM S-adenosylmethionine:tRNA ribosyltransferase-isomerase; OS = Gilliamella apicola OX=1196095 GN=queA PE=3 SV=1
MQLSDFDFYLPKELIAKHPSKNRSACRLLSLDSHTGKVEDNVFTDIIDKINPGDLLIFNNTKVIPARLYGKKASGGKIEILIERILDNNRALAHIRASKSPKAGTELILGENDPIKVTMLTRHDALFELQFPDDVLSVLNKIGHIPLPPYIDRPDNEQDREVYQTVYSKVPGAVAAPTAGLHFDKPLLEKLKQKGVEMAFVTLHVGAGTFQPVRVENIETHIMHSEYAEVPETVVEAVLACKARNKKVIAVGTTSVRALESAAQKTGKIASFFADTQIFIYPGYQFKVIDSLITNFHLPESTLIMLVSAFAGYENTMKAYQHAVKENYRFFSYGDAMFITAESNKY

SEQ ID NO: 66960 - protein, 146 aa, unidentified
  source 1..146: note = Gilliamella apicola
  REGION 1..146: note = tr|A0A080KCV9|A0A080KCV9_9GAMM S-adenosylmethionine:tRNA ribosyltransferase-isomerase (Fragment) OS=Gilliamella apicola SCGC AB-598-B02; OX = 1445513 GN=GASC598B02_0055 70 PE=3 SV=1
MQLSDFDFTLPKELIAKYPAETRSACRLLSLDGNTGNTNHGFFTDIVDKINPGDLLIFNNTRVIPARVYGKKSSGGKIEILIERLLDGNRALAHVKASKSPKEGAELILGEDSSVTVTMVARHDSLFELQFPDDVLTILNKIGHIP

SEQ ID NO: 66961 - protein, 343 aa, unidentified
  source 1..343: note = Gilliamella apis
  REGION 1..343: note = tr|A0A2V4E720|A0A2V4E720_9GAMM S-adenosylmethionine:tRNA ribosyltransferase-isomerase; OS = Gilliamella apis OX=1970738 GN=queA PE=3 SV=1
MQLSDFDFTLPKELIAKYPSETRSSCRLLALDGHSGKIEDKVFTDIIDCINAGDLLIFNNTKVIPARLYGKKASGGKIEVLIERLLEGNRALAHIKASKSPKIGAELILGENDNIQVTMVARHDALFELQFPNDVLSILNEIGHIPLPPYIDRPDDAQDREVYQTVYSKVPGAVAAPTAGLHFDKPLLDKLKQKGVEMEFVTLHVGAGTFQPVRVENIETHIMHAEYAEVPESVVKAVLDCKARGNKVIAVGTTSVRALESAAQLTGTIAPFFADTRIFIYPGYQFKVIDSLITNFHLPESTLIMLVSAFAGYENTMNAYQYAVKEKYQFFSYGDAMLITNNK

SEQ ID NO: 66962 - protein, 343 aa, unidentified
  source 1..343: note = Gilliamella apis
  REGION 1..343: note = tr|A0A242NTL9|A0A242NTL9_9GAMM S-adenosylmethionine:tRNA ribosyltransferase-isomerase; OS = Gilliamella apis OX=1970738 GN=queA PE=3 SV=1
MQLSDFNFTLPKELIAKYPSETRSSCRLLALDGHTGKIEDKVFTDIVDYINAGDLLIFNNTKVIPARLYGKKVSGGKIEVLIERLLEGNRALAHIKASKSPKIGAELILGENENIQVTMVARHDALFELQFPDDVLSILNEIGHIPLPPYIDRPDDAQDREVYQTVYSKVPGAVAAPTAGLHFDKPLLDKLKQKGVEMEFVTLHVGAGTFQPVRVENIETHIMHAEYAEVPESVVKAVLDCKARGNKVIAVGTTSVRALESAAQQTGTIAPFFADTRIFIYPGYQFKVIDSLITNFHLPESTLIMLVSAFAGYENTMNAYQYAVKEKYQFFSYGDAMLITNNK

SEQ ID NO: 66963 - protein, 346 aa, unidentified
  source 1..346: note = Gilliamella bombicola
  REGION 1..346: note = tr|A0A1C4D8D5|A0A1C4D8D5_9GAMM S-adenosylmethionine:tRNA ribosyltransferase-isomerase; OS = Gilliamella bombicola OX=1798182 GN=queA PE=3 SV=1
MQLSDFDFYLPKELIAKHPKKTRSACRLLSLNSHTGKIEDKVFTDIVDKINPGDLLVFNDTKVIPARLYGKKASGGKIEILIERLLDGNRALAHIKASKSPKAGAELILGEDTSISVIMLARHDALFELQFPDNVLNILDKIGHIPLPPYINRPDDEQDREVYQTVYNRVPGAVAAPTAGLHFDKPLLEKLKQKGVEMAFVTLHVGAGTFQPVRVENIETHVMHSEYAEVPESVVEAVLACKARNNKVIAVGTTSVRALESAAQKTGKIAPFFADTQIFIYPGYQFKVIDSLITNFHLPESTLIMLVSAFAGYKNTMDAYQHAVNEKYRFFSYGDAMFITTQDNQS

SEQ ID NO: 66964 - protein, 346 aa, unidentified
  source 1..346: note = Gilliamella intestini
  REGION 1..346: note = tr|A0A1C4CLL3|A0A1C4CLL3_9GAMM S-adenosylmethionine:tRNA ribosyltransferase-isomerase; OS = Gilliamella intestini OX=1798183 GN=queA PE=3 SV=1
MQLSDFDFYLPKELIAKHPSETRSACKLLSLNSQTGKIEDNVFTDIIDKINPGDLLIFNNTKVIPARLYGKKASGGKIEVLIERILDNNQALAHIKASKSPKAGAKLILGENDPIKVTMLTRHDTLFELQFPNDVLSILNKIGHIPLPPYIDRPDNEQDREVYQTVYSKVPGAVAAPTAGLHFDKPLLEKLKQKGVEMAFVTLHVGAGTFQPVRVENIETHIMHAEYAQVPDSVVEAVLACKARNNKVIAVGTTSVRALESAAQKTGKIAPFFADTQIFIYPGYQFKVIDSLITNFHLPESTLIMLVSAFAGYKNTMNAYQHAVKEKYRFFSYGDAMFITSKNDKY

SEQ ID NO: 66965 - protein, 343 aa, unidentified
  source 1..343: note = Gilliamella sp.
  REGION 1..343: note = tr|A0A242PCS4|A0A242PCS4_9GAMM S-adenosylmethionine:tRNA ribosyltransferase-isomerase; OS = Gilliamella sp. N-G2 OX=1970471 GN=queA PE=3 SV=1
MQLSDFNFTLPKELIAKYPSKTRSSCRLLALDGHTGKIEDKVFTDIVDYINAGDLLIFNNTKVIPARLYGKKISGGKIEVLIERLLEGNRALAHIKASKSPKIGAELILGENENIQVTMIARHDALFELQFPDDVLSILNEIGHIPLPPYIDRPDEAQDREVYQTVYSKVPGAVAAPTAGLHFDKPLLDKIKQKGVEMEFVTLHVGAGTFQPVRVENIETHIMHAEYAEVPESVVKAVLNCKARGNKVIAVGTTSVRALESAAQQTGTIAPFFADTRIFIYPGYQFKVIDSLITNFHLPESTLIMLVSAFAGYENTMNAYQYAVKEKYQFFSYGDAMLITNNK

SEQ ID NO: 66966 - protein, 343 aa, unidentified
  source 1..343: note = Gilliamella sp.
  REGION 1..343: note = tr|A0A242NYH2|A0A242NYH2_9GAMM S-adenosylmethionine:tRNA ribosyltransferase-isomerase; OS = Gilliamella sp. A7 OX=1970465 GN=queA PE=3 SV=1
MQLSDFNFTLPKELIAKYPSETRSSCRLLALDSDTGKIEDKVFTDIVNYINTGDLLIFNNTKVIPARLYGKKASGGKIEVLIERLLDGNRALAHVKASKSPKIGAELILGENDNIKVTMLARHDALFELQFPDDVLSILNEIGHIPLPPYIDRPDDAQDREVYQTVYSKVPGAVAAPTAGLHFDKPLLDKLKQKGVEMEFVTLHVGAGTFQPVRVENIETHIMHAEYAEVPESVVKAVLNCKARGNKVIAVGTTSVRALESAAQQTGTIAPFFADTRIFIYPSYQFKVIDSLITNFHLPESTLIMLVSAFAGYENTMSAYQHAVKEKYQFFSYGDAMLITNKR

SEQ ID NO: 66967 - protein, 349 aa, Gillisia hiemivivida
  REGION 1..349: note = tr|A0A5C6ZXR6|A0A5C6ZXR6_9FLAO S-adenosylmethionine:tRNA ribosyltransferase-isomerase; OS = Gillisia hiemivivida OX=291190 GN=queA PE=3 SV=1
MKLSQFGFELPEELLAEYPAENRDEARLMVLNRKDQTIEHKLFKDIMEYFEPKDVMVLNNTKVFPARLFGNKEKTGARIEVFLLRELNPETKLWDVLVDPARKIRIGNKLYFGDDESLVAEVIDNTTSRGRTLRFLYDGSYQEFRKKLQELGETPLPKYIKRDVQPEDAERYQTIYAKNEGAVAAPTAGLHFSKHLLKRLEIKGIDFAEVTLHVGLGTFSPVEVEDLSKHKMDSEEAFIEEKATVTINKALSEKRRICAVGTTSMRVLESAVSSNHTLNEFSGWTNKFIFPPYDFSIANCMITNFHTPKSTLMMMVSAFAGHDFMKRAYDEAIKEKYKFYTYGDAMLII

SEQ ID NO: 66968 - protein, 351 aa, Gillisia limnaea
  REGION 1..351: note = tr|H2BVD8|H2BVD8_9FLAO S-adenosylmethionine:tRNA ribosyltransferase-isomerase OS=Gillisia limnaea DSM 15749; OX = 865937 GN=queA PE=3 SV=1
MGMKLSQFGFELPEELLAEYPAENRDESRLMVLNRKEQTIEHKQFKDIIDYFQPEDVLVLNNTKVFPARLYGNKEKTGARIEVFLLRELNPETKLWDVLVDPARKIRIGNKLYFGDDESLVAEVIDNTTSRGRTLRFLYDGSYQEFRKKLDELGETPLPKYIKREVQPEDQERYQTIYAKTEGAVAAPTAGLHFSKQLLKRLEIKGIDFAEVTLHVGLGTFNPVEVEDLSKHKMDSEEAFIDTNATRIINKAIKERRRVCAVGTTSMRVLESAVSSNHTLNEFSGWTNKFIFPPYDFSIANCMITNFHTPKSTLMMMVSAFAGHDFMKKAYTEAIKEKYKFYTYGDAMLII

SEQ ID NO: 66969 - protein, 351 aa, Gillisia mitskevichiae
  REGION 1..351: note = tr|A0A495Q0H0|A0A495Q0H0_9FLAO S-adenosylmethionine:tRNA ribosyltransferase-isomerase; OS = Gillisia mitskevichiae OX=270921 GN=queA PE=3 SV=1
MGMKLSQFGFELPDELLAEYPSENRDEARLMVLNRKDQTIEHKLFKDIMDYFEPNDVMVLNNTKVFPARLFGNKEKTGARIEVFLLRELNPETKLWDVLVDPARKIRIGNKLYFGDDESLVAEVIDNTTSRGRTLRFLYDGSYQEFRKKLQELGETPLPKYIKRDVQPEDAERYQTIYAKNEGAVAAPTAGLHFSKHLLKRLEIKGIDFAEVTLHVGLGTFSPVEVEDLSKHKMDSEEAFIEEKATVTINKALSEKRRICAVGTTSMRVLESAVSSNHTLNEFSGWTNKFIFPPYDFSIANCMITNFHTPKSTLMMMVSAFAGHDFMKKAYDEAIKEKYKFYTYGDAMLII

SEQ ID NO: 66970 - protein, 351 aa, Gillisia sp.
  REGION 1..351: note = tr|A0A559PNS4|A0A559PNS4_9FLAO S-adenosylmethionine:tRNA ribosyltransferase-isomerase; OS = Gillisia sp. Hel_I_86 OX=1249981 GN=queA PE=3 SV=1
MGMKLSQFGFELPDELLAEYPAENRDEARLMVLNRKDQTIEHKLFKDIMDYFEPQDVMVLNNTKVFPARLFGNKEKTGARIEVFLLRELNPETKLWDVLVDPARKIRIGNKLYFGEDESLVAEVIDNTTSRGRTLRFLYDGSYQEFRKKLQELGETPLPKYIKREVQPEDQERYQTIYAKNEGAVAAPTAGLHFSKHLLKRLEIKGIDFAEVTLHVGLGTFSPVEVEDLSKHKMDSEEAFIEEKATKIINKALSEKRRICAVGTTSMRVLESAVSSNHTLNEFSGWTNKFIFPPYDFSIANSMITNFHTPKSTLMMMVSAFAGHDFMKKAYDEAIKEKYKFYTYGDAMLII

SEQ ID NO: 66971 - protein, 351 aa, Gillisia sp.
  REGION 1..351: note = tr|A0A1H1Q2Y4|A0A1H1Q2Y4_9FLAO S-adenosylmethionine:tRNA ribosyltransferase-isomerase; OS = Gillisia sp. Hel1_33_143 OX=1336796 GN=queA PE=3 SV=1
MGMKLSQFNFELPKELLAEYPAENRDEARLMVLNRKEQTIEHKQFKDLIDYFEPEDVMVLNNTKVFPARLYGNKEKTGARIEVFLLRELNAETKLWDVLVDPARKIRIGNKLYFGDDESLVAEVIDNTTSRGRTLRFLYDGSYEEFRKKLQDLGETPLPKYIKREVQPEDQERYQTIYAKKEGAVAAPTAGLHFSKHLLKRLEIKGIDFAEVTLHVGLGTFNPVEVEDLSKHKMDSEEAFIETNATNTINQAIQDRRRICAVGTTVMRVLESAVSSNHTLNEFSGWTNKFIFPPYDFSIANCMITNFHTPKSTLMMMVSAFAGHDFMKKAYAEAIKEEYKFYTYGDAMLII

SEQ ID NO: 66972 - protein, 349 aa, Gilvibacter sp.
  REGION 1..349: note = tr|A0A1Y0MNB5|A0A1Y0MNB5_9FLAO S-adenosylmethionine:tRNA ribosyltransferase-isomerase; OS = Gilvibacter sp. SZ-19 OX=754429 GN=queA PE=3 SV=1
MKLSNFNFDLPNELLAEYPSANRDESRLMVLDREKQTIEHRMFKDLIEYFNEDDVLVLNNTKVFPARLFGNKEKTGARIEVFLLRELNAETRLWDVLVDPARKIRIGNKLYFGEDESLVAEVIDNTTSRGRTLRFLYDGSYEEFRMKLNELGQTPLPKYIKRDVEPEDEERYQTIYAKNEGAVAAPTAGLHFSKHLMKRLEIKGVHFSEVTLHVGLGTFSPVEVEDLSKHKMDSEEIIISPEAANIINTGLANKKRVCAVGTTAMRTLESSVSSNHTLNPYAGWTNKFIFPPYEFSIANAMITNLHTPKSTLLMMVSAFAGHEFIKEAYAEAVKEKYRFYSYGDAMLIL

SEQ ID NO: 66973 - protein, 351 aa, unidentified
  source 1..351: note = Gimesia maris
  REGION 1..351: note = tr|A6CET7|A6CET7_9PLAN S-adenosylmethionine:tRNA ribosyltransferase-isomerase OS=Gimesia maris DSM 8797; OX = 344747 GN=queA PE=3 SV=1
MTDLNDFDYQLPPELIATEPTQQRDQSRLLILDRKSQSITHGSISDLPRYLNPDDCLVLNNTRVLSARLFGTRQSTGGKWEGLYLGSNSLGEWKLMSKTRGKLNPGDIIELRPAHQRSLEKQVTLKLLSKDTEGYWTALVKSDEDHHSLLAHFGTMPLPPYMKRNLATEEDWERYQTVYAAQPGAVAAPTAGLHFTPELLERCTAQGTRIANVTLHVGIGTFKPISVETLEAHKMHSEWCELSAESAELLNQSRQQGGRIVCVGTTSVRTLESVAQQGPLQAWQGETDIFIYPPYQFQAVDCLLTNFHLPKSTLLVLVSAFAGAEFICEAYKKAVEAEYRFYSYGDAMLIL

SEQ ID NO: 66974 - protein, 351 aa, unidentified
  source 1..351: note = Gimesia maris
  REGION 1..351: note = tr|A0A3D3R9N5|A0A3D3R9N5_9PLAN S-adenosylmethionine:tRNA ribosyltransferase-isomerase; OS = Gimesia maris OX=122 GN=queA PE=3 SV=1
MTDLNDFDYQLPPELIATEPTQQRDQSRLLILDRKSQSITHGSISDLPRYLNPDDCLVLNNTRVLSARLFGTRQSTGGKWEGLYLGSNSLGEWKLMSKTRGKLNPGDIIELRPAHQRSLEKQVTLKLLSKDTEGYWTALVKSDEDHHSLLAHFGTMPLPPYMKRNLATEEDWERYQTVYAAQPGAVAAPTAGLHFTPELLERCTAQGTRIANVTLHVGIGTFKPISVETLEAHKMHSEWCELPAESAELLNQSRQQGGRIICVGTTSVRTLESVAQQGPLQAWQGETDIFIYPPYQFQAVDCLLTNFHLPKSTLLVLVSAFAGAEFIREAYKKAVEAEYRFYSYGDAMLIL

SEQ ID NO: 66975 - protein, 351 aa, unidentified
  source 1..351: note = Gimesia sp.
  REGION 1..351: note = tr|A0A2E7K924|A0A2E7K924_9PLAN S-adenosylmethionine:tRNA ribosyltransferase-isomerase; OS = Gimesia sp. OX=2024833 GN=queA PE=3 SV=1
MPRLDAFDYHLPPELIATEPTRQRDQSRLLVVNRQDRSIEHSMISDLPQFLNPQDCLVLNDTRVLSARLFGVRQATGGKWEGLYLGSNAEGEWKLMSKTRGKLVPGETIKLTPAHSRSEEKQLSLIMQSKDEEGYWTAQVQSDEDHHALLSHFGTMPLPPYMKRDLATEEDWERYQTVYANQPGAVAAPTAGLHFTPDLLANCTGKGVGVAKVTLHVGIGTFKPIACETLEEHKMHSEWCELPGESAALLNRTREQGGRIVAVGTTSVRTLESVAQQGPLQAWQGETDIFIYPPYQFQAVDCLLTNFHLPKSTLLVLVSAFADTELIREAYEKAVEAKYRFYSYGDAMLII

SEQ ID NO: 66976 - protein, 351 aa, unidentified
  source 1..351: note = Gimesia sp.
  REGION 1..351: note = tr|A0A5A8ATQ0|A0A5A8ATQ0_9PLAN S-adenosylmethionine:tRNA ribosyltransferase-isomerase; OS = Gimesia sp. JC646 OX=2605989 GN=queA PE=3 SV=1
MPRLDAFDYHLPPELIATEPTRQRDQSRLLVVNRRDRSIQHSMISDLPQFLNPQDCLVLNDTRVLSARVFGVRQATGGKWEGLYLGSNAEGEWKLMSKTRGKLVPGETIELTPAHSRSEEKQLSLIMQSKDDEGYWTALVQSDEDHHALLSHFGTMPLPPYMKRDLATEEDWERYQTVYANQPGAVAAPTAGLHFTPDLLANCTGKGVGVAKVTLHVGIGTFKPIACETLEEHKMHSEWCELPGESAAFLNRTREQGGRIVAVGTTSVRTLESVAQQGPLQAWQGETDIFIYPPYQFQAVDCLLTNFHLPKSTLLVLVSAFADTELIREAYEKAVEAKYRFYSYGDAMLII

SEQ ID NO: 66977 - protein, 346 aa, Glaciecola nitratireducens
  REGION 1..346: note = tr|G4QK24|G4QK24_GLANF S-adenosylmethionine:tRNA ribosyltransferase-isomerase OS=Glaciecola nitratireducens (strain JCM 12485 / KCTC 12276 / FR1064) OX=1085623 GN=qu eA PE=3 SV=1
MKLADFYFDLPEHLIAKHPTAQRTQSRLLHLKGDTGEVLHQKFTDILDLLHPGDLLIFNNTRVIPARLHGAKASGGKVEVLIERILNDGSAMAHIRSSKSPKSGAILTMEGGLQIEMLGRNDALFHIKFLTEENVFDLLEKYGHMPLPPYIDRPDDEADKERYQTVYNEKPGAVAAPTAGLHFDDDILNKLRDKGVDLAFVTLHVGAGTFQPVRVENIVEHQMHAEYAEVSQDVVDKVIATKAAGGRVIAVGTTSVRSIESAAKAADNDLITEFMSDTNIFIYPGYQFKVIDAMLTNFHLPESTLMMLISAFAGRDNVMDAYAKAIEEEYRFFSYGDAMFIERKNT

SEQ ID NO: 66978 - protein, 346 aa, Glaciecola pallidula
  REGION 1..346: note = tr|K6YV63|K6YV63_9ALTE S-adenosylmethionine:tRNA ribosyltransferase-isomerase OS=Glaciecola pallidula DSM 14239 = ACAM 615 OX=1121922 GN=queA PE=3 SV=1
MKLSDFYFDLPEHLIAKHPTEQRTQSRLLQLDGNTGEVSHKKFTDILELLQPSDLLIFNNTRVIPARLHGTKASGGKVEVLIERILNDGSAMAHIRSSKSPKSGAMLTMEGGLQIEMLGRDNALFHIKFMTERNVFDLLEEFGHMPLPPYIDRADEEADKERYQTVYNERPGAVAAPTAGLHFDLDILNRIQEKGVELAFVTLHVGAGTFQPVRVDNIEEHQMHAEYAEVSQDVVDKVLATKAAGGRVIAVGTTSVRSIESAAQAARSELISEFMSDTNIFIYPGYHFKVIDAMLTNFHLPESTLMMLISAFAGRDNVMQAYALAIEEKYRFFSYGDAMFIERKNT

SEQ ID NO: 66979 - protein, 352 aa, Glaciecola punicea
  REGION 1..352: note = tr|H5T7V9|H5T7V9_9ALTE S-adenosylmethionine:tRNA ribosyltransferase-isomerase OS=Glaciecola punicea ACAM 611 OX=1121923 GN=queA PE=3 SV=1
MKLTDFDFELPEKLIAKYPSAQRTASRMLRLNGATSEVRHGLFIDIVDLVEPGDLLVFNNTRVIPARLFGHKQSGGKIEIMLERVLNDSTALAHIRSSKSPKVGAVLTLEGDIKVQVLGRQDALFHIQFEVNPKSPQTIFELLEQHGHMPLPPYIDRPDEAADKERYQTVYNEKPGAVAAPTAGLHFDEAILQTLKDKGVNTAFVTLHVGAGTFLPVRVENIEDHQMHAEFAEVTPEVANLVKQTKANGKRVIAVGTTSVRSLESAAQQASDSLIESFLSDTSIFIYPGFEFKVVDCMLTNFHLPQSTLMMLISAFASRDGVMKAYSEAIEQEYRFFSYGDAMFIEGAQTKA

SEQ ID NO: 66980 - protein, 346 aa, Glaciecola sp.
  REGION 1..346: note = tr|A0A2N1HU85|A0A2N1HU85_9ALTE S-adenosylmethionine:tRNA ribosyltransferase-isomerase; OS = Glaciecola sp. 33A OX=2057807 GN=queA PE=3 SV=1
MKLSDFYFDLPEHLIAKHPTELRTQSRLLQLDGNTGEVLHKKFTDILGLLQPNDLLIFNNTRVIPARLHGTKMSGGKVEVLIERILNDGSAMAHIRSSKSPKSGAILTMEGGLQIEMLGRDNALFHIKFMTEKNVFDLLEEFGHMPLPPYIDRPDEEADKERYQTVYNERPGAVAAPTAGLHFDLEILNRIKEKGVELAFVTLHVGAGTFQPVRVDNIEEHQMHAEYAEVSQDVVDKVLATKAAGGRVIAVGTTSVRSIESAAQAASSELISEFMSDTNIFIYPGYHFKVIDAMLTNFHLPESTLMMLISAFAGRDNVMQAYAQAIQEEYRFFSYGDAMFIERKNT

SEQ ID NO: 66981 - protein, 316 aa, Glaciecola sp.
  REGION 1..316: note = tr|A0A2Z6UCM1|A0A2Z6UCM1_GLASK S-adenosylmethionine:tRNA ribosyltransferase-isomerase; OS = Glaciecola sp. (strain KUL10) OX=2161813 GN=queA PE=3; SV = 1
MLCLNVDTGEVEHKQFVDIIDLIDEGDLLIFNNTRVIPARLFGQKETGGKVEVLIERVLEDQTAMVHMRSSKSPKSGAILTLEGGLKVEVIGRKEALFHIKFIAEGNVFDLLEQYGHMPLPPYIDRPDEEQDKERYQTVYNEKPGAVAAPTAGLHFDEAILQTLSQKGVQTAFVTLHVGAGTFQPVRVDNIEEHQMHAEYAEVPQDVVDKVLATKKAGKRVIAVGTTSVRSLESAAQASNETIEAFMSDTNIFIYPGYEFKVVDAMITNFHLPESTLMMLISAFADREKVMAAYAAAIEEEYRFFSYGDAMFIHHE

SEQ ID NO: 66982 - protein, 344 aa, Glaciimonas sp.
  REGION 1..344: note = tr|A0A2T6FBX1|A0A2T6FBX1_9BURK S-adenosylmethionine:tRNA ribosyltransferase-isomerase; OS = Glaciimonas sp. PCH181 OX=2133943 GN=queA PE=3 SV=1
MHSLSDYDFTLPPELIAQLPLSERSASRLLHVDNTNGAALIDRQFTDVVDLLLPGDLLVFNDTRVLKARFFGVKDTGGNVEVLVERVLDNRTVHAQVRASKSPPTGTNIRLAEAFDVTVGPRVGEFFTLIFPTDVFELIEAHGRLPLPPYIEHTADAFDETRYQTVYAKELGAVAAPTAGLHFDLALLERLRQKGINFAYVTLHVGAGTFQPVRTENLADHKMHTEWYTIDVATVEAIRATKAAGRSVVAVGTTSLRALESASQSGELQAGGADTALFITPGYRFKTVDRLITNFHLPKSTLLMLVSAFAGYDVIKAAYAHAIVQQYRFFSYGDAMLLTTQKNI

SEQ ID NO: 66983 - protein, 361 aa, unidentified
  source 1..361: note = Glaesserella parasuis
  REGION 1..361: note = tr|U4SKL0|U4SKL0_HAEPR S-adenosylmethionine:tRNA ribosyltransferase-isomerase OS=Glaesserella parasuis D74; OX = 1275971 GN=queA PE=3 SV=1
MRVTDFHFDLPDELIARYPTAERSASRLLYLNGNTGEYQDQQFNDLLEHIHSGDLLIFNNTRVIPARLYGRKASGGKLEVLVERVLDEHRCLAHIRSSKAPKENAEIFLGEDKLGEGNGFKAIMVARHDALFELKFEEAQPLFDLLQQAGHIPLPPYIDRPDEDADQERYQTVYSKVLGAVAAPTAGLHFDHQMLQKLQEKGVQTAFVTLHVGAGTFQPVRVETIEEHKMHAEYAEVSQEVVDKILATKAQGKRVICVGTTSVRSIESAAQAAEKEGKLIAPFYSDTTIFLYPGKTFRIVDALVTNFHLPESTLIMLVSAFAGFKNCMNAYQHAVESQYRFFSYGDAMFITKNENAFGDVP

SEQ ID NO: 66984 - protein, 362 aa, unidentified
  source 1..362: note = Glaesserella parasuis
  REGION 1..362: note = tr|U4RYB4|U4RYB4_HAEPR S-adenosylmethionine:tRNA ribosyltransferase-isomerase OS=Glaesserella parasuis str. Nagasaki OX=1117322 GN=queA PE=3 SV=1
MRVTDFHFDLPDELIARYPTAERSASRLLYLNGNTGEYQDQQFNDLLEHIHSGDLLIFNNTRVIPARLYGRKASGGKLEVLVERVLDEHRCLAHIRSSKAPKENAEIFLGEDKLGEGNGFKAIMVARHDALFELKFEEAQPPLFDLLQQAGHMPLPPYIDRPDEDADQERYQTVYSKVLGAVAAPTAGLHFDHQMLQKLQEKGVQTAFVTLHVGAGTFQPVRVETIEEHKMHAEYAEVSQEVVDKILATKAQGKRVICVGTTSVRSIESAAQAAEKEGKLIAPFYSDTAIFLYPGKTFRIVDALVTNFHLPESTLIMLVSAFAGFKNCMNAYQHAVESQYRFFSYGDAMFITKNENALGDVP

SEQ ID NO: 66985 - protein, 361 aa, unidentified
  source 1..361: note = Glaesserella sp.
  REGION 1..361: note = tr|A0A328C063|A0A328C063_9PAST S-adenosylmethionine:tRNA ribosyltransferase-isomerase; OS = Glaesserella sp. HHC-2018 OX=2094024 GN=queA PE=3 SV=1
MRVTDFHFDLPDELIARYPTAERSASRLLYLNGNTGVYQDQQFNDLLEHINAGDLLIFNNTRVIPARLYGRKASGGKLEVLVERVLDEHRCLAHIRSSKAPKENAEIFLGEDKLGEAHGFKAIMVARHDALFELKFEADKPLFDLLQQAGHMPLPPYIDRPDEDADQERYQTVYSKVLGAVAAPTAGLHFDNQMLQKLQDKGVQTAFVTLHVGAGTFQPVRVETIEEHKMHAEYAEVSQEVVDKILETKAKGKRVICVGTTSVRSIESAAQAAEKEGKLIAPFYSDTAIFLYPGKTFRIVDALVTNFHLPESTLIMLVSAFAGFKNCMNAYQHAVESQYRFFSYGDAMFITKNENALKDTP

SEQ ID NO: 66986 - protein, 344 aa, Globicatella sanguinis
  REGION 1..344: note = tr|A0A2I1PJA9|A0A2I1PJA9_9LACT S-adenosylmethionine:tRNA ribosyltransferase-isomerase; OS = Globicatella sanguinis OX=13076 GN=queA PE=3 SV=1
MLTTKDFDYELPEELIAQTPLSDRSSSRLLVLDRETDELTDTHFTEIIDYLNPGDALVVNETRVIPARIFGVKPDTGGHLEVLLLNNTEGNHWECLIKPARRAKVGTEIHFGDNAQLKATVTKELTHGGRMIEFHYEGVFLELLETLGQMPLPPYIKERLDDPDRYQTVYAKENGSAAAPTAGLHFTPELLEKVKAKGIEIIPLVLHVGLGTFRPVSTDKIEEHEMHAEYYMLSEDSAAKIRQVKANGGKITAVGTTSVRTLETIASEHNGEIVASSGWTSIFISPGYQFKVVDHLITNFHLPQSTLVMLVSAFYDREKILKAYEHAVVEKYRFFSFGDAMFIK

SEQ ID NO: 66987 - protein, 344 aa, Globicatella sp.
  REGION 1..344: note = tr|A0A1E8YQA4|A0A1E8YQA4_9LACT S-adenosylmethionine:tRNA ribosyltransferase-isomerase; OS = Globicatella sp. HMSC072A10 OX=1739315 GN=queA PE=3 SV=1
MLTTKDFDYELPEELIAQTPLSDRSSSRLLVLDRENDELTDTHFTEIIDYLNPGDALVVNETRVIPARIFGVKPDTGGHLEVLLLNNTEGNHWECLIKPARRAKVGTEIHFGDNAQLKATVTKELTHGGRMIEFHYEGVFLELLETLGQMPLPPYIKERLDDPDRYQTVYAKENGSAAAPTAGLHFTPELLEKVKAKGIEIIPLVLHVGLGTFRPVSTDKIEEHEMHAEYYMLSEDSAAKIRQIKANGGKITAVGTTSVRTLETIASEHNGEIVASSGWTSIFISPGYQFKVVDHLITNFHLPQSTLVMLVSAFYDREKILKAYEHAVAEKYRFFSFGDAMFIK

SEQ ID NO: 66988 - protein, 344 aa, Globicatella sulfidifaciens
  REGION 1..344: note = tr|A0A1T4K4T3|A0A1T4K4T3_9LACT S-adenosylmethionine:tRNA ribosyltransferase-isomerase; OS = Globicatella sulfidifaciens DSM 15739 OX=1121925; GN = queA PE=3 SV=1
MLTTKDFDYELPEELIAQTPLNDRSSSRLLVLDRETDELTDTHFTEIIDYLNPGDALVVNETRVIPARIFGVKPDTGGHLEVLLLNNTEGNHWECLIKPARRAKVGTEIHFGDNAQLKATVTKELTHGGRMIEFHYEGVFLELLETLGQMPLPPYIKERLDDPDRYQTVYAKENGSAAAPTAGLHFTPDLLEKVKAKGIEIIPLVLHVGLGTFRPVTTDKIEEHEMHAEYYMLSEDSAAKIRQVQANGGKITAVGTTSVRTLETIASEHNGEIVASSGWTSIFISPGYQFKVVDHLITNFHLPQSTLVMLVSAFYDREKILKAYEHAVAEKYRFFSFGDAMFIK

SEQ ID NO: 66989 - protein, 351 aa, unidentified
  source 1..351: note = Gloeobacter kilaueensis
  REGION 1..351: note = tr|U5QE22|U5QE22_9CYAN S-adenosylmethionine:tRNA ribosyltransferase-isomerase OS=Gloeobacter kilaueensis JS1 OX=1183438 GN=queA PE=3 SV=1
MNDSAHTSELDLLTESYAYELPERCIAQNPVEPRDHSHLMVVRQSDHTHRRFFELPELLQPGDLLVLNDTRVIPARLFGRKATGSRIEVLLLEPRSERQWLCLLKPARKLTAGSVIDFDGLLSATVLESDPATGGRWLAFDGKTDFESALHKLGQMPLPPYLKHSTARAEQYQTIWASRPGAVAAPTAGLHFTSELLTRLNERGIEQTQITLHVGLGTFRPVQAAHILAHQMHSEWYEIPEAAVEAVRRTRERGGRVIAVGTTSARALESAGEDGTLRSGSRRSELFIYPGYRWQVVDGLLTNFHLPRSSLLMLVSSLVGRERLLALYREAIAQGYRFYSFGDAMLILLDG

SEQ ID NO: 66990 - protein, 352 aa, unidentified
  source 1..352: note = Gloeobacter violaceus
  REGION 1..352: note = sp|Q7NFD9|QUEA_GLOVI S-adenosylmethionine:tRNA ribosyltransferase-isomerase OS=Gloeobacter violaceus (strain ATCC 29082 / PCC 7421) OX=251221 GN=queA PE=3 SV=1
MNAPIDERDFLTDSYDYALPERCIAQQPAEPRDHSRLLVVDGEAHTHRYFYDLPGLLRPGDLLVLNDTRVIPARLFGSKASGGRVEVLLLEPRAPREWLCLVKPARRLAVGARIDFDGVLAARVTELDAETGGRWLRFEGEEDFEAALERVGHTPLPPYLKTGRTRDERYQTLWASRPGAVAAPTAGLHFSGELLARLAERGIERATVTLHVGLGTFRPVQSVSVHTHRMHREWYEIPEATAIAIERTRSRGGRVLAVGTTSARALESAAQPNGLPATGPGRSELFVYPGYRWRVVEGLITNFHLPRSSLLMLVSSLVGRERLLALYREAVDKGYRFYSFGDAMLILPGAGA

SEQ ID NO: 66991 - protein, 361 aa, Gloeocapsa sp.
  REGION 1..361: note = tr|K9XL20|K9XL20_9CHRO S-adenosylmethionine:tRNA ribosyltransferase-isomerase OS=Gloeocapsa sp. PCC 7428; OX = 1173026 GN=queA PE=3 SV=1
MLRQLSAQEQDRLLSAYDYELPEELIAQNPAVPRDSARLLVVDSTRHRHHRFYELPQLLRSGDLLVMNNTRVIPARLYGHKQSGATVEVLLLEERQHNQWLALVKPGRRLPPGATIVFAGNATDPLSATVLETDAATGGRLLQFDVPQEMSLLQVLDQYGQVPLPPYITNSQAASEQYQTVYAEQPGAVAAPTAGLHFTPELLTRLKDTGIRTAFVTLHVGVGTFRPVEVEDITTHKMHGEWVEVSADTVAQIRETQAQGGRVFAVGTTVVRSLEGAAVSGELQPFCGKTNLFIYPGYQWRVVEGLITNFHLPKSSLLMLVSALIGRQRLLELYQEAIAERYRFYSFGDAMLILPQFESMC

SEQ ID NO: 66992 - protein, 356 aa, Gloeocapsa sp.
  REGION 1..356: note = tr|L8LUU7|L8LUU7_9CHRO S-adenosylmethionine:tRNA ribosyltransferase-isomerase OS=Gloeocapsa sp. PCC 73106; OX = 102232 GN=queA PE=3 SV=1
MNAEQLLSSYDYQLPTELIAQTPAIPRDSSRLLVIDSLVSHQHLIFRDINRYLQPGDLLVVNDTKVIPARLYGRKSTGAPVEILLLEEKTSNHWLALVKPGKRFHQDTEIWFQPHNSSSGQSLLKATVVDKDSETGGRILAFDLPDQRSLWEILPEFGTIPLPPYITATDSPIDQYQTVYAQQPGAVAAPTAGLHFTHELLAKLAQLGVEQTSITLHVGVGTFRPVEVESIVNHKIHQEWLEVNSSTVERIQAKRAQGGRIIAVGTTVVRALETASIKRLQPYRGKTDLFIYPGYKFRAIDALITNFHLPRSSLLMLVSALIGRERLLSLYQEAIDQRYRFYSFGDAMFITPEAKI

SEQ ID NO: 66993 - protein, 366 aa, unidentified
  source 1..366: note = Gloeomargarita lithophora
  REGION 1..366: note = tr|A0A1J0AE02|A0A1J0AE02_9CYAN S-adenosylmethionine:tRNA ribosyltransferase-isomerase; OS = Gloeomargarita lithophora Alchichica-D10 OX=1188229; GN = queA PE=3 SV=1
MPYPAYPPGAGDWELSNYNYHLPQELIAQTAMVPRDHARLLVVDPDCHQHHRFDELPALLRPGDLLVLNNTKVLPARLIGTRPGGGITEFLLLEPGEDGGWRALVRPGRRVGAGTVVRFPAGEETQLLGVVQVRDETTGGRWVQFQTPDGMAIDQIRLLQILDKIGELPLPPYIQKFQGDPGQYQTVYAQALGAVAAPTAGLHFTDDLLKKLQNKGIAQAMVTLHVGLGTFRPVNTPDVRQHELHSEWIEVSPATVAQIHQTQQRGGRVIGVGTTVARALEAAAQGGELQATTGKINLYIYPGYTWRVIDGLITNFHLPQSSLLLLVSALIGRERLLYLYEQAIQERYRFYSLGDAMLILPDGDFR

SEQ ID NO: 66994 - protein, 366 aa, unidentified
  source 1..366: note = Gloeothece citriformis
  REGION 1..366: note = tr|B7K8E8|B7K8E8_GLOC7 S-adenosylmethionine:tRNA ribosyltransferase-isomerase OS=Gloeothece citriformis (strain PCC 7424) OX=65393 GN=queA PE=3 SV=1
MINDRLLSSYDYQLPSELIAQTPVVPRDSSRLLIVDSLTTYSHSVFRDLGKWLLPGDLLVFNNTRVIPARLYGRKVTGSPVEILLLEEKSNLCWLALVKPGKRFKIGSEIEFYSSIAQGENQEVVLKAKVLERDETTGGRLLQFELKSDRSFWELLEQIGEIPFPPYISSSDAKASQYQTVYAQKSGAVAAPTAGLHFTNELLESLLSQGIDQAHVTLHVGVGTFRPVEVEDITQHLMHTEWVEVPEATVQKIEATKARGGRVIAVGTTVVRSLEGAAKETQPPDGKYLLPFRGKTDLFIYPGYSWGVVDGLITNFHLPKSSLLMLVSALIGRERLLSLYQVAIEERYRFYSFGDAMLILPSAVIK

SEQ ID NO: 66995 - protein, 365 aa, unidentified
  source 1..365: note = Gloeothece verrucosa
  REGION 1..365: note = tr|E0U7X8|E0U7X8_GLOV7 S-adenosylmethionine:tRNA ribosyltransferase-isomerase OS=Gloeothece verrucosa (strain PCC 7822) OX=497965 GN=queA PE=3 SV=1
MTNDQLLSSYDYELPLDLIAQNPVVPRDMSRLLIVDTPASHTHSIFRELPKWLLPGDLLVFNNTRVIPARLYGCKSTGAPIEILLLEPKSNGCWLALVKPGKRFKVGSELWFYPPSANPKNPEIFLKAKVLDRDEATGGRILQFLWDNDQSFWELLEKIGQVPLPPYITSSDAKSSQYQTVYAKELGAVAAPTAGLHFTDELLKSLQSIGIDQAWITLHVGVGTFRPVEKEDITQHQMHTEWLEVPSATVTKIQETKARGGRVIAVGTTVVRALEGAAKETQAPESEYLLPFQGRTDLFIYPGYRWRVIDGMITNFHLPKSSLLMLVSALIGRERLLELYHQAIQEKYRFYSFGDAMLILPTAVL

SEQ ID NO: 66996 - protein, 355 aa, Gluconacetobacter diazotrophicus
  REGION 1..355: note = sp|A9HBI8|QUEA_GLUDA S-adenosylmethionine:tRNA ribosyltransferase-isomerase OS=Gluconacetobacter diazotrophicus (strain ATCC 49037 / DSM 5601 / PAl5); OX = 272568 GN=qu eA PE=3 SV=1
MTDLASDFDFDLPPALIAEHPARPRDSARLLDIPAAGPFHDRIVRDLPSLLRPGDLLVANDTAVIPAQLDARRGEARIGITLDRILPDGTWHALARNARRLRAGDVLTFPGTPNTAAVISRDDEGGVVLRFDTEGAAFDAFLQAAGVLALPPYIARPFGPTEQDRVDYATIFSAHRGAVAAPTAGLHFTPDLLAALDAAGVGRCTLTLHVGAGTFLPVRGDSIAAHRMHAERGVITAETADAINAARRAGGRIVAVGTTSLRLLESAADPDGTIRPFDGDTAIFIRPGYRFRAVDVLMTNFHLPRSTLFMLVCAFAGYDRMRDAYAHAVADGYRFYSYGDACLLHRAPVAGEQGL

SEQ ID NO: 66997 - protein, 352 aa, Gluconacetobacter entanii
  REGION 1..352: note = tr|A0A318Q622|A0A318Q622_9PROT S-adenosylmethionine:tRNA ribosyltransferase-isomerase; OS = Gluconacetobacter entanii OX=108528 GN=queA PE=3 SV=1
MTDLVSDFDFDLPPALIADHPARPRDSARMLEVPVEGPFIDRHVRDLPGCLRAGDILVANDTAVIPAQLSAMRGAARIGITLDRILPDGTWHALARNSRRLKPGDTLTFAPSHVTAEVMVCEDAGGVVLRFDVEGEAFDQFLHDTGHLALPPYIARPDGPTEEDRRDYSTIFAQHRGAVAAPTAGLHFTPALLSGLEAAGVLRQTLTLHVGAGTFLPMRSEQISEHRMHAERGTISPHAAQRINAARAAGGRIIAVGTTSLRLLESATDEDGVVHPFHGETAIFIRPGYRFRAVDMLLTNFHLPRSTLFMLVSAFAGQARMRAAYDHAIAAGYRFYSYGDACLLHRHDGGAA

SEQ ID NO: 66998 - protein, 355 aa, Gluconacetobacter liquefaciens
  REGION 1..355: note = tr|A0A370G249|A0A370G249_GLULI S-adenosylmethionine:tRNA ribosyltransferase-isomerase; OS = Gluconacetobacter liquefaciens OX=89584 GN=queA PE=3; SV = 1
MSDQVSDFDFDLPHTLVAEHPARPRDAARLLDVMPTGPFHDRVVRDLPSLLRPGDLLVANDTAVIPAQLDARRGEAKIGITLDRILPDGTWHALARNARRLRAGDVLTFPGTSNTAAIVSRDDEGGVILRFDTEGAAFDAFLQKAGVLALPPYIDRPQGPTEQDRQDYATIFAAHRGAVAAPTAGLHFTPQLLAALDAAGVERCTLTLHVGAGTFLPVRGDSIAGHRMHAERGVITEETAERLNRTRRAGGRIVAVGTTSLRLLESAADPDGTIRPFDGDTAIFIRPGYRFRAVDLLMTNFHLPRSTLFMLVCAFAGYDRMRDAYAHAIGTGYRFYSYGDACLLHRAPTPGETGA

SEQ ID NO: 66999 - protein, 397 aa, Gluconacetobacter sp.
  REGION 1..397: note = tr|F3S4J4|F3S4J4_9PROT S-adenosylmethionine:tRNA ribosyltransferase-isomerase OS=Gluconacetobacter sp. SXCC-1 OX=1004836 GN=queA PE=3 SV=1
MKNSRTGIAMSFWLPPPLLSNIGLHAASAHSSDWQEPWGFRKGSRMTDLVSDFDFTLPPDRIADHPARPRDSARLLDVPVAGPIMDRHVRDLPGCLRAGDILVANDTAVIPAQLSATRGAARIGITLDRILPDGSWHVLARNARRLHPGDTLAFGASPVTADVLACGDAGDVTLRFSVEGAAFDQFLHDTGHLALPPYIARPEGPTEQDRKDYATIFAQHRGAVAAPTAGLHFTPDLLAALDHAGVLRQTLTLHVGAGTFLPMRSEQISAHRMHAERGTITPHAARRINAARAAGGRIIAVGTTSLRLLESATDEDGVVHPFHGETAIFIKPGYRFRAVDMLLTNFHLPRSTLFMLVCAFGGYRRMQAAYAHAIAKGYRFYSYGDACLLHRSEGDLP

SEQ ID NO: 67000 - protein, 347 aa, Gluconobacter albidus
  REGION 1..347: note = tr|A0A149TL73|A0A149TL73_9PROT S-adenosylmethionine:tRNA ribosyltransferase-isomerase; OS = Gluconobacter albidus OX=318683 GN=queA PE=3 SV=1
MTDDLAPFDFELPRDHIATEPARPRDSATLLHVRPGLAPDPHVIRELPDFLREGDLLIANNTAVIRAQLAATRGEAKIGLTLDRILADGSWHALARNSRKLKPQDILHFGDDPVTATVVENEGDGAVSIRFSVEGDDFDAFLERVGALALPPYIERPFGPTKQDDTDYRTIFSQYRGAVAAPTAGLHFTPEVLAALDAKGIQRRTLTLHVGAGTFLPVRSTIAEHKMHAEWGEIDADTAAAINETRARGGRVIAVGTTSLRLLESAARDDGTVAPWRGETSIFIKPGYRFKAVDVLMTNFHLPRSTLFMLVCAFSGIETMREAYAYAIANGLRFYSYGDACLLERAP

SEQ ID NO: 67001 - protein, 347 aa, Gluconobacter albidus
  REGION 1..347: note = tr|A0A1U9KZR0|A0A1U9KZR0_9PROT S-adenosylmethionine:tRNA ribosyltransferase-isomerase; OS = Gluconobacter albidus OX=318683 GN=queA PE=3 SV=1
MTDDLAPFDFELPRDHIATEPARPRDSATLLHVRPGLAPDPHVIRELPDFLREGDLLIANNTAVIRAQLAATRGEAKIGLTLDRILADGSWHALARNSRKLKPQDILHFGDDPVTATVVENEGDGAVSIRFSVEGDDFDAFLERVGALALPPYIERPFGPTKQDDTDYRTIFSQYRGAVAAPTAGLHFTPEVLAALDAKGIQRRTLTLHVGAGTFLPVRSTIAEHKMHAEWGEIDADTAAAINETRARGGRVIAVGTTSLRLLESAARDDGTVAPWRGETSIFIKPGYRFKAVDVLMTNFHLPRSTLFMLVCAFSGTETMREAYAYAIANGLRFYSYGDACLLERAP

SEQ ID NO: 67002 - protein, 347 aa, Gluconobacter cerinus
  REGION 1..347: note = tr|A0A1B6VKB8|A0A1B6VKB8_9PROT S-adenosylmethionine:tRNA ribosyltransferase-isomerase; OS = Gluconobacter cerinus OX=38307 GN=queA PE=3 SV=1
MTDELATFDFELPRDHIATEPARPRDSAKLLHVRSGEAPDLRIIRDLPGLLQEGDLLIANNTAVIRAQLSATRGEAKIGITLDRILADGSWHALARNSRKLKPNDTLNFGDDPVTASVVENEGDGAVSIRFAVEGDAFDAFLERVGALALPPYIDRPFGPTVQDDSDYRTIFSEHRGAVAAPTAGLHFTPDLLAALDAKGIQRRTLTLHVGAGTFLPVRSSIAEHRMHAEWGEIDAETAQAINETRARGGRVVAVGTTSLRLLESAAQEDGTVQPWRGETSIFIKPGYRFKAVDLLMTNFHLPRSTLFMLVCAFSGTVTMREAYAYAIANGLRFYSYGDACLLERAQ

SEQ ID NO: 67003 - protein, 347 aa, Gluconobacter frateurii
  REGION 1..347: note = tr|A0A0K8N5H4|A0A0K8N5H4_9PROT S-adenosylmethionine:tRNA ribosyltransferase-isomerase; OS = Gluconobacter frateurii NBRC 101659 OX=1104996 GN=queA; PE = 3 SV=1
MTDELAPFDFELPRDHIATEPARPRDSATLLHVRPGHAPDQRIIRDLPSLLREGDLLIANNTAVIRAQLSATRGEAKIGITLDRILADGSWHALARNSRKLKPNDTLNFGDDPVTASVVENEGDGAVSIRFSVEGDAFDAFLERVGALALPPYIDRPFGPTVQDDSDYRTIFSEHRGAVAAPTAGLHFTPDLLAALDAKGIQRRTLTLHVGAGTFLPVRSSIAEHRMHAEWGEIDAETAQAINETRARGGRVVAVGTTSLRLLESAAQEDGTVQPWRGETSIFIKPGYRFKAVDLLMTNFHLPRSTLFMLVCAFSGTDTMREAYAYAIANGLRFYSYGDACLLERAP

SEQ ID NO: 67004 - protein, 347 aa, Gluconobacter frateurii
  REGION 1..347: note = tr|A0A0S6TJC0|A0A0S6TJC0_9PROT S-adenosylmethionine:tRNA ribosyltransferase-isomerase; OS = Gluconobacter frateurii NBRC 103465 OX=1307834 GN=queA; PE = 3 SV=1
MTDELAQFDFELPRDHIATEPARPRDSATLLHVRPGHAPDQRIIRDLPSLLREGDLLIANNTAVIRAQLSATRGEAKIGITLDRILADGSWHALARNSRKLKPNDTLHFGDDPVTASVVENEGDGAVSIRFSVEGEAFDAFLERVGALALPPYIDRPFGPTVQDDSDYRTIFSEHRGAVAAPTAGLHFTPDLLAALDAKGIQRRTLTLHVGAGTFLPVRSSIAEHRMHAEWGEIDAETAQAINETRARGGRVVAVGTTSLRLLESAAQEDGTVQPWRGETSIFIKPGYRFKAVDLLMTNFHLPRSTLFMLVCAFSGTDTMREAYAYAIANGLRFYSYGDACLLERAP

SEQ ID NO: 67005 - protein, 103 aa, Gluconobacter japonicus
  REGION 1..103: note = tr|A0A149U775|A0A149U775_GLUJA S-adenosylmethionine:tRNA ribosyltransferase-isomerase (Fragment) OS=Gluconobacter japonicus OX=376620; GN = AD936_07000 PE=3 SV=1
TRARGGRVVAVGTTSLRLLESAAQDDGTVQPWRGETSIFIKPGYRFKAVDLLMTNFHLPRSTLFMLVCAFSGTDTMREAYAYAIANGLRFYSYGDACLLERAP

SEQ ID NO: 67006 - protein, 347 aa, Gluconobacter japonicus
  REGION 1..347: note = tr|A0A149S6J6|A0A149S6J6_GLUJA S-adenosylmethionine:tRNA ribosyltransferase-isomerase; OS = Gluconobacter japonicus OX=376620 GN=queA PE=3 SV=1
MTDELAQFDFELPRDHIATEPARPRDSATLLHVRPGHAPDQRIIRDLPSLLREGDLLIANNTAVIRAQLSATRGEAKIGITLDRILADGSWHALARNSRKLKPNDTLNFGDDPVTASVVENEGDGAVSIRFSVEGDAFDAFLERVGALALPPYIDRPFGPTVQDDSDYRTIFSEHRGAVAAPTAGLHFTPDLLAALDAKGIQRRTLTLHVGAGTFLPVRSSIAEHRMHAEWGEIDVETAQAINETRTRGGRVVAVGTTSLRLLESAAQEDGTVQPWRGETSIFIKPGYRFKAVDLLMTNFHLPRSTLFMLVCAFSGTDTMREAYAYAIANGLRFYSYGDACLLERAP

SEQ ID NO: 67007 - protein, 347 aa, Gluconobacter kanchanaburiensis
  REGION 1..347: note = tr|A0A511B9S2|A0A511B9S2_9PROT S-adenosylmethionine:tRNA ribosyltransferase-isomerase; OS = Gluconobacter kanchanaburiensis NBRC 103587 OX=1307948; GN = queA PE=3 SV=1
MTDDLAPFDFELPRDHIATEPARPRDSATLLHVRPGLAPDPHIIRELPDFLREGDLLIANNTAVIRAQLAATRGEAKIGLTLDRILADGSWHALARNSRKLKPQDILHFGDDPVTATVVENEGDGAVSIRFSVEGDDFDAFLERVGALALPPYIERPFGPTKQDDTDYHTIFSQYRGAVAAPTAGLHFTSEVLAALDAKGIQRRTLTLHVGAGTFLPVRSTIAEHKMHAEWGEIDAETAAAINETRARGGRIVAVGTTSLRLLESAAREDGTVAPWRGETSIFIKPGYRFKAVDVLMTNFHLPRSTLFMLVCAFSGTETMREAYAYAIANGLRFYSYGDACLLERAP

SEQ ID NO: 67008 - protein, 347 aa, unidentified
  source 1..347: note = Gluconobacter morbifer
  REGION 1..347: note = tr|G6XMP9|G6XMP9_9PROT S-adenosylmethionine:tRNA ribosyltransferase-isomerase OS=Gluconobacter morbifer G707 OX=1088869 GN=queA PE=3 SV=1
MTDELAPFDFHLPHDHIATEPARPRDSARLLHVRPGQAPVLNTVRDLPGLLREGDLLIANNTAVIRAQLAATRGEAKIGLTLDRILPDGIWHALARNARKLRPQDVLRFGDDPVTATVRENEGDGAVSIRFSVEGEAFDAFLERVGALALPPYIDRPFGPTKQDDIDYRTIFSQYRGAVAAPTAGLHFTPELLAALDKKGIKRRTLTLHVGAGTFLPVRSSIAEHRMHAEWGEIDQDTADAINETRARGSRIVAVGTTSLRLLESAAADDGTVSPWRGETSIFIKPGYRFRAVDVLMTNFHLPRSTLFMLVCAFSGTETMREAYAYAIARGLRFYSYGDACLLERAE

SEQ ID NO: 67009 - protein, 347 aa, Gluconobacter oxydans
  REGION 1..347: note = sp|Q5FR06|QUEA_GLUOX S-adenosylmethionine:tRNA ribosyltransferase-isomerase OS=Gluconobacter oxydans (strain 621H) OX=290633 GN=queA PE=3 SV=2
MTDDLAPFDFELPRDHIATEPARPRDSATLLHVRPGLPPDPHVIRDLPDFLREGDLLIANNTAVIRAQLAATRGEAKIGLTLDRILANGSWHALARNSRKLKPQDILHFGDDPVTATVIENEGDGAVSIRFSVEGDEFDAFLERVGALALPPYIERPFGPTKQDDADYRTIFSQYRGAVAAPTAGLHFTPEVLAALDAKGIQRRTLTLHVGAGTFLPVRSTIAEHKMHAEWGEIDAETAAAINETRARGGRIVAVGTTSLRLLESAAREDGTVAPWRGETSIFIKPGYRFKAVDVLMTNFHLPRSTLFMLVCAFSGTETMREAYAYAIANGLRFYSYGDACLLERAP

SEQ ID NO: 67010 - protein, 347 aa, Gluconobacter oxydans
  REGION 1..347: note = tr|A0A067Z4Q4|A0A067Z4Q4_GLUOY S-adenosylmethionine:tRNA ribosyltransferase-isomerase; OS = Gluconobacter oxydans DSM 3504 OX=1288313 GN=queA PE=3; SV = 1
MTDDLAPFDFELPRDHIATEPARPRDSATLLHVRPGLPPDPHVIRELPDFLREGDLLIANNTAVIRAQLAATRGEAKIGLTLDRILADGSWHALARNSRKLKPQDILHFGDDPVTATVIENEGDGAVSIRFSVEGDAFDAFLERVGALALPPYIERPFGPTKQDDADYRTIFSQYRGAVAAPTAGLHFTPEVLAALDAKGIQRRTLTLHVGAGTFLPVRSTIAEHKMHAEWGEIDAETAAAINETRVRGGRVVAVGTTSLRLLESAAREDGTVAPWRGETSIFIKPGYRFKAVDVLMTNFHLPRSTLFMLVCAFSGTETMREAYAYAIANGLRFYSYGDACLLERAP

SEQ ID NO: 67011 - protein, 347 aa, Gluconobacter roseus
  REGION 1..347: note = tr|A0A4Y3M943|A0A4Y3M943_9PROT S-adenosylmethionine:tRNA ribosyltransferase-isomerase; OS = Gluconobacter roseus NBRC 3990 OX=1307950 GN=queA PE=3; SV = 1
MTDDLAPFDFELPRDHIATEPARPRDSATLLHVRPGLPPDPHVIRDLPDFLREGDLLIANNTAVIRAQLAATRGEAKIGLTLDRILADGSWHALARNSRKLKPQDILHFGDDPVTATVIENEGDGAVSIRFSVEGDEFDAFLERVGALALPPYIERPFGPTKQDDADYRTIFSQYRGAVAAPTAGLHFTPEVLAALDAKGIQRRTLTLHVGAGTFLPVRSTIAEHKMHAEWGEIDVETAAAINETRARGGRIVAVGTTSLRLLESAAREDGTVAPWRGETSIFIKPGYRFKAVDVLMTNFHLPRSTLFMLVCAFSGTETMREAYAYAIANGLRFYSYGDACLLERAP

SEQ ID NO: 67012 - protein, 347 aa, Gluconobacter sp.
  REGION 1..347: note = tr|A0A252BNA4|A0A252BNA4_9PROT S-adenosylmethionine:tRNA ribosyltransferase-isomerase; OS = Gluconobacter sp. DsW_058 OX=1511210 GN=queA PE=3 SV=1
MTDELATFDFELPRDHIATEPARPRDSAKLLHVRSGEAPDLRIIRDLPGLLREGDLLIANNTAVIRAQLSATRGEAKISITLDRILADGSWHALARNSRKLKPNDTLNFGDDLVTASVVENEGDGAVSIRFSVEGDAFDAFLERVGALALPPYIDRPFGPTAQDDSDYRTIFSEHRGAVAAPTAGLHFTPDLLAALDAKGIQRRTLTLHVGAGTFLPVRSSIAEHRMHAEWGEIDAETAQAINETRVRGGRVVAVGTTSLRLLESAAQEDGTVQPWRGETSIFIKPGYRFKAVDLLMTNFHLPRSTLFMLVCAFSGTDTMREAYAYAIANGLRFYSYGDACLLERAP

SEQ ID NO: 67013 - protein, 347 aa, Gluconobacter sphaericus
  REGION 1..347: note = tr|A0A4Y3QCY5|A0A4Y3QCY5_9PROT S-adenosylmethionine:tRNA ribosyltransferase-isomerase; OS = Gluconobacter sphaericus NBRC 12467 OX=1307951 GN=queA; PE = 3 SV=1
MTDDLAPFDFELPRDHIATEPARPRDSATLLHVRPGLAPDPHVIRDLPDFLREGDLLIANNTAVIRAQLAATRGEAKIGLTLDRILADGSWHALARNSRKLKPQDVLHFGDDVVTATVVDNEGDGAVSIRFSVEGDDFDAFLERVGALALPPYINRPFGPTKQDDADYRTIFSQHRGAVAAPTAGLHFTPEVLTALDAKGIQRRTLTLHVGAGTFLPVRSTIAEHKMHAEWGEIDEETAAAINETRARGGRIVAVGTTSLRLLESAAREDGTVAPWRGETSIFIKPGYRFKAVDVLMTNFHLPRSTLFMLVCAFSGTETMREAYAYAIANGLRFYSYGDACLLERAP

SEQ ID NO: 67014 - protein, 371 aa, Gluconobacter thailandicus
  REGION 1..371: note = tr|M9LWF3|M9LWF3_GLUTH S-adenosylmethionine:tRNA ribosyltransferase-isomerase OS=Gluconobacter thailandicus NBRC 3255 OX=1291534 GN=queA PE=3 SV=1
MTEKMRRAGWSGVFMLAEPAREHPMTDELATFDFELPRDHIATEPARPRDSAKLLHVRSGHAPDLRIIRDLPGLLREGDLLIANNTAVIRAQLSATRGEAKIGITLDRILADGSWHALARNSRKLKPNDTLNFGDDPVTASVVENEGDGAVSIRFSVEGDAFDAFLERVGALALPPYIDRPFGPTAQDDSDYRTIFSEHRGAVAAPTAGLHFTPDLLAALDTKGIQRRTLTLHVGAGTFLPVRSSIAEHRMHAEWGEIDAETAQAINETRARGGRVVAVGTTSLRLLESAAQEDGTVQPWRGETSIFIKPGYRFKAVDLLMTNFHLPRSTLFMLVCAFSGTDTMREAYAYAIANGLRFYSYGDACLLERAP

SEQ ID NO: 67015 - protein, 367 aa, Gluconobacter thailandicus
  REGION 1..367: note = tr|A0A5C0AA23|A0A5C0AA23_GLUTH S-adenosylmethionine:tRNA ribosyltransferase-isomerase; OS = Gluconobacter thailandicus OX=257438 GN=queA PE=3 SV=1
MRRAGWSGVFMLAEPAREHPMTDELATFDFELPRDHIATEPARPRDSAKLLHVRSGHAPDLRIIRDLPGLLREGDLLIANNTAVIRAQLSATRGEAKIGITLDRILADGSWHALARNSRKLKPNDTLNFGDDPVTASVVENEGDGAVSIRFSAEGDAFDAFLERVGALALPPYIDRPFGPTAQDDSDYRTIFSEHRGAVAAPTAGLHFTPDLLAALDAKGIQRRTLTLHVGAGTFLPVRSSIAEHRMHAEWGEIDAETAQAINETRARGGRVVAVGTTSLRLLESAALEDGTVQPWRGETSIFIKPGYRFKAVDLLMTNFHLPRSTLFMLVCAFSGTDTMREAYAYAIANGLRFYSYGDACLLERAP

SEQ ID NO: 67016 - protein, 347 aa, Gluconobacter wancherniae
  REGION 1..347: note = tr|A0A511B2F2|A0A511B2F2_9PROT S-adenosylmethionine:tRNA ribosyltransferase-isomerase; OS = Gluconobacter wancherniae NBRC 103581 OX=656744 GN=queA; PE = 3 SV=1
MTDELAPFDFELPRDNIATEPARPRDSAKLLHVRPEAGTDMHVVRDLPDLLREGDLLIANNTEVIRAQLSATRGEARIGITLDRILADGSWHALARNSRKLRSGDVLQFGNDAVTATIVTNEGDGAIALRFSVEGDAFDAFLERVGALALPPYIERPLGPTPQDDTDYRTIFSQFRGAVAAPTAGLHFTPELLAALDARGIQRRTLTLHVGAGTFLPVRSSISEHRMHAEWGEIDAETAAAINETRARGGRVVAVGTTSLRLLESAAREDGIVEPWRGETSIFIKPGYRFRAVDVLMTNFHLPRSTLFMLVCAFSGTDTMREAYTRAIADGLRFYSYGDACLLERAP

SEQ ID NO: 67017 - protein, 354 aa, unidentified
  source 1..354: note = Glycocaulis alkaliphilus
  REGION 1..354: note = tr|A0A3T0E9R3|A0A3T0E9R3_9RHOB S-adenosylmethionine:tRNA ribosyltransferase-isomerase; OS = Glycocaulis alkaliphilus OX=1434191 GN=queA PE=3 SV=1
MKLSDFDFHLPEDRIALRPARPRDSARLLHVGQGGALGDHTMLDLPALLQPGDLLVLNNTSVIPAALTGERPARAVGGGGPARIELNLHTRVSEDSWRAFARPAKRVREGDTIHFPEGLSATVMAKAEGGDIALQFNASGAGLDAALEGAGNPPLPPYIASKRDTDAQDRTDYQTLFSDPARKGSVAAPTAGLHFTDRLFAALEARGVSTTQLTLHVGAGTFLPVKTENVAEHTMHAEWYEISEDTAAAINTARAEGRRIIPVGTTALRTLESAADNEGRVRAGSTETAIFITPGYRFRVTDALLTNFHLPRSTLFMLVSALVGLDVMQGAYSHAIARSYRFFSYGDACLIERG

SEQ ID NO: 67018 - protein, 352 aa, unidentified
  source 1..352: note = Glycocaulis sp.
  REGION 1..352: note = tr|A0A550KI75|A0A550KI75_9RHOB S-adenosylmethionine:tRNA ribosyltransferase-isomerase; OS = Glycocaulis sp. ZYF765 OX=2518983 GN=queA PE=3 SV=1
MKLSDFDFHLPEDRIALRPARPRDSARLLHVGGALEDLGVLDLPGLLNPGDLLVFNDTRVLPASLSGVRPARAHGGGGDAAIEINLHRREGADRWRAFARPGKRLREGDAVRFSGGLEAVVETKGEGGEIVLAFPLSGEALDRAIEAAGAPPLPPYIASKRAADEADRDDYQTLYAAPDKTGSVAAPTAGLHFTERLFTALDARGVQRAHVTLHVGAGTFLPVKTEDVAEHRMHGEWFEISPEAAAAINAAKAAGRRVIPVGTTSLRTLESAADGEGRIAPGARETDIFITPGYRFRVADALLTNFHLPKSTLFMLVSALAGLDRMQAAYAHAIANRYRFFSYGDACFIERA

SEQ ID NO: 67019 - protein, 348 aa, unidentified
  source 1..348: note = Glycomyces artemisiae
  REGION 1..348: note = tr|A0A2T0UL30|A0A2T0UL30_9ACTN S-adenosylmethionine:tRNA ribosyltransferase-isomerase; OS = Glycomyces artemisiae OX=1076443 GN=B0I28_105354 PE=3; SV = 1
METSKLNFQLPAHLLARQPIERRGGERHDSKMVVYHKRSETVEFTSFREIPRFLEPGDVVVINDSRTLNASVFANVEDRGRVEVQLRYNPKDNIWGVSSKSRRAPRIGSKLTFDGTDITATMLGPDDRGLSLWMLEFDCEFDALVAYLDEHGRPIPSLYVEGSFTNEEYNSVYAERPGSAEMPAAGRHFTEEVLTRLRERGVGIAYITLHTGLSSVEISEEHLEDHRMHAEWCQIPPETADMVNTAKDEGHRVLVVGTTVMRTLESAAKEDGLPLRAGDRWTDLYIYPGFDFQVADAFVTNFHGPRSSRIALASAFTGADLLLHGYDAAIERGLQFYEFGDTTLTLPD

SEQ ID NO: 67020 - protein, 341 aa, unidentified
  source 1..341: note = Glycomyces artemisiae
  REGION 1..341: note = tr|A0A2T0UHW5|A0A2T0UHW5_9ACTN S-adenosylmethionine:tRNA ribosyltransferase-isomerase; OS = Glycomyces artemisiae OX=1076443 GN=B0I28_107323 PE=3; SV = 1
MSTTLSEPFAFALDAALEARRPAEVRGSGRSDVRMLVTDKETGEITHRRFEDLPALVRPGDLLVVNNSGTLPAAVVTRQGLRVHFSSVRPDGSWLVELRDRDKPYLGDVLGRIVDLPGSYQLYLERRFGKRLWVVRPPFASVPDYLARYGRPISYSYVEEQWPIGAYQTVFATVPGSAEMPSAARPFTSEIVTRLVSAGVGIAPVTLHTGVASLESDEDPYPEWFEVGEYTARAVNTAKAAGGRVIAVGTTVVRALESAVEKSTAEDGRVVGTSGHTERIISPANPVAVVDGLLTGFHEPRSTHLSMLEAICPTALLRDSYEAAIGGKYLWHEFGDVHLIA

SEQ ID NO: 67021 - protein, 337 aa, Glycomyces harbinensis
  REGION 1..337: note = tr|A0A1G7BE73|A0A1G7BE73_9ACTN S-adenosylmethionine:tRNA ribosyltransferase-isomerase; OS = Glycomyces harbinensis OX=58114 GN=SAMN05216270_11665; PE = 3 SV=1
MSTTLTSPFAFALDAALEADRPAEARGASRSDVRMLVSDKATGAIGHHRFDALPALVRPGDLLVVNNSGTMPASVPTRQGWRVHFSSTRPDGSWLVELRDRDKPYLGEVLGRIVDLPGGVELYLERRFGKRLWVTRPKFASVPEYLAKYGKPIRYSYVDRDWPISAYQTAFATVPGSAEMPSAARPFTPEIVTRLVSAGVGVAPITLHTGVASLESDEDPYPEWFEVGDFTARAVNAAKAAGGRVIAVGTTAVRALESAAAEGGEVAAASGHTDRIVSTADPVKVVDGLLTGFHEPRSTHLSMLEAICDTDLLRASYTAAIEERYLWHEFGDVHLIA

SEQ ID NO: 67022 - protein, 336 aa, unidentified
  source 1..336: note = Glycomyces paridis
  REGION 1..336: note = tr|A0A4V4HP80|A0A4V4HP80_9ACTN S-adenosylmethionine:tRNA ribosyltransferase-isomerase; OS = Glycomyces paridis OX=2126555 GN=E9998_09420 PE=3 SV=1
MSATLESPFGFALDAALEADRPAEERGLLRSDVRMLVTDKATGAIEHAAFDSLPALVRPGDLLVVNNSATLPAAVSTRQGLRVHFSSTRPDGSWLVELRDRDRPHLGEVQGRTVDLPGGVSLYLERRFGKRLWVTRPPVPSVPEYLARYGRPIRYSYVATDRPLSAYQTAFATVPGSAEMPSAARPFTPEIVTRLVSAGVGIAPITLHTGVASLESDEDPYPEWFEVGEYTARQVNATREAGGRVIAVGTTAVRALESAVSEGRVVAASGHTERIVSTAHPVEVVDGLLTGFHEPRSTHLSMLEAICETELLRASYEAAIGARYLWHEFGDVHLIA

SEQ ID NO: 67023 - protein, 336 aa, Glycomyces sambucus
  REGION 1..336: note = tr|A0A1G9D3C2|A0A1G9D3C2_9ACTN S-adenosylmethionine:tRNA ribosyltransferase-isomerase; OS = Glycomyces sambucus OX=380244 GN=SAMN05216298_0645 PE=3; SV = 1
MSTTLTEPFAFALDAALEARRPAEVRGTGRSDVRMLVTDKATGAITHQHFEDLPALVRPGDLLVVNNSGTLPAAVLTRQGLRVHFSSVRPDGSWLVELRDRDKPYLGDVIGRTLDLPGGVHLYLERRFGKRLWVTRPPVKSVADYLVRYGRPIRYTYVDQQWPLSAYQTAFATVPGSAEMPSAARPFTPEIVTRLVSAGVGIAPVTLHTGVASLESDEDPYPEWFEVGEYTARAVESAKAAGGRVIAVGTTAVRALETAAEGGRVAAASGHTERIVSTADPVTVVDGLLTGFHEPRSTHLSMLEAICETELLRESYAAAIEARYLWHEFGDVHLIA

SEQ ID NO: 67024 - protein, 336 aa, Glycomyces sp.
  REGION 1..336: note = tr|A0A4S8Q1U6|A0A4S8Q1U6_9ACTN S-adenosylmethionine:tRNA ribosyltransferase-isomerase; OS = Glycomyces sp. 18 OX=2570927 GN=FAB82_21220 PE=3 SV=1
MSTTLVSPFGFALEAALEANQPAEVRGASRSDVRMLVTDKATGQISHRHFEDLPALVRPGDLLVVNNSTTLPASVPTKQGWRVHFSSTRPDGSWLVELRDGQRPYLGEVPGRQVHLAGGVVLELEARFGKRLWVTRPPLASVPDYLARFGKPIRYSYVDRDWPVSAYQTAFATVPGSAEMPSAARPFTPEIVTRLVSAGIGIAPITLHTGVASLESDEDPYPEWFEVGEYTARAVNAAKDSGGRVIAVGTTAVRALESAADGGRAFAASGHTDRIISLDDPPVVVDGLLTGLHEPRSTHLAMLEALCETELLRESYEAAIEARYLWHEFGDVHLIA

SEQ ID NO: 67025 - protein, 336 aa, Glycomyces sp.
  REGION 1..336: note = tr|A0A426V4E2|A0A426V4E2_9ACTN S-adenosylmethionine:tRNA ribosyltransferase-isomerase; OS = Glycomyces sp. YIM 121974 OX=2493553 GN=EIW28_02700; PE = 3 SV=1
MSTTLTEPFAFALDAALEARRPAEVRGAGRSDVRMLVTDKATGAITHRHFEDLPALVRPGDLLVVNNSATLPAAVLTRQGLRVHFSSVRPDGSWLVELRDRDRPYLGDVIGRTLDLPGGVHLYLERRFGKRLWTTRPPVASVPDYLARHGRPIRYSYVDQEWPLAAYQTAFSTVPGSAEMPSAARPFTPEIVTRLVSAGVGIAPITLHTGVASLESDEDPYPEWFEVGEYTARAVNSAKAAGGRVIAVGTTAVRALESAVEDGRVAAASGHTERIISPAAPVAVVDGLLTGFHEPRSTHLSMLEAICETGLLRDSYTAAIEARYLWHEFGDVHLIA

SEQ ID NO: 67026 - protein, 359 aa, Gordonibacter pamelaeae
  REGION 1..359: note = tr|A0A369M7P3|A0A369M7P3_9ACTN S-adenosylmethionine:tRNA ribosyltransferase-isomerase; OS = Gordonibacter pamelaeae OX=471189 GN=queA PE=3 SV=1
MKTSDFDYDLPEELIAQEPAAERDGCRLLVMDRATGALEDRVFRDIAEYLRPGDLLVANETRVMPARLLGAKRGTGGAAEVFLLRQHGTPTENRSALWEVLVRPGKRLKPGTGAVVDFTDAEGNVALSAEIVDWLPDAQKGERLARLTTPLPSLDEALHAVGHTPLPPYIKDYAGDEELYQTVYSRRESSAAAPTAGLHFTPELIEHLREQGVRWETVELEVGLDTFRIVDEDDPEKHVIHTEFYTVPERTVAAISETRERGGRVVAVGTTSVRSLESAWDAEAGAVTPREREATSLYLLPGSEFHVVDALVTNFHVPRSTLMMLVSAFSTREHIMAAYQHAIAERYRMLSFGDAMFIC

SEQ ID NO: 67027 - protein, 359 aa, Gordonibacter sp.
  REGION 1..359: note = tr|A0A1Y4G703|A0A1Y4G703_9ACTN S-adenosylmethionine:tRNA ribosyltransferase-isomerase; OS = Gordonibacter sp. An230 OX=1965592 GN=queA PE=3 SV=1
MLTSDFDYDLPPELIAQEPAPNRDGCRLLVMDRSTGALEDRVFRDIVEYLRPGDVLVANETRVMPARLVGTKRGTGGAAEVFLLRQHGTPFDNKSALWEVLVRPGKRLKPGSGAVVDFTDSKGNAALSAEIVDWAPNAQKGERVARISTTLPSLDEALHAVGRTPLPPYIKDYAGDEELYQTVYSRRESSAAAPTAGLHFTPELIERLRGQGVGWETVELEVGLDTFRIVDEDDPERHAIHTEFYTVGQRTADAVNEARERGGRVVAVGTTSVRSLESAWDAERGRLAPKEREATSLYILPGYEFRAVDALITNFHVPRSTLMMLVSAFSTRDNVMAAYAHAIAERYRLLSFGDAMLIR

SEQ ID NO: 67028 - protein, 359 aa, Gordonibacter sp.
  REGION 1..359: note = tr|A0A1Y4GI73|A0A1Y4GI73_9ACTN S-adenosylmethionine:tRNA ribosyltransferase-isomerase; OS = Gordonibacter sp. An232A OX=1965593 GN=queA PE=3 SV=1
MLTSDFDYDLPPELIAQEPAPDRDGCRLLVMDRATGALEDRVFRDIADYLRPGDVLVANETRVMPARLIGKKRGTGGAAEVFLLRQHGTPTQNRSALWEVLVRPGKRLKPGSGAVVDFADATGNTVLSAEVVDWARNAQKGERVARLSTTLPSLDEALHAVGRTPLPPYIKDYAGDEELYQTVYSRRESSAAAPTAGLHFTPELIDRLREKGVGWETVELEVGLDTFRIVDEDDPERHVIHTEFYTVPRRTADAVNEARERGGRVVAVGTTSVRSLESAWDAEACRLMPKDREATSLYILPGYEFHAVDALVTNFHVPRSTLMMLVSAFSTRDNIMAAYAHAVAERYRMLSFGDAMLIG

SEQ ID NO: 67029 - protein, 359 aa, unidentified
  source 1..359: note = Gordonibacter urolithinfaciens
  REGION 1..359: note = tr|A0A423UJN6|A0A423UJN6_9ACTN S-adenosylmethionine:tRNA ribosyltransferase-isomerase; OS = Gordonibacter urolithinfaciens OX=1335613 GN=queA PE=3; SV = 1
MKTSDFDYDLPEELIAQEPAAERDGCRLLVMDRVTGALEDRVFRDIAEYLRPGDLLVANETRVMPARLLGAKRGTGGAAEVFLLRQHGTPLDNKSALWEVLVRPGKRLKPGTGAIVDFTDAAGQVALSAEIVDWIADAQKGERLARLITPLPSLDEALHAVGHTPLPPYIKDYAGDEELYQTVYSRRESSAAAPTAGLHFTPELIERLHKQGVGWETVELEVGLDTFRIVDEDDPEKHVIHTERYSVPARTVDAIAATRERGGRVVAVGTTSVRSLESAWDAEAGIVTPREREATSLYLLPGSEFHVVDALVTNFHVPRSTLMMLVSAFSTREHIMAAYRHAIAERYRLLSFGDAMLIC

SEQ ID NO: 67030 - protein, 359 aa, unidentified
  source 1..359: note = Gordonibacter urolithinfaciens
  REGION 1..359: note = tr|A0A1Y4FUD3|A0A1Y4FUD3_9ACTN S-adenosylmethionine:tRNA ribosyltransferase-isomerase; OS = Gordonibacter urolithinfaciens OX=1335613 GN=queA PE=3; SV = 1
MKTSDFDYDLPEELIAQEPAAERDGCRLLVMDRVTGALEDRVFRDIAEYLRPGDLLVANETRVMPARLLGAKRGTGGAAEVFLLRQHGTPLDNKSALWEVLVRPGKRLKPGTGAIVDFTDAAGQVALSAEIVDWIADAQKGERLARLITPLPSLDEALHAVGHTPLPPYIKDYAGDEELYQTVYSRRESSAAAPTAGLHFTPELIERLHKQGVGWETVELEVGLDTFRIVDEDDPEKHVIHTERYSVPARTVDAIAATRERGGRVVAVGTTSVRSLESAWDAEAGAVTPREREATSLYLLPGSEFHVVDALVTNFHVPRSTLMMLVSAFSSRENIMTAYRHAIAERYRLLSFGDAMLIC

SEQ ID NO: 67031 - protein, 341 aa, unidentified
  source 1..341: note = Gottschalkia acidurici
  REGION 1..341: note = tr|K0AW07|K0AW07_GOTA9 S-adenosylmethionine:tRNA ribosyltransferase-isomerase OS=Gottschalkia acidurici (strain ATCC 7906 / DSM 604 / BCRC 14475 / CIP 104303 / NCIMB10678 / 9a) OX=1128398 GN=queA PE=3 SV=1
MNTHDFYFDLPEELIAQYPLKNREKSKLLFLEKKTGKIEHKIFEDIIDYLEKGDCIILNNTRVIPARLFGKREDTGANIEFLLLKRIEGDTWETLVKPGKKARIGTKVVFGNGELRGEIIDIAEDGTRIIKFIYEGIFQEILDILGEMPLPPYITQKLEDRERYQTVYSKKEGSAAAPTAGLHFTQELLDKIDAKGVNIGYVTLHVGLGTFRPVKVENIHDHSMHSEYFEIEESVAKLVNDTKKKGKKVIAVGTTSIRTLESSVDENSMVKSGSGWTDIFIYPGYEFKVVDRLITNFHLPESTLIMLVSALASRENTLRAYEEAVKLKYRFFSFGDAMFIY

SEQ ID NO: 67032 - protein, 341 aa, unidentified
  source 1..341: note = Gottschalkia purinilytica
  REGION 1..341: note = tr|A0A0L0WCQ1|A0A0L0WCQ1_GOTPU S-adenosylmethionine:tRNA ribosyltransferase-isomerase; OS = Gottschalkia purinilytica OX=1503 GN=queA PE=3 SV=1
MKKEDFYFELPEDLIAQYPLENREESRLLVLNKETGEINHKVFKEIIEYLEEGDCLVLNNTRVIPARIFGQRVDTGSSIEFLLLKRVEGDIWETLVKPGKKAKIGSEIIFGDGELKAKVLDILEGGTRVIEFYYDGIFQEILDRLGEMPLPPYITAKLEDKERYQTVYSKEEGSAAAPTAGLHFTKELIQEISKKGVKIAYVTLHVGLGTFRPVKSDNIEDHIMHSEYFEISEDAVELINSSKKNGKKVIAVGTTSVRTLESSVNEEGKLIPKSGWTDIFIYPGYEYKVIDRLITNFHLPESTLIMLVSALAGKENTMNAYEVAVKEKYRFFSFGDAMFII

SEQ ID NO: 67033 - protein, 341 aa, unidentified
  source 1..341: note = Gottschalkiaceae bacterium
  REGION 1..341: note = tr|A0A521J5C0|A0A521J5C0_9FIRM S-adenosylmethionine:tRNA ribosyltransferase-isomerase; OS = Gottschalkiaceae bacterium OX=2527676 GN=queA PE=3 SV=1
MKKEDFYFDLPEKLIAQTPIENREGSRLLILDKETGVIEHRFFSDIIQYLNPGDCLVLNNTRVIPARLYGHREDTKSSVEFLLLRRIDKDKWETLVKPGKKAKPGAIFNFGEGIMKGEILEIKDGGTRVIEFKYKGIFEEILDKLGEMPLPPYIKEKLEDRERYQTVYAKKEGSAAAPTAGLHFTESLLHKIKEKGVNIAYITLHVGLGTFRPVKVDNIEEHTMHSEFYEIDEYTANIINNTKEAGGRIVAVGTTSVRTIESASDEDGRLNSKQGWTNIFIHPGYRFKVVDRLITNFHLPESTLIMLVSALASRENVLQAYEEAVKQGYRFFSFGDAMFIK

SEQ ID NO: 67034 - protein, 43 aa, Gracilibacillus boraciitolerans
  REGION 1..43: note = tr|W4VN20|W4VN20_9BACI S-adenosylmethionine:tRNA ribosyltransferase-isomerase OS=Gracilibacillus boraciitolerans JCM 21714 OX=1298598 GN=JCM21714_3284 PE=3; SV = 1
MPKSTLIMLVSALADRDFILEAYHKAVEERYRFFSFGDAMLII

SEQ ID NO: 67035 - protein, 254 aa, Gracilibacillus boraciitolerans
  REGION 1..254: note = tr|W4VL81|W4VL81_9BACI S-adenosylmethionine:tRNA ribosyltransferase-isomerase OS=Gracilibacillus boraciitolerans JCM 21714 OX=1298598 GN=JCM21714_3285 PE=3; SV = 1
MEIEDFDFELPEELIAQTPLKDRASSRLMKLNRDKRTITHHHFYDIVDLLHAGDCLVLNDTKVLPARLYGIKEDTDAKVEILLLKQIENDDWEVLAKPAKKIQEGTQISFGNGKLTATCIEIKEHGGRILRFNYQGIFYEVLDQLGEMPLPPYIKEQLKEKDRYQTVYAKEQGSAAAPPTAGLHFTEELLEKLKQKGGIEIAFITLHVGIGTFRPVRVDNIQEHEMHAEFYQMTQKTADQLNAVKNRGEIVLYP

SEQ ID NO: 67036 - protein, 342 aa, Gracilibacillus dipsosauri
  REGION 1..342: note = tr|A0A317KY72|A0A317KY72_9BACI S-adenosylmethionine:tRNA ribosyltransferase-isomerase; OS = Gracilibacillus dipsosauri OX=178340 GN=queA PE=3 SV=1
MKIDDFDFELPEKLIAQTPLKDRSSSRLMVLNREMRTISHHHFYDVLDFLEKGDCLVLNDTKVLPARLFGTKKDTGAKVEVLLLTQMEQDDWEVLVKPARKIQIGTEISFGDGKLRAICVDTKEHGGRILRFRYQGIFYEVLDELGEMPLPPYIKEQLEEKDRYQTVFAREQGSAAAPTAGLHFTDELLEEIKQKGVEIAFITLHVGLGTFRPVSVEDVTTHEMHAEFYQMTSETAEQLNKVKKRGGRIISVGTTSTRTLETIARDTGGNFEERNGWTDIFIYPPYQFQAIDGLITNFHLPKSTLIMLVSALADREFILEAYNQAVKEKYRFFSFGDAMLII

SEQ ID NO: 67037 - protein, 342 aa, Gracilibacillus halophilus
  REGION 1..342: note = tr|N4WVK8|N4WVK8_9BACI S-adenosylmethionine:tRNA ribosyltransferase-isomerase OS=Gracilibacillus halophilus YIM-C55.5 OX=1308866 GN=queA PE=3 SV=1
MRIEDFDFDLPEELIAQTPLKDRSSSRLMVLHRQEQRVAHHHFYEMIDFLHPGDCLVLNDTKVLPARLYGIKEDTGAKVEVLLLNQIEHDDWEVLVKPAKKLKVGTKVTFGHGQLTATCVDTMEHGGRVLRFDYDGIFYEVLDALGEMPLPPYIKEQLDEADRYQTVYAKEKGSAAAPTAGLHFTEELLDKLKKKGIEIAFITLHVGLGTFRPVNVENITEHEMHAEFYQMTEETAETLNRVKAKGGRIISVGTTSTRTLETVARDTGGTFEARNGWTDIFIYPSYQFQAIDGLITNFHLPKSTLIMLVSALAGRDFILEAYQTAVKEKYRFFSFGDAMLIL

SEQ ID NO: 67038 - protein, 342 aa, Gracilibacillus kekensis
  REGION 1..342: note = tr|A0A1M7NYS3|A0A1M7NYS3_9BACI S-adenosylmethionine:tRNA ribosyltransferase-isomerase; OS = Gracilibacillus kekensis OX=1027249 GN=queA PE=3 SV=1
MEIEDFDFDLPEELIAQTPLQERASSRLMVLNRENRKISHHHFYDILDFLNEGDCLVLNDTKVLPARLYGIKEETGAKVEVLLLTQMENDDWEVLVKPAKKIKAGSKITFGDGQLIATCLEIKEHGGRILRFEYQGIFYEVLDQLGEMPLPPYIKEQLEEKDRYQTVYAKEQGSAAAPTAGLHFTETLLRKIKQKGIDIAFITLHVGLGTFRPVSVDNIKEHEMHAEFYQMTQETADQLNEVKKSGNRIISVGTTSTRTLETIARDTGGVFEERNGWTDIFIYPPYQFKAIDGLITNFHLPKSTLIMLVSALADRDFILEAYHKAVDERYRFFSFGDAMLII

SEQ ID NO: 67039 - protein, 342 aa, Gracilibacillus orientalis
  REGION 1..342: note = tr|A0A1I4MQ02|A0A1I4MQ02_9BACI S-adenosylmethionine:tRNA ribosyltransferase-isomerase; OS = Gracilibacillus orientalis OX=334253 GN=queA PE=3 SV=1
MEIEDFDFDLPEELIAQTPLEERASSRLMVLNRENRSITHHHFYDILDFLKSGDCLVLNNTEVLPARLYGVKEETGAKVEVLLLTQLEDDDWEVLVKPAKKITEGTKISFGEGKLTATCVDTKEHGGRVLRFHYDGIFYEVLDQLGEMPLPPYIKEQLDERNRYQTVYAKEKGSAAAPTAGLHFTEALLQQIREKGVEIAFITLHVGLGTFRPVSVDNIAEHEMHAEFYQMTKETADQLNQVKIRGDRIISVGTTSTRTVETIARDTGGKFEERNGWTDIFIYPPYQFKAIDGLITNFHLPKSTLIMLVSALADRDFILEAYNKAVTERYRFFSFGDAMLIM

SEQ ID NO: 67040 - protein, 342 aa, Gracilibacillus ureilyticus
  REGION 1..342: note = tr|A0A1H9RNG8|A0A1H9RNG8_9BACI S-adenosylmethionine:tRNA ribosyltransferase-isomerase; OS = Gracilibacillus ureilyticus OX=531814 GN=queA PE=3 SV=1
MRIEDFDFNLPEELIAQTPLKDRTSSRLMVLDKEKHTIRNHHFYEVIDFLNEGDCLVLNDTKVLPARLYGTKTDTGGKVEVLLLTQMENDDWEVLVKPAKRIKAGTEISFGDGKLTATCIDTKDHGGRILRFHYEGIFYEVLDELGEMPLPPYIKEQLNERDRYQTVYAKEEGSAAAPTAGLHFTEDLLEKIKQKGIEIAFITLHVGLGTFRPVSVEDVETHEMHAEFYQMTEETAAQLNAVKKRGGRIISVGTTSTRTLETIARDTGGTFAAKNGWTDIFIYPPYTFKAIDGLITNFHLPKSTLIMLVSALADRDFILEAYNKAVEEKYRFFSFGDAMLIL

SEQ ID NO: 67041 - protein, 345 aa, Gracilibacter sp.
  REGION 1..345: note = tr|A0A101W5E1|A0A101W5E1_9FIRM S-adenosylmethionine:tRNA ribosyltransferase-isomerase; OS = Gracilibacter sp. BRH_c7a OX=1734398 GN=queA PE=3 SV=1
MQLKDFDFYLPEELIAQVPIEPRDRSRMMLIDRAKGELFHYQFNQLDKLLKADDVLVLNKTKVIPARLFGNKKATGTQIEVLLLNRLEKDLWEVILRPGKRLKLGQKVVFGKGLLEGELISIKDNGNRLIKFEYEGLFEEVLDELGKMPLPPYIHIELEDKERYQTVYAKESGSAAAPTAGLHFTEDLLEKLRSKGVEILEITLHVGLGTFRPVKTENILEHEMHSEYFRLDPQTADRINLAKKEGRKVIAVGTTVVRTLESAATYSTKKEGELSALDGWTDIFIYPGYEFKIIDGLITNFHFPRSTLIMLVSAFANRELIMKAYETAVKERYRFFSFGDCMLIL

SEQ ID NO: 67042 - protein, 351 aa, unidentified
  source 1..351: note = Gracilimonas mengyeensis
  REGION 1..351: note = tr|A0A521FKE6|A0A521FKE6_9BACT S-adenosylmethionine:tRNA ribosyltransferase-isomerase; OS = Gracilimonas mengyeensis OX=1302730 GN=queA PE=3 SV=1
MKLTDFKFEIDDLNVPEEPLEKRDSAKLMVLNRAEKTIEHKTFSDIHEYVNEGDVVIYNNTKVFPARLKGKKEKTEADIEVFLLRELMPENMLWDVLVEPARKIRIGNKLYFGEEDDELMAEVVDNTTSRGRTIRFLYEGPNQELYDKLDELGMMPLPPYIEREPVEADKERYQTIFATERGAVAAPTAGMHFTPELVKKIEDKGAEFLPTTLHIGWGTFRNVEVEDLTKHRMDSENYFISKDTSDKINKALKSKKNKVIAIGTSAVRTIETSVMASGMSKPGTGWTDKFIYPPYEFKITEALITNFHRPESTLLMLGAAFAGYDFLMEAYEEAKEKDYRMFSFGDAMLII

SEQ ID NO: 67043 - protein, 333 aa, unidentified
  source 1..333: note = Gracilimonas mengyeensis
  REGION 1..333: note = tr|A0A521CDY1|A0A521CDY1_9BACT S-adenosylmethionine:tRNA ribosyltransferase-isomerase; OS = Gracilimonas mengyeensis OX=1302730 GN=queA PE=3 SV=1
MNFTLSDFDYDLPEKLIAQAPASPRDHARLLVYNRETGTITDDYFYNLGKYLPNETTLVVNNSKVEKCRLLFDDGKRELFVTSVRNNNTVEAMVRPGKKFKLDREVELAEGITAKVTNIADDGIRTVILSCDVDDPKLEPYKHTPFPPYIEQNESLSEEYQTVYAKDLGSKAAPTAGLHFTDNLLEDLKNAGVRKSEVTLHVGLGTFAPVKTEDISEHNMHSEWYQLGAFTCEELNEAKHITAVGTTSVRVLESAAKEPRGFQPESRDTDIFITPGYKFKATDALITNFHLPKSTLLMLVSAFMGYEEMNRLYQHAIEEEYRFYSFGDAMLIL

SEQ ID NO: 67044 - protein, 333 aa, Gracilimonas sp.
  REGION 1..333: note = tr|A0A316TSN5|A0A316TSN5_9BACT S-adenosylmethionine:tRNA ribosyltransferase-isomerase; OS = Gracilimonas sp. 8A47 OX=2079485 GN=queA PE=3 SV=1
MQFTLSDFDYHLPEELIAQKPAEPRDHSRLLVYNRSTEKITDDHFYNIGDHLPQETSLVVNNSRVEKCRLLFNKGRIEIFVIKAVDDRVVEAMVRPGKKFKKGKTVELPGGITASTIDIAEDGIRTLKLSHSIDHPLLEPYRHTPFPPYIERDESLAERYQTVYAKDEGSKAAPTAGLHFTPALLKTLSDRGIEKKEVTLHVGLGTFAPVKSEKIEEHIMHSEWYQVTAEQAEALNRSKSITAVGTTCVRVLESAPKKNGMFIASSGETDIFITPGYTFTSVDHLITNFHLPKSTLLMLIAAFTGFDEMQKIYEHAIREKYRFYSFGDAMLLL

SEQ ID NO: 67045 - protein, 348 aa, Gracilimonas sp.
  REGION 1..348: note = tr|A0A316TKZ3|A0A316TKZ3_9BACT S-adenosylmethionine:tRNA ribosyltransferase-isomerase; OS = Gracilimonas sp. 8A47 OX=2079485 GN=queA PE=3 SV=1
MKLTDFKFEIDHFNVPDEPAEPRDSSRLMVLDREDKSIKHEKFSDIHKYLNKGDVVVYNNTKVFPAKLKGKKEKTEADIEVFLLRELQPENMLWDVLVEPARKIRIGNKLYFGEDLMAEVVDNTTSRGRTIRFLYEGPNQDLYERLDEIGDMPLPPYIEREPKDSDKENYQTIFAKERGAVAAPTAGMHFTPELVEKLEKKGVDFVPVTLHIGWGTFRPVEVEDLTKHRMDSENYYISKESSDRINEALKSKKNKVVACGTSAVRVIETSVMASGMSKPGTGWTDKFIYPDYNFKITEAIITNFHRPESTLLMLAAAFGGFEYIKEAYKEAVKEDYRFFSFGDAMLIL

SEQ ID NO: 67046 - protein, 351 aa, unidentified
  source 1..351: note = Gramella flava
  REGION 1..351: note = tr|A0A1L7I6V2|A0A1L7I6V2_9FLAO S-adenosylmethionine:tRNA ribosyltransferase-isomerase; OS = Gramella flava JLT2011 OX=1229726 GN=queA PE=3 SV=1
MGMKLSHFNFELPKELLAEYPSEHRDEARLMVLNRKDQTIEHKKFKDIIDYFDPEDVMVLNNTKVFPARLYGNKEKTGARIEVFLLRELNPETKLWDVLVDPARKIRIGNKLYFGEDESLVAEVIDNTTSRGRTLRFLYDGSYSDFRKKLKELGQTPLPKYIKRDVEPEDEERYQTIYAKNEGAVAAPTAGLHFSKHLLKRLEIKGVDFAEVTLHVGLGTFSPVEVEDLSKHKMDSEEAFITKDATDVINKAKAEKRKVCAVGTTVMRVLESSVSSNQTLNEFSGWTNKFIFPPYDFNIANCMITNFHTPKSTLLMMISAFAGHDFMKKAYEEAVKEKYRFYTYGDAMLIL

SEQ ID NO: 67047 - protein, 351 aa, unidentified
  source 1..351: note = Gramella forsetii
  REGION 1..351: note = tr|A0LY93|A0LY93_GRAFK S-adenosylmethionine:tRNA ribosyltransferase-isomerase OS=Gramella forsetii (strain KT0803) OX=411154 GN=queA PE=3 SV=1
MGMKLSNFNFELPQELLAEYPSENRDEAKLMVLNRKEQTIEHKKFKDLIDYFEPEDVMVLNNTKVFPARLYGNKEKTGARIEVFLLRELNPETKLWDVLVDPARKIRIGNKLYFGEDESLVAEVIDNTTSRGRTLRFLYDGSYSDFRIKLKELGQTPLPKYIKRDVEPSDEDRYQTIYAKNEGAVAAPTAGLHFSKHLLKRLEIKGIDFAEVTLHVGLGTFSPVEVEDLSKHKMDSEEAFITKDATEVINNAKTEKRRVCAVGTTVMRVLESAVSSDQTLNEFGGWTNKFIFPPYDFNIANCMITNFHTPKSTLLMMVSAFAGHDFMKKAYEEAVKEKYRFYTYGDAMLII

SEQ ID NO: 67048 - protein, 351 aa, Gramella gaetbulicola
  REGION 1..351: note = tr|A0A2T6AKC1|A0A2T6AKC1_9FLAO S-adenosylmethionine:tRNA ribosyltransferase-isomerase; OS = Gramella gaetbulicola OX=703340 GN=queA PE=3 SV=1
MGMKLSNFNFELPKELLAEYPSENRDEARLMVLNRKEQTIEHKKFKDLIDYFEPEDVMVLNNTKVFPARLYGNKEKTGARIEVFLLRELNPETKLWDVLVDPARKIRIGNKLYFGEDESLVAEVIDNTTSRGRTLRFLYDGSYTDFRKKLKELGQTPLPKYIKREVEPEDEERYQTIYAKNEGAVAAPTAGLHFSKHLLKRLEIKGVDFAEVTLHVGLGTFSPVEVEDLSKHKMDSEEAYITKDATEVINKAKTERRRVCAVGTTVMRVLESAVSSDQTLNEFGGWTNKFIFPPYDFNIANCMITNFHTPKSTLLMMVSAFAGHDFMKKAYEEAVKEKYRFYTYGDAMLIL

SEQ ID NO: 67049 - protein, 349 aa, unidentified
  source 1..349: note = Gramella jeungdoensis
  REGION 1..349: note = tr|A0A4Y8ARJ4|A0A4Y8ARJ4_9FLAO S-adenosylmethionine:tRNA ribosyltransferase-isomerase; OS = Gramella jeungdoensis OX=708091 GN=queA PE=3 SV=1
MKLSHFKFELPEDLLAEYPAEHRDESRLMVLNRKEKTIEHKQFKDLINYFDEGDLMVLNNTKVFPARMYGEKEKTGARIEVFLLRELNAESRLWDVLVDPARKIRIGNKLFFGDDESLVAEVIDNTTSRGRTLRFLYDGSYEEFRKKLEELGETPLPKYIKREVNEDDEERYQTIYAKHEGAVAAPTAGLHFSKHLMKRLEIKGVDFAEVTLHVGLGTFSAVEVEDLSKHKMDSEQAIIPDETVEIVNNAIDTKRRVCAVGTTVMRAMESSVSSNNHLNSFNGWTNKFIFPPYDFSIANCMITNFHTPKSTLMMMAAAFAGYDFLMEAYEEAVKEGYKFYSYGDAMLII

SEQ ID NO: 67050 - protein, 349 aa, unidentified
  source 1..349: note = Gramella salexigens
  REGION 1..349: note = tr|A0A1L3J8G6|A0A1L3J8G6_9FLAO S-adenosylmethionine:tRNA ribosyltransferase-isomerase; OS = Gramella salexigens OX=1913577 GN=queA PE=3 SV=1
MKLSNFNFELPKELLAEYPSEHRDEARLMVLNRKEQTIEHKYFKDIIDYFEPEDVMVLNNTKVFPARLYGNKEKTGARIEVFLLRELNPETKLWDVLVDPARKIRIGNKLYFGEDESLVAEVIDNTTSRGRTLRFLYDGSYIDFRKKLKELGQTPLPKYIKRDVEPEDEERYQTIYAKNEGAVAAPTAGLHFSKHLLKRLEIKGIDFAEVTLHVGLGTFSPVEVEDLSKHKMDSEEAFIKKDATEVINKAKLEKRKVCAVGTTVMRVLESAVSSNQTLNEFGGWTNKFIFPPYDFNIANCMITNFHTPKSTLLMMVSAFAGHDFMKKAYEEAVKEKYRFYTYGDAMLIL

SEQ ID NO: 67051 - protein, 349 aa, Gramella sp.
  REGION 1..349: note = tr|A0A2D8KQJ3|A0A2D8KQJ3_9FLAO S-adenosylmethionine:tRNA ribosyltransferase-isomerase; OS = Gramella sp. OX=1931228 GN=queA PE=3 SV=1
MKLSHFNFELPKELLAEYPSEHRDEARLMVLNRKDQTIEHKKFKDIIDYFDPEDVMVLNNTKVFPARLYGNKEKTGARIEVFLLRELNPETKLWDVLVDPARKIRIGNKLYFGEDESLVAEVIDNTTSRGRTLRFLYDGSYSDFRKKLKELGQTPLPKYIKRDVEPEDEERYQTIYAKNEGAVAAPTAGLHFSKHLLKRLEIKGVDFAEVTLHVGLGTFSPVEVEDLSKHKMDSEEAFITKDATDVINKAKAEKRKVCAVGTTVMRVLESSVSSNQTLNEFSGWTNKFIFPPYDFNIANCMITNFHTPKSTLLMMISAFAGHDFMKKAYEEAVKEKYRFYTYGDAMLIL

SEQ ID NO: 67052 - protein, 349 aa, Gramella sp.
  REGION 1..349: note = tr|A0A2R3ZB09|A0A2R3ZB09_9FLAO S-adenosylmethionine:tRNA ribosyltransferase-isomerase; OS = Gramella sp. SH35 OX=2126553 GN=queA PE=3 SV=1
MKLSNFNFELPKELLAEYPTENRDEARLMVLNRKEQTIEHKKFKDLIDYFEPEDVMVLNNTKVFPARLFGNKEKTGARIEVFLLRELNPETKLWDVLVDPARKIRIGNKLYFGEDESLVAEVIDNTTSRGRTLRFLYDGSYSDFRRKLKELGQTPLPKYIKRDVEPEDEERYQTIYAKNEGAVAAPTAGLHFSKHLLKRLEIKGVDFAEVTLHVGLGTFSPVEVEDLSKHKMDSEEAFITKDATDIINKAKSERRKVCAVGTTVMRVLESSVSSNQTLNEFAGWTNKFIFPPYDFNIANCMVTNFHTPKSTLLMMVSAFAGHDFVKKAYAEAVKEKYRFYTYGDAMLIL

SEQ ID NO: 67053 - protein, 351 aa, Granulibacter bethesdensis
  REGION 1..351: note = tr|A0A1L3RV69|A0A1L3RV69_9PROT S-adenosylmethionine:tRNA ribosyltransferase-isomerase; OS = Granulibacter bethesdensis OX=364410 GN=queA PE=3 SV=1
MSTAPLDIADFTFDLPPERIAHEPARPRESARLLHVPAGEEGFHDHHIRDLPDLLSPGDVLVANDTRVIPAQLTAWRGQARIGLTLNRPLPDGSWHVLARNARRLRAGDRLRFTEEDTQPTGMLAAEVVARDEDGGAILRFVAEDFDAALAQYGALALPPYIDRPQGPTDQDARDYQTVFARHRGAVAAPTAGLHFTPALLDRLEAKGIERVTITLHVGAGTFLPMRDDTIEAHRLHAERGVITPEAASRINAAKRIVAVGTTSLRLLESAADATGGVRPFDAETDIFIKPGHRFRTAHALLTNFHLPRSTLFMLVCAFAGTARMRAAYAHAIAEAYRFYSYGDACLIERG

SEQ ID NO: 67054 - protein, 361 aa, Granulibacter bethesdensis
  REGION 1..361: note = tr|Q0BVG5|Q0BVG5_GRABC S-adenosylmethionine:tRNA ribosyltransferase-isomerase OS=Granulibacter bethesdensis (strain ATCC BAA-1260 / CGDNIH1) OX=391165 GN=queA PE=3 S; V = 1
MSTAPLDIADFTFDLPPERIAHEPARPRESARLLHVPAGEEGVHDHHIRDLPDLLRPGDVLVANDTRVIPAQLTAWRGQARIGLTLNRPLPDGSWHVLARNARRLRAGDRLRFTEHDTQSTHTQPTGMLAAEVVARDEDGGAILRFVAEDFDAALAQYGALALPPYIDRPQGPTAQDAKDYQTVFARHRGAVAAPTAGLHFTPALLDRLAAKGIERVTITLHVGAGTFLPMRDDTIEAHRLHAERGVITPEAASRINAAKRVIAVGTTSLRLLESAADAAGGVRPFDAETDIFIKPGHRFRTAHALLTNFHLPRSTLFMLVCAFAGTARMRAAYAYAIAEAYRFYSYGDACLIERDLRDRH

SEQ ID NO: 67055 - protein, 345 aa, Granulicatella adiacens
  REGION 1..345: note = tr|C8NF57|C8NF57_9LACT S-adenosylmethionine:tRNA ribosyltransferase-isomerase OS=Granulicatella adiacens ATCC 49175 OX=638301 GN=queA PE=3 SV=1
MNYTTKDFDFDLPEELIAQTPLKDRTSSRLLMVDKTKHTIEDRHFSDLLEELEAGDTLVVNNTRVLPARLYGTKEETGAHIEVLLLTNTEGDKWETLVKPAKRMKVGSVVSFGDGRLKATVIEELEQGGRIIEFSYEGVFLEVLESLGEMPLPPYIKERLEDKERYQTVYAKENGSAAAPTAGLHFTEELMQQIRDKGVNIVPVTLHVGLGTFRPVSVDSLEDHKMHSEYYNVSKETADMIEATKKAGKRVIAVGTTSIRTLETVARDNDGHVVPASGWTDIFISPGYEFGVVDAFVTNFHLPKSTLVMLVSAYLGREFTLEAYQHAIEERYRFFSFGDAMFVHK

SEQ ID NO: 67056 - protein, 346 aa, Granulicatella balaenopterae
  REGION 1..346: note = tr|A0A1H9MQD2|A0A1H9MQD2_9LACT S-adenosylmethionine:tRNA ribosyltransferase-isomerase; OS = Granulicatella balaenopterae OX=137733 GN=queA PE=3 SV=1
MGFTTNDFDFNLPEELIAQTPLKNRASSKLLTVDAITNKMEDKHFSEIIGELNAGDTLVINNTRVLPARLHGVKEETGAHCEVLLLTNTEGDTWETLVKPAKRFKVGTKITFGDGRLTATVLETLEQGGRMIEFSYDGVFLEIIESLGEMPLPPYIKEKLEDQDRYQTVYAKENGSAAAPTAGLHFTNEVLDELKAKGVNVVPVTLHVGLGTFRPVSVDNLEDHKMHSEYYQISPETAEIVNKTKEAGGRVIAVGTTSIRTLETVAKANNGRLVATSGWTDIFISPGYEFALVDAFVTNFHLPKSTLVMLVSAYLGRENTLACYQHAIDEKYRFFSFGDAMFVYRS

SEQ ID NO: 67057 - protein, 345 aa, Granulicatella elegans
  REGION 1..345: note = tr|D0BJU6|D0BJU6_9LACT S-adenosylmethionine:tRNA ribosyltransferase-isomerase OS=Granulicatella elegans ATCC 700633 OX=626369 GN=queA PE=3 SV=1
MNYTTQDFDFDLPEEQIAQTPLKDRTSSRLLVVNETEHSVEDKHFSEIIDYLEEGDILVVNNTRVLPARLYGEKEGTGAHIEVLLLHNTHGDCWETLVKPAKRMKVGTVVSFGDGRLKATVTEELEQGGRIIEFQYDGVFLEILESLGEMPLPPYIKERLDDQERYQTVYAKENGSAAAPTAGLHFTKELMEKIQQKGIQIVPITLHVGLGTFRPVSVDHLEDHKMHSEYYHISKETAEVIAETKKNGKRVIAVGTTSIRTLETVGSANQGEIVPSSGWTDIFISPGYEFKVVDAFITNFHLPKSTLVMLVSAYLGRDFTLEAYHHAIRERYRFFSFGDAMFVYR

SEQ ID NO: 67058 - protein, 345 aa, Granulicatella sp.
  REGION 1..345: note = tr|A0A1F1SG80|A0A1F1SG80_9LACT S-adenosylmethionine:tRNA ribosyltransferase-isomerase; OS = Granulicatella sp. HMSC31F03 OX=1581074 GN=queA PE=3; SV = 1
MNYTTKDFDFDLPEELIAQTPLKDRTSSRLLVVDKTTHSIEDKHFSDLLDELEEGDTLVVNNTRVLPARLYGTKEETGAHIEALLLTNTEGDKWETLVKPAKRMKVGSVVSFGDGRLKATVVEELEQGGRIIEFSYEGVFLEVLESLGEMPLPPYIKERLEDKERYQTVYAKENGSAAAPTAGLHFTEELMQKIREKGVNIVPVTLHVGLGTFRPVSVDSLEDHKMHSEYYNVSKETADMIEATKKAGKRVIAVGTTSIRTLETVARDNDGHVVPASGWTDIFISPGYEFRVVDAFVTNFHLPKSTLVMLVSAYLGREFTLEAYQHAIEERYRFFSFGDAMFVHK

SEQ ID NO: 67059 - protein, 342 aa, Granulicatella sp.
  REGION 1..342: note = tr|A0A4Y9J4R4|A0A4Y9J4R4_9LACT S-adenosylmethionine:tRNA ribosyltransferase-isomerase; OS = Granulicatella sp. WM01 OX=2558277 GN=queA PE=3 SV=1
MLTTKDFDFDLPEQLIAQTPLKERSQSKLLVLNKKNGHYKDEIFVDVIHHLHKGDVLVLNDTKVLPARLMGTKVETGANIECLLLTNNKDDEWEVLIKPAKRAKVGTEITFGDGRLKATVIGEKEHGGRIVQFTYQGIFLEVLDSLGEMPLPPYIKEKLEDKERYQTVYAKQVGSAAAPTAGLHFTPELLQNIQEKGVHIAYVTLHVGLGTFRPVSSEVLDEHQMHAEFYQLTEENAQIIQQAKQSGGRIIAVGTTSIRTLETIMNTHHNIIASSGWTDIFIFPGYTFKAVDAFITNFHLPKSTLVMLVSAFAGREHVLQAYEHAIKNHYRFFSFGDAMIVE

SEQ ID NO: 67060 - protein, 373 aa, unidentified
  source 1..373: note = Granulicella mallensis
  REGION 1..373: note = tr|G8NV90|G8NV90_GRAMM S-adenosylmethionine:tRNA ribosyltransferase-isomerase OS=Granulicella mallensis (strain ATCC BAA-1857 / DSM 23137 / MP5ACTX8) OX=682795; GN = qu eA PE=3 SV=1
MLVSDFHYDLPEELIAQRPPAVRGTSRMMTLDRRTGDFSDHTFAELPLLLQPGDLLVMNDSRVIPARLFATRAGLTTQHNSPAPSGHIEVLLTQRHASAEGYNDWSALVRPAKKIQPGETLLFAPDDSTAPLLRATVLSAGEFGERTLRFDPAEDFHAALERIGHLPLPPYIHRSKQEPNTSEDRERYQTVYSQQLTSAEAEGSAAAPTAGLHFTPEVLSQLKERGVEFATLTLHVGLGTFQPVRVERTEDIRLHAEHYTLSTTTAEAIQRARREGRRIVAVGTTTTRTLEHIARETNGSEIAAHSGSTALFLSPGVEFKLVGGLLTNFHLPQSTLLMLVSAFAGREQALAAYAHAVEARYRFFSYGDCMLIT

SEQ ID NO: 67061 - protein, 360 aa, Granulicella pectinivorans
  REGION 1..360: note = tr|A0A1I6N1E4|A0A1I6N1E4_9BACT S-adenosylmethionine:tRNA ribosyltransferase-isomerase; OS = Granulicella pectinivorans OX=474950 GN=queA PE=3 SV=1
MLTADFDFHLPESLIAQTPPPVRGSSRMLVVDRATGAYTDGRFTDLPEHLGEGDLLILNDSRVLPARLFGTRARSTTTQASSPDPSGRVEVLLTQQVAPGTWTTLVRPAKKVQVGEKLLFHEGAAVVLEAVVLGAGEYGERTLRFSATDEFEAILQRIGHMPLPPYIHRDKGTPDSEEDRARYQTVYANQTGSAAAPTAGLHFTPEVLEALTRKGVQIERVTLHVGLGTFQPVRAERVVDIRLHAERYTLPAATAEAINVARREGRRIIAAGTTTTRTLEHCATLGAELYPHSGETSIFLSPGHRFQVVSGLLTNFHLPQSTLLMLVCAFAGTEHVLAAYAHAVEAKYRFFSYGDCMLLL

SEQ ID NO: 67062 - protein, 360 aa, Granulicella rosea
  REGION 1..360: note = tr|A0A239L5D7|A0A239L5D7_9BACT S-adenosylmethionine:tRNA ribosyltransferase-isomerase; OS = Granulicella rosea OX=474952 GN=queA PE=3 SV=1
MLVSDFNYELPEELIAQAPPAVRGASRMLAMDRRTGAVTDDRFVNLPEYLRAGDLLVLNDSRVLPARLYATRGGLRTQVKSPEPSGRIEVLLTQQLGPELWTALVRPGKKVQPGETLSFADPAGAPVLTAEVVAAGEFGERTLRFAPDPRFLQILDRIGHMPLPPYIHRDKDAPDTDEDKARYQTVYAHQPGSAAAPTAGLHFTPEILAAIRERGVQVETVTLHVGLGTFQPVRAERLEDIRLHTEHYTLPAATASAINLARADGRRIIAAGTTTTRTLEHCATLGAELAPHSGQTSIFIQPGHEFRVVSGLLTNFHLPQSTLVMLVSAFAGREAVLAAYAHAVAQRYRFFSYGDCMLLL

SEQ ID NO: 67063 - protein, 362 aa, unidentified
  source 1..362: note = Granulicella sibirica
  REGION 1..362: note = tr|A0A4Q0SYY2|A0A4Q0SYY2_9BACT S-adenosylmethionine:tRNA ribosyltransferase-isomerase; OS = Granulicella sibirica OX=2479048 GN=queA PE=3 SV=1
MLTSDFQFQLPERLIAQTPPAIRGTSRMLALDRRSGAYEDTSFSDLPNRLQPGDLLVLNDSRVLPARLFATRARSRMTQATSPDPSGRIEVLLTQKVADDQVWMALVKPARKVVPGETLHFADPDGATALEAEVIAAGEYGERTLRFSAKEDFLETIMRIGHMPLPPYIHRDRDTPDTAEDKDRYQTVYSHEIGSAAAPTAGLHFTPEVLEALRAKGVEIAYLTLHVGLGTFQPVRAEKVEDIRLHAERYTLSEATAEAVNRARRGGRRIIAAGTTTTRTLEHCATLAPELFPHTGETSIFISPGHTFQIIQGLLTNFHLPQSTLLMLVSAFAGRKAVLAAYAHAVEAQYRFFSYGDCMLIL

SEQ ID NO: 67064 - protein, 369 aa, Granulicella sp.
  REGION 1..369: note = tr|A0A3N1JZE4|A0A3N1JZE4_9BACT S-adenosylmethionine:tRNA ribosyltransferase-isomerase; OS = Granulicella sp. GAS466 OX=2485170 GN=queA PE=3 SV=1
MRVSDFHFDLPEELIAQTPPATRGSSRMLFLDKKTGATSDVLFADLPHYLQDGDLLILNNSRVIPARLYATRAGLHTQSSSPDPSGQIEVLLTQQISPDEWTALVRPSRKVVVGERLLFAAPDNPTPLLQAEIITTGDFGERTLKFQPAPEFFSILNKIGHMPLPPYIHREDTPEDRDRYQTVFAHHPGSAAAPTAGLHFTEEMLATLKTKGIQIETVTLHVGLGTFQPVRVENLDDVRLHEEHYIIPEATADAIESAYKSKRRIIAVGTTAARTLEGAVLKHCEDPNARPFEGKLFSQAREGTTNIFISPGHKFALVNGLLTNFHLPQSTLLMLVSAFAGREAVLAAYAHAVCERYRFFSYGDCMLIL

SEQ ID NO: 67065 - protein, 368 aa, unidentified
  source 1..368: note = Granulicella tundricola
  REGION 1..368: note = tr|E8X0D6|E8X0D6_GRATM S-adenosylmethionine:tRNA ribosyltransferase-isomerase OS=Granulicella tundricola (strain ATCC BAA-1859 / DSM 23138 / MP5ACTX9) OX=1198114; GN = queA PE=3 SV=1
MLVSDFDYELPEELIAQTPPETRGASRMLRMDRASGALVDDSFASLPECLKAGDLLILNDTRVIPARLFGVRAGLHTQHNSPAPTGRIEVLLTSQISADDEGSTWETLVRPARKVQPGETLHFYDAERPSAPALTAEVLAAGEFGERTLRLIPADPQEPLTAILERIGHLPLPPYIYRPDEAPNTTADRERYQTVFAQPAGSAAAPTAGLHFTPEILAALKARGVEVQTLTLHVGLGTFQPVRAERTEDIRLHAEPYTLPAATAEAIQRAQAEGRRIVAVGTTVTRTLEHCAAIGNLAPHSGTTSLFLSPGHEFRVVGGLLTNFHLPQSTLVMLVSAFAGREATLAAYAHAVRERYRFFSYGDCMLIV

SEQ ID NO: 67066 - protein, 393 aa, Granulosicoccus antarcticus
  REGION 1..393: note = tr|A0A2Z2NZ48|A0A2Z2NZ48_9GAMM S-adenosylmethionine:tRNA ribosyltransferase-isomerase; OS = Granulosicoccus antarcticus IMCC3135 OX=1192854 GN=queA; PE = 3 SV=1
MDKADIAQNSRLIERADTQSATPDLEAFRLSDFFYDLPDELIAQAPLAARSDSRLMVVDGRVGKASDTENSESQAVQHLSVRDLPRLLKKGDHLVFNNTRVIPARLYGAKASGGKLEMMLERVTSRGSVLAKIRASKSPKPGSIIVLSGRDTQSADCPHCEARVVGRQDDLFELEAVDNSNDVLTRFIEAQGEIPLPPYIERAPDAADDERYQTVFAKSPGAVAAPTAGLHFDEDLLQALSAAGITHSFITLHVGAGTFQPVRVENPAEHVMHAERVTVDAATVAEIQAAKARGGRIVAVGTTSVRALEAAAAETGVLAPFNGETRLFLVPGAKFYVVDAMVTNFHLPESTLLMLVASFTGLDTIMQAYRMAVLERYRFFSYGDAMLVWPKIS

SEQ ID NO: 67067 - protein, 356 aa, unidentified
  source 1..356: note = Grimontella sp.
  REGION 1..356: note = tr|A0A318GBY7|A0A318GBY7_9GAMM S-adenosylmethionine:tRNA ribosyltransferase-isomerase; OS = Grimontella sp. AG753 OX=2183905 GN=queA PE=3 SV=1
MRVADFSFELPESLIAHYPQPERSSCRLLSLDGPTGALAHGTFTDLLDKLNPGDLLVFNNTRVIPARLFGRKASGGKIEVLVERMLDDKRILAHIRASKAPKPGAELLLGDDESINATMVARHDALFEVEFNDERPVLDILNAIGHMPLPPYIDRPDEDADRELYQTVYSQKPGAVAAPTAGLHFDEPLLARLREKGIEMAFVTLHVGAGTFQPVRVDSIEDHIMHSEYAEVPQEVVDAVLAAKARGNRVIAVGTTSVRSLESAAQAAKNALIEPFFGDTQIFIFPGYQYQVIDALVTNFHLPESTLIMLVSAFAGYKHTMHAYQEAVAHKYRFFSYGDAMFITYNPQAINERPGE

SEQ ID NO: 67068 - protein, 351 aa, unidentified
  source 1..351: note = Grimontia celer
  REGION 1..351: note = tr|A0A128ESQ8|A0A128ESQ8_9GAMM S-adenosylmethionine:tRNA ribosyltransferase-isomerase; OS = Grimontia celer OX=1796497 GN=queA PE=3 SV=1
MQVSDFHFDLPDSLIARYPQADRTASRLLQLNGNTGELSHKQFTDILDLVEPGDLMVFNNTRVIPARVYGRKASGGKIEVLVERMLDEKSILAHVRASKPPKPGTQLFLGENDEFEAEMVARHDALFEIHFSGEQAVLDILNQVGHMPLPPYIDRPDEESDKERYQTVYNEKPGAVAAPTAGLHFDENILAALKEKGVETAFVTLHVGAGTFQPVRVDDINDHVMHSEYAEVPQEVVDAVLATKARGNRVIAVGTTSVRSLESAAQHSKNESTELKPFFNDTQIFIYPGYEWQLVDALVTNFHLPESTLIMLVSSFAGYEHVMNAYQEAVNNEYRFFSYGDAMFVTRQTEV

SEQ ID NO: 67069 - protein, 351 aa, Grimontia hollisae
  REGION 1..351: note = tr|A0A377HQ20|A0A377HQ20_GRIHO S-adenosylmethionine:tRNA ribosyltransferase-isomerase; OS = Grimontia hollisae OX=673 GN=queA PE=3 SV=1
MQVSDFHFDLPDSLIARYPQPDRTASRLLQLNGNTGELSHRQFTDILDLVEPGDLMVFNNTRVIPARVYGRKASGGKIEVLVERMLDEKTILAHVRSSKSPKPGTQLFLGENDEFEAEMVARHDALFEIRFAGEQAVLDILNQVGHMPLPPYIDRPDEDSDKERYQTVYNEKPGAVAAPTAGLHFDENILAALKEKGVQTAFVTLHVGAGTFQPVRVENINDHVMHAEYAEVPQEVVDAVLATKARGNRVIAVGTTSVRSLESAAQHAKKEGTELQPFFDDTQIFIYPGYEWQLVDALVTNFHLPESTLIMLVSSFAGYDHVMNAYKEAVSNEYRFFSYGDAMFVTRQTEV

SEQ ID NO: 67070 - protein, 351 aa, Grimontia hollisae
  REGION 1..351: note = tr|D0I7R6|D0I7R6_GRIHO S-adenosylmethionine:tRNA ribosyltransferase-isomerase OS=Grimontia hollisae CIP 101886 OX=675812 GN=queA PE=3 SV=1
MQVSDFHFDLPDSLIARYPQPDRTASRLLQLNGNTGELSHRQFTDILDLVEPGDLMVFNNTRVIPARVYGRKASGGKIEVLVERMLDEKTILAHVRSSKSPKPGTQLFLGENDEFEAEMVARHDALFEIRFVGEQAVLDILNQVGHMPLPPYIDRPDEDSDKERYQTVYNEKPGAVAAPTAGLHFDENILAALKEKGVQTAFVTLHVGAGTFQPVRVENINDHVMHAEYAEVPQEVVDAVLATKARGNRVIAVGTTSVRSLESAAQHAKKEGTELQPFFDDTQIFIYPGYEWQLVDALVTNFHLPESTLIMLVSSFAGYDHVMNAYKEAVSNEYRFFSYGDAMFVTRQSEV

SEQ ID NO: 67071 - protein, 351 aa, unidentified
  source 1..351: note = Grimontia indica
  REGION 1..351: note = tr|R1GXF4|R1GXF4_9GAMM S-adenosylmethionine:tRNA ribosyltransferase-isomerase OS=Grimontia indica; OX = 1056512 GN=queA PE=3 SV=1
MQVSDFHFDLPDSLIARYPQPDRTASRLLQLNGNSGELSHKQFTDILDLVEPGDLMVFNNTRVIPARVYGRKASGGKIEVLVERMLDEKSILAHVRASKPPKPGTQLFLGENDEFEAEMVARYDALFEIHFSGEQAVLDILNQVGHMPLPPYIDRPDEESDKERYQTVYNEKPGAVAAPTAGLHFDEKILAALKEKGVDTAFVTLHVGAGTFQPVRVDDINDHVMHSEYAEVPQEVVDAVLATKARGNRVIAVGTTSVRSLESAAQHSKNEGTELKPFFNDTQIFIYPGYEWQLVDALVTNFHLPESTLIMLVSSFAGYDHVMNAYQEAVNNEYRFFSYGDAMFVTRQTEV

SEQ ID NO: 67072 - protein, 351 aa, unidentified
  source 1..351: note = Grimontia marina
  REGION 1..351: note = tr|A0A128F406|A0A128F406_9GAMM S-adenosylmethionine:tRNA ribosyltransferase-isomerase; OS = Grimontia marina OX=646534 GN=queA PE=3 SV=1
MQVSDFHFDLPDSLIARYPQADRTASRLLQLNGNTGELSHKQFTDILDLVEPGDLMVFNNTRVIPARVFGRKASGGKIEVLVERMLDEKSILAHVRASKPPKPGTQLFLGENDEFEAEMVARHDALFEIHFSGEQAVLDILNQVGHMPLPPYIDRPDEESDKERYQTVYNEKPGAVAAPTAGLHFDENILAALKEKGVETVFVTLHVGAGTFQPVRVDDINDHVMHSEYAEVPQEVVDAVLATKARGNRVIAVGTTSVRSLESAAQHSKNEGTDLEPFFNDTQIFIYPGYEWQLVDALVTNFHLPESTLIMLVSSFAGYEHVMNAYKEAVNNEYRFFSYGDAMFVTRQTEV

SEQ ID NO: 67073 - protein, 351 aa, Grimontia sp.
  REGION 1..351: note = tr|A0A0F6A442|A0A0F6A442_9GAMM S-adenosylmethionine:tRNA ribosyltransferase-isomerase; OS = Grimontia sp. AD028 OX=1581149 GN=queA PE=3 SV=1
MQVSDFHFDLPDSLIARYPQPDRTASRLLQLNGNTGELSHKQFTDILDLVEPGDLMVFNNTRVIPARVYGRKASGGKIEVLVERMLDEKSILAHVRASKPPKPGTQLFLGENDEFEAEMVARHDALFEIHFSGEQAVLDILNQVGHMPLPPYIDRPDEESDKERYQTVYNEKPGAVAAPTAGLHFDESILAALKEKGVETAFVTLHVGAGTFQPVRVDDINDHVMHSEYAEVPQEVVDAVLATKARGNRVIAVGTTSVRSLESAAQHSKNEGTELKPFFNDTQIFIYPGYEWRLVDALVTNFHLPESTLIMLVSSFAGYDHVMNAYKEAVNNEYRFFSYGDAMFVTRQTEV

SEQ ID NO: 67074 - protein, 340 aa, Gulbenkiania indica
  REGION 1..340: note = tr|A0A0K6H324|A0A0K6H324_9NEIS S-adenosylmethionine:tRNA ribosyltransferase-isomerase; OS = Gulbenkiania indica OX=375574 GN=queA PE=3 SV=1
MQLSDFDYHLPEALIAQHPPAERGRSRLMHVQGSRHTDLMFSDFDVLVEPGDVLVFNDTRVIKARLFGEKVSGGKVEALVERVLDEHTALAHVRASKSPKPGTRLVFAGRWEAEMVERQGELFKLRFLCETGVFDILEASGKLPLPPYIERGADEDDDERYQTVYARERGAVAAPTAGLHFSEAMLARLAEKGVHLAYVTLHVGAGTFQPVRVENIEEHRMHSEVYEIPQATVEAVREAHAAGRRVLSVGTTSMRALESAAHTGELVAGRGETDIFITPGYRFRVVDRLLTNFHLPKSTLLMLVSAFAGYEEMRAAYAHAVEAEYRFFSYGDAMLLERKD

SEQ ID NO: 67075 - protein, 359 aa, unidentified
  source 1..359: note = Guyparkeria sp.
  REGION 1..359: note = tr|A0A426QP22|A0A426QP22_9GAMM S-adenosylmethionine:tRNA ribosyltransferase-isomerase; OS = Guyparkeria sp. SCN-R1 OX=2341113 GN=queA PE=3 SV=1
MKLDAFDYHLPPERIAARPAEPRESARLLVLPAVGEFDHRQIGDLPDLIAPGDLLILNDTRVIPARAFGRKVSGGKVEFLLERLLDSDRALCHLRSSRSPRVGVELIMEGGARLEVIGRDGALFEVKLLASAPMNGMLSWLDQHGHMPLPTYIERPDDDQDRHDYQTVFARREGAVAAPTAGLHLTEALLERLRAQGVETAFVTLHVGAGTFQPVRSETIEAHEMHREWTEVPQATVEAVAAARRRGNRVIAIGTTAVRAIETAVRAHPEHAARGEIGPFVGDTQLFLYPGQPLHVIDAMLTNFHLPRSTLLMLVSAFAGRERVLGAYHEAIERGYRFYSFGDAMFIETSADVGGAQTA

SEQ ID NO: 67076 - protein, 354 aa, unidentified
  source 1..354: note = Gynuella sunshinyii
  REGION 1..354: note = tr|A0A0C5VRV2|A0A0C5VRV2_9GAMM S-adenosylmethionine:tRNA ribosyltransferase-isomerase; OS = Gynuella sunshinyii YC6258 OX=1445510 GN=queA PE=3 SV=1
MSASLLSVKDFDFDLPDHLIARYPLSERSASRLLTLEGETGALAHRRFTDIVSLLNANDLLVFNNTRVIPARLYGQKSSGGKVEMLFERLLTQTRCLAHVRSSRAPKAGQHLIFDGGIEVEVTGRQHNLFELELLNGAQHWFEALEGNGRMPLPPYMEREDDESDKSRYQTVYAEKKGAVAAPTAGLHFDEALLQAIADKGVRIAFVTLHVGAGTFMPVKVDKVEDHVMHSEWYDIPEDTVAAIQQTRERGGRVVAVGTTSVRSLESAARGQDGWICRGDTSIFIYPGYQFQVVDAMVTNFHLPQSTLIMLVSAFAGREAVMQAYHEAIAQEYRFFSYGDAMFITRNQSVAEKD

SEQ ID NO: 67077 - protein, 347 aa, unidentified
  source 1..347: note = Haematobacter genomosp.
  REGION 1..347: note = tr|A0A212AD20|A0A212AD20_9RHOB S-adenosylmethionine:tRNA ribosyltransferase-isomerase; OS = Haematobacter genomosp. 1 OX=366618 GN=queA PE=3 SV=1
MTLRLSDFDFDLPDDLIATRPVRPRSAARLLVAEGDRISDRRVSDLVTLLRPGDRLVLNDTKVIPARLSGLRIRGEVSARVEVTLLEATASGGWRVLARPLRKLKPGDILIFSDRLSGEVRERNEADAVIAFNLTGGDFDTALAEAGSMPLPPYIAAKRPADEQDKEDYQTVFARRSGAVAAPTASLHFDEPLLAALAERGVAFSHVTLHVGAGTFLPVKVEDVTTHRMHAEWGEVTARAAEEIAATRLAGGRVIPVGTTALRLIESASRGGEIAPWDGETDIFIYPGFRFHATDGLITNFHLPKSTLLMLVSALMGMDRMRRVYAHAVTERYRFFSYGDASLLLPQ

SEQ ID NO: 67078 - protein, 347 aa, Haematobacter massiliensis
  REGION 1..347: note = tr|A0A086Y068|A0A086Y068_9RHOB S-adenosylmethionine:tRNA ribosyltransferase-isomerase; OS = Haematobacter massiliensis OX=195105 GN=queA PE=3 SV=1
MTLRLSDFDFDLPDDLIATRPVRPRSAARLLVAESDRISDRRVSDLVTLLRPGDRLVLNDTRVIPARLSGLRIRGEVAARVEVTLLEATASNGWRVLARPLRKLKPGDIIAFSDRLSAEVQERNEADAVIAFNLTGGDFDTALAEAGAMPLPPYIAAKRPADEQDKEDYQTVFARRSGAVAAPTASLHFDEPLLAALAERGVAFSHVTLHVGAGTFLPVKVEDVTTHRMHAEWGEVTLRAAEEIASTRADGGRVIPVGTTALRLIESASRGGEIAPWEGETDIFIYPGFRFHATDGLMTNFHLPKSTLLMLVSALMGMDRMRRVYAHAVAERYRFFSYGDASLLLPE

SEQ ID NO: 67079 - protein, 347 aa, Haematobacter missouriensis
  REGION 1..347: note = tr|A0A212AY81|A0A212AY81_9RHOB S-adenosylmethionine:tRNA ribosyltransferase-isomerase; OS = Haematobacter missouriensis OX=366616 GN=queA PE=3 SV=1
MTLRLSDFDFNLPDDLIATRPVRPRSAARLLVAEGDRISDRRVSDLVTLLRPGDRLVLNDTKVIPARLSGLRTRGEVSARVEVTLLEATASGGWRVLARPLRKLKPGDILIFSDRLSAEVRERNEADAVIAFNLTGGDFDTALAEAGSMPLPPYIAAKRPADEQDKEDYQTVFARRSGAVAAPTASLHFDEPLLAALAERGVAFSHVTLHVGAGTFLPVKVEDVTTHRMHAEWGEVTARAAEEIAATRLAGGRVIPVGTTALRLIESAARSGEIVPWEGETDIFIYPGFRFHATDGLITNFHLPKSTLLMLVSALMGMDRMRRVYAHAVTERYRFFSYGDASLLLPE

SEQ ID NO: 67080 - protein, 353 aa, unidentified
  source 1..353: note = Haematospirillum jordaniae
  REGION 1..353: note = tr|A0A143DD48|A0A143DD48_9PROT S-adenosylmethionine:tRNA ribosyltransferase-isomerase; OS = Haematospirillum jordaniae OX=1549855 GN=queA PE=3 SV=1
MRVDAFDFDLPREQIATRPVSPRHSARLLDVAPDGLHDRTMLDLPSLLEPGDVMVFNDTRVIPARLSGLRPAIHPGCQPAGVDITLHQGLGPDTWAAFAKGARKLSPGQTVVLSADGDFTARVENRQEGGEIVLRFDRSGADLMAALERHGHIPLPPYMGRKDDARDRQDYQTVYASRDGAVAAPTAGLHFTPELLEAIDARGIRRVHVTLHVGAGTFLPVKAEDTRDHRMHAETGDISADAARTITQAREQGGRVVCVGTTSLRLLESAAAPDGSLSAWSGSTSIFITPGYQFRIADLLVTNFHLPRSTLFMLVCALAGLDAMHAAYAHAIKAGYRFYSYGDGSLLRCKDSC

SEQ ID NO: 67081 - protein, 363 aa, Haemophilus aegyptius
  REGION 1..363: note = tr|A0A448MFB1|A0A448MFB1_HAEAE S-adenosylmethionine:tRNA ribosyltransferase-isomerase; OS = Haemophilus aegyptius OX=197575 GN=queA PE=3 SV=1
MRVSDFNFDLPDELIARYPKTDRVSCRLLQLNGENGEIFHRTFSDVLDLIDEGDLLIFNNTRVIPARMFGRKASGGKIEVLVERMLDEHRFLAHIRSSKSPKEGAELFLGEDKLGENNGIKAVMKARHSSLFEVELSDKSTALLDVLQTIGHMPLPLYIDRPDEEADKECYQTVYSKVPGAVAAPTAGLHFDDPLLEKLKKKGVNFEFVTLHVGAGTFQPVRVENIEDHVMHAEYVEVSQEVCNAIIATKKAGKRVIAVGTTSVRSIESAALSAEEFGNPDLIEPYFSDTSIFIYPGKKFRVVDCLITNFHLPESTLIMLVSAFAGYKNTMNAYKHAVQEKYRFFSYGDAMFINKNSNVRGLE

SEQ ID NO: 67082 - protein, 361 aa, Haemophilus ducreyi
  REGION 1..361: note = tr|A0A448KJX5|A0A448KJX5_HAEDC S-adenosylmethionine:tRNA ribosyltransferase-isomerase; OS = Haemophilus ducreyi OX=730 GN=queA PE=3 SV=1
MLVSDFHFNLPDELIARYPEDERTASRLLHLNGESGKFTDLHFSDLLDHINPGDLLIFNNTRVIPARLYGRKESGGKLEVLIERVLDEHHCLAHIRCSKAPKAGTKLILGEDKLGVGNGLEATMISRHDTLFELRFNASTPLFTLLQQAGHIPLPPYIDRPDEDFDQERYQTVYSKVLGAVAAPTAGLHFDNPMLDKLKAKGVNMAFVTLHVGAGTFQPVRVENILEHNMHAEYAEVTQAVVDQILATKAAGKRVIAVGTTSVRSIESAAQAAQPTGKLIAPFFSDTNIFLYPGKTFKIVDVLITNFHLPESTLIMLVSAFAGYRHTMNAYQHAVQQKYRFFSYGDAMLINKNPNALNDLP

SEQ ID NO: 67083 - protein, 361 aa, Haemophilus ducreyi
  REGION 1..361: note = sp|Q7VLY1|QUEA_HAEDU S-adenosylmethionine:tRNA ribosyltransferase-isomerase OS=Haemophilus ducreyi (strain 35000HP / ATCC 700724) OX=233412 GN=queA PE=3 SV=1
MLVSDFHFNLPDELIARYPKDERTASRLLHLNGESGKFSDLHFSDLLDHINPGDLLIFNNTRVIPARLYGRKESGGKLEVLIERVLDEHHCLAHIRCSKAPKAGTKLILGEDKLGIGNGLEATMISRHDTLFELRFNATTPLFTLLQQAGHIPLPPYIDRPDEDFDQERYQTVYSKVLGAVAAPTAGLHFDNPMLDKLKAKGVNMAFVTLHVGAGTFQPVRVENILEHNMHAEYAEVTQAVVDQILATKAAGKRVIAVGTTSVRSIESAAQATQPTGKLIAPFFSDTNIFLYPGKTFKIVDVLITNFHLPESTLIMLVSAFAGYRHTMNAYQHAVQQKYRFFSYGDAMLINKNPNALNDLP

SEQ ID NO: 67084 - protein, 356 aa, Haemophilus haemoglobinophilus
  REGION 1..356: note = tr|A0A1V4AZT2|A0A1V4AZT2_9PAST S-adenosylmethionine:tRNA ribosyltransferase-isomerase; OS = Haemophilus haemoglobinophilus OX=733 GN=queA PE=3 SV=1
MQLSDFYFDLPDELIARYPKADRKSSKLLQLEGKTGAVSHRSFSHVLDLVNEGDLLIFNNTRVIPARMFGRKASGGKLEVLVERVLSEHSFLAHIRSSKSPKENAELFLGEDKLGEGNGVKVLMKSRHESLFELELADKSTALLDILQQIGHMPLPPYIDRPDEDADKERYQTVYNKVPGAVAAPTAGLHFDNELLEQLKNKGVNFAFVTLHVGAGTFQPVRVENIEDHKMHAEYVEVPQEVVDAVLATKAKGKRVIAVGTTSVRSIESAALFAEENNSTQLLEPYFSDTSIFIYPGKKFRVIDCLITNFHLPESTLIMLVSAFAGYEHTMNAYKIAVENQYRFFSYGDAMFITKA

SEQ ID NO: 67085 - protein, 363 aa, Haemophilus haemolyticus
  REGION 1..363: note = tr|A0A0M3FZ89|A0A0M3FZ89_HAEHA S-adenosylmethionine:tRNA ribosyltransferase-isomerase; OS = Haemophilus haemolyticus OX=726 GN=queA PE=3 SV=1
MRVSDFNFDLPDKLIARYPKEDRASCRLLHLNGENGAVIDRTFSDVLDLIDEGDLLIFNNTRVIPARMFGRKASGGKIEVLVERMLDEHRFLAHIRSSKSPKEGAELFLGEDKLGENNEIKAVMTARHGALFEVELSDKSTALLDVLQAIGHMPLPPYIDRPDEEADQECYQTVYSKVPGAVAAPTAGLHFDAPLLEKLKKKGVNFEFVTLHVGAGTFQPIRVENIEDHVMHAEYVEVSQEVCNAIIATKKAGKRIIAVGTTSVRSIESAALSAEEFGNPDLIEPYFSDTSIFIYPGKKFRVVDCLITNFHLPESTLIMLVSAFAGYKNTMNAYKHAVKEKYRFFSYGDAMFINKNSNVRGLE

SEQ ID NO: 67086 - protein, 363 aa, Haemophilus haemolyticus
  REGION 1..363: note = tr|A0A0M3G902|A0A0M3G902_HAEHA S-adenosylmethionine:tRNA ribosyltransferase-isomerase; OS = Haemophilus haemolyticus OX=726 GN=queA PE=3 SV=1
MRVSDFNFDLPDELIARYPKEDRASCRLLHLNGENGAVIDRTFSDVLDLIDEGDLLIFNNTRVIPARMFGRKASGGKIEVLVERMLDEHRFLAHIRSSKSPKEGAELFLGEDKLGENNGIKAVMTARYGALFEVELSDKSTALLDVLQTIGHMPLPPYIDRPDEEADQECYQTVYNKVPGAVAAPTAGLHFDDPLLEKLKKKGVNFEFVTLHVGAGTFQPVRVENIEDHVMHAEYVEVSQEVCNAIIATKKAGKRVIAVGTTSVRSIESAALSAEEFSNPDLIEPYFSDTSIFIYPGKKFRVVDCLITNFHLPESTLIMLVSAFAGYKNTMNAYKHAVQEKYRFFSYGDAMFINKNSNLRGLE

SEQ ID NO: 67087 - protein, 363 aa, Haemophilus influenzae
  REGION 1..363: note = sp|P44595|QUEA_HAEIN S-adenosylmethionine:tRNA ribosyltransferase-isomerase OS=Haemophilus influenzae (strain ATCC 51907 / DSM 11121 / KW20 / Rd) OX=71421; GN = queA PE =3 SV=1
MRVSDFNFDLPDELIARYPKTDRVSCRLLQLNGENGEIFHRTFSDVLDLIDEGDLLIFNNTRVIPARMFGRKASGGKIEVLVERMLDEHRFLAHIRSSKSPKEGAELFLGEDKLGENNGIKAVMKARHGALFEVELSDKSTALLDVLQTIGHMPLPPYIDRPDEEADQECYQTVYSKVPGAVAAPTAGLHFDENLLEKLKAKGVNFEFVTLHVGAGTFQPVRVENIEDHVMHAEYVEVSQEVCNAIIATKKAGKRVIAVGTTSVRSIESAALSAEEFGNPDLIEPYFSDTSIFIYPGKKFRVVDCLITNFHLPESTLIMLVSAFAGYKNTMNAYKHAVKEKYRFFSYGDAMFINKNSNVRGLE

SEQ ID NO: 67088 - protein, 363 aa, Haemophilus influenzae
  REGION 1..363: note = sp|A5UAP2|QUEA_HAEIE S-adenosylmethionine:tRNA ribosyltransferase-isomerase OS=Haemophilus influenzae (strain PittEE) OX=374930 GN=queA PE=3 SV=1
MRVSDFNFDLPDELIARYPKTDRVSCRLLQLNGENGEIFHRTFSDVLDLIDEGDLLIFNNTRVIPARMFGRKASGGKIEVLVERMLDEHRFLAHIRSSKSPKEGAELFLGEDKLGENNGIKAVMKARHSSLFEVELSDKSTALLDVLQTIGHMPLPPYIDRPDEEADKECYQTVYSKVPGAVAAPTAGLHFDENLLEKLKAKGVNFEFVTLHVGAGTFQPVRVENIEDHVMHAEYVEVSQEVCNAIIATKKAGKRVIAVGTTSVRSIESAALSAEEFGNPDLIEPYFSDTSIFIYPGKKFRVVDCLITNFHLPESTLIMLVSAFAGYKNTMNAYKQAVQEKYRFFSYGDAMFINKNSNVRELE

SEQ ID NO: 67089 - protein, 361 aa, Haemophilus paracuniculus
  REGION 1..361: note = tr|A0A1T0ASL2|A0A1T0ASL2_9PAST S-adenosylmethionine:tRNA ribosyltransferase-isomerase; OS = Haemophilus paracuniculus OX=734 GN=queA PE=3 SV=1
MLVSDFHFDLPDELIARYPTAQRTASRLLYLNGETGEFADQQFPDLLSHINEGDLLIFNNTRVIPARLYGRKASGGKLEVLVERVLDEKRCLAHVRASKAPKEGAELILGEDKLGEGNGLKAIMVARHEALFELHFEADKSLFELLQQAGHMPLPPYIDRPDEDADQERYQTVYSKVLGAVAAPTAGLHFDKDMLQKLADKGVQTAFVTLHVGAGTFQPVRVETIEDHKMHAEYAEVSQEVVDKILATKANGKRVICVGTTSVRSIESAAQAAEKSGKLIAPFCSDTAIFLYPGKTFRIVDALVTNFHLPESTLIMLVSAFAGYRHCMQAYAHAVEQKYRFFSYGDAMFITKNSQALKDLP

SEQ ID NO: 67090 - protein, 361 aa, Haemophilus parahaemolyticus
  REGION 1..361: note = tr|A0A377I2Q9|A0A377I2Q9_HAEPH S-adenosylmethionine:tRNA ribosyltransferase-isomerase; OS = Haemophilus parahaemolyticus OX=735 GN=queA PE=3 SV=1
MLVSDFHFDLPDELIARYPTQERTASRLLYLNGNTGKFADQHFTDLLEHLNEGDLLVFNNTRVIPARLYGRKLSGGKVEALVERVLDEHRCLAHVRASKAPKEGTVLVFGEDKLGEGNGLTATMTERHDTLFELQFEGKKPLFDLLQQAGHMPLPPYIDRPDEDADQERYQTVYSKVLGAVAAPTAGLHFDQNLLAKLKEKGVNTAFVTLHVGAGTFQPVRVENILDHKMHAEYAEVSQDVVDQILQTKANGKRVIAVGTTSVRSIESAAQAVKNPEHLIEPFFSDTSIFIYPGKTFKVIDALVTNFHLPESTLIMLVSAFAGYRTTMDAYAHAVTEKYRFFSYGDAMFIEKNPNALKDVP

SEQ ID NO: 67091 - protein, 361 aa, Haemophilus parahaemolyticus
  REGION 1..361: note = tr|A0A5C1QQ13|A0A5C1QQ13_HAEPH S-adenosylmethionine:tRNA ribosyltransferase-isomerase; OS = Haemophilus parahaemolyticus OX=735 GN=queA PE=3 SV=1
MLVSDFHFDLPAELIARYPTKERTASRLLYLNGNTGEFADQHFTDLLEHLNEGDLLVFNNTRVIPARLYGRKLSGGKVEALVERVLDEHRCLAHVRASKAPKEGTVLVFGEDKLGEGNGLTATMTERHDTLFELQFEGEAPLFDLLQQAGHMPLPPYIDRPDEDADQERYQTVYSKVLGAVAAPTAGLHFDQNLLAKLKEKGVNTAFVTLHVGAGTFQPVRVENILDHKMHAEYAEVSQDVVDQILQTKANGKRVIAVGTTSVRSIESAAQAVKNPEYLIEPFFSDTSIFIYPGKTFKVIDALVTNFHLPESTLIMLVSAFAGYRTTMNAYAHAVTEKYRFFSYGDAMFIEKNPNALKDVP

SEQ ID NO: 67092 - protein, 363 aa, Haemophilus parainfluenzae
  REGION 1..363: note = tr|A0A410SG88|A0A410SG88_HAEPA S-adenosylmethionine:tRNA ribosyltransferase-isomerase; OS = Haemophilus parainfluenzae OX=729 GN=queA PE=3 SV=1
MRVSDFHFDLPDELIARYPKEDRSSCRLLQLNGENGEISHRTFTDVLDLIDEGDLLIFNNTRVIPARMFGRKASGGKIEVLVERVLSVHHFLAHIRSSKAPKEGAELFLGEDKLGENNGVKAIMVGRQDALFEVELADKSRNVLDVLQEIGHMPLPPYIDRPDEEADQECYQTVYNKVPGAVAAPTAGLHFDDELLQKLHEKGVNFEFVTLHVGAGTFQPVRVENIEDHIMHAEYVELSQEVCNAIIETKKAGKRVIAVGTTSVRSVETAALSAEENGNPDLIEPYFSDTSIFIYPGKSFRVVDALITNFHLPESTLIMLVSAFAGFSHTMNAYKSAVENRYRFFSYGDAMFITKNPNVKGLE

SEQ ID NO: 67093 - protein, 363 aa, Haemophilus parainfluenzae
  REGION 1..363: note = tr|F0ES63|F0ES63_HAEPA S-adenosylmethionine:tRNA ribosyltransferase-isomerase OS=Haemophilus parainfluenzae ATCC 33392 OX=888828 GN=queA PE=3 SV=1
MRVSDFHFNLPDELIARYPKEDRSSCRLLQLNGENGEISHRTFTDVLDLIDEGDLLIFNNTRVIPARMFGRKASGGKIEVLVERVLSEHHFLAHIRSSKAPKEGTELFLGEDKLGENNGVKAIMVGRQDALFEVELADKSRNVLDVLQEIGHMPLPPYIDRPDEEADQECYQTVYNKVPGAVAAPTAGLHFDDELLQKLHEKGVNFEFVTLHVGAGTFQPVRVENIEDHIMHAEYVELSQEVCNAIIETKKAGKRVIAVGTTSVRSVETAALSAEENGNPDLIEPYFSDTSIFIYPGKSFRVVDALITNFHLPESTLIMLVSAFAGFSHTMNAYKSAVENRYRFFSYGDAMFITKNPNVKGLE

SEQ ID NO: 67094 - protein, 361 aa, Haemophilus paraphrohaemolyticus
  REGION 1..361: note = tr|A0A369ZTN6|A0A369ZTN6_9PAST S-adenosylmethionine:tRNA ribosyltransferase-isomerase; OS = Haemophilus paraphrohaemolyticus OX=736 GN=queA PE=3; SV = 1
MLVSDFHFDLPDELIARYPTKERTASRLLYLNGNTGEFADQHFTDLLEHLNEGDLLVFNNTRVIPARLYGRKLSGGKVEALVERVLDEHRCLAHVRASKAPKEGTVLVFGEDKLGEGNGLAATMTARHDALFELQFEGKKPLFDLLQQAGHMPLPPYIDRPDEDADQERYQTVYSKVLGAVAAPTAGLHFDQNLLVKLKEKGVNTAFVTLHVGAGTFQPVRVENILDHKMHAEYAEVSQEVVDQILQTKANGKRVIAVGTTSVRSIESAAQAVKNPENLIEPFFSDTSIFIYPGKTFKVADALVTNFHLPESTLIMLVSAFAGYHTTMNAYAHAVAEKYRFFSYGDAMFIEKNPNALKDVP

SEQ ID NO: 67095 - protein, 361 aa, Haemophilus paraphrohaemolyticus
  REGION 1..361: note = tr|I2NNN2|I2NNN2_9PAST S-adenosylmethionine:tRNA ribosyltransferase-isomerase OS=Haemophilus paraphrohaemolyticus HK411 OX=1095743 GN=queA PE=3 SV=1
MLVSDFQFDLPSELIARYPTKERTASRLLYLNGNTGEFADQHFTDLLEHLNEGDLLVFNNTRVIPARLYGRKLSGGKVEALLERVLDEHRCLAHVRASKAPKEGTVLVFGEDKLGEGNGLTATMTERHDTLFELQFEGEESLFNLLQQAGHMPLPPYIDRPDEDADQERYQTVYSKVLGAVAAPTAGLHFDQNLLAKLKEKGVNTAFVTLHVGAGTFQPVRVENILDHKMHAEYAEVSQDVVDQILQTKANGKRVIAVGTTSVRSIESAAQAVKNPEHLIEPFFSDTSIFIYPGKTFKVADALVTNFHLPESTLIMLVSAFAGYRTTMNAYAHAVAEKYRFFSYGDAMFIEKNPNALKDVP

SEQ ID NO: 67096 - protein, 361 aa, Haemophilus parasuis
  REGION 1..361: note = sp|B8F4R5|QUEA_HAEPS S-adenosylmethionine:tRNA ribosyltransferase-isomerase OS=Haemophilus parasuis serovar 5 (strain SH0165) OX=557723 GN=queA PE=3 SV=1
MRVTDFHFDLPDELIARYPTAERSASRLLYLNGNTGEYQDQQFNDLLEHIHSGDLLIFNNTRVIPARLYGRKASGGKLEVLVERVLDEHRCLAHIRSSKAPKENAEIFLGEDKLGEGNGFKAIMVARYDALFELKFEASQPLFDLLQQAGHMPLPPYIDRPDEDADQERYQTVYSKVLGAVAAPTAGLHFDHQMLQKLQEKGVQTAFVTLHVGAGTFQPVRVETIEEHKMHAEYAEVSQDVVDKILATKAQGKRVICVGTTSVRSIESAAQAAEKEGKLIAPFYSDTTIFLYPGKTFRIVDALVTNFHLPESTLIMLVSAFAGFKNCMNAYQHAVESQYRFFSYGDAMFITKNENALGDVP

SEQ ID NO: 67097 - protein, 361 aa, Haemophilus parasuis
  REGION 1..361: note = tr|A0A1T0A6V2|A0A1T0A6V2_HAEPR S-adenosylmethionine:tRNA ribosyltransferase-isomerase; OS = Haemophilus parasuis OX=738 GN=queA PE=3 SV=1
MRVTDFHFDLPDELIARYPTAERSASRLLYLNGNTGEYQDQQFNDLLEHIHSGDLLIFNNTRVIPARLYGRKASGGKLEVLVERVLDEHRCLAHIRSSKAPKENAEIFLGEDKLGEGNGFKAIMVARHDALFELKFEEAQPLFDLLQQAGHIPLPPYIDRPDEDADQERYQTVYSKVLGAVAAPTAGLHFDHQTLQKLQEKGVQTAFVTLHVGAGTFQPVRVETIEEHKMHAEYAEVSQEVVDKILATKAQGKRVICVGTTSVRSIESAAQAAEKEGKLIAPFYSDTTIFLYPGKTFRIVDALVTNFHLPESTLIMLVSAFAGFKNCMNAYQHAVESQYRFFSYGDAMFITKNENAFGDVP

SEQ ID NO: 67098 - protein, 82 aa, Haemophilus pittmaniae
  REGION 1..82: note = tr|F9QBE4|F9QBE4_9PAST S-adenosylmethionine:tRNA ribosyltransferase-isomerase OS=Haemophilus pittmaniae HK 85 OX=1035188 GN=HMPREF9952_1493 PE=3 SV=1
MIEPYFSDTSIFIYPGKKFRVVDALITNFHLPESTLIMLVSAFAGFTHTMNAYKSAVENRYRFFSYGDAMFITKNPNVKGLE

SEQ ID NO: 67099 - protein, 363 aa, Haemophilus pittmaniae
  REGION 1..363: note = tr|A0A377J0Z7|A0A377J0Z7_9PAST S-adenosylmethionine:tRNA ribosyltransferase-isomerase; OS = Haemophilus pittmaniae OX=249188 GN=queA PE=3 SV=1
MRVSDFHFDLPDELIARYPKEERASCRLLTLDGEQGTLGHGTFTDVLDLINEGDLLIFNNTRVIPARMFGRKASGGKLEVLVERVLDEQHCLAHIRSSKSPKEGTELFLGEDKLGEGQGIKVVMTGRQGALFELQLVEPHSAWLAVLQQIGHMPLPPYIDRPDEEADQECYQTVYSKVPGAVAAPTAGLHFDDLLLDKLRAKGVNFEFVTLHVGAGTFQPVRVDNIEEHIMHAEYVELSQEVCNAIIETKKAGKRVIAVGTTSVRSIETAALSAEENGNPDLIEPYFSDTSIFIYPGKKFRVVDALITNFHLPESTLIMLVSAFAGFTHTMNAYKSAVENRYRFFSYGDAMFITKNPNVKGLE

SEQ ID NO: 67100 - protein, 356 aa, unidentified
  source 1..356: note = Haemophilus somnus
  REGION 1..356: note = sp|Q0I4R7|QUEA_HAES1 S-adenosylmethionine:tRNA ribosyltransferase-isomerase OS=Haemophilus somnus (strain 129Pt) OX=205914 GN=queA PE=3 SV=1
MYLSDFYFDLPDELIARYPKRERSSSRMLQLNGQNGELFHRTFSDVADLINEGDLLIFNNTRVIPARMFGRKASGGKIEVLVERVLNEHHFLAHIRSSKSPKENTVLFLGEDKLGEGKGVEMLMKARHENLFELELSDKSTALLDILQKIGHMPLPPYIDRPDEDADKERYQTVYNKVPGAVAAPTAGLHFDDELLTQLKNKGVNFAFVTLHVGAGTFQPVRVENIEDHKMHAEYVEVPQEVVDAVLATKAKGKRVIAVGTTSVRSIESAALFAEENNSTHLLEPYFSDTSIFIYPGKKFRVIDCLITNFHLPESTLIMLVSAFAGYQHTMNAYKSAVENRYRFFSYGDAMFITKA

SEQ ID NO: 67101 - protein, 363 aa, Haemophilus sp.
  REGION 1..363: note = tr|H1LMT8|H1LMT8_9PAST S-adenosylmethionine:tRNA ribosyltransferase-isomerase OS=Haemophilus sp. oral taxon 851 str. F0397 OX=762965 GN=queA PE=3 SV=1
MRVSDFNFDLPDELIARYPKEDRASCRLLHLNGENGAVIDRTFSDVLDLIDEGDLLIFNNTRVIPARMFGRKASGGKIEVLVERMLDEHRFLAHIRSSKSPKEGAELFLGEDKLGENNGIKAVMTARHGALFEVELSDKSTALLDVLQAIGHMPLPPYIDRPDEEADQECYQTVYSKVPGAVAAPTAGLHFDEPLLEKLKDKGVNFEFVTLHVGAGTFQPVRVENIEDHVMHAEYVEVSQEVCNAIIATKKAGKRVIAVGTTSVRSIESAALSAEEFGNPDLIEPYFSDTSIFIYPGKKFRVVDCLITNFHLPESTLIMLVSAFAGYKNTMNAYKHAVQEKYRFFSYGDAMFINKNSNVRGLE

SEQ ID NO: 67102 - protein, 363 aa, Haemophilus sp.
  REGION 1..363: note = tr|A0A0M1GP31|A0A0M1GP31_9PAST S-adenosylmethionine:tRNA ribosyltransferase-isomerase; OS = Haemophilus sp. C1 OX=1661745 GN=queA PE=3 SV=1
MRVSDFNFDLPDELIARYPKEDRASCRLLHLNGENGAVIDRTFSDVLDLIDEGDLLIFNNTRVIPARMFGRKASGGKIEVLVERMLDEYRFLAHIRSSKSPKEGAELFLGEDKLGGNNGIKAVMTVRHGALFEVELSDKSTALLDVLQSIGHMPLPPYIDRPDEEADQECYQTVYSKVPGAVAAPTAGLHFDTPLLEKLKKKGVNFEFVTLHVGAGTFQPVRVENIEDHVMHAEYVEVSQEVCNAIIATKKAGKRVIAVGTTSVRSIESAALSAEEFGNPDLIEPYFSDTSIFIYPGKKFRVVDCLITNFHLPESTLIMLVSAFAGYKNTMNAYKHAVQEKYRFFSYGDAMFINKNSNVRGLE

SEQ ID NO: 67103 - protein, 364 aa, unidentified
  source 1..364: note = Haemophilus sputorum
  REGION 1..364: note = tr|J5HKQ1|J5HKQ1_9PAST S-adenosylmethionine:tRNA ribosyltransferase-isomerase OS=Haemophilus sputorum HK 2154 OX=1078483 GN=queA PE=3 SV=1
MLVSDFHFDLPDNLIARYPMPERTASRLLKLDGNTGALTDQHFPDLLEDIQAGDLLIFNNTRVIPARLYGRKSSGGKLEVLVERVLDEHRCLAHIRASKAPKEGAEIILGEDKLGEGNGFHAIMTARHGALFELQFSAAQPLFDLLQQAGHMPLPPYIDRPDEDADQERYQTVYSKVLGAVAAPTAGLHFDNAMLEKLSEKGVQTAFVTLHVGAGTFQPVRVENILDHQMHAEYAEVSEEVVEKILATKAAGKRVIAVGTTSVRSIESAAQAAEQTGKLIAPFFSDTQIFLYPGKTFKVVDALVTNFHLPESTLIMLVSAFAGYRHTMQAYQHAVANQYRFFSYGDAMFITKNENATQDLPPNA

SEQ ID NO: 67104 - protein, 364 aa, unidentified
  source 1..364: note = Haemophilus sputorum
  REGION 1..364: note = tr|A0A369YMI4|A0A369YMI4_9PAST S-adenosylmethionine:tRNA ribosyltransferase-isomerase; OS = Haemophilus sputorum OX=1078480 GN=queA PE=3 SV=1
MLVSDFHFDLPDNLISRYPMPERTASRLLKLDGNTGALTDQHFPDLLEDIQAGDLLIFNNTRVIPARLYGRKSSGGKLEVLVERVLDEHRCLAHIRASKAPKEGAEIILGEDKLGEGNGFHAIMTARHGALFELQFSAAQPLFDLLQQAGHMPLPPYIDRPDEDADQERYQTVYSKVLGAVAAPTAGLHFDNAMLEKLCEKGVQTAFVTLHVGAGTFQPVRVENILDHQMHAEYAEVSEEVVEKILATKAAGKRVIAVGTTSVRSIESAAQAAEQTGKLIAPFFSDTQIFLYPGKTFKVVDALVTNFHLPESTLIMLVSAFAGYRHTMQAYQHAVANQYRFFSYGDAMFITKNENATQDLPPNA

SEQ ID NO: 67105 - protein, 357 aa, Hafnia alvei
  REGION 1..357: note = tr|A0A2J9HG02|A0A2J9HG02_HAFAL S-adenosylmethionine:tRNA ribosyltransferase-isomerase; OS = Hafnia alvei OX=569 GN=queA PE=3 SV=1
MRVSDFSFELPDNLIARYPQAERSACRLLSLDGPTGKLDHGVFTDVLDKIEAGDLLIFNNTRVIPARLFGRKASGGKLEVLVERVLDDTRVLAHVRASKSPKPGAELLLGDNEDIRATMVARHDTLFELRFDDGRDVLTILNAAGHMPLPPYIDRPDEDADRELYQTVYSSRPGAVAAPTAGLHFDEPLLEKLRAKGVEMAFVTLHVGAGTFQPVRVDTIENHTMHSEYAEVPQDVVDAVLACKARGNRVIAVGTTSVRSIESAAAAAKDALIAPFFDDTQIFIYPGYHYQVIDALITNFHLPESTLIMLVSAFAGYQNTMHAYHEAVAKEYRFFSYGDAMFITRSEQAEQEKVSAA

SEQ ID NO: 67106 - protein, 357 aa, Hafnia alvei
  REGION 1..357: note = tr|A0A097R576|A0A097R576_HAFAL S-adenosylmethionine:tRNA ribosyltransferase-isomerase; OS = Hafnia alvei FB1 OX=1453496 GN=queA PE=3 SV=1
MRVSDFSFELPDNLIARYPQAERSACRLLSLDGPTGKLEHGVFTDVLDKIEAGDLLIFNNTRVIPARLFGRKASGGKLEVLIERVLDDTRVLAHVRASKSPKPGAELLLGDNEDIRATMVARHDTLFELRFDDGRDVLTILNAAGHMPLPPYIDRPDEDADRELYQTVYSSRPGAVAAPTAGLHFDEPLLEKLRAKGVEMAFVTLHVGAGTFQPVRVDTIENHTMHSEYAEVPQDVVDAVLACKARGNRVIAVGTTSVRSIESAAAAAKDALIVPFFDDTQIFIYPGYHYQVIDALITNFHLPESTLIMLVSAFAGYQNTMHAYHEAVAKEYRFFSYGDAMFITRSEQAEQEKVSAE

SEQ ID NO: 67107 - protein, 357 aa, Hafnia paralvei
  REGION 1..357: note = tr|A0A2A2MCS6|A0A2A2MCS6_9GAMM S-adenosylmethionine:tRNA ribosyltransferase-isomerase; OS = Hafnia paralvei OX=546367 GN=queA PE=3 SV=1
MRVSDFSFELPDNLIARYPQAERSACRLLSLDGPTGKLEHGVFTDVLNKIDAGDLLIFNNTRVIPARLFGRKASGGKLEVLVERLLDDTRVLAHVRASKSPKPGAELLLGDNEDIRVTMVARHDTLFELRFEDGRDVLTILNAAGHMPLPPYIDRPDEDADRELYQTVYSSRPGAVAAPTAGLHFDEPLLEKLRAKGVEMAFVTLHVGAGTFQPVRVDTIENHTMHSEYAEVPQDVVDAVLACKARGNRVIAVGTTSVRSIESAAAAAKDQLIAPFFDDTQIFIYPGYHYQVIDALITNFHLPESTLIMLVSAFAGYKNTMHAYHEAVAKEYRFFSYGDAMFITHSELAEQEKVSAE

SEQ ID NO: 67108 - protein, 357 aa, Hafnia paralvei
  REGION 1..357: note = tr|A0A4Q9EWK2|A0A4Q9EWK2_9GAMM S-adenosylmethionine:tRNA ribosyltransferase-isomerase; OS = Hafnia paralvei OX=546367 GN=queA PE=3 SV=1
MRVSDFSFELPDNLIARYPQAERSACRLLSLDGPTGKLEHGVFTDVLNKIDAGDLLIFNNTRVIPARLFGRKASGGKLEVLVERLLDDTRVLAHVRASKSPKPGAELLLGDNEDIRVTMVARHDTLFELRFEDGRDVLTILNAAGHMPLPPYIDRPDEDADRELYQTVYSSRPGAVAAPTAGLHFDEPLLEKLRAKGVEMAFVTLHVGAGTFQPVRVDTIENHTMHSEYAEVPQDVVDAVLACKARGNRVIAVGTTSVRSIESAAAAAKDQLIAPFFDDTQIFIYPGYHYQVIDALITNFHLPESTLIMLVSAFAGYKNTMHAYHEAVAKEYRFFSYGDAMFITRSELAEQEKVSAE

SEQ ID NO: 67109 - protein, 351 aa, Hahella chejuensis
  REGION 1..351: note = sp|Q2SDV0|QUEA_HAHCH S-adenosylmethionine:tRNA ribosyltransferase-isomerase OS=Hahella chejuensis (strain KCTC 2396) OX=349521 GN=queA PE=3 SV=1
MRVDDFDFELPPELIARRPLAERSSSRLLCLDAETGEINHRGFKDLLGMVNPGDLLVFNDTRVIPARLFGQKRSGGKVEVMVERVVSMTEMLAHVRASKAPKPGVEILIEENYVLTMVEREGDLFRLRVSQGGSVSELLERCGHMPLPPYIDREDDLSDRERYQTVYSRQPGAVAAPTAGLHFDEALLLAMSQKGVETAFVTLHVGAGTFQPVRVDVVQDHQMHSEYLEVSADVCERVRQVKAAGGRVVAVGTTAVRALETASRSGSIEPYAGDTSIFIYPGYEFVTVDALVTNFHLPKSTLLMLVSAFAGREHILAAYQEAIEQRYRFFSYGDAMFLHRRQSGLEDAGAN

SEQ ID NO: 67110 - protein, 351 aa, Hahella sp.
  REGION 1..351: note = tr|A0A3T0VQ60|A0A3T0VQ60_9GAMM S-adenosylmethionine:tRNA ribosyltransferase-isomerase; OS = Hahella sp. KA22 OX=1628392 GN=queA PE=3 SV=1
MRVDDFDFDLPPELIARRPLAERSSSRLLCLDADTGEINHRGFKDLLGMINPGDLLVFNDTRVIPARLFGQKRSGGKVEVMVERVVSMTEILAHVRASKAPKPGVDILIDDNYVLTMVEREGDLFRLRVSEGGSVSELLEACGHMPLPPYIDREDDLSDRERYQTVYSRQPGAVAAPTAGLHFDESLLQALAQKGVETAFVTLHVGAGTFQPVRVDVVQDHQMHSEYLEVSADVCEQVRKVKAAGGRVIAVGTTAVRALETASRSGAIEPYAGDTSIFIYPGYDFVTIDALVTNFHLPKSTLLMLVSAFAGREHILAAYQEAIEQRYRFFSYGDAMFLHRRQSGRADALTS

SEQ ID NO: 67111 - protein, 339 aa, Hahella sp.
  REGION 1..339: note = tr|A0A261GQV5|A0A261GQV5_9GAMM S-adenosylmethionine:tRNA ribosyltransferase-isomerase; OS = Hahella sp. CCB-MM4 OX=1926491 GN=queA PE=3 SV=1
MRVDDFDFDLPESLIAKYPLSKRSSSRLLCMDKSSGKVEHRQFQDIEDYLNPGDLLVFNDTRVIPARMFGQKATGGKVEVLIERVISSHEAMAHIRSSKAPKPGAQIHIGDNVLEVTGRDDALFFVRSLGAASISDILESHGHMPLPPYIDREDEVSDRERYQTVYNRNPGAVAAPTAGLHFDEELLARLSAKGVEFAYVTLHVGAGTFQPVRVESINDHKMHKEYLEVNRECVDRIVKARGNGNKVIAVGTTAVRSLETAAASGGIKPYVGDTQIFIYPGYQFQVVDALITNFHLPKSTLLMLVSAFAGRENILAAYQDAIAREYRFFSYGDAMLLHP

SEQ ID NO: 67112 - protein, 360 aa, unidentified
  source 1..360: note = Hahellaceae bacterium
  REGION 1..360: note = tr|A0A2D8RDU9|A0A2D8RDU9_9GAMM S-adenosylmethionine:tRNA ribosyltransferase-isomerase; OS = Hahellaceae bacterium OX=2048971 GN=queA PE=3 SV=1
MTSSTSDYDFELPEALIAQHPLERRSASRLLTMQMSGGASTIRHDHFASLPDYLESGDLLVFNDTKVIPARLFGRKMTGGAVEILLERVLDERHCLAHVRASKAPKAGARIVLCKAGPGVEPAEAGAAVFEVSGRQGDLFKIELLVNSTTRHVDIDSVLAHYGIVPLPPYIERSVESPEDLQRYQTVYASKPGAIAAPTAGLHFDEAMLATLKGRGIETAYTTLHVGAGTFQPVRVEQIASHAMHTELYEVPEAVVTAVQAAKARGNKVMAVGTTVVRALESAARSGELRPGHGETDIFIHPGYEFRVIDALLTNFHLPRSTLLMLVSALAGRDAIMSAYAEAIRERYRFFSYGDAMLLY

SEQ ID NO: 67113 - protein, 342 aa, Halalkalibacillus sp.
  REGION 1..342: note = tr|A0A2I0QXN8|A0A2I0QXN8_9BACI S-adenosylmethionine:tRNA ribosyltransferase-isomerase; OS = Halalkalibacillus sp. B3227 OX=2018042 GN=queA PE=3 SV=1
MNVNDFDFDLPEELIAQTPLKDRAASKLMVIDRDKGSVENKQFPSVVDYLNPGDCLVLNNTKVLPARLLGEKEETKGKVEMLLLHQTGEDEWEALVKPAKKIKVGTRVSFGDGLLTAECTEIRDQGLRIVKFEYDGIFLEVLDQLGEMPLPPYIKEQLDDRDRYQTVYAKEVGSAAAPTAGLHFTDEILERIRAKGIKIAYLTLHVGLGTFRPVQVDDVEEHDMHSEFYQLDQETADLLNDVKQNGNSVVAVGTTSVRTLETIARDEQGKFKGSSGWTDIFIYPPYRFQAIDAMITNFHLPKSTLIMLVSAFASKELILRAYEEAVRDRYRFFSFGDAMIIL

SEQ ID NO: 67114 - protein, 347 aa, Halanaerobium congolense
  REGION 1..347: note = tr|A0A4R7E849|A0A4R7E849_9FIRM S-adenosylmethionine:tRNA ribosyltransferase-isomerase; OS = Halanaerobium congolense OX=54121 GN=queA PE=3 SV=1
MKVEEFDYHLPEELIAQKPLPKRDESRLMVLNPKQNKIEENVFKNLKKFLDPGDMIIMNNSRVIPARLYGAKIPTGTEIEVLLLNELTEGHWEVLVRPGRRAKKGVKINFNDILKAEVVEYTDFGGRIVEFSWDENNYDFEEILNQLGEMPLPPYINEKLDDPERYQTIYSKKKGSAAAPTAGLHFTENLLNELQDYGIILDYITLHVGLGTFRPVKSEEIEDHEMHEEYAEISAETAAKIKEVKARGSKVIAVGTTVTRTLESAAQDGGLSEYKGWTDIFIYPGYEFKVIDSLITNFHLPKSTLLMLVSALAGKDFILSAYKKAVEDKYRFFSLGDAMLILNRKED

SEQ ID NO: 67115 - protein, 347 aa, Halanaerobium congolense
  REGION 1..347: note = tr|A0A1G6PJQ7|A0A1G6PJQ7_9FIRM S-adenosylmethionine:tRNA ribosyltransferase-isomerase; OS = Halanaerobium congolense OX=54121 GN=queA PE=3 SV=1
MKVEEFDYHLPEELIAQKPLPKRDESRLMVLNPKQNKIEENVFKNLKKFLDPGDMIIMNNSRVIPARLYGAKIPTGTEIEVLLLNELTEGRWEVLVRPGRRAKKGVKINFNDILKAEVVEYTDFGGRIVEFSWDENNYDFEEILNQLGEMPLPPYINEKLDDPERYQTIYSKKKGSAAAPTAGLHFTENLLNELQDYGIILDYITLHVGLGTFRPVKSEEIEDHEMHEEYAEISAETAAKIKEVKARGSKVIAVGTTVTRTLESAAQDGGLSEYKGWTDIFIYPGYEFKVIDSLITNFHLPKSTLLMLVSALAGKDFILSAYKKAVEDKYRFFSLGDAMLILNRKED

SEQ ID NO: 67116 - protein, 347 aa, unidentified
  source 1..347: note = Halanaerobium hydrogeniformans
  REGION 1..347: note = tr|E4RIK4|E4RIK4_HALHG S-adenosylmethionine:tRNA ribosyltransferase-isomerase OS=Halanaerobium hydrogeniformans OX=656519 GN=queA PE=3 SV=1
MRVEEFDYQLPEELIAQKPLPERDMSRLMVLDPQNKMIREDLFKNLKRYLEPGDRLILNNSRVIPARLYGEKIPTGTEIEILLLNELKEGRWEVLVKPGRRAKKGVKIQFQNILEAEVLEYTDFGGRIVEFSWDDGCSSFEEILNKLGEMPLPPYINEKLDNPERYQTVYSKKRGSAAAPTAGLHFTDQLLRDLENYGVKIDYITLHVGLGTFRPVKSEKIEDHKMHAEYAEISPETVARIKKTQANGNKVVAVGTTVTRTLETAAQSGSIKAFKGWTDIFIYPGYEFKVIDSLITNFHLPKSTLLMLVSALAGKELILKAYNQAVEEEYRFFSLGDAMLILNRKED

SEQ ID NO: 67117 - protein, 347 aa, Halanaerobium kushneri
  REGION 1..347: note = tr|A0A1N6V7E9|A0A1N6V7E9_9FIRM S-adenosylmethionine:tRNA ribosyltransferase-isomerase; OS = Halanaerobium kushneri OX=56779 GN=queA PE=3 SV=1
MKVEEFDYHLPEELIAQTPLPERDESRLMILNPEQDRIKEDIFKNLKDYLEPGDMIVMNNSRVIPARLYGEKIPTGTEIELLLLNELAEGRWEVLVRPGRRAKKGVKINFEDILEAEVVEYTDFGGRIVEFSWDQQEYNFEEILNQLGEMPLPPYINEKLDDPERYQTVYSEKKGSAAAPTAGLHFTDRLLEELQEYGVILDYITLHVGLGTFRPVKSEDIEDHEMHEEYAEISAETAKKIKEVKARGNKVVAVGTTVTRTLESAAQDGELSEYKGWTDIFIYPGYEFKVIDSLITNFHLPKSTLLMLVSALAGKEFVLEAYEQAVENEFRFFSLGDAMLILNRKED

SEQ ID NO: 67118 - protein, 347 aa, Halanaerobium praevalens
  REGION 1..347: note = tr|E3DQD6|E3DQD6_HALPG S-adenosylmethionine:tRNA ribosyltransferase-isomerase OS=Halanaerobium praevalens (strain ATCC 33744 / DSM 2228 / GSL) OX=572479 GN=queA; PE = 3SV=1
MKVEEFNYQLPEELIAQKPLSKRDESRLMVLNPEQQIIEENIFKNLKEYLDPGDMIIMNNSRVIPARLYGAKIPTGTEIELLLLNELSEGRWEVLVRPGRRAKKGVKIKFQDILEAEVVEYTDFGGRIVEFSWDHKKYNFEEVLNQLGEMPLPPYINEKLDDPERYQTVYSKKRGSAAAPTAGLHFTDSLLKELEEYGIILDYITLHVGLGTFRPVKSENIEEHEMHEEYAEISAETAAKIKKVKTQGNKVVAVGTTVTRTLESAAANGELSEYQGWTDIFIYPGYEFKVIDSLITNFHLPKSTLLMLVSALAGKELVLSAYQKAVEKEYRFFSLGDAMLILNRKED

SEQ ID NO: 67119 - protein, 347 aa, Halanaerobium saccharolyticum
  REGION 1..347: note = tr|M5E2P3|M5E2P3_9FIRM S-adenosylmethionine:tRNA ribosyltransferase-isomerase OS=Halanaerobium saccharolyticum subsp. saccharolyticum DSM 6643 OX=1293054; GN = queA PE= 3 SV=1
MKVEEFDYHLPEELIAQKPLPKRDESRLMVLNPQENTIEENVFKNLKDHLDPGDMIIMNNSRVIPARLYGAKIPTGTEIELLLLNELAEGRWEVLVRPGRRAKKGVKINFEDILEAEVVEYTDFGGRIVEFSWNQNNYDFEEVLNQLGEMPLPPYINEKLDDPERYQTVYSKKKGSAAAPTAGLHFTDRLLEELTEYGIILDYITLHVGLGTFRPVKSEDIEDHEMHEEYAEISAATVDKIKKVKANGNKVVAVGTTVTRTLESAAQTDELSEYKGWTDIFIYPGYEFKVIDSLITNFHLPKSTLLMLVSALAGKEFVLNAYQKAVEEEYRFFSLGDAMLILNRKED

SEQ ID NO: 67120 - protein, 347 aa, Halanaerobium saccharolyticum
  REGION 1..347: note = tr|A0A4V3CYN2|A0A4V3CYN2_9FIRM S-adenosylmethionine:tRNA ribosyltransferase-isomerase; OS = Halanaerobium saccharolyticum OX=43595 GN=queA PE=3 SV=1
MKVEEFDYHLPEELIAQKPLPERDESRLMVLNPQQDTIEENIFKNLKEYLEPGDMIIMNNSRVIPARLYGAKIPTGTEIELLLLNELAEGRWEVLVRPGRRAKKGVKINFEDILEAEVVEYTDFGGRIVEFSWDQQNYDFEEILNQLGEMPLPPYINEKLDDPERYQTVYSQKKGSAAAPTAGLHFTDRLLKELQEYGVILDYITLHVGLGTFRPVKSEDIEDHEMHEEYAEISAETAAKIKEVKANGNKVVAVGTTVTRTLESAAQEGDLSEYKGWTDIFIYPGYEFKVINSLITNFHLPKSTLLMLVSAMAGKEFILKAYKKAVEDEFRFFSLGDAMMILNRKED

SEQ ID NO: 67121 - protein, 347 aa, Halanaerobium salsuginis
  REGION 1..347: note = tr|A0A1I4GBX3|A0A1I4GBX3_9FIRM S-adenosylmethionine:tRNA ribosyltransferase-isomerase; OS = Halanaerobium salsuginis OX=29563 GN=queA PE=3 SV=1
MNLDEFDYHLPEELIAQDPLPERDSSRLMVLDPLTKTIKESIFKDIKQFIEPGDLIIMNNSRVIPARLYGNKIPTGTQIEVLLLNELQTGRWEVLVKPGRRAKKGVKIDFNNLLQAEVVEYTDFGGRIVEFSWNKSNYDFEEILNKLGEMPLPPYINHKLANPERYQTVYSKKRGSAAAPTAGLHFTKSLLADLQQNGVLLDYITLHVGLGTFRPVKTEKIEDHKMHAEYAEVSAETVAKIKACKQRGNKVIAVGTTVTRTLESAAAGEELTDFKGWTDIFIYPGYEFKVIDALITNFHLPKSTLLMLVSALAGQDFVLKAYQKAVADKYRFFSLGDAMFILNRKED

SEQ ID NO: 67122 - protein, 347 aa, Halanaerobium sp.
  REGION 1..347: note = tr|A0A424YFJ4|A0A424YFJ4_9FIRM S-adenosylmethionine:tRNA ribosyltransferase-isomerase; OS = Halanaerobium sp. MSAO_Bac5 OX=2293859 GN=queA PE=3 SV=1
MRVEEFDYQLPEELIAQKPLPERDMSRLMVLDPQNKEIKDDLFKNIKKYLEPGDRLVLNNSRVIPARLYGEKIPTGTEIEVLLLNELKEGRWEVLVKPGRRAKKGVKVQFQNILEAEVVEYTDFGGRIVQFSWDEKAGSFEEILNKLGEMPLPPYIKQKLDNPERYQTVYSKKRGSAAAPTAGLHFTDQLLNDLKNYGVKIDYITLHVGLGTFRPVKSEKIEDHKMHAEYAEISSETVAKIKETKARGNKVVAVGTTVTRTLEAAAQSGSLKAFKGWTDIFIYPGYDFKVIDSLITNFHLPKSTLLMLVSALAGKEFILKAYNKAVAEEYRFFSLGDAMLILNRKED

SEQ ID NO: 67123 - protein, 347 aa, Halanaerobium sp.; identical to SEQ ID NO: 67120
  REGION 1..347: note = tr|A0A315REL4|A0A315REL4_9FIRM S-adenosylmethionine:tRNA ribosyltransferase-isomerase; OS = Halanaerobium sp. OX=1895664 GN=queA PE=3 SV=1

SEQ ID NO: 67124 - protein, 342 aa, Halarsenatibacter silvermanii
  REGION 1..342: note = tr|A0A1G9JS53|A0A1G9JS53_9FIRM S-adenosylmethionine:tRNA ribosyltransferase-isomerase; OS = Halarsenatibacter silvermanii OX=321763 GN=queA PE=3; SV = 1
MDVDKFSFDLPEELIAQEPAQRRDESRLLVMNKDGNIKDHSIFKNLLDFLQPGDRIVLNNSRVIPARLYGQKRTSGIEIEILLLNELETGRWEVLANPGRRVKPGTEIEFEGEISARCDDVTDFGGRILSFSPENKLRSVLDEIGEMPLPPYIKKKPEDPGRYQTIYASSDREGSVAAPTAGLHFTERLIEELRSKGIGISYLTLHVGLGTFRPVRSERVENHDMHSEYFELPEKTAKEINATRQQGGRIIAVGTTVTRTLEGASEALNRGEGKKGWTDLFIYPGYEFQVIDSLITNFHLPESTLIMLVSALVGREEVLEAYREAIERRYRFYSFGDAMLIL

SEQ ID NO: 67125 - protein, 368 aa, Haliangium ochraceum
  REGION 1..368: note = tr|D0LJ83|D0LJ83_HALO1 S-adenosylmethionine:tRNA ribosyltransferase-isomerase OS=Haliangium ochraceum (strain DSM 14365 / JCM 11303 / SMP-2) OX=502025 GN=queA; PE = 3 S V=1
MRLRSDYHFDLPDGQIAQLPSAQRDDSRLLLLRAGAAAEDRGFRDIIDLLPADAVLVVNDTRVLPARLRARKHSGGAVELLFLERVEVRGVSEQWRCMGRSSKPLREGAQLRVLASDAEGVLAETGDTVSIAGERGEDGTLLVDIAGDGRLLLERAGELPLPPYIARPEGPETLDSERYQTIFARAPGAVAAPTAGLHFTPAILDALQAKGAAIAPLTLHVGPGTFLPVRTEEIAAHHMHLERYEVPETTAALVASGRPVVAVGTTCVRALESAARAAARDQDRDRDDGARRLAVGPGQTDLFITPGYRFRAVDWMVTNFHLPESTLLMLVCAFAGYRRVLDSYRHAVDAGYRFFSYGDAMLVERAPE

SEQ ID NO: 67126 - protein, 363 aa, Haliangium ochraceum
  REGION 1..363: note = tr|D0LSN9|D0LSN9_HALO1 S-adenosylmethionine:tRNA ribosyltransferase-isomerase OS=Haliangium ochraceum (strain DSM 14365 / JCM 11303 / SMP-2) OX=502025; GN = Hoch_4771 P E=3 SV=1
MLAQGQGTRALADERARPPGSAPRPSLRPGRDPGRPLEATRLLSLRGADIAHHRVGALVELLAPGDLLVLNDAATLPASLRGHVAGAEVELRLAGALGDRDFPAMFRAVLFGAGDWRQDTERRPPPPLLGPGARIELDGFSATVRARAALSPRLLTLEFDRADDQLAEAVYRAGRPVQYRHLDAPLPLSAVQTPYAWRPWAVEMPSTGRPLSWALLDRLAAAGIEHAFLTHAAGLSATGDPALDAALPLPERYAIPAQTARACRVARARGGRIVAVGTTVVRALESARGVAGAGVATERISRRHRLRAVDGILTGIHAPGESHFELLEAFAAPAALRRVHAEAVAGDYLAHELGDLMMIMPAR

SEQ ID NO: 67127 - protein, 356 aa, Haliea salexigens
  REGION 1..356: note = tr|A0A3C1KI02|A0A3C1KI02_9GAMM S-adenosylmethionine:tRNA ribosyltransferase-isomerase; OS = Haliea salexigens OX=287487 GN=queA PE=3 SV=1
MQLDEFHYALPPELIAQYPLQDRSASRLLALDGASGATRHLAFTDVPGCLQPGDLLVFNNTRVIPARLWGQKATGGRVEILIERVTGEHTALAHIRSSKSPRPGGVIHLSAQPGEAPGPLQLTVTGRDGALFKLLSPPGVPLHAILADIGHMPLPPYIERADEVADQERYQTVYAERAGAVAAPTAGLHFTQALLEQLDAAGIERGTVTLHVGAGTFQPVRVDNIRDHHMHAEYLEVDADLCAAVEATRARGGRVVAVGTTAVRSLESAACGHGRVAPQTGDTQIFIYPGYRFQVVDAMITNFHLPESTLLMLVSAFSGREAILAAYREAIEQRYRFFSYGDAMFLTPQPDAVGPR

SEQ ID NO: 67128 - protein, 356 aa, Haliea sp.
  REGION 1..356: note = tr|A0A2D5F9L4|A0A2D5F9L4_9GAMM S-adenosylmethionine:tRNA ribosyltransferase-isomerase; OS = Haliea sp. OX=1932666 GN=queA PE=3 SV=1
MRKSDFFYDLPPELIAQHPLPERGASRLLCLEGASGAVAHRRFTDLPELLRPEDLLVFNNTRVIPARLWGQKSSGGRVEILIERLTGVDTALAHIRSSKSPKPGTTLLLAEREGEEPGPWQLEVTGREGALFCLRTPDGSPLTALLNQIGHMPLPPYIAREDEQLDQSRYQTVYAEKEGAVAAPTAGLHFTDSLLAQLDAQGVHRAAVTLHVGAGTFQPVRTDNIEDHHMHAEYLEVDEQVCAAVEACRARGGRVVAVGTTAVRSLESAACGKGRVAPMTGDTDIFIYPGYRFRVVDALVTNFHLPESTLVMLVSAFAGREAVLAAYAEAIAQRYRFFSYGDAMFLTPRPDSLEPR

SEQ ID NO: 67129 - protein, 356 aa, Haliea sp.
  REGION 1..356: note = tr|A0A2E7C2B7|A0A2E7C2B7_9GAMM S-adenosylmethionine:tRNA ribosyltransferase-isomerase; OS = Haliea sp. OX=1932666 GN=queA PE=3 SV=1
MKLDDFHYELPPELIAQYPLKERSASRLLVLDGASGATRHGVFSALPGCLQPGDLLVFNNTRVIPARLWGQKATGGRVEILIERITGEHTALAHIRSSKSPKPGSVIHLSAEPGGAPGPLQLTVTGREGALFQLASPPQVALHSVLADIGHMPLPPYIERGDEAADQERYQTVYAERAGAVAAPTAGLHFTEALLEQLDAAGIQRATVTLHVGAGTFQPVRVDNIQEHHMHAEYLEVDAGVCAAVEATRLRGGRVVAVGTTAVRSLESAACGQGRIAPLTGDTDIFIYPGYRFQVVDAMITNFHLPESTLLMLVSAFCGRDNMLAAYREAIAERYRFFSYGDAMFLTPTPAAMGPR

SEQ ID NO: 67130 - protein, 354 aa, unidentified
  source 1..354: note = Halieaceae bacterium
  REGION 1..354: note = tr|A0A2D7J8J9|A0A2D7J8J9_9GAMM S-adenosylmethionine:tRNA ribosyltransferase-isomerase; OS = Halieaceae bacterium OX=2026743 GN=queA PE=3 SV=1
MKRTDFTFELPAELIAQEPLAERSASRLLEVNAGLESVAHRAFRDLPSLLSPNDLLVFNNTRVLPARLFAQKQTGGKVEILFERVLGDGSALAHVRASKSPKEGTLLLVTPDDQSDVSEFTLRVTGRTGALFALSPESGSLKEMMQCFGHIPLPPYIDREDTHEDRDRYQTVYARREGAVAAPTAGLHFDPPLLNALDALGVRRTELTLHVGAGTFQPVRADNLEDHVMHREYVDVDQTCCDAVNACRDRGGRVIAVGTTAVRSLESAACQSEQGVLAPFEGDTDIFLYPGCRFHVVDAMITNFHLSESTLLMLVSAFAGVETIRRAYAAAIENRYRFFSYGDAMFLTKSEFAA

SEQ ID NO: 67131 - protein, 356 aa, unidentified
  source 1..356: note = Halieaceae bacterium
  REGION 1..356: note = tr|A0A359EML3|A0A359EML3_9GAMM S-adenosylmethionine:tRNA ribosyltransferase-isomerase; OS = Halieaceae bacterium OX=2026743 GN=queA PE=3 SV=1
MQLDEFHYALPPELIAQYPLQDRSASRLLALDGASGATRHLAFTDVPGCLQPGDLLVFNNTRVIPARLWGQKATGGRVEILIERVTGEHTALAHIRSSKSPRPGGVIHLSAQPGEAPGPLQLTVTGRDGALFKLLSPPGVPLHAILADIGHMPLPPYIERADEAADQERYQTVYAERAGAVAAPTAGLHFTQALLDQLDAAGIERGTVTLHVGAGTFQPVRVDNIRDHHMHAEYLEVDAALCAAVEATRARGGRVVAVGTTAVRSLESAACGHGRVAPQTGDTQIFIYPGYRFQVVDAMITNFHLPESTLLMLVSAFSGREAILAAYREAIEQRYRFFSYGDAMFLTPQPDAVGPR

SEQ ID NO: 67132 - protein, 354 aa, unidentified
  source 1..354: note = Halioglobus japonicus
  REGION 1..354: note = tr|A0A2N5YGS5|A0A2N5YGS5_9GAMM S-adenosylmethionine:tRNA ribosyltransferase-isomerase; OS = Halioglobus japonicus OX=930805 GN=queA PE=3 SV=1
MLRSDFHFELPDELIAQYPLPERSASRLLCLDGASGAIDHRHFSQLPSLLREGDLLVFNDTRVIPARLWGQKETGGKLEILVERLTGTHTALAHIRSSKSPKPGTRILLTPEQGAEPCGLELTVTGRDDALFLLSSEGGPALSQMMREVGHMPLPPYIERSDEAADQERYQTVFAAREGAVAAPTAGLHFTDALLNEIATMGVQRCTVTLHVGAGTFQPVRADNIEDHRMHSEYIEVDEAACAAVRETRARGGRVIAVGTTAVRSLESASQGGEIAPFTGDTDIFIYPGYRFRSVDAMVTNFHLPESTLLMLVSAFAGREPIMAAYAAAVAERYRFFSYGDAMFITPANAQESA

SEQ ID NO: 67133 - protein, 352 aa, unidentified
  source 1..352: note = Halioglobus lutimaris
  REGION 1..352: note = tr|A0A2N5X0S2|A0A2N5X0S2_9GAMM S-adenosylmethionine:tRNA ribosyltransferase-isomerase; OS = Halioglobus lutimaris OX=1737061 GN=queA PE=3 SV=1
MKRTDFSFELPQDLIAQYPLAQRSASRLLCLDGVSGQVVHRRFTDLIEQLSPQDLLVFNNTRVIPARLWGQKETGGKLEILIERVTGSHTALAHVRCSKSPRPGTRILLADAEGAQPGEYSFKVTGREGALFALSSEGGPELAKILKQIGHMPLPPYIKRQDEQSDQDRYQTVYADREGAVAAPTAGLHFTDELLMRLDEKGVHRATVTLHVGAGTFQPVRADEIEDHVMHAEFVEVDASVCAAVRQARERGGRVVAVGTTAVRSLESASASGEIAPFTGDTDIFMYPGYRFRSVDAMITNFHLPESTLLMLVSAFAGREAIMRAYREAVAQRYRFFSYGDAMFITAAMEAR

SEQ ID NO: 67134 - protein, 352 aa, unidentified
  source 1..352: note = Halioglobus sp.
  REGION 1..352: note = tr|A0A3L7E206|A0A3L7E206_9GAMM S-adenosylmethionine:tRNA ribosyltransferase-isomerase; OS = Halioglobus sp. U0301 OX=2283635 GN=queA PE=3 SV=1
MKRSDFNYQLPQELIAQYPLPGRSDSRLLCLDGMTGQVEHRRFTDLTSLLRPDDLLVFNNTRVIPARLWGQKETGGRLELLVERVTGSHTALAHIRCSKSPKPGTAILLAAEEGAQPGRYRLQVTGREDALFAISSEGGPALADIMGDIGHMPLPPYIEREDEGSDQERYQTVFAEREGAVAAPTAGLHFTRELLADIARLGVRSVTVTLHVGAGTFQPVRADNIEDHVMHAEFVEVDEAVCAAVRETRARGGRVVAVGTTAVRSLESASQGGDIAPFTGDTDIFIYPGYRFRAVDAMVTNFHLPESTLLMLVSAFAGKAHIMNAYGSAVENRYRFFSYGDAMFITAGAGHA

SEQ ID NO: 67135 - protein, 351 aa, unidentified
  source 1..351: note = Halioglobus sp.
  REGION 1..351: note = tr|A0A5B0X1B2|A0A5B0X1B2_9GAMM S-adenosylmethionine:tRNA ribosyltransferase-isomerase; OS = Halioglobus sp. NY5 OX=2606449 GN=queA PE=3 SV=1
MKRSDFAFELPPELIAQHPLPERSASRMLCLDGGSGEVAHLSFTDIVDELSPDDLLVFNNTRVIPARLWGQKASGGKVEILIERVTGSHSAVAHVRCSKSPRPGTRILLAAERGGEPGEHSLEVTGRQEDLFLLSSAGGPPLADILQQTGHMPLPPYIEREDELADRNRYQTVYAEREGAVAAPTAGLHFSEELLARIDARGVQRAMVTLHVGAGTFQPVRADNIEDHQMHAEFADVSESVCAAVREAQQRGGRVIAVGTTAVRSLESASAGGEIQPFTGDTDIFIFPGYRFRTVDAMITNFHLPESTLMMLVSAFAGREHIMRAYREAIAERYRFFSYGDAMFIRSRKPY

SEQ ID NO: 67136 - protein, 354 aa, Haliscomenobacter hydrossis
  REGION 1..354: note = tr|F4KTT4|F4KTT4_HALH1 S-adenosylmethionine:tRNA ribosyltransferase-isomerase OS=Haliscomenobacter hydrossis (strain ATCC 27775 / DSM 1100 / LMG 10767 / O); OX = 760192GN=queA PE=3 SV=1
MRTKLSQFTYELPKKLIAQYPADSRHEARMMVVNRQTGTIEHKVFKDVLNIFSEGDVMVFNNTKVFPARLYGRKEKTGAKIEVFLLRELNNESRLWDVLVDPARKIRVGNKLYFSDDNDNDILVAEVVDNTTSRGRTIRFLYDGTDDEFQRELATLGNTPLPKYIIRPAEDVDRDRYQTVYAKEIGAVAAPTAGLHFSRELMKRLELKGIDFAELTLHVGLGTFRSIDVEDLSKHKMDAEYFRIPAVSVDLVNSAKERNHRICAVGTTSMRAIESAVSAEGLLKPAEGWTNKFIYPPYEFSIADSMITNFHLPKSSLLIMICAFGGYELIMQAYEEAVKEEYRFFSYGDSMLII

SEQ ID NO: 67137 - protein, 431 aa, Haliscomenobacter hydrossis
  REGION 1..431: note = tr|F4KSN7|F4KSN7_HALH1 S-adenosylmethionine:tRNA ribosyltransferase-isomerase OS=Haliscomenobacter hydrossis (strain ATCC 27775 / DSM 1100 / LMG 10767 / O); OX = 760192GN=Halhy_0088 PE=3 SV=1
MRVQDIRIEDYQYVLPEGRIAKYPLPLRDASKLLVAIDVASGFQEDIYANIHHYIPNGALMLFNNTKVIPARLHMAKPTGGMVEIFCLEPIGELSVEMARHGETTWKCFVGGAKKWKEGTVTAVWGTDSYREYLLSAEVIERTDTYFHIKFRWQPSEFTFAEVLSAIGQIPLPPYLDREAEELDRERYQTIYANLEGSVAAPTAGLHFTEKVFDDLRAKNIDLAYVTLHVGAGTFKPVSATTIGNHDMHAEYFDVSRYLIQDLYTAYSEKRPVIAVGTTTLRTLESLFLMGCKLLDASASLSNRASASLSNRASASLSDLSHEDLEIKQWDAYQLAHETTDVPRALSALLDWMDQQGLDRMVAKTQLLIAPGYTIRMISGLCTNFHQPGSTLLLLVAALMGNRWKEMYQYALEHDYRFLSYGDGCYIELKS

SEQ ID NO: 67138 - protein, 344 aa, unidentified
  source 1..344: note = Haloarcobacter mediterraneus
  REGION 1..344: note = tr|A0A4V1M1M6|A0A4V1M1M6_9PROT S-adenosylmethionine:tRNA ribosyltransferase-isomerase; OS = Haloarcobacter mediterraneus OX=2023153 GN=queA PE=3; SV = 1
MMKSNLDPLKTSSYDYNLPKELIATKPVYPADSAKLLVYNRETDTITHTTFKSLMHVLPDNLSVFLNDTKVIKARIFGEKESGGKVELLFNKPLFMDRYLVMIRGKVKIGTKLFFPMNLQAEVLEVNDDGSRVVNFIQNDKKLDFLSLVEILNEIGHLPLPPYMNREDEEKDNEDYQTLFAKNYGAVAAPTASLHFTEELLEKINNKYDVNYLTLHVGAGTFKPVDSEDILSHPMHSEYFEIGSEAKKSLDEAQKVLAVGTTVTRTVEYYARTNKIQGECDLFLNPANKPIKVDHLLTNFHLPKSTLIMLIASFVGLEKTLEIYEEAIKEKYRFYSYGDGMLII

SEQ ID NO: 67139 - protein, 341 aa, Halobacillus aidingensis
  REGION 1..341: note = tr|A0A1H0P1L9|A0A1H0P1L9_HALAD S-adenosylmethionine:tRNA ribosyltransferase-isomerase; OS = Halobacillus aidingensis OX=240303 GN=queA PE=3 SV=1
MDIKQYDFDLPEELIAQVPLEDRTASRLMVCDRNEQTIEHRHFSQITDYLEKGDCLVLNDTKVLPARLYGAKEGTGGKVEVLLLHQTEDDEWDVLVKPAKKVKVGTKIVFGEGKLVAECTELQEHGGRKVKFSYDGIFLEVLESLGEMPLPPYIKEQLSDRDRYQTVYAKEEGSAAAPTAGLHFTEELLKDLQSNGIELAYLTLHVGLGTFRPVSVDQVEEHDMHAEFYQLSEETADQLNAVKERGGRIISVGTTSTRTLETIIRDHGTFKEASGWTDIFIYPPQKLKAIDGLITNFHLPKSTLIMLVSAFAGRDFILEAYRQAVEERYRFFSFGDAMFIK

SEQ ID NO: 67140 - protein, 341 aa, Halobacillus alkaliphilus
  REGION 1..341: note = tr|A0A1I2JE90|A0A1I2JE90_9BACI S-adenosylmethionine:tRNA ribosyltransferase-isomerase; OS = Halobacillus alkaliphilus OX=396056 GN=queA PE=3 SV=1
MDIKQYDFELPEELIAQVPLQDRSSSRLMVCDRSAETIEHYHFSDIERLLKPGDCLVLNDTRVLPARLFGAKEDTGGKVEVLLLHQDSKDEWDVLIKPAKKVKPGSRIVFGDGQLIAECTELQEHGGRKVRFSYEGIFMEVLESLGEMPLPPYIKEQLSDRERYQTVYAKEEGSAAAPTAGLHFTNELLENLQASGVTIAYLTLHVGLGTFRPVSVDKVEDHDMHAEFYQVSQETADQLNQVKKQGGRIISVGTTSTRTLETIIRDYGTFQEASGWTDIFIYPPQKLKAIDGLITNFHLPKSTLIMLVSAFAGRDFVLEAYARAVENKYRFFSFGDAMLII

SEQ ID NO: 67141 - protein, 341 aa, Halobacillus dabanensis
  REGION 1..341: note = tr|A0A1I3P774|A0A1I3P774_HALDA S-adenosylmethionine:tRNA ribosyltransferase-isomerase; OS = Halobacillus dabanensis OX=240302 GN=queA PE=3 SV=1
MDIKQYDFELPEELIAQVPLEDRTASRLMVCDRNKETIEHRHFSQITDYLEEGDCLVLNDTKVLPARLYGAKEDTGGKVEVLLLHQTESDEWEVLVKPAKKVKLGTKIVFGDGQLIAECTDLQEHGGRKVKFSYEGIFLEVLESLGEMPLPPYIKEQLPDRERYQTVYAKEEGSAAAPTAGLHFTRELLQELENLGVEIAYLTLHVGLGTFRPVSVEQVEDHDMHAEFYQLNKETADKLNAVRASGGRIISVGTTSTRTLETIIRDYGTFKEAKGWTDIFIYPPQKLKAIDGLITNFHLPKSTLIMLVSAFAGRDFILEAYNRAVEEKYRFFSFGDAMFIK

SEQ ID NO: 67142 - protein, 341 aa, Halobacillus faecis
  REGION 1..341: note = tr|A0A511WNT7|A0A511WNT7_9BACI S-adenosylmethionine:tRNA ribosyltransferase-isomerase; OS = Halobacillus faecis OX=360184 GN=queA PE=3 SV=1
MEIKQYDFDLPEELIAQVPLEDRTASRLMVCDRTEQTIEHRHFSQITDYLEKGDCLVLNNTKVLPARLYGAKEGTGGKVEVLLLHQTEDDEWDVLVKPAKKVKVGTKIVFGEGKLVAECTELQEHGGRKVKFRYEGIFLEVLESLGEMPLPPYIKEQLSDRDRYQTVYAKEEGSAAAPTAGLHFTEELLEDLQAKGIEIAYLTLHVGLGTFRPVSVDQVEEHDMHAEFYQLSEETANQLNAVKERGGRIISVGTTSTRTLETIIRDHGTFKEASGWTDIFIYPPQQLKAIDGLITNFHLPKSTLIMLVSAFAGRDFILEAYKQAVEERYRFFSFGDAMFIK

SEQ ID NO: 67143 - protein, 341 aa, Halobacillus halophilus
  REGION 1..341: note = tr|I0JPB7|I0JPB7_HALH3 S-adenosylmethionine:tRNA ribosyltransferase-isomerase OS=Halobacillus halophilus (strain ATCC 35676 / DSM 2266 / JCM 20832 / NBRC 102448/ NCI MB 2269) OX=866895 GN=queA PE=3 SV=1
MDIKQYDFELPEELIAQVPLQDRSSSRLMVCDRSAETIEHYHFSDIERLLKPGDCLVLNDTRVLPARLFGAKEDTGGKVEVLLLHQDTKDEWDVLIKPAKKVKPGTRIVFGDGQLIAECTEMQEHGGRKVRFSYEGIFMEVLESLGEMPLPPYIKEQLSDRERYQTVYAKEEGSAAAPTAGLHFTNELLENLQASGVTIAYLTLHVGLGTFRPVSVDKVEDHDMHAEFYQVSQETADQLNQVKKQGGRIISVGTTSTRTLETIIRDYGTFQEASGWTDIFIYPPQKLKAIDGLITNFHLPKSTLIMLVSAFAGREFVLEAYARAVENKYRFFSFGDAMLIV

SEQ ID NO: 67144 - protein, 341 aa, Halobacillus karajensis
  REGION 1..341: note = tr|A0A024P6Q7|A0A024P6Q7_9BACI S-adenosylmethionine:tRNA ribosyltransferase-isomerase; OS = Halobacillus karajensis OX=195088 GN=queA PE=3 SV=1
MDIKQYDFELPEELIAQVPLEDRTSSRLMICDRQEQTIEHRHFSQITDYLVEGDCLVLNDTKVLPARLYGSKEGTGGKVEVLLLHQTKEDEWEVLVKPAKKVKIGTKIVFGEGKLVAECTDLQDHGGRKVRFEYEGIFLEVLESLGEMPLPPYIKEQLSDRDRYQTVYAKEEGSAAAPTAGLHFTNELLDELQNRGVEIAYLTLHVGLGTFRPVNVDQIEEHDMHAEFYQLNEDTATQLNAVKDRGSRIISVGTTSTRTLETIIRDHGIFKEAKGWTDIFIYPPQQLKAIDGLITNFHLPKSTLIMLVSAFAGRDFILEAYQEAVKERYRFFSFGDAMFIK

SEQ ID NO: 67145 - protein, 341 aa, Halobacillus litoralis
  REGION 1..341: note = tr|A0A410MHD9|A0A410MHD9_9BACI S-adenosylmethionine:tRNA ribosyltransferase-isomerase; OS = Halobacillus litoralis OX=45668 GN=queA PE=3 SV=1
MDIKQYDFELPEELIAQVPLENRSSSRLMVCNRRTNEIEHRHFSQITEYLNSGDCLVLNDTRVLPARLYGAKEDTGGKVEVLLLHQTEKDEWEVLIKPAKKVKVGTRIVFGEGQLTAECTEIQEHGGRKVKFSYDGIFLEVLDSLGEMPLPPYIKEQLPDRERYQTVYAKEEGSAAAPTAGLHFTEDLLEELQAKGIEMAYLTLHVGLGTFRPVSVDNVEEHDMHAEFYQLNQQTADQLNEVRQRGGRIISVGTTSTRTLETIIRDHGTFTAASGWTDIFIYPPQTLKAIDGLITNFHLPKSTLIMLVSAFAGRDFILEAYRKAVEERYRFFSFGDAMFIT

SEQ ID NO: 67146 - protein, 344 aa, Halobacillus mangrovi
  REGION 1..344: note = tr|A0A1W5ZVX8|A0A1W5ZVX8_9BACI S-adenosylmethionine:tRNA ribosyltransferase-isomerase; OS = Halobacillus mangrovi OX=402384 GN=HM131_11355 PE=3 SV=1
MNEISTAFQIPNHLNAHIPAEQRGLRRDQVKMMVVGIDRKPVHSRFDLLDQFLNSGDVLVLNKSRTIPPVLRGSQGNNPIEIRLSRKLSTNQWEALVLGRVINRKQPIYFPDGVTARIAGMGSERPLVSLTFSETGSSLFSFIYDYGDPIRYEYIDYPWPLDTYQTVYGSVPGSAEMPSAGRAFTWKMIKHLKAKGIKIAFLHLHTGLSYYEDDRWPDPKNHPEPYHVPLETVKIIQQAKAARKRIIAVGTTVVRALETSVNEEGNLYESEGNTSLYVDQHYKHAVVDGLLTGFHEPEASHLDMLSSFLPANELLKAYEEALQNNYLWHEFGDMNLLFSSSDQS

SEQ ID NO: 67147 - protein, 341 aa, Halobacillus mangrovi
  REGION 1..341: note = tr|A0A1W5ZUH3|A0A1W5ZUH3_9BACI S-adenosylmethionine:tRNA ribosyltransferase-isomerase; OS = Halobacillus mangrovi OX=402384 GN=queA PE=3 SV=1
MDIKQYDFDLPEELIAQVPLQDRSSSRLMVLDRAQETIEHHYFSDISQFIQPGDCLVLNDTRVLPARLYGAKEGTGGKVEVLLLHQSEGDEWEVLVKPAKKVKAGTKITFGNGQLVAECTEIQEHGGRKVRFSYEGIFLEVLESLGEMPLPPYIKEQLPDRERYQTVYAKEEGSAAAPTAGLHFTTELLQSLEEKGVEIAYLTLHVGLGTFRPVSVDQIEEHDMHAEFYQLSEETAEQLNRVKENGGKIISVGTTSTRTLETVIRDYGTFTAASGWTDIFIYPPQKLKAIDGLITNFHLPKSTLIMLVSAFAGRDFILEAYNRAVQERYRFFSFGDAMLIL

SEQ ID NO: 67148 - protein, 335 aa, Halobacillus salinus
  REGION 1..335: note = tr|A0A4Z0H055|A0A4Z0H055_9BACI S-adenosylmethionine:tRNA ribosyltransferase-isomerase; OS = Halobacillus salinus OX=192814 GN=E4663_02095 PE=3 SV=1
MHAFSIPENLNAQTPAEIVRGRRDQVRLLSIDKDQQLFHNNFNEIDQFLNPGDLLVLNNSRTIPPVLEASQGNHTFEIRLSRKRSSTSWEALVVGDFLAIDRPIQLEEKVEAMITGHGSEHPLVTLEFSISGSNLLDFIYRNGEPVRYEYIHRPFSLDTYQTVYGSVPGSVEMPSAGRAFTWGLLEKLKRKGVRLAFIQLHAGLSYYEKDRWPNPNNHPEAFCVPEATAELIQDTRRTGNRVIAVGTTVVRALESAVTSHGEVEPIEGTTRLYVDEGYTIAAVDGLLTGFHEPEASHLHMLTAFLPKKKLMSAYHQALEKGYLWHEFGDMNLILK

SEQ ID NO: 67149 - protein, 341 aa, Halobacillus salinus
  REGION 1..341: note = tr|A0A4Z0H1B4|A0A4Z0H1B4_9BACI S-adenosylmethionine:tRNA ribosyltransferase-isomerase; OS = Halobacillus salinus OX=192814 GN=queA PE=3 SV=1
MDIKQYDFELPEELIAQVPLEDRTSSRLMVLNREDQTIKHQQFSDIKQFIQPGDCLVLNDTKVLPARLYGAKEDTGGKVEVLLLHQTEEDEWDVLVKPAKKVKEGTRIEFGDGQLVAECTDIQEHGGRRVRFSYEGIFLEVLESLGEMPLPPYIKEQLSDRDRYQTVYAKEEGSAAAPTAGLHFTNELLQELKDEGVELAYLTLHVGLGTFRPVSVDNVEEHDMHAEFYQLSEETAAQLNRVRENGGRIISVGTTSTRTLETVIRDYGTFQEASGWTDIFIYPPQKLKAIDGLITNFHLPKSTLIMLVSAFADRDFILEAYHRAVEERYRFFSFGDAMLIL

SEQ ID NO: 67150 - protein, 345 aa, Halobacillus sp.
  REGION 1..345: note = tr|A0A0B0D0N1|A0A0B0D0N1_9BACI S-adenosylmethionine:tRNA ribosyltransferase-isomerase; OS = Halobacillus sp. BBL2006 OX=1543706 GN=LD39_12300 PE=3; SV = 1
MSNLPERFQVPDNLNAVSPAEYEGGSRDQVRMMVLDQSLPKPLHNQFNQIGQYLNPGDILVLNNSRTIPPVLKGKQGKNPVEVRLSREISTNQWEALVLGPLTQANAAIILPDEMKAYITGTGSEHPLVTLTFSESGRSLLDFLYRYGEPVRYEYIDQPWPLDAYQTVYGSLPGSVEMASAGRAFTWKLLNSLKAKGIKLAFIQLHTGLSYYEKNRWPDPRNHPENYRVPEDTVKMIQSVKSEGNRVIAVGTTVVRALESSVNCNGELVAHSGVTTLYVDHHHKHSVVDGLLTGFHEPEASHLDMLASFLPESTLMNGYNEAIQKGYLWHEFGDMNLLLPSRKRT

SEQ ID NO: 67151 - protein, 341 aa, Halobacillus sp.
  REGION 1..341: note = tr|A0A3S3ZPH7|A0A3S3ZPH7_9BACI S-adenosylmethionine:tRNA ribosyltransferase-isomerase; OS = Halobacillus sp. SKP4-6 OX=2498856 GN=queA PE=3 SV=1
MDIKQYDFELPEELIAQVPLKDRSSSRLMVLNRQEEKIEHQHFADIKSYIQPGDCLVLNDTRVLPARLYGAKEETGGKVEVLLLHQQEGDEWEVLVKPAKKVKLGTRIVFGDGQLIAECTEVQEHGGRKVRFLYEGIFLEVLESLGEMPLPPYIKEQLSDKERYQTVYAKEEGSAAAPTAGLHFTHELLEELEASGVEIAYLTLHVGLGTFRPVSVDQIEEHDMHAEFYRLSKETADQLNRVRANGGRIISVGTTSTRTLETIIRDHGTFKEASGWTDIFIYPPQKLQAIDGLITNFHLPKSTLIMLVSAFASREFILDAYREAVQERYRFFSFGDAMLIL

SEQ ID NO: 67152 - protein, 341 aa, Halobacillus trueperi
  REGION 1..341: note = tr|A0A3E0JCQ7|A0A3E0JCQ7_9BACI S-adenosylmethionine:tRNA ribosyltransferase-isomerase; OS = Halobacillus trueperi OX=156205 GN=queA PE=3 SV=1
MDIKQYDFDLPEELIAQVPLEDRTASRLMVCDRNEQTIEHRHFSQITDYLEKGDCLVLNDTKVLPARLYGAKEGTGGKVEVLLLHQTEDDEWDVLVKPAKKVKVGTKIVFGEGKLVAECTELQEHGGRKVTFSYEGIFLEVLESLGEMPLPPYIKEQLSDRDRYQTVYAKEEGSAAAPTAGLHFTEELLKDLQSKGIELAYLTLHVGLGTFRPVSVDQVEEHDMHAEFYQLSEETADQLNAVKERGGRIISVGTTSTRTLETIIRDHGTFKEASGWTDIFIYPPQKLKAIDGLITNFHLPKSTLIMLVSAFAGRDFILEAYKQAVEERYRFFSFGDAMFIK

SEQ ID NO: 67153 - protein, 341 aa, Halobacillus trueperi
  REGION 1..341: note = tr|A0A3D8VRI5|A0A3D8VRI5_9BACI S-adenosylmethionine:tRNA ribosyltransferase-isomerase; OS = Halobacillus trueperi OX=156205 GN=queA PE=3 SV=1
MDIKQYDFDLPEELIAQVPLEDRTASRLMVCDRNEQTIEHRHFSQIIDYLEKGDCLVLNDTKVLPARLYGAKEGTGGKVEVLLLHQTEDDEWDVLVKPAKKVKVGTKIVFGEGKLVAECTELQEHGGRKVKFSYDGIFLEVLESLGEMPLPPYIKEQLSDRDRYQTVYAKEEGSAAAPTAGLHFTEELLKDLQSNGIELAYLTLHVGLGTFRPVSVDQVEEHDMHAEFYQLSEETADQLNAVKERGGRIISVGTTSTRTLETIIRDHGTFKEASGWTDIFIYPPQKLKAIDGLITNFHLPKSTLIMLVSAFAGRDFILEAYRQAVEERYRFFSFGDAMFIK

SEQ ID NO: 67154 - protein, 347 aa, unidentified
  source 1..347: note = Halobacteriovoraceae bacterium
  REGION 1..347: note = tr|A0A2E5X0T9|A0A2E5X0T9_9PROT S-adenosylmethionine:tRNA ribosyltransferase-isomerase; OS = Halobacteriovoraceae bacterium OX=2026745 GN=queA PE=3; SV = 1
MKREDLLTESYDYELPEELIAQRPAPERDHSKLMVYKHKSETVDHSKFHNIADYLPAGTLLVLNQSKVFPCRLMGKKPTGGKAEVLFLSLLDEGGLYPVMLKTSGKKKLGDVFLFGELKLKIERILEDGSFYVQTNLEGEDLLDYLESRAHIPIPPYIREGVADESDKKDYQTVYAKHAGSVAAPTAGLHFTNKVFDSLKEKGIEIAKVTLHVGAGTFKPVSADEITDHKMHREHFDISDEDLEKLNSAKNIFAVGTTTLRVLESCYSDGKFALPEEKSTDIFLYPGKEVKSIQGLITNFHLPKSTLLMLVSSIVGREKTLSLYKEAVEKKYRFFSYGDSMMIMRNE

SEQ ID NO: 67155 - protein, 350 aa, unidentified
  source 1..350: note = Halobacteriovoraceae bacterium
  REGION 1..350: note = tr|A0A2E2EJA4|A0A2E2EJA4_9PROT S-adenosylmethionine:tRNA ribosyltransferase-isomerase; OS = Halobacteriovoraceae bacterium OX=2026745 GN=queA PE=3; SV = 1
MKNIDLLTESYHYELDPKFIADRPTKHRHDSKLMVYYEQDDRIEHVLFKDLPRFLEPEHLLVLNQSKVFPCRLLGQKVSGGKAELFLLSLIANNGVYPAMIKASGKKNIGDRLLFGDLEATITQRNSQGEFFVSFNKSHSELTELLHTQAHIPIPPYIRSGQADKKDMTDYQTVYAKELGSVAAPTAGLHFTESVFSELESKGIQKAFVTLHVGAGTFKPVKSDHILEHTMHEECFYIDPKNLSLLNANSKRIAVGTTSLRVLESCASQERIIFESGEGMKTTDIFLYPGKKIESISGLITNFHLPKSTLLMLVSSLIGREKTLELYEVAKKMNYRFFSYGDAMLILRKK

SEQ ID NO: 67156 - protein, 348 aa, unidentified
  source 1..348: note = Halobacteriovorax marinus
  REGION 1..348: note = tr|E1X0T2|E1X0T2_HALMS S-adenosylmethionine:tRNA ribosyltransferase-isomerase OS=Halobacteriovorax marinus (strain ATCC BAA-682 / DSM 15412 / SJ) OX=862908 GN=queA P; E = 3 SV=1
MSSADLTLSNYDFDLPKELVASRPIAGRHNSKLLVYKVKSGEIIHEHFYNLANYLPEDSLLVLNQSKVFPCRLIGKKPTGGKCEVFLLESYPNSNGEYKSLIKTSSKKSVGDEFFFEDELVAKIERIDEGNFYISFNRENLAEYLNEYAKIPIPPYIRNGESDELDKSDYQTVFAKNIGSVAAPTAGLHFTEDVFKSLQEKNIERAYVTLHVGLGTFAPVKTDNLQDHKMHSENYFIDTENKEKILSKKEIFAVGTTSLRVLESSHNGENFDIEANEIKETDIFLHPGVDVHSINGLITNFHLPKSTLLMLVSSLIGREKTLELYKEAIANEYRFFSYGDSMLILRDQ

SEQ ID NO: 67157 - protein, 348 aa, unidentified
  source 1..348: note = Halobacteriovorax marinus
  REGION 1..348: note = tr|A0A1Y5F8U7|A0A1Y5F8U7_9PROT S-adenosylmethionine:tRNA ribosyltransferase-isomerase; OS = Halobacteriovorax marinus OX=97084 GN=queA PE=3 SV=1
MNEQDLLLSKYDFDLPKELIATRPVAGRHHSKLLVYKVKSNEVIHDEFRNISNYIPKSSLLVVNQSKVFPCRLMGTKSTGGKCEIFILDIEKNAEGLREVLIKTTSKKRLEQEFFFEDGLVAKLKKIEEGQFFVEFNLDDLGSYLESHGKIPIPPYIRNGQSDEQDKSDYQTVFAKDTGSVAAPTAGLHFTEDVFADLRAKEIERAEVTLHVGLGTFAPVKTDNLKDHNMHTERYFVDVENLKKLKSHKSIFAVGTTSLRVLESCHDGSDFVIEPNVIKETNIFLHPGVEVKSISGLLTNFHLPKSTLLMLVSSLIGREKTLELYKTAIENEYRFFSYGDAMLILRDQ

SEQ ID NO: 67158 - protein, 347 aa, unidentified
  source 1..347: note = Halobacteriovorax sp.
  REGION 1..347: note = tr|A0A2D5YRB0|A0A2D5YRB0_9PROT S-adenosylmethionine:tRNA ribosyltransferase-isomerase; OS = Halobacteriovorax sp. OX=2020862 GN=queA PE=3 SV=1
MTIDNDLKLSSYSYDLPKSFIADRPVVGRQNSKLLVFDNKTQEVVHDYFYNIDKYLPKESLIVFNQSKVFPCRLIGEKRTGGKVEVFLLDAKANEDGLHRALVKSSGKKRVGDTYFFDNDLELTIKEVLDGTFFLKANIEDLESFLFKYAKVPIPPYIRDGDSDEKDLEDYQTVYAKHTGSVAAPTAGLHFTDEVFQKLGNKDIKQAYVTLHVGLGTFAPVKVDDLTTHKMHTEEYFIEKKDLETIKGEQFVTAVGTTSLRTLESAHRIGLDNFKPSEIYDTDIFLYPGVEVKSINALVTNFHLPESTLLMLVSSLIGREKTLELYEVAKENQYRFFSYGDAMLILR

SEQ ID NO: 67159 - protein, 343 aa, unidentified
  source 1..343: note = Halobacteriovorax sp.
  REGION 1..343: note = tr|A0A4Z0KWX3|A0A4Z0KWX3_9PROT S-adenosylmethionine:tRNA ribosyltransferase-isomerase; OS = Halobacteriovorax sp. Y22 OX=2505978 GN=queA PE=3 SV=1
MQLSAYDYDLPKELIATRPVEGRHHSRLLVYNCQTDTVSHHTFNELVNFLPQETTLVLNQSKVFPCRLKGKKETGGSIEVFFLTVEPNKDGLYRALVKANGKKKAGDIYHFEDGLKIEINGNIEGEFLIRPSLIGNDLINYLNAHALVPIPPYIRGGESDEQDKKDYQTVFANELGSVAAPTAGLHFTDELLSKIKEEGHDIAKVTLHVGLGTFAPVKVDNLEDHKMHSENYCVDKNDFEKIKNAKKRFAVGTTSLRTLETIWQAGVENYTPGELKDTDIFLHPGVDVKSIDGLITNFHLPKSTLLMLVSALIGREKTLELYDIAVKEKYRFFSYGDAMLILR

SEQ ID NO: 67160 - protein, 341 aa, Halobacteroides halobius
  REGION 1..341: note = tr|L0K9T1|L0K9T1_HALHC S-adenosylmethionine:tRNA ribosyltransferase-isomerase OS=Halobacteroides halobius (strain ATCC 35273 / DSM 5150 / MD-1) OX=748449 GN=queA; PE = 3 SV=1
MKVEEFDFDLPEELIAQQPVEPRDESRLMVVDRQKDEIKEEVFKNIIDYFEPGDLLVRNNTKVIPARLFGNKEKTGGKVEFLLLNRVKLDTWETLVKANGKVKVGTRIVFGEGKLIAEVKDKTDFGGRIVEFEHDGIFEEILDELGSMPLPPYIKEELDNPEKYQTVYAKNRGAAAAPTAGLHFTDRLLQQIKDKGVKIADVTLHVGLGTFRPVKVDDVEEHDMHSEYYEVSQETAQLINQTKKKGKRVFAVGTTTTRTLETVVSEDGQIEAKKGWTDIFIYPGYNFKAIDALITNFHLPQSTLIMMVAALAGKSRILTAYQRAIEEEYRFYSLGDGMLII

SEQ ID NO: 67161 - protein, 340 aa, Halocella sp.
  REGION 1..340: note = tr|A0A3Q9B882|A0A3Q9B882_9FIRM S-adenosylmethionine:tRNA ribosyltransferase-isomerase; OS = Halocella sp. SP3-1 OX=2382161 GN=queA PE=3 SV=1
MDVNEFDYYLPEKLIAQQPVPNRDESRLMVLDKATGEIEDRIFKDIIDLLDPGDLLVMNNSRVIPARLYGKKVSTGTDIEVLLLTEKEEGVWEVLVRPGKRVKKGVEISFGDNELMAKAVEYTEFGGRIMEFSYQGKFNEIIERLGELPLPPYIHEKLAEPGRYQTVYARKPGSAAAPTAGLHFTPQLIKQLEEKGIDIAYITLHVGLGTFRPVKVDKVEKHQMHSEYYELDTATAELIKEKKESGKRVISVGTTVTRTLETIAAKGEIKAKKGWTDIFIYPPYKFKVIDSLITNFHLPRSTLLMLVSAFAGKEKVLTAYKEAVNREYRFFSLGDAMFIK

SEQ ID NO: 67162 - protein, 348 aa, unidentified
  source 1..348: note = Halocynthiibacter arcticus
  REGION 1..348: note = tr|A0A126V2C3|A0A126V2C3_9RHOB S-adenosylmethionine:tRNA ribosyltransferase-isomerase; OS = Halocynthiibacter arcticus OX=1579316 GN=queA PE=3 SV=1
MKLSDFDFDLPEDRIAVRPAVPREAARLLVAQGTGIADLHVADLLDQFRAGDRLVLNDTKVIPARLFGTRARDGVEGLTQAKIDVTLLAPRGDGNWLALVKPLRKIKEGETVVFTDGLSARLIAKEDGAAILAFNLEGSAFDEALEAAGAMPLPPYIAAKRPADAQDHVDYQTVFARHKGAVAAPTASLHLTTEMLEALAKKGVDVTYVTLHVGAGTFLPVKVDDISDHKMHAEWGEVTAQAVAEIAGTKAAGHRVIPVGTTALRLIETAARAGELAPWVGPTDIFITPGFEFRVADGLMTNFHLPKSTLMMLVSAFLTPKAIRYIYEHAIAEGYRFFSYGDSSLLWR

SEQ ID NO: 67163 - protein, 372 aa, unidentified
  source 1..372: note = Halodesulfovibrio marinisediminis
  REGION 1..372: note = tr|A0A1N6EVB7|A0A1N6EVB7_9DELT S-adenosylmethionine:tRNA ribosyltransferase-isomerase; OS = Halodesulfovibrio marinisediminis DSM 17456 OX=1121457; GN = queA PE=3 SV=1
MERDSHCIKQNLQTIPEDFRLSAYTYELPEDQIAQNPADKRGSSRLFVIDRKSGKNHSAMFADLGKFLPKNALLVVNNSKVLPARLYGQRPSGGKVEFLMLTPLPLIKPVDNGEWKSATVEGLMRMSKRVKVGTKAEFGDDLWIEVTKTAEFGRCEATINWRGELKDHFLKQGHLPLPPYIKREDTTADKDRYQTVYANDSQLGSVAAPTAGLHFTEEMREELSQSGIEWAEVTLYVGYGTFSPVRCDDIREHSMHKEFIELSEETAKKIAKAKAEGRPVIAVGTTSSRVLEGAFKEVGHIAPFKGWTDIFIYPGYKFNVVDHMITNFHLPESSLLMMISAFASKQRILDGYAEAIEQGFRVFSYGDSMLIL

SEQ ID NO: 67164 - protein, 358 aa, unidentified
  source 1..358: note = Halodesulfovibrio spirochaetisodalis
  REGION 1..358: note = tr|A0A1B7XCY2|A0A1B7XCY2_9DELT S-adenosylmethionine:tRNA ribosyltransferase-isomerase; OS = Halodesulfovibrio spirochaetisodalis OX=1560234 GN=queA; PE = 3 SV=1
MPEDFRLSSYTYDLPEDQVAQHPADKRGSSRLFVINRESGENHAAMFTDLADFLPKNALLVVNNSKVLPARLYGQRPSGGKVEFLMLTPLPLIEPIESGEWKSATVEGLMRMSKRVKVGTKAEFGNDLWIEVTETAEFGRCEATMHWRGELRDHFLNQGHLPLPPYIKREDTTADKDRYQTVYADDSQLGSVAAPTAGLHFTEEMREQLSQSGIEWAEVTLYVGYGTFSPVRCDDIREHTMHKEFIELTDETAQKIAKAKAEGRPVIAVGTTSSRVLEGAFKEAGGIAPFKGWTDIFIYPGYKFNVVDHMITNFHLPESSLLMMISAFASKKRILEGYAEAIEKGFRVFSYGDSMLII

SEQ ID NO: 67165 - protein, 342 aa, Halolactibacillus alkaliphilus
  REGION 1..342: note = tr|A0A511WY31|A0A511WY31_9BACI S-adenosylmethionine:tRNA ribosyltransferase-isomerase; OS = Halolactibacillus alkaliphilus OX=442899 GN=queA PE=3; SV = 1
MNIEDFDFDLPKELIAQTPLIDRSSSRLLVMNREKRTIEHGRFTNILNYLNKGDALVLNNTKVLPARIFGTKEDTGANIELLLLTQREGDSWEVLAKPAKKVKVGTVISFGEGKLKATCTELLEHGGRLVSFSYEGIFLEVLTELGEMPLPPYIKETLDDQSRYQTVYAKEQGSAAAPTAGLHFTEALLDEAKAKGVEICFVTLHVGLGTFRPVSVEKIEEHDMHSEFYILTEQEAEKINRVKSSGGRVISVGTTSTRTLETIARDYDGAIQAASGWTNIFIYPGYKFKAIDGLITNFHLPKSTLVMLVSAFSDRDFIMEAYHQAINERYRFFSFGDAMFIY

SEQ ID NO: 67166 - protein, 342 aa, Halolactibacillus halophilus
  REGION 1..342: note = tr|A0A1I5L0S7|A0A1I5L0S7_9BACI S-adenosylmethionine:tRNA ribosyltransferase-isomerase; OS = Halolactibacillus halophilus OX=306540 GN=queA PE=3 SV=1
MNIEDFDFDLPDELIAQTPLQDRSSSRLLVMNRQTRKIEHHHFKDILTYLNKGDALVLNNTKVLPARVFGTKEDTGANIEMLLLTQHEGDTWEVLAKPAKKVKEGTVVSFGDGKLKATCAKLLDHGGRLVEFSYDGIFLEVLTTLGEMPLPPYIKETLDDQSRYQTVYAKEQGSAAAPTAGLHFTEALLEEAKQKGVEICFVTLHVGLGTFRPVSVDSIEDHDMHSEFYVLSETEAEKINRVKQAGGRIISVGTTSTRTLETIARDHGGTITAASGWTNIFIYPGYQFKAIDGLITNFHLPKSTLVMLVSAFSDRDFIMEAYHAAINERYRFFSFGDAMFIQ

SEQ ID NO: 67167 - protein, 342 aa, Halolactibacillus miurensis
  REGION 1..342: note = tr|A0A1I6PKI0|A0A1I6PKI0_9BACI S-adenosylmethionine:tRNA ribosyltransferase-isomerase; OS = Halolactibacillus miurensis OX=306541 GN=queA PE=3 SV=1
MNIEDFDFHLPEELIAQTPLKDRSSSRLLVMNRQTRTIEHRHFKDILDYLNKGDALVLNNTKVLPARVFGTKEETGANIEMLLLTQHEGDTWEVLAKPAKKVKEGTIVSFGDGRLTATCTKILDHGGRLVEFSYDGIFLEVLTELGEMPLPPYIKETLDDQSRYQTVYAKEEGSAAAPTAGLHFTEALLEEAKEKGIEICFVTLHVGLGTFRPVSVDKIEEHDMHSEFYILTEAEAEKINRVKQSGGRIISVGTTSTRTLETIARDHDGAITAATGWTNIFIYPGYPFKAIDGLITNFHLPKSTLVMLVSAFSDRDFIMEAYHAAINERYRFFSFGDAMFIQ

SEQ ID NO: 67168 - protein, 368 aa, unidentified
  source 1..368: note = Halomicronema excentricum
  REGION 1..368: note = tr|A0A4Q7E0M0|A0A4Q7E0M0_9CYAN S-adenosylmethionine:tRNA ribosyltransferase-isomerase; OS = Halomicronema excentricum str. Lakshadweep OX=2294035; GN = queA PE=3 SV=1
MGVLPNSAKSMGIPDNSDFQLSAYNYELPPDRIAQNPVEPRDHARLLTITSARGHEHRHVYDLPSLLQPGDLLVLNDTKVLPARLFGQKVGGAAVEILLLEERASLEWLALVKPGKRLKPGAQIHFGENLDQPALIADVVASDPETNGRILKFTIPGPESFYEVCDRLGKMPLPPYITESTAPDDRYQTIYAEKLGAVAAPTAGLHFTPELFAQLDDRGIDRTFITLHVGVGTFRPVEAATITDHTMHAEWLDVPAATVEKIRQTKANGGRVIAVGTTVTRALEGAAQSGELQPLQGKTNLFIYPGYQWQVLDGLMTNFHLPESSLMMLVSAMIGRQRLLDLYAEAVRQDYRFYSFGDAMLILPTARR

SEQ ID NO: 67169 - protein, 371 aa, unidentified
  source 1..371: note = Halomicronema hongdechloris
  REGION 1..371: note = tr|A0A1Z3HR32|A0A1Z3HR32_9CYAN S-adenosylmethionine:tRNA ribosyltransferase-isomerase; OS = Halomicronema hongdechloris C2206 OX=1641165 GN=queA; PE = 3 SV=1
MSDPKHQSPHSSISNHHSLAAYHYVLPPECIAQTPARPRDHSRLLAVTSPTQHQHHRFRDLPDLLQPGDLLILNDTQVIPARLWGHKPAGAAVEVLLLEPQKTDRWLALVKPGRRLKPGATIHFGSKDSEPDLIAQVIATDADTNGRWLQFTTPKQDSLETVLQRLGQVPLPPYITHTDIPAEHYQTIYAEKPGAVAAPTAGLHFTPELFARLDQAGIQRAFITLHVGVGTFRPVETDNITQHTMHSEWVDVPPSVVKKIQTTHARGHRVIAVGTTVVRALEGAAQSGTLRPFRGKTNLFIYPGYKWQVIDGLITNFHLPGSSLLMLVSALIGRQRLLGLYQEAITSGYRFYSFGDAMIILPTALTHHKFS

SEQ ID NO: 67170 - protein, 346 aa, unidentified
  source 1..346: note = Halomonadaceae bacterium
  REGION 1..346: note = tr|A0A139CBN3|A0A139CBN3_9GAMM S-adenosylmethionine:tRNA ribosyltransferase-isomerase; OS = Halomonadaceae bacterium T82-2 OX=1783518 GN=queA PE=3; SV = 1
MQRSDFHFDLPEDLIARYPSEQRSDCRLLCVDAETQTLAHHHFPDLLTLLAPGDVVVFNDTRVIPARLHGQKASGGRVEMLLERPLDAQRGLAHLRASKSPKPGTELIFEGDIHAVVEGRRDALFELRFLGDTPLIELLERHGHMPLPPYITREDELSDRERYQTVYARRHGAVAAPTAGLHFDEPLLAAMRERGIETAFVTLHVGAGTFQPVRVDDIREHHMHSEWLEVDERVCEQINAARARGNRVIAVGTTSVRCLETAAAGREDGTIAPYRGETDIFIYPGYRWRCVDALVTNFHLPESTLVMLVSAFAGHDLTLRAYREAVAERYRFFSYGDAMFLTRKTP

SEQ ID NO: 67171 - protein, 347 aa, unidentified
  source 1..347: note = Halomonadaceae bacterium
  REGION 1..347: note = tr|A0A2E2BKV3|A0A2E2BKV3_9GAMM S-adenosylmethionine:tRNA ribosyltransferase-isomerase; OS = Halomonadaceae bacterium OX=2026746 GN=queA PE=3 SV=1
MQRADFHYELPDELIARYPSERRSDCRLLCVDGTSGALDHRRFPDLLEILEPGDLLVFNDTRVIPARLHGQKASGGRVEMLLERPLDAHRGLAHIRASKSPKPGTELIFEGDVRAVVEGRQDALFELRFLGETPLIALLEAHGHMPLPPYITREDELADRERYQTVYARRDGAVAAPTAGLHFDEPMMAALKEKGIESAFVTLHVGAGTFQPVRADDIRDHHMHSEWIEVDETACAKVREAKARGNRVVAVGTTGVRCLESACLKSEDGEIAPYSGETDIFIYPGYEWRCVDALVTNFHLPESTLLMLVSSFAGFEPVMNAYRAAVEEGYAFFSYGDAMFLTRADAG

SEQ ID NO: 67172 - protein, 345 aa, unidentified
  source 1..345: note = Halomonas aestuarii
  REGION 1..345: note = tr|A0A1J0VEH2|A0A1J0VEH2_9GAMM S-adenosylmethionine:tRNA ribosyltransferase-isomerase; OS = Halomonas aestuarii OX=1897729 GN=queA PE=3 SV=1
MQRADFHYELPEELIARYPSEQRSDCRLLCVDGESGALAHRRFTDLVELLEPGDLLVFNDTRVIPARLHGQKDSGGRVEMLLERPLDAHRGLAHLRSSKSPKPGTELIFEGGIRAVVEGRREALFELRFLGETPLISLLEQHGHMPLPPYITREDELADRERYQTVYARRDGAVAAPTAGLHFDEPLLAALAEKGVESAFVTLHVGAGTFQPVRADDIREHQMHSEWIEVTEEACEQVRQARAAGRRVIAVGTTSVRCLESACLKSPDGEIAAFSGETDIFIYPGYAWRCVDALVTNFHLPESTLLMLVSSFAGFDTTMAAYRSAVAERYAFFSYGDAMFLERAP

SEQ ID NO: 67173 - protein, 343 aa, Halomonas alkaliantarctica
  REGION 1..343: note = tr|A0A4R7YRV0|A0A4R7YRV0_9GAMM S-adenosylmethionine:tRNA ribosyltransferase-isomerase; OS = Halomonas alkaliantarctica OX=232346 GN=queA PE=3 SV=1
MQRADFHYELPDELIARYPSEQRSDCRLLCVDGQSGALEHRRFPDLLELLEPGDLLVFNDTRVIPARLHGHKASGGKVEMLLERPLDAHRGLAHIRSSKSPKPGTELIFEGDIHAIVEGRRDALFELRFLGDTPMIALLEKHGHMPLPPYITREDELSDRERYQTVYARRDGAVAAPTAGLHFDQPLLDALADKGINRAFVTLHVGAGTFQPVRVDNILEHHMHSEWIEVTEATCQQVRETLAAGKRVVAVGTTSVRCLESACMKSSDGQIAPYSGDTDIFIYPGYQWRCVDALITNFHLPESTLLMLVSSFVGYDTIMHAYQRAVAERYAFFSYGDAMLLTR

SEQ ID NO: 67174 - protein, 343 aa, Halomonas alkaliphila
  REGION 1..343: note = tr|A0A386WXF9|A0A386WXF9_9GAMM S-adenosylmethionine:tRNA ribosyltransferase-isomerase; OS = Halomonas alkaliphila OX=272774 GN=queA PE=3 SV=1
MQRADFHFELPDELIARYPSEQRSDCRLLCVDGQSGALEHRRFPDLFELLEPGDLLVFNDTRVIPARLHGHKASGGKVEMLLERPLDSHRGLAHIRSSKSPKPGTELIFEGDIHAVVEGRRDALFELRFLGDTPMIALLEKHGHMPLPPYITRDDELSDRERYQTVYARRDGAVAAPTAGLHFDQPLLDALAEKGVNSAFVTLHVGAGTFQPVRVDNILEHHMHSEWIEVSETACQQVRDTQAAGKRVIAVGTTSVRCLESACLKSSDGQIAPYSGDTDIFIYPGYEWRCVDALITNFHLPESTLLMLVSAFAGYDHMMRAYRTAVDERYAFFSYGDAMLLTR

SEQ ID NO: 67175 - protein, 343 aa, Halomonas andesensis
  REGION 1..343: note = tr|A0A3S0W649|A0A3S0W649_9GAMM S-adenosylmethionine:tRNA ribosyltransferase-isomerase; OS = Halomonas andesensis OX=447567 GN=queA PE=3 SV=1
MQRADFHFELPDELIARYPSEQRSDCRLLCVDGQSGALEHRRFPDLLELLEPGDLLVFNDTRVIPARLHGHKASGGKVEMLLERPLDSHRGLAHIRSSKSPKPGTELIFEGDIHAVVEGRRDALFELRFLGDTPMIALLEKHGHMPLPPYITRDDELSDRERYQTVYARRDGAVAAPTAGLHFDQPLLDALAEKGINSAFVTLHVGAGTFQPVRVDNILEHHMHSEWIEVSEAACQKVRDTQAAGKRVIAVGTTSVRCLESACLKSSDGQIAPYSGDTDIFIYPGYEWRCVDALITNFHLPESTLLMLVSAFAGHEHMMRAYHAAVDERYAFFSYGDAMLLIR

SEQ ID NO: 67176 - protein, 346 aa, Halomonas anticariensis
  REGION 1..346: note = tr|S2KIY4|S2KIY4_HALAF S-adenosylmethionine:tRNA ribosyltransferase-isomerase OS=Halomonas anticariensis (strain DSM 16096 / FP35) OX=1121939 GN=queA PE=3 SV=1
MQRADFHYELPSELIARYPSERRSDCRLLCVDGTTGELAHRHFPDLLELLEPGDLLVFNDTRVIPARLHGHKASGGRVEMLLERPLDTHRGLAHLRASKSPKPGTELVFEGDIHAVVEGRREALFELRFLGETPMIELLERHGHMPLPPYITREDDPSDRERYQTVYARRDGAVAAPTAGLHFDEPLLAALAAKGVESAFVTLHVGAGTFQPVRADDIREHQMHSEWIDVSADVCEKVRTARAAGRRVVAVGTTSVRCLESACLMSDSGDIAPYSGDTDIFIYPGYEWRCVDALVTNFHLPESTLLMLVASFAGFDTVMNAYQAAVAERYAFFSYGDAMFLTRKTH

SEQ ID NO: 67177 - protein, 343 aa, Halomonas aquamarina
  REGION 1..343: note = tr|A0A1H8HAF2|A0A1H8HAF2_9GAMM S-adenosylmethionine:tRNA ribosyltransferase-isomerase; OS = Halomonas aquamarina OX=77097 GN=queA PE=3 SV=1
MQRADFHFELPDELIARYPSEQRSDCRLLCVDGQSGALAHRRFPDLLDLLEPGDLLVFNDTRVIPARLHGHKASGGKVEMLLERPLDSHRGLAHIRSSKSPKPGTELIFEGDIHAVVEGRRDALFELRFLGDTPMIALLEKHGHMPLPPYITREDELSDRERYQTVYARRDGAVAAPTAGLHFDQPLLDALAEKGINSAFVTLHVGAGTFQPVRVDNILEHHMHSEWIEVTDATCQQIRETQAAGKRVIAVGTTSVRCLESACMKSSDGKIAPFSGDTDIFIYPGYEWRCVDALITNFHLPESTLLMLVSAFAGYEHIMQAYRTAVEERYAFFSYGDAMLLTR

SEQ ID NO: 67178 - protein, 343 aa, Halomonas arcis
  REGION 1..343: note = tr|A0A1H0BFT1|A0A1H0BFT1_9GAMM S-adenosylmethionine:tRNA ribosyltransferase-isomerase; OS = Halomonas arcis OX=416873 GN=queA PE=3 SV=1
MQRADFHFELPDELIARYPSEQRSDCRLLCADGQSGALEHRRFTDLLELLEPGDLLVFNDTRVIPARLHGHKASGGKVEMLLERPLDAHRGLAHIRSSKSPKPGTELIFEGDVHAVVEGRREALFELRFLGETPMIALLEQHGHMPLPPYITREDELSDRERYQTVYARRDGAVAAPTAGLHFDQPMLDALAEKGINSAFVTLHVGAGTFQPVRVDNILEHHMHSEWIEVSETTCQQVRATQAAGKRVIAVGTTSVRCLESACLQSTDNHIAPFSGDTDIFIYPGYEWRCVDALITNFHLPESTLLMLVSAFAGYETIMHAYRAAVDERYAFFSYGDAMLLTR

SEQ ID NO: 67179 - protein, 343 aa, Halomonas axialensis
  REGION 1..343: note = tr|A0A455VKA0|A0A455VKA0_9GAMM S-adenosylmethionine:tRNA ribosyltransferase-isomerase; OS = Halomonas axialensis OX=115555 GN=queA PE=3 SV=2
MQRADFHFELPDELIARYPSEQRSDCRLLCVDGQSGALAHRRFPDLLDLLEPGDLLVFNDTRVIPARLHGHKASGGKVEMLLERPLDSHRGLAHIRSSKSPKPGTELIFEGDIHAVVEGRRDALFELRFLGDTPMIALLEKHGHMPLPPYITREDELSDRERYQTVYARRDGAVAAPTAGLHFDQPLLDALAEKGINSAFVTLHVGAGTFQPVRVDNILEHHMHSEWIEVTDSTCQQIRETQAAGKRVIAVGTTSVRCLESACMKSSDGQIAPFSGDTDIFIYPGYEWRCVDALITNFHLPESTLLMLVSAFAGYEHIMQAYRTAVEERYAFFSYGDAMLLTR

SEQ ID NO: 67180 - protein, 367 aa, unidentified
  source 1..367: note = Halomonas beimenensis
  REGION 1..367: note = tr|A0A291P3F2|A0A291P3F2_9GAMM S-adenosylmethionine:tRNA ribosyltransferase-isomerase; OS = Halomonas beimenensis OX=475662 GN=queA PE=3 SV=1
MSACQGSPEPPSIPSSGTFRPMQRADFHYELPEALIARYPSEQRSDCRLLCVDGGSGELAHRRFPDLLEILEPGDLLVFNDTRVIPARLHGHKASGGRVEMLLERPLDAHRGLAHLRASKSPKPGTELEFESGIRAVVEGRREALFELRFLGDTPLIALLERHGHMPLPPYITREDELADRDRYQTVYARRDGAVAAPTAGLHFDEPLLEALADKGVESAFVTLHVGAGTFQPVRADDIRDHEMHSEWIEVNETVCDQVRAARARGNRVIAVGTTSVRCLESACLKSADGEIAPYRGETDIFIYPGYEWRVVDALVTNFHLPESTLLMLVASFAGFETVMAAYREAVRERYAFFSYGDAMFLTRKTP

SEQ ID NO: 67181 - protein, 343 aa, Halomonas boliviensis
  REGION 1..343: note = tr|A0A265E317|A0A265E317_9GAMM S-adenosylmethionine:tRNA ribosyltransferase-isomerase; OS = Halomonas boliviensis LC1 OX=1072583 GN=queA PE=3 SV=1
MQRADFHYELPDELIARYPSEQRSDCRLLCVDGQSGALEHRRFPDLLELLEPGDLLVFNDTRVIPARLHGHKASGGKVEMLLERPLDAHRGLAHIRSSKSPKPGTELIFEGDVHAIVEGRRDALFELRFLGDTPMIALLEKHGHMPLPPYITREDELSDRERYQTVYARRDGAVAAPTAGLHFDQPLLDALADKGINRAFVTLHVGAGTFQPVRVDNILEHHMHSEWIEVTEATCQQVRETLAAGKRVVAVGTTSVRCLESACMKSSDGQIAPYSGDTDIFIYPGYQWRCVDALITNFHLPESTLLMLVSSFVGYDTIMHAYQRAVAERYAFFSYGDAMLLTR

SEQ ID NO: 67182 - protein, 343 aa, Halomonas campaniensis
  REGION 1..343: note = tr|A0A060BD91|A0A060BD91_9GAMM S-adenosylmethionine:tRNA ribosyltransferase-isomerase; OS = Halomonas campaniensis OX=213554 GN=queA PE=3 SV=1
MQRADFHFELPDELIARYPSEQRSDCRLLCVDGQSGALEHRRFPDLLELLEPGDLLVFNDTRVIPARLHGHKASGGKVEMLLERPLDSHRGLAHIRSSKSPKPGTELIFEGDIHAVVEGRRDALFELRFLGDTPMIALLEKHGHMPLPPYITRDDELSDRERYQTVYARRDGAVAAPTAGLHFDQPLLDALAEKGVNSAFVTLHVGAGTFQPVRVDNILEHHMHSEWIEVSETACQQVRDTQAAGKRVIAVGTTSVRCLESACLKSSDGQIAPYSGDTDIFIYPGYEWRCVDALITNFHLPESTLLMLVSAFAGYDHMMRAYRTAVDERYAFFSYGDAMLLTR

SEQ ID NO: 67183 - protein, 343 aa, Halomonas campaniensis; identical to SEQ ID NO: 67173
  REGION 1..343: note = tr|A0A246RYE8|A0A246RYE8_9GAMM S-adenosylmethionine:tRNA ribosyltransferase-isomerase; OS = Halomonas campaniensis OX=213554 GN=queA PE=3 SV=1

SEQ ID NO: 67184 - protein, 356 aa, Halomonas caseinilytica
  REGION 1..356: note = tr|A0A1M6VHL6|A0A1M6VHL6_9GAMM S-adenosylmethionine:tRNA ribosyltransferase-isomerase; OS = Halomonas caseinilytica OX=438744 GN=queA PE=3 SV=1
MQRADFHFDLPQELIARYPSEVRSDCRLLCVDGDSGQFSHHHFPDLVDMLEPGDLLVFNDTRVIPARLHGHKASGGKVEMLLERPLDAHRGLVHLRASKSPSPGTELNFEGGIQAVVEGRQDALFELRFLGETPMIALLEQHGHMPLPPYITRDDELSDRERYQTVYARRDGAVAAPTAGLHFDQPLLERLAAKGVESTFVTLHVGAGTFQPVRAEDIREHHMHSEWIDVGEDTCAKVRAAQQAGKRVIAVGTTSVRCLETASASGEIAPFSGDTDIFIYPGYEWRCVDALVTNFHLPESTLLMLVSSFAGHDTVMAAYREAVQEGYAFFSYGDAMFLTRHHAPSARRADIETSDA

SEQ ID NO: 67185 - protein, 346 aa, unidentified
  source 1..346: note = Halomonas chromatireducens
  REGION 1..346: note = tr|A0A109UKQ9|A0A109UKQ9_9GAMM S-adenosylmethionine:tRNA ribosyltransferase-isomerase; OS = Halomonas chromatireducens OX=507626 GN=queA PE=3 SV=1
MQRADFHYELPEDLIARYPSEQRSDCRLLCVDGASGELAHRRFVDLLELLEPGDLLVFNDTRVIPARLHGHKASGGKVEMLLERPLDAHRGLAHLRSSKSPKPGTELVFEGDIHAVVEGRRDALFELRFLGDTPLIALLERHGHMPLPPYITREDELADRERYQTVYARRDGAVAAPTAGLHFDEPLLQRLTEKGIDSAFVTLHVGAGTFQPVRADDIREHQMHSEWIDVGEAACEKVRAARAAGRRVVAVGTTSVRCLESACANSSDGEIAPYSGETDIFIYPGYEWRCVDALITNFHLPESTLLMLVSSFAGYESTMAAYREAVAERYAFFSYGDAMFLTRKSS

SEQ ID NO: 67186 - protein, 342 aa, Halomonas cupida
  REGION 1..342: note = tr|A0A1M7IN40|A0A1M7IN40_9GAMM S-adenosylmethionine:tRNA ribosyltransferase-isomerase; OS = Halomonas cupida OX=44933 GN=queA PE=3 SV=1
MQRADFHFDLPQELIARYPSEVRSDCRLLCVDGNSGQFRHQRFPDLVDMLEPGDLLVFNDTRVIPARLHGHKASGGKVEMLLERPLDAHRGLVHLRSSKSPKPGTELVFEGGIQAVVEGRQDALFELRFLGETPMIALLEQHGHMPLPPYITREDELSDRERYQTVYARRDGAVAAPTAGLHFDQPLLERLAAKGVESTFVTLHVGAGTFQPVRADDIREHHMHSEWIEVGEETCARVRAAQQAGKRVIAVGTTSVRCLETASASGEIAPFSGDTDIFIYPGYEWRCVDALVTNFHLPESTLLMLVSSFAGFEPVMQAYREAVEQRYAFFSYGDAMFLTRQR

SEQ ID NO: 67187 - protein, 351 aa, Halomonas daqiaonensis
  REGION 1..351: note = tr|A0A1H7R053|A0A1H7R053_9GAMM S-adenosylmethionine:tRNA ribosyltransferase-isomerase; OS = Halomonas daqiaonensis OX=650850 GN=queA PE=3 SV=1
MQRADFHYALPEELIARYPSEQRSDCRLLCVDGASGELAHRRFTDLLELLEPGDLLVFNDTRVIPARLHGHKASGGKVEMLLERPLDAHRGLAHLRSSKSPKPGTEIEFEGGIRAVVEGRREALFELRFLGETPLIALLEQHGHMPLPPYITREDELADRERYQTVYARRDGAVAAPTAGLHFDEPLLEALAARGVESAYVTLHVGAGTFQPVRADDIREHHMHSEWIEVNETACEQVRAARARGNRVVAVGTTSVRCLESAARESACLKSNDGQIAPYCGETDIFIYPGYEWRCVDALITNFHLPESTLLMLVSSFAGFDTTLAAYREAVAERYAFFSYGDAMFLTRKER

SEQ ID NO: 67188 - protein, 346 aa, Halomonas daqingensis
  REGION 1..346: note = tr|A0A1H5U1Y9|A0A1H5U1Y9_9GAMM S-adenosylmethionine:tRNA ribosyltransferase-isomerase; OS = Halomonas daqingensis OX=419596 GN=queA PE=3 SV=1
MQRADFHYELPEELIARYPSERRSDCRLLCVDGESGELAHRRFTDLLELLEPGDLLVFNDTRVIPARLHGHKASGGKVEMLLERPLDAHRGLAHIRSSKSPKPGTELIFEGDVRAVVEGRREALFELRFLGERRLIELLERHGHMPLPPYIDRADELADRDRYQTVYARRDGAVAAPTAGLHFDEPLLERLAAKGVESAFVTLHVGAGTFQPVRADDIREHKMHSEWIEVNEAACAKVRAAQAAGRRVIAVGTTSVRCLESACAKSADGAIAPYSGETDIYIYPGYEWRCVDNLITNFHLPESTLLMLVSSFAGYETIMAAYREAVAERYAFFSYGDAMLLSRKRS

SEQ ID NO: 67189 - protein, 346 aa, Halomonas desiderata
  REGION 1..346: note = tr|A0A243T704|A0A243T704_9GAMM S-adenosylmethionine:tRNA ribosyltransferase-isomerase; OS = Halomonas desiderata SP1 OX=1191209 GN=queA PE=3 SV=1
MQRADFHYELPEELIARYPSERRSDCRLLCVDGESGELAHRRFTDLLELLEPGDLLVFNDTRVIPARLHGHKASGGKVEMLLERPLDAHRGLAHIRSSKSPKPGTELIFEGDVRAVVEGRREALFELRFLGETPLIELLERHGHMPLPPYIDRADELADRDRYQTVYARRDGAVAAPTAGLHFDEPLLERLAAKGVESAFVTLHVGAGTFQPVRADDIREHKMHSEWIEVNEAACAKVRAAQAAGRRVIAVGTTSVRCLESACAKSADGAIAPYSGETDIYIYPGYEWRCVDNLITNFHLPESTLLMLVSSFAGYETIMAAYREAVAERYAFFSYGDAMLLSRKRS

SEQ ID NO: 67190 - protein, 134 aa, Halomonas elongata
  REGION 1..134: note = tr|A0A1B8P6V7|A0A1B8P6V7_HALEL S-adenosylmethionine:tRNA ribosyltransferase-isomerase; OS = Halomonas elongata OX=2746 GN=queA_1 PE=3 SV=1
MQRADFHYELPEALIARYPSEQRSDCRLLCVDGASGALDHRRFPELIDKLEPGDLLVFNDTRVIPARLHGHKASGGRVEMLLERPLDAHRGLAHLRSSKSPKIGTELTFEGGIQAVVEGAARRCSNCAFSARRH

SEQ ID NO: 67191 - protein, 359 aa, Halomonas elongata
  REGION 1..359: note = tr|A0A329Q5N0|A0A329Q5N0_HALEL S-adenosylmethionine:tRNA ribosyltransferase-isomerase; OS = Halomonas elongata OX=2746 GN=queA PE=3 SV=1
MQRADFHYELPEALIARYPSEQRSDCRLLCVDGASGALDHRRFPELIDKLEPGDLLVFNDTRVIPARLHGHKASGGRVEMLLERPLDAHRGLAHLRSSKSPKIGTELTFEGGIQAVVEGRREALFELRFLGETPLIALLERHGHMPLPPYITRDDELSDRERYQTVYARRDGAVAAPTAGLHFDEPLLERLAAKGVESAFVTLHVGAGTFQPVRVEDIREHEMHSEWIEVSASVCEQVRAARARGNRVVAVGTTSVRCLESASLKSPDGDIAPYSGETDIFIYPGYEWRVVDALVTNFHLPESTLLMLVSSFAGYDTVMAAYREAVQEGYAFFSYGDAMFLTRHNSSSTRHADVETPDA

SEQ ID NO: 67192 - protein, 345 aa, unidentified
  source 1..345: note = Halomonas endophytica
  REGION 1..345: note = tr|A0A2N7U1V9|A0A2N7U1V9_9GAMM S-adenosylmethionine:tRNA ribosyltransferase-isomerase; OS = Halomonas endophytica OX=2033802 GN=queA PE=3 SV=1
MQRADFHYELPEELIARYPSEQRSDCRLLCVKGATGELAHRRFTDLPGLLEPGDLLVFNDTRVIPARLHGHKASGGKVEMLLERPLDAHRGLAHLRSSKSPKPGTELIFEGDIHAVVEGRRDALFELRFLGETPLITLLERHGHMPLPPYITREDELADRERYQTVYARRDGAVAAPTAGLHFDEPLLERLAEKGIESAFVTLHVGAGTFQPVRADDIREHRMHSEWIEVSEEVCDQVRAARARGNRVVAVGTTSVRCLESACLKSADGEIVPHSGETTIFIYPGYEWRCVDVLVTNFHLPESTLLMLVSSFAGFETTLAAYREAVAERYAFFSYGDAMYLTRAA

SEQ ID NO: 67193 - protein, 359 aa, Halomonas eurihalina
  REGION 1..359: note = tr|A0A5D9CTB3|A0A5D9CTB3_HALER S-adenosylmethionine:tRNA ribosyltransferase-isomerase; OS = Halomonas eurihalina OX=42566 GN=queA PE=3 SV=1
MQRADFHYELPEALIARYPSEQRSDCRLLCVDGASGALDHCRFPELIDKLAPGDLLVFNDTRVIPARLHGHKASGGRVEMLLERPLDAHRGLAHLRSSKSPKIGTELTFEGGIQAVVEGRREALFELRFLGETPLIALLERHGHMPLPPYITRDDELSDRERYQTVYAKRDGAVAAPTAGLHFDEPLLERLAAKGVESAFVTLHVGAGTFQPVRVDDIREHEMHSEWIEVSASVCEQVRATRARGNRVIAVGTTSVRCLESASLKSSDGDIAPYSGETDIFIYPGYEWRVVDALVTNFHLPESTLLMLVSSFAGYDTVMAAYREAVQEGYAFFSYGDAMLLTRHNSSPTRHADVETPDA

SEQ ID NO: 67194 - protein, 348 aa, Halomonas gudaonensis
  REGION 1..348: note = tr|A0A1G9A5Y3|A0A1G9A5Y3_9GAMM S-adenosylmethionine:tRNA ribosyltransferase-isomerase; OS = Halomonas gudaonensis OX=376427 GN=queA PE=3 SV=1
MQRADFHYELPEELIARYPSEQRSDCRLLCVDGASGALEHRRFPELTELLEPGDLLVFNDTRVIPARLHGHKASGGRIELLLERPLDAHRGLAHLRSSKSPKPGTELVFEGGVRAVVEGREGPLFKLRFLGETPLVQLLEQHGHMPLPPYIDREDELADRERYQTVYARRDGAVAAPTAGLHFDEPLLEALAAKGVESAFVTLHVGAGTFQPVRVDDIREHTMHSEWVEVSPGVCEQVRTAQARGNRVVAVGTTSVRCLESACAATPDGAIAPLTGETDIFIFPGYEWRCVDALITNFHLPESTLLMLVSAFAGFDTTMTAYREAVEARYRFFSYGDAMFLTRQPMPA

SEQ ID NO: 67195 - protein, 350 aa, Halomonas halmophila
  REGION 1..350: note = tr|A0A4Y4F303|A0A4Y4F303_9GAMM S-adenosylmethionine:tRNA ribosyltransferase-isomerase; OS = Halomonas halmophila OX=252 GN=queA PE=3 SV=1
MQRADFHYELPEALIARYPSEQRSDCRMLCVDGASGELDHQRFPALLDKLDPGDLLVFNDTRVIPARLHGHKASGGRVEMLLERPLDAHRGLAHLRSSKSPPVGSELTFEGGIQAVVEGRRDALFELRFLGETPLIALLEQHGHMPLPPYITREDELSDRERYQTVYARRDGAVAAPTAGLHFDEPLLEQLAAKGVESAFVTLHVGAGTFQPVRVDDIREHDMHSEWIEVSESACARVRAARARGNRIIAVGTTSVRCLESACQQSPDGRIAPLSGETDIFIYPGYEWQVVDGLITNFHLPESTLLMLVASFAGYETVMRAYREAVEQGYAFFSYGDAMFLTRQAPGGIR

SEQ ID NO: 67196 - protein, 345 aa, Halomonas halophila
  REGION 1..345: note = tr|A0A510ZAX7|A0A510ZAX7_9GAMM S-adenosylmethionine:tRNA ribosyltransferase-isomerase; OS = Halomonas halophila OX=29573 GN=queA PE=3 SV=1
MQRADFHYELPEALIARYPSEQRSDCRLLCVDGESGSLAHRRFPDLLETLDPGDLLVFNDTRVIPARLHGHKASGGRVEMLLERPLDAHRGLAHLRSSKSPKPGTEIAFEGGIRAVVEGRRDALFELRFLGETPLVELLEQHGHMPLPPYITREDELSDRERYQTVYARREGAVAAPTAGLHFDEPLLEALAEKGVESAFVTLHVGAGTFQPVRADDIRDHEMHSEWIEVSEAVCEQVRAARARGNRVIAVGTTSVRCLESACLKSDDGEIAPYSGETDIFIYPGYDWRVVDALITNFHLPESTLLMLVSSFAGYETVMAAYREAVREEYAFFSYGDAMLLTRAR

SEQ ID NO: 67197 - protein, 346 aa, unidentified
  source 1..346: note = Halomonas heilongjiangensis
  REGION 1..346: note = tr|A0A2N7TI94|A0A2N7TI94_9GAMM S-adenosylmethionine:tRNA ribosyltransferase-isomerase; OS = Halomonas heilongjiangensis OX=1387883 GN=queA PE=3 SV=1
MQRADFHYELPDELIARYPSERRSDCRLLCVDGAGGARAHRHFPDLLELLAPGDLLVFNDTRVIPARLHGHKASGGKVEMLLERPLDAHRGLAHLRSSKSPKPGTELIFEGDIHAVVEGRRDALFELRFLGEIPLVQLLEKHGHMPLPPYIDRSDELADRERYQTVYARRDGAVAAPTAGLHFDEPLIAALAAKGVESAFVTLHVGAGTFQPVRADDIREHRMHSEWIEVSEAVCEQVRSAKARGNRIIAVGTTSVRCLESACLKSQGGEIAPYSGETDIFIYPGYEWRCVDALVTNFHLPESTLLMLVASFAGFDQVMAAYHEAVAKRYAFFSYGDAMFLTRKSS

SEQ ID NO: 67198 - protein, 342 aa, unidentified
  source 1..342: note = Halomonas huangheensis
  REGION 1..342: note = tr|W1NA93|W1NA93_9GAMM S-adenosylmethionine:tRNA ribosyltransferase-isomerase OS=Halomonas huangheensis; OX = 1178482 GN=queA PE=3 SV=1
MQRADFHFDLPQELIARYPSEVRSDCRLLCVDGNSGQFSHHQFPDLVEMLEPGDLLVFNDTRVIPARLHGHKASGGKVEMLLERPLDAHRGLVHLRSSKSPKPGTELIFEGGIQAVVEGRRDALFELRFLGETPMIALLEQHGHMPLPPYITRDDELSDRERYQTVYARRDGAVAAPTAGLHFDQPLLERLAAKGVESTFVTLHVGAGTFQPVRAADIREHHMHSEWIEVGEEACTKVHAAQQAGKRVIAVGTTSVRCLETASASGEIAPFSGDTDIFIYPGYEWRCVDVLVTNFHLPESTLLMLVSSFAGFEPVMQAYREAVEQRYAFFSYGDAMFLTRSR

SEQ ID NO: 67199 - protein, 343 aa, Halomonas hydrothermalis
  REGION 1..343: note = tr|A0A291JU59|A0A291JU59_9GAMM S-adenosylmethionine:tRNA ribosyltransferase-isomerase; OS = Halomonas hydrothermalis OX=115561 GN=queA PE=3 SV=1
MQRADFHFELPDELIARYPSEQRSDCRLLCVDGQSGALAHRRFPDLLELLEPGDLLVFNDTRVIPARLHGHKASGGKVEMLLERPLDSHRGLAHLRSSKSPKPGTELIFEGDIHAVVEGRRDALFELRFLGDTPMIALLEQHGHMPLPPYITREDELSDRERYQTVYARRDGAVAAPTAGLHFDQPLLDALAEKGIQSAFVTLHVGAGTFQPVRVDNILEHHMHSEWIEVTEATCQQVRDTQATGKRVVAVGTTSVRCLESACMKSSDGEIAPFSGDTDIFIYPGYQWRCVDALITNFHLPESTLLMLVSSFAGYEHIMHAYRTAVEERYAFFSYGDAMLLTR

SEQ ID NO: 67200 - protein, 346 aa, Halomonas ilicicola
  REGION 1..346: note = tr|A0A1M4T7E3|A0A1M4T7E3_9GAMM S-adenosylmethionine:tRNA ribosyltransferase-isomerase; OS = Halomonas ilicicola DSM 19980 OX=1121942 GN=queA PE=3; SV = 1
MQRADFHFDLPDELIARYPSEQRSDCRLLCVDGESGELAHRRFPDLLELLAPGDLLVFNDTRVIPARLHGHKASGGRVEMLLERPLDAHRGLAHIRASKSPKPGTELIFEGDIHAVVEGRREALYELRFLGETPLVELLERHGHMPLPPYITREDELADRERYQTVYARREGAVAAPTAGLHFDQPLMDALGERGIEHAFVTLHVGAGTFQPVRVEDIREHHMHSEWLEVDEKACEQVRAARARGKRVVAVGTTSVRCLESACLNSTDGEITPFRGETDIFIYPGYRWRCVDALVTNFHLPESTLLMLVSAFVGRDTILHAYREAVIEQYRFFSYGDAMFLTRKTP

SEQ ID NO: 67201 - protein, 363 aa, Halomonas korlensis
  REGION 1..363: note = tr|A0A1I7I896|A0A1I7I896_9GAMM S-adenosylmethionine:tRNA ribosyltransferase-isomerase; OS = Halomonas korlensis OX=463301 GN=queA PE=3 SV=1
MRPGCKLNLLNRTETPLMQRADFHFDLPDELIARYPSQQRSDCRLLCVEGERGALAHRRFTDLLELLEPGDLLVFNDTRVIPARLHGHKASGGKVEMLLERPLDAHRGLAHLRSSKTPKPGTEIRFEGDVLAVVEGRRDALFELRFFGETPLIELLERYGHMPLPPYIDRADELADRERYQTVYARRDGAVAAPTAGLHFDEPLLEALAAKGVNSAFVTLHVGAGTFQPMRVDDIREHQMHSEWIEVDEKACEQVRATQAAGRRVVAVGTTSVRCLESACLMSDSGDIAPLRGETDIFIYPGYAWRCVDALVTNFHLPESTLMMLVASFIGFETTMVAYREAVTERYAFFSYGDAMFLTRQRS

SEQ ID NO: 67202 - protein, 343 aa, Halomonas meridiana
  REGION 1..343: note = tr|A0A1N6IEE3|A0A1N6IEE3_9GAMM S-adenosylmethionine:tRNA ribosyltransferase-isomerase; OS = Halomonas meridiana OX=29570 GN=queA PE=3 SV=1
MQRADFHFELPDELIARYPSEQRSDCRLLCVDGQSGALAHHRFPDLLDLLEPGDLLVFNDTRVIPARLHGHKASGGKVEMLLERPLDSHRGLAHIRSSKSPKPGTELIFEGDIHAVVEGRRDALFELRFLGDTPMIALLEKHGHMPLPPYITREDELSDRERYQTVYARRDGAVAAPTAGLHFDQPLLDALAEKGINSAFVTLHVGAGTFQPVRVDNILEHHMHSEWIEVTDATCQQIRETQAAGKRVIAVGTTSVRCLESACMKSSDGQIAPFSGDTDIFIYPGYEWRCVDALITNFHLPESTLLMLVSAFAGYEHIMQAYRTAVEKRYAFFSYGDAMLLTR

SEQ ID NO: 67203 - protein, 343 aa, Halomonas meridiana
  REGION 1..343: note = tr|A0A0D7UYY0|A0A0D7UYY0_9GAMM S-adenosylmethionine:tRNA ribosyltransferase-isomerase; OS = Halomonas meridiana OX=29570 GN=queA PE=3 SV=1
MQRADFHFELPDELIARYPSEQRSDCRLLCVDGQSGALAHRRFPDLLDLLEPGDLLVFNDTRVIPARLHGHKASGGKVEMLLERPLDSHRGLAHIRSSKSPKPGTELIFEGDIHAVVEGRRDALFELRFLGDTPMIALLEKHGHMPLPPYITREDELSDRERYQTVYARRDGAVAAPTAGLHFDQPLLDALAEKGINSAFVTLHVGAGTFQPVRVDNILEHHMHSEWIEVTDATCQQIRETQAAGKRVIAVGTTSVRCLESACMKSSDGQIAPFSGDTDIFIYPGYEWRCVDALITNFHLPESTLLMLVSAFAGYEHIMQAYRTAVEERYAFFSYGDAMLLTR

SEQ ID NO: 67204 - protein, 348 aa, Halomonas muralis
  REGION 1..348: note = tr|A0A1G9RYD7|A0A1G9RYD7_9GAMM S-adenosylmethionine:tRNA ribosyltransferase-isomerase; OS = Halomonas muralis OX=119000 GN=queA PE=3 SV=1
MQRADFHFDLPDELIARYPSEQRSDCRLLCVDGESGALAHRRFADLLELLDPGDLVVFNDTRVIPARLHGHKASGGRVEMLLERPLDAHRGLAHIRASKSPKPGTELIFEGGINAVVEGRVDALFELRFLGDTPLIELLERHGHMPLPPYITREDELADRERYQTVYARRDGAVAAPTAGLHFDEPLMAAMRERGIETAFVTLHVGAGTFQPVRVDNIREHHMHSEWIEVDEAVSEQVRAARARGNRIVAVGTTSVRCLESACLHDPDGEIAPYSGETDIFIYPGYQWRCVDALVTNFHLPESTLLMLVSSFAGYDNTMHAYRAAVDERYSFFSYGDAMFLTRTPQDS

SEQ ID NO: 67205 - protein, 343 aa, unidentified
  source 1..343: note = Halomonas nigrificans
  REGION 1..343: note = tr|A0A2A4HQ80|A0A2A4HQ80_9GAMM S-adenosylmethionine:tRNA ribosyltransferase-isomerase; OS = Halomonas nigrificans OX=2042704 GN=queA PE=3 SV=1
MQRADFHFELPDELIARYPSEQRSDCRLLCVDGQNGALEHRRFADLLELLEPGDLLVFNDTRVIPARLHGHKASGGKVEMLLERPLDSHRGLAHIRSSKSPKPGTELIFEGDIHAVVEGRRDALFELRFLGDTPMIALLEKHGHMPLPPYITREDELSDRDRYQTVYARRDGAVAAPTAGLHFDQPLLDALAAKGINSAFVTLHVGAGTFQPVRVDNILEHHMHSEWVEITATACKKVRDTQAAGKRVIAVGTTSVRCLESACMKSTDGQIAPYSGDTDIFIYPGYEWHCVDALITNFHLPESTLLMLVSAFAGYDHMMQAYRAAVEERYAFFSYGDAMLLTR

SEQ ID NO: 67206 - protein, 345 aa, Halomonas nitroreducens
  REGION 1..345: note = tr|A0A431V1I2|A0A431V1I2_9GAMM S-adenosylmethionine:tRNA ribosyltransferase-isomerase; OS = Halomonas nitroreducens OX=447425 GN=queA PE=3 SV=1
MQRADFHYELPEALIARYPSEQRSDCRLLCVDGASGRLAHRRFPDLLEHLATGDLLVFNDTRVIPARLHGHKASGGRVEMLLERPLDAHRGLAHLRSSKSPKPGTEIVFEGGIHAVVEGRREALFELRFLGETPLIALLEAHGHMPLPPYITREDELADRERYQTVYARRDGAVAAPTAGLHFDEPLLEALAAKGIESAFVTLHVGAGTFQPVRADDIREHQMHSEWIEVSETVCEQVRAARARGNKVVAVGTTSVRCLESACLKSADGEIAPYSGETDIFIYPGYEWRVVDALVTNFHLPESTLLMLVSSFAGFETVMTAYREAVREGYAFFSYGDAMYLTRAR

SEQ ID NO: 67207 - protein, 343 aa, unidentified
  source 1..343: note = Halomonas olivaria
  REGION 1..343: note = tr|A0A3T1DIN7|A0A3T1DIN7_9GAMM S-adenosylmethionine:tRNA ribosyltransferase-isomerase; OS = Halomonas olivaria OX=390919 GN=queA PE=3 SV=1
MQRADFHYELPDELIARYPSEQRSDCRLLCVDGQSGALEHRRFPDLLELLEPGDLLVFNDTRVIPARLHGHKASGGKVEMLLERPLDAHRGLAHIRSSKSPKPGTELIFEGDVHAVVEGRRDALFELRFLGDTPMIALLEKHGHMPLPPYITREDELSDRERYQTVYARRDGAVAAPTAGLHFDQPLLDALADKGINRAFVTLHVGAGTFQPVRVDNILEHHMHSEWIEVTEETCRQVRETLAAGKRVVAVGTTSVRCLESACMKSSDGQIAPYSGDTDIFIYPGYQWRCVDALITNFHLPESTLLMLVSAFVGYDTIMHAYQRAVAERYAFFSYGDAMLLTR

SEQ ID NO: 67208 - protein, 343 aa, Halomonas pacifica
  REGION 1..343: note = tr|A0A510X411|A0A510X411_9GAMM S-adenosylmethionine:tRNA ribosyltransferase-isomerase; OS = Halomonas pacifica OX=77098 GN=queA PE=3 SV=1
MQRADFHYELPEELIARYPSEQRSDCRLLCVDGNSGELAHRRFPDLLDLLQPGDLLVFNDTRVIPARLHGHKASGGKVEMLLERPLDAHRGLAHLRASKSPKPGTELHFEGGIRAVVEGRREALFELRFLGETPMIELLERHGHMPLPPYITRDDELSDRDRYQTVYARRDGAVAAPTAGLHFDEPLLERLAAKGVESAFVTLHVGAGTFQPVRADDIREHQMHSEWVEVNEVVCEQVRAARAAGRRVIAVGTTSVRCLESASAGGEIAPLRGDTDIFIYPGYEWRCVDALITNFHLPESTLLMLVSSFAGYDSVMTAYREAVRKRYAFFSYGDAMFLTRKTR

SEQ ID NO: 67209 - protein, 346 aa, Halomonas pantelleriensis
  REGION 1..346: note = tr|A0A1G9S7E1|A0A1G9S7E1_9GAMM S-adenosylmethionine:tRNA ribosyltransferase-isomerase; OS = Halomonas pantelleriensis OX=48727 GN=queA PE=3 SV=1
MLRADFHYDLPEELIARYPSEQRSDCRLLCVDGASGALSHRRFPDLLELLEPGDLLVFNDTRVIPARLHGHKASGGKVEMLLERPLDAHRGLAHIRSSKSPKPGTELIFEGDVRAVVEGRRDALFELRFLGDTPMITLLERHGHMPLPPYITREDELNDRERYQTVYARRDGAVAAPTAGLHFDEPLLEALAEKGVESAFVTLHVGAGTFQPVRADDIRDHHMHSEWIEVDESACAKVQAARAAGRRVIAVGTTSVRCLESACQKSGSGEIAPYRGETDIFIYPGYAWQCVDALITNFHLPESTLLMLVSSFTGYDTMMAAYREAVAERYAFFSYGDAMFLTRESS

SEQ ID NO: 67210 - protein, 345 aa, Halomonas saccharevitans
  REGION 1..345: note = tr|A0A1I7AZ17|A0A1I7AZ17_9GAMM S-adenosylmethionine:tRNA ribosyltransferase-isomerase; OS = Halomonas saccharevitans OX=416872 GN=queA PE=3 SV=1
MQRADFHYELPEALIARYPSEQRSDCRLLCVDGESGSLAHRRFPDLVELLEPGDLLVFNDTRVIPARLHGHKASGGKVEMLLERPLDAHRGLAHLRSSKSPKPGTEIIFEGDIRAVVEGRQDALFELRFLGETPLIALLEAHGHMPLPPYITREDELADRERYQTVYARRDGAVAAPTAGLHFDEPLLAALAEKGVESAYVTLHVGAGTFQPVRADDIRDHHMHSEWIEVSETACEQVRRARAAGRRVIAVGTTSVRCLESACLKSVDGEIAPYSGETDIFIYPGYEWRVVDALVTNFHLPESTLLMLVSSFAGYDTTMAAYREAVAEGYAFFSYGDAMFLERAR

SEQ ID NO: 67211 - protein, 344 aa, Halomonas shengliensis
  REGION 1..344: note = tr|A0A1H0CGQ4|A0A1H0CGQ4_9GAMM S-adenosylmethionine:tRNA ribosyltransferase-isomerase; OS = Halomonas shengliensis OX=419597 GN=queA PE=3 SV=1
MQRADFHFELPDELIARYPSEQRTDCRLLCVEGASGTLTHRRFPDLLELLEPGDLLVFNDTRVIPARLHGHKASGGKVEMLLERPLDAHRGLAHLRSSKSPKPGTELEFEGGIRAVVEGRREALFELRFLGETPLVELLERHGHMPLPPYIDREDELADRERYQTVYARREGAVAAPTAGLHFDEPLLEALAEKGVERAFVTLHVGAGTFQPVRADDIREHVMHSEWLEVDETVCEKVRAARAAGRRVIAVGTTSVRCLESASDEHGEIAPYRGETDIFIYPGYRWRCVDALITNFHLPESTLLMLVASFAGFETTLSAYREAVAERYAFFSYGDAMFLTRQPS

SEQ ID NO: 67212 - protein, 343 aa, unidentified
  source 1..343: note = Halomonas songnenensis
  REGION 1..343: note = tr|A0A2T0V4L2|A0A2T0V4L2_9GAMM S-adenosylmethionine:tRNA ribosyltransferase-isomerase; OS = Halomonas songnenensis OX=1176243 GN=queA PE=3 SV=1
MQRADFHFELPDELIARYPSEQRSDCRLLCVDGQSGELAHRRFPDLLELLEPGDLLVFNDTRVIPARLHGHKASGGKVEMLLERPLDSHRGLAHIRSSKSPKPGTELIFEGDIHAVVEGRRDALFELRFLGDTPMIALLEQHGHMPLPPYITREDELSDRERYQTVYARRDGAVAAPTAGLHFDQPLLDALKEKGVESAFVTLHVGAGTFQPVRVDNILEHHMHSEWIEVTEATCQKVRDTQAAGKRVIAIGTTSVRCLESACQKSGNGQIAPYSGDTDIFIYPGYEWRCVEALITNFHLPESTLLMLVSSFAGYEHTMHAYQQAVEERYAFFSYGDAMLLTR

SEQ ID NO: 67213 - protein, 343 aa, Halomonas sp.
  REGION 1..343: note = tr|A0A2N0G590|A0A2N0G590_9GAMM S-adenosylmethionine:tRNA ribosyltransferase-isomerase; OS = Halomonas sp. es.049 OX=1761788 GN=queA PE=3 SV=1
MQRADFSYELPEELIARYPSEQRSDCRLLCVDAQDGSLAHRRFPDLLEILEPGDLLVFNDTRVIPARLHGQKASGGKVEMLLERPLDAHRGLAHLRSSKSPKPGTELIFEGDIHAIVEGRHDALFELRFLGDTPMIALLEKHGHMPLPPYITREDELSDRERYQTVYARQDGAVAAPTAGLHFDQPLLDALAEKGINSAFVTLHVGAGTFQPVRVDDIREHAMHSEWIDVSEATCQQVRETRAAGNRVVAVGTTSVRCLESACAQTPDGSIAPFTGDTDIFIYPGYEWRCVDALITNFHLPESTLMMLVSAFAGYDTIMRAYQAAVEERYAFFSYGDAMLLTR

SEQ ID NO: 67214 - protein, 343 aa, Halomonas sp.; identical to SEQ ID NO: 67179
  REGION 1..343: note = tr|A0A355PFD4|A0A355PFD4_HALSX S-adenosylmethionine:tRNA ribosyltransferase-isomerase; OS = Halomonas sp. OX=1486246 GN=queA PE=3 SV=1

SEQ ID NO: 67215 - protein, 363 aa, Halomonas subglaciescola
  REGION 1..363: note = tr|A0A1M7G281|A0A1M7G281_9GAMM S-adenosylmethionine:tRNA ribosyltransferase-isomerase; OS = Halomonas subglaciescola OX=29571 GN=queA PE=3 SV=1
MQRADFAYELPEELIARYPSEQRSDCRLLCVDGEDGQIAHRRFPDLLELLEPGDLLVFNDTRVIPARLHGHKASGGRVEMLLERPLDTHRGLAHLRASKSPKPGTEIIFEGDIHAVVEARHDALFELRFLGETPMIALLERHGHMPLPPYITRDDELSDRERYQTVYARRDGAVAAPTAGLHFDQPLLDALADKGVDSAFVTLHVGAGTFQPVRADDIRDHHMHSEWVDVDDAACQKVRAAKAAGKRVIAVGTTAVRCLESACGQHDQGSADGGIAPYRGDTDIFIYPGYEWRCVDALVTNFHLPESTLLMLVSAFIGYDTTLRAYHTAVVERYAFFSYGDAMLLTRATPDTCATAELNDQRD

SEQ ID NO: 67216 - protein, 343 aa, Halomonas subterranea
  REGION 1..343: note = tr|A0A1H9U2Y4|A0A1H9U2Y4_9GAMM S-adenosylmethionine:tRNA ribosyltransferase-isomerase; OS = Halomonas subterranea OX=416874 GN=queA PE=3 SV=1
MQRADFHFELPDELIARYPSEQRSDCRLLCVDGQSGALEHRRFPDLLELLEPGDLLVFNDTRVIPARLHGQKASGGKVEMLLERPLDTHRGLAHIRSSKSPKPGTELVFEGDIHAVVEGRRDALFELRFLGDTPMIALLEKHGHMPLPPYITREDELSDRERYQTVYARRDGAVAAPTAGLHFDQPLLDALAEKGINSAFVTLHVGAGTFQPVRVDNILEHHMHSEWIDVSEDTCQQVRATQAAGKRVIAVGTTSVRCLESACLKSPDNQIAPFSGDTDIFIYPGYEWRCVDALITNFHLPESTLLMLVSAFAGYDNIMHAYQAAVDERYAFFSYGDAMLLTR

SEQ ID NO: 67217 - protein, 343 aa, Halomonas sulfidaeris
  REGION 1..343: note = tr|A0A365TRI2|A0A365TRI2_9GAMM S-adenosylmethionine:tRNA ribosyltransferase-isomerase; OS = Halomonas sulfidaeris OX=115553 GN=queA PE=3 SV=1
MQRADFHYELPDELIARYPSEQRSDCRLLCVDGQIGSLEHRRFPDLLELLEPGDLLVFNDTRVIPARLHGHKASGGKVEMLLERPLDAHRGLAHIRSSKSPKPGTELIFEGDVHAIVEGRRDALFELRFLGDTPMIALLEKHGHMPLPPYITREDELSDRERYQTVYARRDGAVAAPTAGLHFDQPLLDALADKGINRAFVTLHVGAGTFQPVRVDNILEHHMHSEWIEVTESTCQQVRDTLAAGKRVIAVGTTSVRCLESACQKSSDGQIAPYSGDTDIFIYPGYQWRCVDALITNFHLPESTLLMLVSSFVGYDTIMHAYQRAVAERYAFFSYGDAMLLTR

SEQ ID NO: 67218 - protein, 89 aa, Halomonas sulfidaeris
  REGION 1..89: note = tr|A0A455U7X5|A0A455U7X5_9GAMM S-adenosylmethionine:tRNA ribosyltransferase-isomerase; OS = Halomonas sulfidaeris OX=115553 GN=HSBAA_09400 PE=3 SV=1
MAPPACAAWKAPAKSSDGQIAPYSGDTDIFIYPGYQWRCVDALITNFHLPESTLLMLVSSFVGYDTIMHAYQRAVAERYAFSAMVMPCC

SEQ ID NO: 67219 - protein, 347 aa, Halomonas taeanensis
  REGION 1..347: note = tr|A0A1G7SL30|A0A1G7SL30_9GAMM S-adenosylmethionine:tRNA ribosyltransferase-isomerase; OS = Halomonas taeanensis OX=284577 GN=queA PE=3 SV=1
MQRADFHYELPDELIARYPSERRSDCRLLCVDGTSGALDHRRFPDLLEILEPGDLLVFNDTRVIPARLHGQKASGGRVEMLLERPLDAHRGLAHIRASKSPKPGTELIFEGDVRAVVEGRQDALFELRFLGETPLIALLEAHGHMPLPPYIAREDELADRERYQTVYARRDGAVAAPTAGLHFDEPMMAALEEKGIESAFVTLHVGAGTFQPVRADDIRDHHMHSEWIEVDETACAKVREAKARGNRVVAVGTTGVRCLESACLKSEDGEIAPYSGETDIFIYPGYEWRCVDALVTNFHLPESTLLMLVSSFAGFEPVMNAYRAAVEEGYAFFSYGDAMFLTRANAG

SEQ ID NO: 67220 - protein, 352 aa, Halomonas taeanensis
  REGION 1..352: note = tr|A0A328XPH4|A0A328XPH4_9GAMM S-adenosylmethionine:tRNA ribosyltransferase-isomerase; OS = Halomonas taeanensis OX=284577 GN=queA PE=3 SV=1
MQRADFHYELPDELIARYPSERRSDCRLLCVDGASEALDHRRFPDLLEILEPGDLLVFNDTRVIPARLHGQKASGGRVEMLLERPLDAHRGLAHIRASKSPKPGTELIFEGDVRAVVEGRQDALFELRFLGETPLIALLEAHGHMPLPPYITREDELADRERYQTVYARRDGAVAAPTAGLHFDEPMMAALAEKGIESAFVTLHVGAGTFQPVRADDIRDHHMHSEWIEVDEAACAKVREAKARGNRVVAVGTTGVRCLESACMKSPGDNKEAGEIAPYSGETDIFIYPGYEWRCVDALVTNFHLPESTLMMLVASFAGFEPVMNAYRAAVEERYAFFSYGDAMFLTRADAT

SEQ ID NO: 67221 - protein, 343 aa, Halomonas titanicae; identical to SEQ ID NO: 67173
  REGION 1..343: note = tr|L9UB87|L9UB87_9GAMM S-adenosylmethionine:tRNA ribosyltransferase-isomerase OS=Halomonas titanicae BH1; OX = 1204738 GN=queA PE=3 SV=1

SEQ ID NO: 67222 - protein, 343 aa, Halomonas titanicae
  REGION 1..343: note = tr|A0A558JBP9|A0A558JBP9_9GAMM S-adenosylmethionine:tRNA ribosyltransferase-isomerase; OS = Halomonas titanicae OX=664683 GN=queA PE=3 SV=1
MQRSDFYYQLPDELIARYPSEQRSDCRLLCVDGQSGALEHRRFPDLLKLLEPGDLLVFNDTRVIPARLHGHKASGGKVEMLLERPLDAHRGLAHIRSSKSPKPGTELIFEGDVHAVVEGRRDALFELRFLGDTPMIALLEKHGHMPLPPYITREDELSDRERYQTVYARRDGAVAAPTAGLHFDQPLLDALSDKGINRAFVTLHVGAGTFQPVRVDNILEHHMHSEWIEVTEETCRQVRETLAAGKRVVAVGTTSVRCLESACMKSSDGQIAPYSGDTDIFIYPGYQWRCVDALITNFHLPESTLLMLVSAFVGYDTTMHAYQRAVAERYAFFSYGDAMLLTR

SEQ ID NO: 67223 - protein, 346 aa, unidentified
  source 1..346: note = Halomonas urumqiensis
  REGION 1..346: note = tr|A0A2N7UMX2|A0A2N7UMX2_9GAMM S-adenosylmethionine:tRNA ribosyltransferase-isomerase; OS = Halomonas urumqiensis OX=1684789 GN=queA PE=3 SV=1
MQRADFHYDLPDELIARYPSEQRSDCRLLCLEGASGEITHRRFPDLLALLAPGDLLVFNDTRVIPARLHGHKASGGRVEMLLERPLDAHRGLAHLRSSKSPKPGTELVFEGDIHAVVEGRQEALFELRFLGETPLITLLERHGHMPLPPYITREDELADRDRYQTVYARRDGAVAAPTAGLHFDEPLLERLADKGVESAFVTLHVGAGTFQPVRADNIREHHMHSEWIEVSETVCGQVRAAQARGNRVIAVGTTSVRCLESACMKSATGEIAPYSGETDIFIYPGYEWQCVDALVTNFHLPESTLLMLVASFTGFDHIMQAYREAVAERYAFFSYGDAMFLTRKER

SEQ ID NO: 67224 - protein, 343 aa, Halomonas ventosae
  REGION 1..343: note = tr|A0A4R6HKE1|A0A4R6HKE1_9GAMM S-adenosylmethionine:tRNA ribosyltransferase-isomerase; OS = Halomonas ventosae OX=229007 GN=queA PE=3 SV=1
MQRADFHYELPEELIARYPSEQRSDCRLLCVDGANGQLAHRRFPDLVELLAPGDLLVFNDTRVTPARLHGHKASGGKVEMLLERPLDAHRGLAHLRSSKSPRPGTELVFEGGIRVVVEGRREALFELRFLGETPLITLLEQHGHMPLPPYITREDELADRERYQTIYARRDGAVAAPTAGLHFDAPLFEALAAKGVESAYVTLHVGAGTFQSVRADDIREHHMHSEWIEVDETACEQVRAAQARGNRVVAVGTTSVRCLESATDEDGHIAPYSGETDIFIYPGYAWRCVDALITNFHLPESTLLMLATSFAGFETTLAAYRAAVAERYAFFSYGDAMFLTRKP

SEQ ID NO: 67225 - protein, 343 aa, Halomonas ventosae
  REGION 1..343: note = tr|A0A2T0VI43|A0A2T0VI43_9GAMM S-adenosylmethionine:tRNA ribosyltransferase-isomerase; OS = Halomonas ventosae OX=229007 GN=queA PE=3 SV=1
MQRADFHYELPEELIARYPSEQRSDCRLLCVDGATGALAHRRFPELLELLAPGDLLVFNDTRVIPARLHGHKASGGKVEMLLERPLDAHRGLAHLRSSKSPKPGTELVFEGGIRAVVEGRQEALFELRFLGETPLIALLEQHGHMPLPPYITREDELADRERYQTVYARRDGAVAAPTAGLHFDQPLLEALAARGVESAYVTLHVGAGTFQPVRADDIREHVMHSEWLEVDEAACAKVQAARAAGRRVVAVGTTSVRCLESATDEGGEIAPYRGETDIFIYPGYEWRCVDALITNFHLPESTLLMLVASFAGFDTTLAAYRAAVAERYAFFSYGDAMFLTRKP

SEQ ID NO: 67226 - protein, 343 aa, Halomonas venusta
  REGION 1..343: note = tr|A0A3S8YNW3|A0A3S8YNW3_9GAMM S-adenosylmethionine:tRNA ribosyltransferase-isomerase; OS = Halomonas venusta OX=44935 GN=queA PE=3 SV=1
MQRADFHFELPDELIARYPSEQRSDCRLLCVDGQSGALEHRQFDDLLELLEPGDLLVFNDTRVIPARLHGHKASGGKVEMLLERPLDSHRGLAHIRSSKSPKPGTELIFEGDIHAVVEGRRDALFELRFLGDTPMIALLEKHGHMPLPPYITRDDELSDRERYQTVYARRDGAVAAPTAGLHFDQPLLDALAEKGVNSAFVTLHVGAGTFQPVRVDNILEHHMHSEWIEVSETACQQVRDTQAAGKRIIAVGTTSVRCLESACLKSSDGQIAPYSGDTDIFIYPGYEWRCVDALITNFHLPESTLLMLVSAFAGYDHMMRAYRTAVDERYAFFSYGDAMLLTR

SEQ ID NO: 67227 - protein, 348 aa, Halomonas xianhensis
  REGION 1..348: note = tr|A0A4R8FX68|A0A4R8FX68_9GAMM S-adenosylmethionine:tRNA ribosyltransferase-isomerase; OS = Halomonas xianhensis OX=442341 GN=queA PE=3 SV=1
MQRADFHYDLPDELIARYPSEQRSDCRLLCVDGASGELAHRRFPDLLDLLAPGDLVVFNDTRVIPARLHGHKASGGRVEMLLERPLDAHRGLAHLRASKSPKPGTELIFEGDVHAVVEGRRDALFELRFLGETPLIELLERHGHMPLPPYITREDELADRDRYQTVYARRDGAVAAPTAGLHFDEPLMEAMHERGIETAFVTLHVGAGTFQPVRVDDIREHHMHSEWIEVDESVSEQVRAARARGNRVVAVGTTSVRCLESACLKSDDGEIAPFRGETDIFIYPGYEWRCVDALITNFHLPESTLLMLVSSFAGYDTVMRAYREAVDERYRFFSYGDAMFLTRTPTLS

SEQ ID NO: 67228 - protein, 359 aa, Halomonas xianhensis
  REGION 1..359: note = tr|A0A1I2YUQ2|A0A1I2YUQ2_9GAMM S-adenosylmethionine:tRNA ribosyltransferase-isomerase; OS = Halomonas xianhensis OX=442341 GN=queA PE=3 SV=1
MQRSPSWPSSFMQRADFHYDLPDELIARYPSEQRSDCRLLCVDGTSGELAHRRFPDLLDLLAPGDLVVFNDTRVIPARLHGQKASGGRVEMLLERPLDAHRGLAHLRASKSPKPGTELIFEGDVRAVVEGRRDALFELRFLGETPLIELLERHGHMPLPPYITREDELADRDRYQTVYARRDGAVAAPTAGLHFDEPLMDAMRERGIETAFVTLHVGAGTFQPVRVDDIREHHMHSEWIEVDETVTEQVRAARARGNRIVAVGTTSVRCLESACLKSDDGTIAPFRGETDIFIYPGYQWRCVDALITNFHLPESTLMMLVSSFAGYDTVMRAYREAVDERYRFFSYGDAMFLTRTPTLS

SEQ ID NO: 67229 - protein, 347 aa, unidentified
  source 1..347: note = Halopeptonella vilamensis
  REGION 1..347: note = tr|A0A4Q8D0S1|A0A4Q8D0S1_9GAMM S-adenosylmethionine:tRNA ribosyltransferase-isomerase; OS = Halopeptonella vilamensis OX=531306 GN=queA PE=3 SV=1
MQVSDFNYELPEDLIASEPLPNRTDSRLLVLDPDTGGVADRQFPTIREYLRPGDLLVVNDTRVLPARLYGHKETGGAVEILLERLTGGNEALAQMRANKMPPIPSRITLEGDLAVEVTGRDGDFFRLRFPDDEPLPTLLERHGHMPLPPYIKREDTPADRERYQTVFADRPGAVAAPTAGLHFDEALLAALRGDGVETATLTLHVGAGTFQPIRTEALEDHRMHAEWLSVPAPVCAAVARTRARGGRVIAVGTTVVRALESAAQTGDLQPFEGETEIFIYPGFEFRVIDGLVTNFHLPGSTLVMLVSALAGREGILAAYDHAVRERYRFFSYGDAMLILAGAGGERP

SEQ ID NO: 67230 - protein, 342 aa, Haloplasma contractile
  REGION 1..342: note = tr|F7PX09|F7PX09_9BACT S-adenosylmethionine:tRNA ribosyltransferase-isomerase OS=Haloplasma contractile SSD-17B OX=1033810 GN=queA PE=3 SV=1
MQVKDFDFELPQELIAQTPLEDRDQSRLLVLDKETGDITHKRFYDIIDFFEVGDTLVLNDTRVMPARLFGVKEDTGANIEILLLKQVEGDRWETLCKPAKRVKQGTVIEFGDGLLKAKCIETLDEGGRIFEFIYDGIFYEVLDELGEMPLPPYITEKLDDQERYQTVYSKNVGSAAAPTAGLHFTQELLKKVEEKGINIAYITLHVGLGTFRPVTADTIDEHKMHAEYYQMTADTAKLLNDTREKNKRIITVGTTSTRTLETIAGKFDGTFQESSGWTDIFIYPGYEFKGIDSLITNFHLPKSTLVMMVSALAGRDPIMKAYHEAIKERYRFFSFGDAMFIR

SEQ ID NO: 67231 - protein, 342 aa, Halorhodospira halochloris
  REGION 1..342: note = tr|A0A0X8XA76|A0A0X8XA76_HALHR S-adenosylmethionine:tRNA ribosyltransferase-isomerase; OS = Halorhodospira halochloris OX=1052 GN=queA PE=3 SV=1
MHKSDFHYQLPERLIAERPAQRRTDSRMLVLERSSGEIADRQFTDLLNYLRPGDLLVLNDTRVIPARLAARKSSGGAVEVLLERIVDPDNGEILCHLRANRAPKPGAVIILPEGVEADVEGRAGRLFRLKLRNVDRDLIDYLERVGRVPLPPYIRRQDDACDRERYQTVFAARPGAVAAPTAGLHFDERMLEELRALGVEITQVTLHVGAGTFTPVDSEDLTAHQMHAEYLDVSAQAVSAIDAARERGGRVVAVGTTVVRALESAAAQGQLRPYSGETDLFITPGFRFRVVDVMLTNFHLPESSLLMLVSAFGGYEQVMAAYRHAVEQEYRFFSYGDAMLLL

SEQ ID NO: 67232 - protein, 345 aa, Halorhodospira halophila
  REGION 1..345: note = tr|A1WXR5|A1WXR5_HALHL S-adenosylmethionine:tRNA ribosyltransferase-isomerase OS=Halorhodospira halophila (strain DSM 244 / SL1) OX=349124 GN=queA PE=3 SV=1
MTEWRRSDFDYALPERLIAHRPAAQRAASRMLVLRTDSGALADRRFTDLPAYLRAGDLLVLNDTRVIPARLEAAKPTGARVEVLIERVEDPDAGLITCQLRANRTPKPGGRLGLADGVQAEVLEREGRFFRLQLAGLVESLWDYLERVGHVPLPPYIRRPDDDEDRTRYQTVFAARPGAVAAPTAGLHFDDALLERLRADGVGTARVTLHVGAGTFAPVESDDLSAHTMHAEWLEVSAETVAAVNATRERGGRVVAVGTTVVRALESAAADGQLAPYSGETRLFITPGYCFRAVDGLLTNFHLPESTLLMLVSAFGGYESVMAAYRHAVAEEYRFFSYGDAMLLI

SEQ ID NO: 67233 - protein, 351 aa, Halospina denitrificans
  REGION 1..351: note = tr|A0A4R7JUN6|A0A4R7JUN6_9GAMM S-adenosylmethionine:tRNA ribosyltransferase-isomerase; OS = Halospina denitrificans OX=332522 GN=queA PE=3 SV=1
MKRSDFHYELPDELIARYPLAERTASRLLCLDGADGAVDHRRFEELPDLLQPQDLLVFNDTRVIPARVYGKKASGGQLEMLVERVLATDAALVHLKVSRSPAVGARLILEGGHEAVVEAREEGLFRLRFTDSPVMAVLEAVGHMPLPPYIDRPDEVTDEERYQTVFGEKPGAVAAPTAGLHFDESVMARLEARGIRRTFVTLHVGAGTFQPVRTEDIREHHMHQEWLSVEQSVVDAVAETRARGGRVVAVGTTAVRALESASASGRLAPFAGETNIFIYPGYRFRSTDAMVTNFHLPESTLIMLVSAFAGREQTLAAYRAAISERYRFFSYGDAMLIFPHPDAIEDGSTHS

SEQ ID NO: 67234 - protein, 351 aa, Halospina sp.
  REGION 1..351: note = tr|A0A5J5FKD6|A0A5J5FKD6_9GAMM tRNA preQ1(34) S-adenosylmethionine ribosyltransferase-isomerase QueA; OS = Halospina sp. K52047b OX=2614160 GN=queA PE=4 SV=1
MKRSDFHFELPDELIARYPLAEREASRLLRLDGTDGAVSHHGFRELPDLLEPGDLLVFNDTRVIPARVYGQKASGGKVEMLVERVLDSDRALVHLKVSRTPSPGGEITLDGGHRVVVDEHTPEGLFRVHFPDADVMTVLEAVGHMPLPPYIDRPDEMTDEERYQTVFGEKPGAVAAPTAGLHFTDAIMDELAARGIERTFVTLHVGAGTFQPVRSEDIREHHMHQEWLSVGQEAVDAVTRTRQRGGRVVAVGTTAVRALESASGEGHLAPFAGETRIFIYPGYRFRSVDAMVTNFHLPESTLIMLVSAFAGRDNVLDAYQAAIGERYRFFSYGDAMLVFPHSEAVAPEVSE

SEQ ID NO: 67235 - protein, 358 aa, Halotalea alkalilenta
  REGION 1..358: note = tr|A0A172YKG1|A0A172YKG1_9GAMM S-adenosylmethionine:tRNA ribosyltransferase-isomerase; OS = Halotalea alkalilenta OX=376489 GN=queA PE=3 SV=1
MQRSDFQFDLPTELIARYPSESRSDCRLLCVDGDLASLEHRRFKDLLERVQPGDLMVFNDTRVVPARLHGQKRSGGRVEILLERPLDAHRALVHLRSSKSPKPGSELDFEGGVTAVVEGRRDALFELRFHGETPLLELLERHGHMPLPPYIERADDERDRERYQTVYARRKGAVAAPTAGLHFDQAMMAALEARGVETAFVTLHVGAGTFQPVRVNDITEHHMHSEWLEVDETTCAKVRAAKAAGRRVIAVGTTSVRCLETAAASGEIAPYRGDTDIFIRPGYAWRCVDALVTNFHLPESTLLMLVCAFAGFDTTMRAYREAVAQGYAFFSYGDAMFLTRRTLPDPWPAPAPSSGQSE

SEQ ID NO: 67236 - protein, 360 aa, unidentified
  source 1..360: note = Halothece sp.
  REGION 1..360: note = tr|K9YC80|K9YC80_HALP7 S-adenosylmethionine:tRNA ribosyltransferase-isomerase OS=Halothece sp. (strain PCC 7418) OX=65093 GN=queA PE=3 SV=1
MKVDASPLDQKLSSYDYHLPESYIAQTPVTPRDHSRLLVVDSPTSHHHQRFYDLPQWLQAGDLLVVNNTKVIPARIYGYKTTGAAIEVLLLEEKSQNCWLALVKPGKRLQIGAKIQFYPHQAQEKPILEATVTGKDEATGGRFLEFDLPVETSLISLLEDYGEIPFPPYVTSTEAQPEQYQTVYAQEQGAIAAPTAGLHFTDELLTTLAEKGINQAEVTLHVGVGTFRPVETESITDHQMHQEWINVPATTVEKIKETKAQGGRVIAVGTTVVRALEGAVAAKEGNFEAFCGKTDLFIYPGYELQVVDGLITNFHLPRSSLLMLVSAFIGRERLLSLYDSAIAHQYRFYSFGDAMLIISH

SEQ ID NO: 67237 - protein, 341 aa, Halothermothrix orenii
  REGION 1..341: note = sp|B8CXG1|QUEA_HALOH S-adenosylmethionine:tRNA ribosyltransferase-isomerase OS=Halothermothrix orenii (strain H 168 / OCM 544 / DSM 9562) OX=373903 GN=queA PE=3; SV = 1
MKVEEFDYELPEELIAQKPLPNRDDSRLMVLHRKTGEIEETVFKNIIKFLEPGDLLVLNDTKVIPARLFGEKIPSGTRIEVLLLKSITEGLWEVLVRPGRRMKKGNRVSFGDGKLVGIVKDYTDFGGRIMQFEYDGDFDKVIEELGEMPLPPYITRKVEDKGRYQTVYARKKGSVAAPTAGLHFTDRLLKKIKEQGIGIIYLTLHVGLGTFRPVRAENVEDHKMHSEYFEVSTDVVNRIKETKEKGKKVIAVGTTVTRALESAAVEKRHLKAMRGWTDIFIYPGYNFKVIDGLITNFHLPKSTLLMLVSAFAGKDMVMSAYKLAIKNKYRFFSFGDAMLIL

SEQ ID NO: 67238 - protein, 352 aa, unidentified
  source 1..352: note = Halothiobacillaceae bacterium
  REGION 1..352: note = tr|A0A545SJD3|A0A545SJD3_9GAMM S-adenosylmethionine:tRNA ribosyltransferase-isomerase; OS = Halothiobacillaceae bacterium OX=2268194 GN=queA PE=3; SV = 1
MKVSDFDFELPEAQIAQAPLAERSAARLLVVDGAAGAWRDARVRDLPSLLREGDLLVLNDTRVIPARLHGRKDSGGKVEVLLERLLNEREGIFHVRASKSPRAGARLLLEGGIVLDMVGREDALFRLKLIEGGETLLAALEAHGHMPLPPYIERADTAADRTRYQTVFADRPGAVAAPTAGLHFDEDLLAAIRARGVETARVTLHVGAGTFQPVRGEDLSQHHMHAEWVEVSAATVEAIRATRARGGRVVAIGTTAVRALESAAAASPSGALEPFAGDTRLFITPGRRFRVVDALFTNFHLPRSTLLMLVCAFGGHETVMGAYRHAVAAGYRFFSYGDAMFLTPAEGGGKAA

SEQ ID NO: 67239 - protein, 352 aa, unidentified
  source 1..352: note = Halothiobacillaceae bacterium
  REGION 1..352: note = tr|A0A539EFI2|A0A539EFI2_9GAMM S-adenosylmethionine:tRNA ribosyltransferase-isomerase; OS = Halothiobacillaceae bacterium OX=2268194 GN=queA PE=3; SV = 1
MAVMLRQDFFFDLPVELIAQAPVADRPASRLLCLNSTPGSFEDRIFGDLPQLLHPGDLLVFNDTRVIPARLHGHKESGGKVEVLIERIVNDQEALAMIRSSKTLQKGTRLTLGEQISAAVIGREGDLYRLHFDDARPLLLLLEEEGAIPLPPYITRLPGATDRARYQTVYARHPGAVAAPTAGLHFDEPLLQQLAKRGVGAAFVTLHVGAGTFQPLRVAEITSHKMHSEYIQVPADTVAKIEATRAAGGRVIAVGTTVVRALESAARPGELAAYAGETDIFIYPGYRFTTIDGLITNFHLPESTLLMLVCALGGQQQVMAAYHHAVAQRYRFFSYGDAMLLWSEPACFHTMG

SEQ ID NO: 67240 - protein, 367 aa, Halothiobacillus neapolitanus
  REGION 1..367: note = tr|D0KW94|D0KW94_HALNC S-adenosylmethionine:tRNA ribosyltransferase-isomerase OS=Halothiobacillus neapolitanus (strain ATCC 23641 / c2) OX=555778 GN=queA; PE = 3 SV=1
MHTKLFDYTLPPELIAHRPIEPREHARLLVLEKEHTPNDLRECRIADFPDLLHPGDLLILNNTRVIPARVFGHKASGGKIEVLIERLQDGFSAWCHIRASKSPAPGTTLHMDGQATLTVKNRQDALFLVELTPDSLNPDVLTWLNRAGHMPLPPYIDRADDAQDRHDYQTVFAAHDGAVAAPTASLHLTENLLEQIAAKGVKTAFVTLHVGAGTFQPVRVDNIQEHTMHSEWLNVPEETVAAIDATRERGGRVVCVGTTALRAIETAARENPTAAAQRRIAPYQGDTRLFLYPGQPVHVTDALLTNFHLPQSTLLMLVSALAGRERILAAYDYAVRAGFRFFSYGDAMFIPVNQSIAPAGGEQSHAI

SEQ ID NO: 67241 - protein, 346 aa, Halothiobacillus sp.
  REGION 1..346: note = tr|A0A258QD73|A0A258QD73_9GAMM S-adenosylmethionine:tRNA ribosyltransferase-isomerase (Fragment) OS=Halothiobacillus sp. 28-55-5 OX=1970386; GN = B7Y53_07880 PE=3 SV=1
RESARLLVLAASPHSALHDRHIADFPALLQAGDLLILNDTRVIPARVFGHKASGGKVEVLVERLINPQSAWCHVRASKSPPVGTVLHMAGGAELTLTERADALFLLTLTPNADTPDLLTWLKRAGHMPLPPYIERADDEQDRADYQTVFARHDGAVAAPTASLHLTCDLLAKITQRGVETAFVTLHVGAGTFQPVRVDNILSHVMHREWLDVPEATAQAIARTRARGGRVICVGTTALRAIESAARAHPAAAARREVRAHQGDTQLFLYPGQPVHIADALLTNFHLPQSTLLMLVSALAGRERILAAYAHAIAQGYRFFSYGDAMFIPITPHTEPSAPSDGKVLAP

SEQ ID NO: 67242 - protein, 361 aa, Halothiobacillus sp.
  REGION 1..361: note = tr|A0A191ZI70|A0A191ZI70_9GAMM S-adenosylmethionine:tRNA ribosyltransferase-isomerase; OS = Halothiobacillus sp. LS2 OX=1860122 GN=queA PE=3 SV=1
MHTQLFDYDLPQELIALRPAEPRESARLLILDDDAPGGLKDAYIADFPDLLRAGDLLVLNDTRVIPARVFGQKESGGRVEILVERLVDTQSAWCHVRASKSPKMGGCLDMEGGVRLTVAARDEGLFLLQLVPGATETDFLGWLKRAGHMPLPPYIDRADDAADRADYQTVFARRDGAVAAPTASLHLTASLLAQIAARGVETTFVTLHVGAGTFQPVRVTDISAHKMHREWLDVPAAAADAIKAARARGGRVVCVGTTAVRALETAARAHPEAAARREVGAYQGDTSLFLYPGQPTYVVDALLTNFHLPQSTLLMLVSALAGRERMLAAYEHAVAHGYRFFSYGDAVFIPVTSSGHAPDNG

SEQ ID NO: 67243 - protein, 351 aa, Halovibrio sp.
  REGION 1..351: note = tr|A0A2A2F8F5|A0A2A2F8F5_9GAMM S-adenosylmethionine:tRNA ribosyltransferase-isomerase; OS = Halovibrio sp. YL5-2 OX=2032626 GN=queA PE=3 SV=1
MKRSDFHFELPDELIARYPLAEREASRLLRLDGTDGAVSHHSFRELPDLLEPGDLLVFNDTRVIPARVYGQKASGGKVEMLVERVLDPDRALVHLKVSRTPSPGGEITLEGGHRVVVEEHTPEGLFRVHFPDADVMTVLEAVGHMPLPPYIDRPDEMTDEERYQTVFGEKPGAVAAPTAGLHFTDAIMDELAARGIERTFVTLHVGAGTFQPVRSEDIREHHMHQEWLSVEQEAVDAVTRTRQRGGRVVAVGTTAVRALESASQEGGLAPFAGETRIFIYPGYRFRSVDAMVTNFHLPESTLIMLVSAFAGRDSVLDAYQAAIDERYRFFSYGDAMLVFPHPEAVAPEVSA

SEQ ID NO: 67244 - protein, 343 aa, unidentified
  source 1..343: note = Halovibrio variabilis
  REGION 1..343: note = tr|A0A511UMZ8|A0A511UMZ8_9GAMM S-adenosylmethionine:tRNA ribosyltransferase-isomerase; OS = Halovibrio variabilis OX=31910 GN=queA PE=3 SV=1
MQRSDFYYQLPDELIARYPSEQRSDCRLLCVDGQSGALEHRRFPDLLELLEPGDLLVFNDTRVIPARLHGHKASGGKVEMLLERPLDAHRGLAHIRSSKSPKPGTELIFEGDVHAIVEGRRDALFELRFLGETPMIALLEKYGHMPLPPYITREDELSDRERYQTVYARRDGAVAAPTAGLHFDQPLLDALADKGIKRTFVTLHVGAGTFQPVRVDNILEHHMHSEWIEVTEATCQQVRETLAAGKRVVAVGTTSVRCLESACQKSSDGQIAPYSGDTDIFIYPGYQWRCVDALITNFHLPESTLLMLVSAFAGYETIMHAYQRAVAERYAFFSYGDAMLLTR

SEQ ID NO: 67245 - protein, 357 aa, unidentified
  source 1..357: note = Hamiltonella defensa
  REGION 1..357: note = sp|C4K8M4|QUEA_HAMD5 S-adenosylmethionine:tRNA ribosyltransferase-isomerase OS=Hamiltonella defensa subsp. Acyrthosiphon pisum (strain 5AT) OX=572265 GN=queA; PE = 3 SV =1
MRLSDFSFELPESLVAQYPLEKRSDCRLLCLNGETGTMTEGVFTDLLYQLEQGDLLVLNNTRVIPARVFGRKPSGGKLEILVERILSPNRVLVHLKSSKTPKLGAQFLLGDTANIPVTLMARHASLFELRFDVREDALMLLQSIGHIPLPPYIPRADEPKDHELYQTVYGQHLGAVAAPTAGLHFDNPLLNALKARGIETAFVTLHVGAGTFQPVKTDNITEHVMHSEYAEVSQEVVDAVLACKARGKRVVAVGTTSVRSLETAAQKTKNSFLTPFSGETSIFIYPGYQYQIVDALITNFHLPKSTLIMLVCAFAGYQNTLRAYKKAIDEKYRFFSYGDAMFISHNPKAAQENRVKK

SEQ ID NO: 67246 - protein, 337 aa, unidentified
  source 1..337: note = Handelsmanbacteria sp.
  REGION 1..337: note = tr|A0A1F6CW65|A0A1F6CW65_HANXR S-adenosylmethionine:tRNA ribosyltransferase-isomerase; OS = Handelsmanbacteria sp. (strain RIFCSPLOWO2_12_FULL_64_10) OX=1817868 GN=queAPE=3 SV=1
MKLSDFDYDLPEGLIAPHPAPVRDESRLMVLHRSGERIEHRVFRDLVDYVRRGDALVVNETKVLPARLLGRGPGGGKVELLLLRRVEGEGWEALGRPGRRLRKGAQVQIGDGDLTAEVREVLPDGRRQVHLRGEDVEAALHRIGRPPLPPYLRREETPEDRERYQTVYARTPGAVAAPTAGLHFTQDLLDRIRGRGVDVAPVLLHVGPGTFRPVTAEDPALHRMEAEYYEIGPDAAAQVASARQRGGRAIAVGTTAVRALETAATTGEHSGWTEIFIYPPYAFRAVDALITNFHLPRSTLLMLVSAFAGREFVLRAYREAIQRGYRFYSYGDAMLIL

SEQ ID NO: 67247 - protein, 361 aa, Hansschlegelia sp.
  REGION 1..361: note = tr|A0A4Q9GSA2|A0A4Q9GSA2_9RHIZ S-adenosylmethionine:tRNA ribosyltransferase-isomerase; OS = Hansschlegelia sp. Dub OX=2528245 GN=queA PE=3 SV=1
MDVGLFDFDLPEALIALRPVAPRDSARLLVVRSGAEPELDDRTVSELPAFLQPGDALVVNATKVIPARLRGVRRRGEALARVELLLHRRLDAGRWLAFARPAKKLALGDRIELGEASGETSLLGRLDATVEARGEAGEITIAFDLAGPDLDIAIARAGELPLPPYIAGKRPTDDRDATDYQTLFAREAGAVAAPTAGLHFTPTLMDALAARGVIRHETVLHVGAGTFLPVKADDTDDHRMHAETGYLDAETADALNAVRARGGRVVAVGTTAARLLESAADADGRLRPFAGDTDIFITPGYRFRAVDALMTNFHLPRSTLMMLISAFAGLDTVKRAYAHAVAERYRFYSYGDACLFLPKTP

SEQ ID NO: 67248 - protein, 363 aa, Hansschlegelia zhihuaiae
  REGION 1..363: note = tr|A0A4Q0MMK5|A0A4Q0MMK5_9RHIZ S-adenosylmethionine:tRNA ribosyltransferase-isomerase; OS = Hansschlegelia zhihuaiae OX=405005 GN=queA PE=3 SV=1
MDVSLFDFELPEELIALRPAVPRDAARLLVVRPGGEPELEDRVVCDLPELLAPGDALVVNATRVIPARLYGLRRRGETAARTEILLHRRLDAARWLAFARPAKKLAPGDRLSFGETSEGMACLLGRLDATVESRGEGGEVTLAFDLAGPDLDLAIAASGDIPLPPYIAGQRPTDARDADDYQTMFAREPGAVAAPTAGLHFTPALSEALAARGVARHETVLHVGAGTFLPVKVEDTDDHRMHAEFGVLDAATAGALNETRGRGGRVVAVGTTSCRLLESAVGPDGRLAGFSGETDIFMTPGFRFRAVDALLTNFHLPRSTLMMLIAAFAGLDVVRRAYAHAVRERYRFYSYGDACLFLPERRG

SEQ ID NO: 67249 - protein, 349 aa, unidentified
  source 1..349: note = Hanstruepera neustonica
  REGION 1..349: note = tr|A0A2K1E0W1|A0A2K1E0W1_9FLAO S-adenosylmethionine:tRNA ribosyltransferase-isomerase; OS = Hanstruepera neustonica OX=1445657 GN=queA PE=3 SV=1
MKLSHFNFNLPDELLAEYPSENRDEARLMVLNRKDESIEHKYFKDLIDYFDEDDVMILNNTKVFPARLYGNKEKTGARIEVFLLRELNEEQRLWDVLVDPARKIRIGNKLYFGDDETLVAEVIDNTTSRGRTLRFLYDGSYRDFRMKLNELGQTPLPKYIKRDVEPEDEERYQTIFAKNEGAVAAPTAGLHFSKHLLKRLEIKGVNFAEVTLHVGLGTFNPVEVEDLSKHKMDSEEIIINKPAVDTINKGIKNKKRVCAVGTTVMRAIESSVSSSGTLNEFEGWSNKFIFPPYDFSIANCMITNFHTPKSTLLMMASAFAGHDFIKRAYDEAVKEKYKFYSYGDAMLIL

SEQ ID NO: 67250 - protein, 400 aa, Hapalosiphon sp.
  REGION 1..400: note = tr|A0A0M0SJX0|A0A0M0SJX0_9CYAN S-adenosylmethionine:tRNA ribosyltransferase-isomerase; OS = Hapalosiphon sp. MRB220 OX=1704290 GN=queA PE=3 SV=1
MQEQLAKTNSHLISEQIPENSELDLSLAGYDYELPTELIAQNPVVPRDSSRLLVVNSQNVGTEVAPRHHIFRDLPEILRPGDLLVMNNTRVLPARLYGQKLTGAEVEVLLLEERQHNCWLALVKPGKRFKRGSKIVFTAKNRKEDTEKKSENISASPCLGVSPSSSLTATVIASDTATGGRLLQFELPEEVSLLQLLDAFGEIPLPPYITTSEAQSEQYQTVYAQNPGAVAAPTAGLHFTPELLQKLREQNINQAFVTLHVGVGTFRPVEVENVTTHTMHEEWIEVPQNTVEQIHATKAAGGRIIAVGTTVVRALEGAATKGELQPFCGRTNLFIYPGYKWRVVEGMITNFHLPRSSLLMLVSALIGRQRLLNIYQEAIASRYRFYSFGDAMLILPEATI

SEQ ID NO: 67251 - protein, 390 aa, unidentified
  source 1..390: note = Hapalosiphonaceae cyanobacterium
  REGION 1..390: note = tr|A0A328I4M2|A0A328I4M2_9CYAN S-adenosylmethionine:tRNA ribosyltransferase-isomerase; OS = Hapalosiphonaceae cyanobacterium JJU2 OX=2109628; GN = queA PE=3 SV=1
MQEQLAKTNSHLISKQTPENSELDFSLAGYDYELPTELIAQNPAVPRDSSRLLVVNSQNVGTETAPQHYIFRDLPQILRPGDLLVMNNTRVLPARLYGHKLTGAEVEVLLLEERQHNRWLALVKPGKRFKRGSQIVFTAKVNTDGDHLTTPVPYHSLTATVIATDAATGGRLLQFELPEEVSLLQLLDAFGEIPLPPYITTTEAQSEQYQTVYAQNPGAVAAPTAGLHFTPELLQKLREQNINQAFVTLHVGVGTFRPVEVENVTTHTMHEEWIEVPQNTVEQIRATKAAGGRIIAVGTTVVRALEGAATKGELQPFCGKTNLFIYPGYQWRVVEGMITNFHLPRSSLLMLVSALIGRQRLLNIYQEAIASQYRFYSFGDAMLILPEATI

SEQ ID NO: 67252 - protein, 349 aa, unidentified
  source 1..349: note = Harryflintia acetispora
  REGION 1..349: note = tr|A0A3E2SV07|A0A3E2SV07_9FIRM S-adenosylmethionine:tRNA ribosyltransferase-isomerase; OS = Harryflintia acetispora OX=1849041 GN=queA PE=3 SV=1
MDKFESGSWNKSDFWFELPEHLIAQTPITPRDHSRMMEISRAGGAISHRHFYDLPQALKKGDLLVINDSRVLPARLYGEKRETGGAMEFLLLEQKEQDIWEVLVRPGKRAKEGARFVFGGGLLEGEVLTTVEGGNRLVRFSYEGSFYEVLEKIGQMPLPPYITQKLEDKERYQTVYSKEVGSAAAPTAGLHFTPRLMEELEGMGVRFASVTLHVGLGTFRPVKVDDIKEHKMHSEHYFVPEETARLVEETKAAGGRVIAVGTTSTRTLESVYAKYGKIIPCEGYTDIFIYPGYRFGVLDGLITNFHLPESTLIMLVSAFLGYRETMEAYREAVREQYRFFSFGDCMLIL

SEQ ID NO: 67253 - protein, 349 aa, unidentified
  source 1..349: note = Harryflintia acetispora
  REGION 1..349: note = tr|A0A4R1Q6I7|A0A4R1Q6I7_9FIRM S-adenosylmethionine:tRNA ribosyltransferase-isomerase; OS = Harryflintia acetispora OX=1849041 GN=queA PE=3 SV=1
MDKFESGSWNKSDFWFELPEHLIAQTPITPRDHSRMMEISRAGGVISHRHFYDLPQALKKGDLLVINDSRVLPARLYGEKRETGGAMEFLLLEQKEQDIWEVLVRPGKRAKEGARFVFGGGLLEGEVLTTVEGGNRLVRFSYEGSFYEVLEKIGQMPLPPYITQKLEDKERYQTVYSKEVGSAAAPTAGLHFTPRLMEELEGMGVRFASVTLHVGLGTFRPVKVDDIKEHKMHSEHYFVPEETARLVEETKAAGGRVIAVGTTSTRTLESVYAKYGKIIPCEGYTDIFIYPGYRFGVLDGLITNFHLPESTLIMLVSAFLGYRETMEAYREAVREQYRFFSFGDCMLIL

SEQ ID NO: 67254 - protein, 361 aa, unidentified
  source 1..361: note = Hartmannibacter diazotrophicus
  REGION 1..361: note = tr|A0A2C9D5V3|A0A2C9D5V3_9RHIZ S-adenosylmethionine:tRNA ribosyltransferase-isomerase; OS = Hartmannibacter diazotrophicus OX=1482074 GN=queA PE=3; SV = 1
MKVDLFDFELPQERIALRPARPRDSARLLRIGSDGDLADHVVSDLPSLLRAGDILVFNDTRVIPAQLEGVRLRDGEPGPVVGATLHMRVAPDRWRAFVRGARKLKTGDRVAFGAVKDGTCLGERLDATVSWKGEAGEVEFAFDFSGPDLDAAIAKVGHIPLPPYIAAKRAEDAEDRRDYQTIYAREEGAVAAPTAGLHFTPELLAALEKAGIETAFVTLHVGAGTFLPVKADDTEEHRMHAEIGHVTQEIADRLNAVRAKGGRIVSVGTTSLRLLESAAGEDGIIRPFAGPTDIFITPGYRFRAIDVLMTNFHLPRSTLFMLVSAFSGLETMRAAYAHAIETGYRFYSYGDASLLLPKKTP

SEQ ID NO: 67255 - protein, 344 aa, Hasllibacter halocynthiae
  REGION 1..344: note = tr|A0A2T0X808|A0A2T0X808_9RHOB S-adenosylmethionine:tRNA ribosyltransferase-isomerase; OS = Hasllibacter halocynthiae OX=595589 GN=queA PE=3 SV=1
MRLDAFDFDLPEELIAVRPARPRSSARLLVAEAGAIADRRASDLPSVLRPGDRLVLNDTKVIPARLTGTRRRGEAEARMDVTLLEPRGDGRWSALVRPLRKLSEGEIIVFPGGLSATFAGREGDAAILSFRAEEDFDTALERAGRMPLPPYIEGRRAADDADRTDYQTVWAREAGAVAAPTASLHFDEPLLAALRARGVGFTHVTLHVGAGTFLPVKAEDTDDHVMHAERGRIAPRAAAEIAATRAEGGRVIPVGTTAMRLLETAARETGMVQPWEGATDIFITPGFRFRASDALMTNFHLPRSTLMMLVGAFMGMDRIRGIYAYAIAERYRFFSYGDASLLVP

SEQ ID NO: 67256 - protein, 341 aa, unidentified
  source 1..341: note = Hathewaya histolytica
  REGION 1..341: note = tr|A0A4U9RKR1|A0A4U9RKR1_HATHI S-adenosylmethionine:tRNA ribosyltransferase-isomerase; OS = Hathewaya histolytica OX=1498 GN=queA PE=3 SV=1
MRVKDFSFDLPEEYIAQHPLEKRDHSRLMVLDKKTGNIEHRVFKDIIEYFNPGDCLILNDTRVLPARLIGHKEGTMGRMEFLLLKRVDKNKWETLVKPGKRAKIGSKFVFGSGELKAEVIDMGEDGSRVVEFSYEGIFEEVLDRLGEMPLPPYITEKLEEKERYQTVYSKEPGSAAAPTAGLHFTEELLGEIKNKGIIVAFVTLHVGLGTFRPVKADTIEEHHMHSEYYQMSKETADIINNTKKNGGRIIGVGTTSCRTIESIGNEHGKVKECSGWTDIFIFPGYKFKVLDALITNFHLPESTLIMLVSALAGKENVMNAYEVAVKEKYRFFSFGDAMFIK

SEQ ID NO: 67257 - protein, 341 aa, unidentified
  source 1..341: note = Hathewaya proteolytica
  REGION 1..341: note = tr|A0A1M6P8U8|A0A1M6P8U8_9CLOT S-adenosylmethionine:tRNA ribosyltransferase-isomerase; OS = Hathewaya proteolytica DSM 3090 OX=1121331 GN=queA PE=3; SV = 1
MKVTDFDFDLPQEYIAQHPIENRDQSRLMVLDKKTGDIEHKVFKDILDYLEPGDCLVLNNTKVIPARLIGHKEDSMGKMEFLLLKRIDDNHWETLVKPGKRAKVGSRFVFGNGELKATVVDIIEEGTRIVEFQYEGIFEEVLDKLGEMPLPPYITEKLEEKNRYQTVYSKELGSAAAPTAGLHFTTELLDAIRKKGVNVEFVTLHVGLGTFRPVKAENIEEHHMHSEFYVMGKETADVINKTKNAGKKVVAVGTTSCRTIESIADENGMVRECSGWTDIFIYPGYRFKVLDCLITNFHLPQSTLIMLVSALAGKENVMNAYAVAVEKKYRFFSFGDAMFVK

SEQ ID NO: 67258 - protein, 344 aa, unidentified
  source 1..344: note = Hazenella coriacea
  REGION 1..344: note = tr|A0A4R3LEV0|A0A4R3LEV0_9BACL S-adenosylmethionine:tRNA ribosyltransferase-isomerase; OS = Hazenella coriacea OX=1179467 GN=EDD58_102570 PE=3 SV=1
MVTIPFSLPNELNADSPPERRGIRRDHVRMMVSDLRSGESQHVRFFDLPQMLKTGDVVVLNASRTVPAVLYVDQMRDGKCISLKRELRLAHRIDHQTWDVWIVGDQVQQGDELIFSDKLTAIVTQTDFSFPLVQVQFSLSGAQLFEQIYSLGDPVRYEYIKQPWSLDYYQTVYASVPGSVEIPSAGRAFSWELIFRLREQGIQIVTLTLHTGLSYFHDDLPFLSPEQNSESYEIPEYTALTINHAKQHGGRVIAVGTTVVRALESAAKSDKVCLARRGKTNLKITEETPLQIADGLITGFHEPEASHLDLLSAFVEPSLLKKMYEEAIQQRYLWHEFGDIHLIL

SEQ ID NO: 67259 - protein, 344 aa, unidentified
  source 1..344: note = Hazenella coriacea
  REGION 1..344: note = tr|A0A4R3L9G4|A0A4R3L9G4_9BACL S-adenosylmethionine:tRNA ribosyltransferase-isomerase; OS = Hazenella coriacea OX=1179467 GN=queA PE=3 SV=1
MDVSLYDFLLPKELIAQTPAQERISSRLMVVNRETKEIQHSHFPQILEYVQPGDVLIFNDSRVRPARLIGVKEETGARIELLLLKPLGEDRWEALVKPAKRVKEGTVIDFGEGELKAIAEEQIEVAGGRVFRLQYQTDNIEALFEKLGEMPLPPYIHERLDDPERYQTVFSKVVGSAAAPTAGLHFNDDLLNQLKQKGVQLGFITLHVGLGTFRPVTTERIEEHQMHAEYYELSVETVEMIQQAKERGNRVFAVGTTSVRTLETVAKRFAGQIQPCHGWTDIFIYPGYRFQVVDGLLTNFHLPQSTLLMLVSAFASRELILKAYDEAVKAQYRFFSFGDAMLIL

SEQ ID NO: 67260 - protein, 340 aa, Helcococcus kunzii
  REGION 1..340: note = tr|H3NN93|H3NN93_9FIRM S-adenosylmethionine:tRNA ribosyltransferase-isomerase OS=Helcococcus kunzii ATCC 51366 OX=883114 GN=queA PE=3 SV=1
METKDFDYDLDPSFIAQHPEEKRTESKLMILNRKDNTIEHKHFYDIIDYLNPGDCLVVNNSRVIPARLYGHRKDREEMIEVFLLKNVEDKKWECLVKPGKKMKMDTEIIFSEKLKAKVIGITDEGHRILDMQFDGIFNEILEEIGNIPLPPYITEKLEDKSKYQTVYAKHDGSVAAPTAGLHFTKELLEKIKEKGIKIAYVTLHVGLGTFKPVSDDKIENHKMHSEYYVLDKENSDIINNTRKNNGRVIAVGTTSVRTLESIALKYGEIRPDNDWTEIFIYPGYEFKVIDAMITNFHLPKSTLIMLVSSFYDRENILKAYEEAKSNNYRFFSFGDAMFIN

SEQ ID NO: 67261 - protein, 340 aa, Helcococcus ovis
  REGION 1..340: note = tr|A0A4R9BZV5|A0A4R9BZV5_9FIRM S-adenosylmethionine:tRNA ribosyltransferase-isomerase; OS = Helcococcus ovis OX=72026 GN=queA PE=3 SV=1
MDTKDFDYELDHSFIAQHPEDKRSESKLMILDRKNETIEHKRFYDIIDYLNEGDVLVVNNSKVIPARLFGHRKDKKEALEVFLLTNIEEKKWECLVKPGRKFKIGSEIIFDEKLKAEVIDITEEGHRILEMKYDGIFNEILNEIGNVPLPPYITERLEDKSKYQTVYAKHDGSVAAPTAGLHFTTQLLQQIKDKGIKLAYLTLHVGLGTFKPVNDEKIEEHKMHSEYYILDKENAETINEAKNKGNRVIAVGTTSVRTLESISRKYGKVQADSDWTDIFIYPGFNFKTVDAMITNFHLPKSTLIMLISSFYNRERILEAYEEAKRNNYRFFSFGDAMLIK

SEQ ID NO: 67262 - protein, 340 aa, Helcococcus ovis
  REGION 1..340: note = tr|A0A5F0K427|A0A5F0K427_9FIRM S-adenosylmethionine:tRNA ribosyltransferase-isomerase; OS = Helcococcus ovis OX=72026 GN=queA PE=3 SV=1
MDTKDFDYELDHSFIAQHPEDKRSESKLMILDRKNETIEHKRFYDIIDYLNEGDVLVVNNSKVIPARLFGHRKDKKEALEVFLLTNIEEKKWECLVKPGRKFKIGSEIIFDEKLKAEVIDITEEGHRILEMKYDGIFNEILNEIGNVPLPPYITERLEDKSKYQTVYAKHDGSVAAPTAGLHFTTQLLQQIKDKGIKLAYLTLHVGLGTFKPVTDDKIEEHKMHSEYYILDKENAETINEAKNKGNRVIAVGTTSVRTLESISRKYGKVQADSDWTDIFIYPGFNFKTVDAMITNFHLPKSTLIMLISSFYNRERILEAYEEAKRNNYRFFSFGDAMLIK

SEQ ID NO: 67263 - protein, 345 aa, Helicobacter acinonychis
  REGION 1..345: note = sp|Q17WP4|QUEA_HELAH S-adenosylmethionine:tRNA ribosyltransferase-isomerase OS=Helicobacter acinonychis (strain Sheeba) OX=382638 GN=queA PE=3 SV=1
MKEFDLESYDYHLPKELIANYPILPKEKAKLLIYERHSQKITHTTFEHVLDFFPKNTLVVLNDTKVIKARLFGSKYAFLPSKTTEVFFHRFLKNNTALTQIKGKIKVGDKIFFDENHYAEVLELLNNGQRLIAFYDNKTPLDQASILKLLEQYGHMPLPPYIKRADESLDTLEYQSVFAKHIGAVAAPTASLHFSQNTLENLLKDFKHTFLTLHVGAGTFASVETKDIREHQIHTEVLHIPKKSQEILQKSQEILCIGTTALRSVEYFKRLKTPKQEAFECDIFLHLANPIQHANYLLTNFHLPKSSLLMLVSAMIGLEKTKEIYQIAIEKKYRFYSYGDGMLIL

SEQ ID NO: 67264 - protein, 342 aa, unidentified
  source 1..342: note = Helicobacter ailurogastricus
  REGION 1..342: note = tr|A0A0K2X2I8|A0A0K2X2I8_9HELI S-adenosylmethionine:tRNA ribosyltransferase-isomerase; OS = Helicobacter ailurogastricus OX=1578720 GN=queA PE=3; SV = 1
MPNIPKEFKRASYAYHLPQHLIATHPINPKENAKLMVYERASGKITHTIFKEIFSFFPKDALVVLNDTKVMKARLFAHTAQKRRVEILLHHAASPTACLAQVRGKVRPGLVLELEQGYSCEVLEVLSDGLRVLGFRHEGKPLEWAKVLGMLELLGHMPIPPYLKRPDTSQDTQDYQSVFAKNLGAIAAPTASLHFSQSAKDHLLKNFKHVFITLHVGAGTFLSVQSEDIREHPMHAEFVEVSFKAGQALDEARYILCVGTTALRATEHYKRGLGLEPCNLFLHPGNPVRAAQALLTNFHLPESTLIMLVASMVGLDKCLELYKIAIEHHYRFYSYGDGMLIL

SEQ ID NO: 67265 - protein, 342 aa, unidentified
  source 1..342: note = Helicobacter ailurogastricus
  REGION 1..342: note = tr|A0A0K2Y356|A0A0K2Y356_9HELI S-adenosylmethionine:tRNA ribosyltransferase-isomerase; OS = Helicobacter ailurogastricus OX=1578720 GN=queA PE=3; SV = 1
MPNIPKEFKRASYAYHLPQHLIATHPINPKENAKLMVYERASDRLTHTTFKKIFDFFPKDALVVLNDTKVMKARLFAHTAQKRRVEILLHHAASPTACLAQVRGKVRPGLVLELEQGYSCEVLEVLNDGLRVLGFRHEGKPLEWAKVLGMLELLGHMPIPPYLKRPDTSQDTQDYQSVFAKNLGAIAAPTASLHFSQSAKDHLLKNFKHVFITLHVGAGTFLSVQSEDIREHPMHAEFVEVSFKAGQALDEARYILCVGTTALRATEHYKRGLGLEPCNLFLHPGNPVRAAQALLTNFHLPESTLIMLVASMVGLDKCLELYKIAIEHHYRFYSYGDGMLIL

SEQ ID NO: 67266 - protein, 338 aa, Helicobacter anseris
  REGION 1..338: note = tr|A0A3D8J9A5|A0A3D8J9A5_9HELI S-adenosylmethionine:tRNA ribosyltransferase-isomerase; OS = Helicobacter anseris OX=375926 GN=queA PE=3 SV=1
MREFDLKSYDYHLPVDLIAKYPVSPKEDARLLVFNRKDKTIVHTSFKYLFDFVPKDYLFVFNDTKVIKARVFGKKTTGAKVEVLFHKKISDGFLVQIRGKIKVDDIIILDQNFYIKVCKLFEDGYRLVRCFHLNQEIFEISKMCDLIGHVPLPPYIKREDEQLDIEEYQSVFAKNYGAVAAPTASLHFSESMMRYVLEHYKKVFLTLHVGAGTFASVESKDIREHKIHSETLLASKQSIDSIKKAKSIICVGTTAMRSVEFLARIGDEEYEGECDIFLHLGNPPIKTSALLTNFHLPKSSLIMLVSSMVGLDTCMWLYDEAIKHQYRFYSYGDGMLIL

SEQ ID NO: 67267 - protein, 351 aa, unidentified
  source 1..351: note = Helicobacter apodemus
  REGION 1..351: note = tr|A0A4U8UF91|A0A4U8UF91_9HELI S-adenosylmethionine:tRNA ribosyltransferase-isomerase; OS = Helicobacter apodemus OX=135569 GN=queA PE=3 SV=1
MDVLSLRSYDYILPKELIAKYPANPKENAKLLVYNRRDKNIIHSNFWNFANFLPQDTLLVFNDTKVIPARFYGKKVLKDSKISQQGAKIEALFHKELESNSYLLQCKGRLKEGERIAFVGNIIAEIIKDKGMGFKEVRFFEVADGVLKPLKKEKFFAFLEQYGHIPLPPYIKRETKIQDREDYNAVFAKHLGAIAAPTASLHFSEGTFNALTQNFKHTYVTLHIGAGTFMGVSVDNILEHKIHKESFYISQESQQKISEATHITAIGTTATRVVEYFGLTGYGRGECDLFLHLPNKPLLTKALLTNFHLPKTTLLMLVASFVGLEEMQRIYKEAIKEKYRFYSYGDGMLIL

SEQ ID NO: 67268 - protein, 351 aa, unidentified
  source 1..351: note = Helicobacter apodemus
  REGION 1..351: note = tr|A0A2U8FG19|A0A2U8FG19_9HELI S-adenosylmethionine:tRNA ribosyltransferase-isomerase; OS = Helicobacter apodemus OX=135569 GN=queA PE=3 SV=1
MDVLSLQSYDYILPKELIAKYPENPKENAKLLVYNRRDKSIIHSNFWNFASFLPQDTLLVFNDTKVIPARFYGKKVLKDSKIGQQGAKIEALFHKELESNSYLLQCKGRLKEGARIAFVGNIIAEIIKDKGMGFKEVRFFEVEDGILKPLKKEKFFAFLEQYGHIPLPPYIKRETKIQDREDYNAVFAKHLGAIAAPTASLHFSEETFNALTQNFKHTYVTLHIGAGTFMGVSVDNILEHKIHKESFYISQESQQKISEATHITAIGTTATRVVEYFGLTGYGRGECDLFLHLPNKPLLTKALLTNFHLPKTTLLMLVASFVGLEEMQRIYKEAIKEQYRFYSYGDGMLIL

SEQ ID NO: 67269 - protein, 386 aa, Helicobacter aurati
  REGION 1..386: note = tr|A0A3D8J8A8|A0A3D8J8A8_9HELI S-adenosylmethionine:tRNA ribosyltransferase-isomerase; OS = Helicobacter aurati OX=137778 GN=CQA66_00710 PE=3 SV=1
MNKDLLLSSYCFSLPKNLIATTPVYPKESARLLVYHKDTQKITHTYFEYLFDFVPRDYLIVLNNTKVIHARFYASKLANQSTIQMQNTSKEFLYHKSLGNTKHLVQIRGRASVQNLFLANDLQTLIELSRVCDDGYREVVFYKMPAHVTTLRVDSREFLTNLQNKTIMQDSEVMAFLQRYGKIPLPPYIKRKVTRQDYKDYQSIFADINGSIAAPTASLHFSESMLTFLQQHYNYTFVTLHVGAGTFAPLQVSSILEHKIHSEYCNLTQESAQKIMQHNNILCVGTTALRCVEWFANLNGLSLDKNVLHSMKYSDWQLSGENTLFLHPFNRPRVVRALLTNFHLPQSSLLLLVSSLIGREEMLRIYAEAIQKEYRFYSYGDGMLIV

SEQ ID NO: 67270 - protein, 460 aa, Helicobacter bilis
  REGION 1..460: note = tr|N2BR92|N2BR92_9HELI S-adenosylmethionine:tRNA ribosyltransferase-isomerase OS=Helicobacter bilis WiWa; OX = 1235804 GN=C826_00043 PE=3 SV=1
MSKDLDLSSYDFTLPNDLIATEPIKPKENAKLLIYHNGKITHTTFYELFNYIPKDYLIVLNDTRVINARLFANKLSLESLHKTQILNDLILPTKREIFYHKHLSNNLHLVQIKGKAKLHDIFTLQYNNTNVFIQVVDIKDDGYKVVSFFTLNDEFSLKSNLQNNFTTTNNLALHNDLNMQNNLALNNSTLHNDFTLNKTLTQNNNENLKNHSTQNNKNHNNNKDSTQNSSKVLNNTLNLQKLLALKQLKQNILSQEKVLSLLQTCGNIPLPPYMKRESTEKDSKDYQSIFAKSEGSVAAPTASLHFSESMFKYLKENYNHAFVTLHVGAGTFKPITCENILKHKIHTESCIIAKQEAQKILESKKILCVGTTAMRSVEWLIRENVAQIESDIIGENAIFLNPFNPPKKVKALLTNFHLPKSSLLMLVSSIIGREETLRIYEEAIANKYRFYSYGDGMLII

SEQ ID NO: 67271 - protein, 380 aa, Helicobacter bilis
  REGION 1..380: note = tr|A0A4U8UFI9|A0A4U8UFI9_9HELI S-adenosylmethionine:tRNA ribosyltransferase-isomerase; OS = Helicobacter bilis OX=37372 GN=queA PE=3 SV=1
MSNDLDLSSYDFTLPNDLIATEPIKPKENAKLLIYHNGKITHTTFYELFNYIPKDYLIVLNDTRVINARLFANKLSLESLHNAHGKTQILSDLILPTKREIFYHKHISNNLHLVQIKGKAKSHDIFTLQYNNTNIFIQVVDIKDDGYKIVSFFTLKDILALKQNSPQDHAKELSQEKVFSILQTCGNIPLPPYMKREGTEKDSKDYQSIFAKSEGSVAAPTASLHFSESMFEILKENYNHAFVTLHVGAGTFKPVTCENILNHKIHTETCIIAKKEAQKILESKKILCVGTTAMRSVEWLIRENVAQIKSDIIGENAIFLNPFNPPKKVNALLTNFHLPKSSLLMLVSSIIGRKETLRIYEEAIANKYRFYSYGDGMLII

SEQ ID NO: 67272 - protein, 341 aa, Helicobacter bizzozeronii
  REGION 1..341: note = tr|F8KT74|F8KT74_HELBC S-adenosylmethionine:tRNA ribosyltransferase-isomerase OS=Helicobacter bizzozeronii (strain CIII-1) OX=1002804 GN=queA PE=3 SV=1
MSIPREFKRTSYAYDLPQHLIATHPIDPKEEAKLMVYERASNKLTHSTFKEIFDFFPKHALVVLNDTKVIKARLYGYKEQGKPVEILIHQPQGLDYMVQMRGRVRTGLVLDLGHGYCVQVQKVLENGMRLVRFIKEGEGFLEWAGVLEMLELLGHVPLPPYLKRPDESADITDYQSVFAKYPGAIAAPTASLHFSQSAKDHLLKNFKHVFITLHVGAGTFLSVQSEDIREHPMHAEFVEVSPQAGLALDEAPYILCVGTTALRATEHYKRGFGLKPCNLFLHLGNPVKHAQALLTNFHLPESTLIMLVASMVGLDKCLELYKIAIEHHYRFYSYGDGMLIL

SEQ ID NO: 67273 - protein, 308 aa, Helicobacter bizzozeronii
  REGION 1..308: note = tr|Q8GBB0|Q8GBB0_HELBI S-adenosylmethionine:tRNA ribosyltransferase-isomerase (Fragment) OS=Helicobacter bizzozeronii OX=56877 PE=3 SV=1
LMVYERASNKLTHSTFKEIFDFFPPHALVVLNDTKVIKARLFAHTAQKRPVEILLHHATSPTACLAQMRGKVRPGLVLGLEGGYSCEVLEVLDNGLRVLSFKHGGELLEWAGVLEMLELLGHVPLPPYLKRPDEAQDLQDYQSVFAKYPGAIAAPTASLHFSQSAKDHLLKNFKHVFITLHVGAGTFLSVQSEDIREHPMHAEFCRSLPQAGLTLDEAPYILCVGTTALRATEHYKRGFGLKPCELFLHLGNPVKHAQALLTNFHLPESTLIMLVASMVGLDKCLELYKIAIEHHYRFYSYGDGMLIL

SEQ ID NO: 67274 - protein, 348 aa, Helicobacter brantae
  REGION 1..348: note = tr|A0A3D8J4Y5|A0A3D8J4Y5_9HELI S-adenosylmethionine:tRNA ribosyltransferase-isomerase; OS = Helicobacter brantae OX=375927 GN=queA PE=3 SV=1
MQDLYLQSYDYTLPQERIATYPASPRESAKLLVYDRKKDLITHSDFFHFYDFLPKDYLVILNDTKVIKARMYGNKLKEDKSLGGRVEVLYHRHLSDERFLVQIRGKVKPHTLIILDEDFSLEVVALLENGFREVRFFTQGKIATLSEVLEKFEKIGHIPLPPYIKREDERLDESEYQSVFAKNLGAVAAPTASLHFSDISYLKSHYSHCFVTLHVGAGTFLSVESEEITEHKIHTESFEVSKEAWEKIASAKHTLCIGTTSARVVEYLYQNPPKFEGEIYQGECDLFLHPLNPPKKLDSLLTNFHLPKSTLIMLVSSLVGREKCLELYSEAIKHNYRFYSYGDGMLIL

SEQ ID NO: 67275 - protein, 351 aa, Helicobacter canadensis
  REGION 1..351: note = tr|C5ZZ68|C5ZZ68_9HELI S-adenosylmethionine:tRNA ribosyltransferase-isomerase OS=Helicobacter canadensis MIT 98-5491 OX=537970 GN=queA PE=3 SV=1
MSKMRMNELLLESYDYDLPKELIALNPIMPQENARLLVYDRKDHSITHTTFRDFAKFLPKETLLVFNDTKVIPARIYGKKLQKEALGGGKIEALFHKEIMENLYLMQLKGRLKIGNIVEFVGVFAKILKDCGMGFKEVSFFRDEKCLLPLSRQEFFDFLEQFGHIPLPPYIKREDNQEDRVNYNSVFAKNVGAIAAPTASLHFNQEAFKALQRDFESAFVTLHVGAGTFIGVSTENILEHKMHQETFVIPKESVEKIKKVSHITAIGTTATRVVEYFARTKQTQGECDLFLHPQNKPIITNALLTNFHLPKTTLLMLVASFVGLEETKRIYKQAIEEKYRFYSYGDGMLVL

SEQ ID NO: 67276 - protein, 439 aa, Helicobacter canis
  REGION 1..439: note = tr|V8CEC0|V8CEC0_9HELI S-adenosylmethionine:tRNA ribosyltransferase-isomerase OS=Helicobacter canis NCTC 12740 OX=1357399 GN=HMPREF2087_01599 PE=3 SV=1
MFALSSYDYPLPKHLIATAPIYPREAAKLLVYDRAKEHITHTTFAHLLEFIPKDCIIALNNTRVLKARIYGKKLGTQTSREIFFHRFATRDDFSALASSANTLESTCASLLDSSALALCQIRGRVKLGDIFVCARFYAQVVALLDNGYRAIRFFSLKDSALGEQCGSVAKIMKGTTAKVANLPQFLQSSHSPTAKPAIAVQGVAEAGFFRNPRILEEAKGAERESIATLTPLSQEAVLAMLEEIGHIPLPPYIKRASNDNDIKDYQTLFATQAGAIAAPTASLHLSSTMLEALKEQLVYLTLHIGAGTFASVDVPDIREHTMHTESLHITAQALERLLCAKSRLCVGTSALRSVEFAARLYETHPKPYADLHAQCDIFLHLGNKPRYVDYLLTNFHLPKSTLTMLVASMVGYEQWRKIYEQAIAKEYRFYSYGDAMLIL

SEQ ID NO: 67277 - protein, 443 aa, Helicobacter canis
  REGION 1..443: note = tr|A0A377J7U1|A0A377J7U1_9HELI S-adenosylmethionine:tRNA ribosyltransferase-isomerase; OS = Helicobacter canis OX=29419 GN=queA PE=3 SV=1
MFALSSYDYALPKHLIANAPIYPREAAKLLVYERATGHITHTTFAHLLEFIPKDCIIALNNTRVLKARIYGKKLGTQTTREIFFHRFIRADEAKSLEPPLLESTYKQALESISTHLQDPLAHSISLDSSCLDPSVLALCQIRGRVKLGDIFACGRFYAQVVGVLDNGYRITRFFLLESTFAKADSRRKVDPMDCFDKSKSRNESKNTMSEKVDSSNAKILAQSSKQKPTPTTLAPLDQAAALTMLEEIGHIPLPPYIKRQATSDDTSDYQSLFATQAGAIAAPTASLHLSASMLESLQERIAYLTLHIGAGTFASVEAKDIREHIMHTEALHITAKSLEKLLNAPSRLCVGTSTLRSVEYAARLYAHHPKPYTDLHAQCDIFLHPGNKPCYVEYLLTNFHLPKSTLTMLVASMVGYEQWREIYEQAIAREYRFYSYGDAMLIL

SEQ ID NO: 67278 - protein, 345 aa, Helicobacter cetorum
  REGION 1..345: note = tr|I0ELZ5|I0ELZ5_HELC0 S-adenosylmethionine:tRNA ribosyltransferase-isomerase OS=Helicobacter cetorum (strain ATCC BAA-429 / MIT 00-7128) OX=182217 GN=queA PE=3; SV = 1
MREFDLESYDYNLPKELIANYPILPKEKAKLLVYERHSQKITHTTFEHVLDFFPKNALVVLNDTKVIKARLFGAKHAFSHSRTTEVFFHRFIKDNIALTQINGKVKVGTKIFFDANTYAEVLELLDNGQRLIAFYENNNPLKEASILRLLEQYGHMPLPPYIKRADESLDLNEYQSVFAKHSGAIAAPTASLHFSKNCLETLQKNFKHTFLTLHVGAGTFVNVETKDIREHKIHTEILQISKNSQKILQESKEILCIGTTALRSVEYFKRLENPKQETFECDIFLHLANPIKHVNYLLTNFHLPKSSLLMLVSALIGLEKAKEIYSIAIEKQYRFYSYGDGMLIL

SEQ ID NO: 67279 - protein, 345 aa, Helicobacter cetorum
  REGION 1..345: note = tr|I0ETJ4|I0ETJ4_HELCM S-adenosylmethionine:tRNA ribosyltransferase-isomerase OS=Helicobacter cetorum (strain ATCC BAA-540 / MIT 99-5656) OX=1163745 GN=queA; PE = 3 SV= 1
MREFDLESYDYNLPKELIANYPILPKEKAKLLVYERHSQKITHTTFEHVLDFFPKNALVVLNDTKVIKARIFGSKHTFSHSRTTEVFFHRFLKDNIALTQIKGKVKAGTKIFFDSNNYAEVLELLNNGQRLIAFYENKNPLKEASILRLLEQHGHMPLPPYIKRADESLDLNEYQSVFAKHSGAIAAPTASLHFSKNCLETLQKNFKHTFLTLHVGAGTFVNVETKDIREHKIHTEILQISKESQKILQEEKEILCIGTTALRSVEYFKRLEDPKQETFECDIFLHLANPIKHVNYLLTNFHLPKSSLLMLVSALIGLEKAKEIYSIAIENKYRFYSYGDGMLIL

SEQ ID NO: 67280 - protein, 353 aa, Helicobacter cholecystus
  REGION 1..353: note = tr|A0A3D8J029|A0A3D8J029_9HELI S-adenosylmethionine:tRNA ribosyltransferase-isomerase; OS = Helicobacter cholecystus OX=45498 GN=queA PE=3 SV=1
MSDLYLQNYDYILPPERIATFPASPRESAKLLVYLRQEDRVIHSDFFHFYDFLPKDYLVVLNNTKVIKARMFGHKILEESIGKKVKMGGKVEVLYHRYLKDVEFLVQIKGRVKVGTLISLSHNFTLEVLRLLDNGFRVVRFYDHHSLLGINEVLTRVQEIGHIPLPPYIKREDQGSDESEYQSVFAQKLGAVAAPTASLHFSDISYLKSHYEHCFLTLHVGAGTFLSVESENITHHQIHTESFEISRSSWEKICNAKHTLCVGTTSARVVEYLYRNPLEFKEEIYKGECNLFLHPLNPPQKLDALLTNFHLPKSTLIMLVSSLVGRQKCLELYDLAIKNHYRFYSYGDGMLIL

SEQ ID NO: 67281 - protein, 373 aa, Helicobacter cinaedi
  REGION 1..373: note = tr|I7HDB6|I7HDB6_9HELI S-adenosylmethionine:tRNA ribosyltransferase-isomerase OS=Helicobacter cinaedi CCUG 18818 = ATCC BAA-847 OX=537971 GN=queA PE=3 SV=1
MPHHNAHSKDSEDFLLSSYDYALPQSAIAQSPSIPRESAKLLVYERKSDKITHSDFYHFSDFIPKDTLLVFNNTKVINARIYAHKLNSQAKPNPKRMEIFFHKALDSFRFLVQIKGRVKSGDRLILESHKAFTRPIIAQVLECCEDGMRIVEFMESTKTHSSQENRILNDKEVFELFNNHGYIPLPPYIKRDEANQNLQEDSVFYQSVFAKELGSVAAPTASLHFSKQSLESLQKSFQTCFVTLHIGAGTFINVESEDIRNHAIHKEYFSISSSSAKAITHAKKVLCVGTTSARCVEYMMRYKVLCGECDIFLYPGVEFKRVDYLLTNFHLPKSTLIMLVSAMVGREKCLELYNIALEKGYKFYSYGDGILIL

SEQ ID NO: 67282 - protein, 373 aa, Helicobacter cinaedi
  REGION 1..373: note = tr|A0A377JVM9|A0A377JVM9_9HELI S-adenosylmethionine:tRNA ribosyltransferase-isomerase; OS = Helicobacter cinaedi OX=213 GN=queA PE=3 SV=1
MPHHNAHSKDSKDFLLSSYDYTLPQSAIAQSPSNPRESAKLLVYERKSGKITHSDFYHFSDFIPKDTLLVFNNTKVINARIYAHKLNSQAKPNPKRMEIFFHKVLDSFRFLVQIKGRVKSGDRLILQSHKAFTRPIIAQVLECCENGMRIVEFMESIKTHSSQENRILNDKEVFELFNNHGYIPLPPYIKRDEANQNMQEDSVFYQSVFAKELGSVAAPTASLHFSKQSLESLQKSFQTCFVTLHIGAGTFMNVESEDIRHHAIHKEYFSISNSSAKAITHAKKVLCVGTTSARCVEYMMRYKVLCGECDIFLYPGVEFKRVDYLLTNFHLPKSTLIMLVSAMVGREKCLELYNIALEKGYKFYSYGDGILIL

SEQ ID NO: 67283 - protein, 357 aa, Helicobacter equorum
  REGION 1..357: note = tr|A0A3D8IS91|A0A3D8IS91_9HELI S-adenosylmethionine:tRNA ribosyltransferase-isomerase; OS = Helicobacter equorum OX=361872 GN=queA PE=3 SV=1
MQEHLLPSDFSLSSYDYTLPQELIAMHPTSPRRDGKLLVYYRNSGEIRHCHFRDFSEIVPRDYTLVCNDTKVLRARLYGYKQGGENIREILFHKAYSVDSAPSFLVQIRGRVKRGTEFRICDHNHCPTNFSMRVLEVLDNGLRVVSFYDDTRNAPLHLTDLYAMLEAFGHIPLPPYMKRQDTLQDSIDYQSAFAKNEGAVAAPTASLHFSDEDFSYLKTLYDICYITLHVGAGTFANVEAQDIRTHIMHTESYAITPKAREKILGDSKLLCIGTTAARAVEYFWRVRETEGLCDLFLHPGNTPKRVDALLTNFHFPKSTLLMLVSAFVSCEEMIRIYTCAIAHKYKFFSYGDGMLIL

SEQ ID NO: 67284 - protein, 341 aa, Helicobacter felis
  REGION 1..341: note = tr|E7A950|E7A950_HELFC S-adenosylmethionine:tRNA ribosyltransferase-isomerase OS=Helicobacter felis (strain ATCC 49179 / NCTC 12436 / CS1) OX=936155 GN=queA PE=3 SV= 1
MTDIPLEFSLSSYHYDLPAEYIASTPLLPPERAKLLVYKRATGRITHSTFAHVFDFFPQDALVVLNDTKVIKARLYGRKASGGKVELLIHNPHSLHHFNAQIKGRVPQGGLIELDQGYSCEVLTPPANLRQVCFYHHQHPLKWEEVLDMLELLGHMPIPPYLKRADTPTDTQTYQSVFAKHAGAIAAPTASLHFSESAKEHLLAHFQHAFLTLHVGAGTFVGVECEDIRQHPMHSEALFIPEETQRALDHAPYILCVGTTALRGVEHYKRGNVLKPCDLFLHPGNPVSHVQALLTNFHLPKSTLIMLVASMVGLEKCLELYKIAIEHHYRFYSYGDGMLIL

SEQ ID NO: 67285 - protein, 375 aa, Helicobacter fennelliae
  REGION 1..375: note = tr|A0A2X3BBH3|A0A2X3BBH3_9HELI S-adenosylmethionine:tRNA ribosyltransferase-isomerase; OS = Helicobacter fennelliae OX=215 GN=queA PE=3 SV=1
MYAKSSHNAPKHLNSYDLNTNDVSDFALANYDYTLPSHCIASYPANPKESAKLLIYNRLDKSIIHSDFYHLFDFIPKDSTIILNDTRVIKARIYGTKQSGGKSEILFHYFLDLANTAMSATHTIAICQVRNSAPNGTIISLSNGYVAKVIDTFRQSYKQIIFYHHDVPMHQAQVFEMLESIGQIPLPPYIKRHVEAQDSAQYQSVFAKHNGSIAAPTASLHFSKSMLASLKAHFTLSYVTLHIGAGTFFGVESSDIRNHHIHSESLFISKQNANLIYNAKKILCIGTTAMRSVECLARANHNPSQDFSVQCNLFLHPGNKPIKTDYLLTNFHLPKSTLIMLVASMIGIKECQRVYQEALKNSYRFFSYGDGMLIL

SEQ ID NO: 67286 - protein, 375 aa, Helicobacter fennelliae
  REGION 1..375: note = tr|T1CT73|T1CT73_9HELI S-adenosylmethionine:tRNA ribosyltransferase-isomerase OS=Helicobacter fennelliae MRY12-0050 OX=1325130 GN=queA PE=3 SV=1
MYAKSSHNAPKHLNSYDLNTNDVSDFALANYDYTLPSHCIASYPANPKESAKLLIYNRLDKSIIHSDFYHLFDFIPKDSTIILNDTRVIKARIYGTKQSGGKSEILFHYFLDLADTAMSATHTIAICQVRNSAPNGTIISLSNGYVAKVIDTFRQSYKQIIFYHHDVPMHQAQVFEMLESIGQIPLPPYIKRHVEAQDSAQYQSVFAKHNGSIAAPTASLHFSKSMLASLKAHFTLSYVTLHIGAGTFFGVESSDIRNHHIHSESLFISKQNANLIYNAKKILCIGTTAMRSVECLARANHNPSQDFSAQCNLFLHPGNKPIKTDYLLTNFHLPKSTLIMLVASMIGIKECQRVYQEALKNSYRFFSYGDGMLIL

SEQ ID NO: 67287 - protein, 369 aa, Helicobacter ganmani
  REGION 1..369: note = tr|A0A3D8ICZ6|A0A3D8ICZ6_9HELI S-adenosylmethionine:tRNA ribosyltransferase-isomerase; OS = Helicobacter ganmani OX=60246 GN=queA PE=3 SV=1
MRELQLKSYDYILPKERIATYPIVPKEEAKLLVYERASDKITHTTFKDFANFLPQDTLLVFNNTKVLPARLYGTKVVQDSKNPNTKGAKIEALFHKEITPNVYLMQFKGRLKVGLLVAFEGGIFARILKDNQDSTLGAGFKEAEFFRIPQKNLQNYLQSFSKTLESPLNREEFFEFLEHFGHIPLPPYLKRQDTQADKKDYQSVFAKHLGAIAAPTASLHFSEESYKNLKQNFQNTEITLHVGAGTFVGVQSENILEHKMHKEYFFISQDSADKIYQASHITAIGTTATRVIEEFARNGKLRGECDLFLHPQNKPRKTNALLTNFHLPKTTLLMLVASFVSLDTMQRLYKEAIARNYRFYSYGDGMLIL

SEQ ID NO: 67288 - protein, 342 aa, Helicobacter heilmannii
  REGION 1..342: note = tr|A0A0K2XPU9|A0A0K2XPU9_HELHE S-adenosylmethionine:tRNA ribosyltransferase-isomerase; OS = Helicobacter heilmannii OX=35817 GN=queA PE=3 SV=1
MPNVPKEFQRASYRYDLPQHLIATHPISPKENAKLMVYERASGRITHATFKEVFSFFPRDALVVLNDTKVMKARLFANTPNKRQVEILLHHALSPTACLAQMRGRVRPGLILELDQGYSCEVLEVRQDGLRVLAFKHEGRILEWAKVLHMLEYLGHMPIPPYLKRPDTSQDTQDYQSVFAKNLGAIAAPTASLHFSESAKNYLLRNFQHVFITLHVGAGTFLSVESKDIREHPMHTEFVEVSFKAGKALDEAHYILCVGTTALRATEHYKRGFGSKPCNLFLHPGNPVKHASALLTNFHLPESTLIMLVASMVGLDKCLELYKIAIEHHYRFYSYGDGMLIL

SEQ ID NO: 67289 - protein, 342 aa, Helicobacter heilmannii
  REGION 1..342: note = tr|A0A0K2XNZ3|A0A0K2XNZ3_HELHE S-adenosylmethionine:tRNA ribosyltransferase-isomerase; OS = Helicobacter heilmannii OX=35817 GN=queA PE=3 SV=1
MPSIPKEFNRTSYAYDLPEHLIATHPIQPKESAKLMVYERSSNKLTHATFQEIFDFFPKHALVVLNDTKVMKARLFANTPNKRQVEILLHHALSPTACLAQMRGRVRPGLILELDQGYSCEVLEVRQDGLRVLAFKHEGRILEWAKVLHMLEYLGHMPIPPYLKRPDTSQDTQDYQSVFAKNLGAIAAPTASLHFSESAKNYLLRNFQHVFITLHVGAGTFLSVESKDIREHPMHTEFVEVSFKAGKALDEAHYILCVGTTALRATEHYKRGFGSKPCNLFLHPGNPVKHASALLTNFHLPESTLIMLVASMVGLDKCLELYKIAIEHHYRFYSYGDGMLIL

SEQ ID NO: 67290 - protein, 365 aa, Helicobacter hepaticus
  REGION 1..365: note = sp|Q7VG37|QUEA_HELHP S-adenosylmethionine:tRNA ribosyltransferase-isomerase OS=Helicobacter hepaticus (strain ATCC 51449 / 3B1) OX=235279 GN=queA PE=3 SV=1
MTYFDPKIQESDFALSSYDYTLPFSAIAQNPANPRERAKLLIYQRDSGRIIHSDFYHFCDFVPKDTLLVFNDTRVIKARIYAHKLDCNTQKLSDKTFEIFYHKPLQSTSSAIPLFLVQIKGRVKCGDKLLINTDSTNPFLIAQVQECLDNGLRVVSFMQNEHALEYIQVLDMLEKYGHTPLPPYIKREDSCQDAHFYQSVFSKQLGSIAAPTASLHFSKESIESIKAQFETCFLTLHIGAGTFMNVESADIRHHLIHKEFFSLSPQSAAAIQNAHKVLCIGTTSARCVEYYARYKILQGECDIFLYPSKSFKRVDYLLTNFHLPKSTLMMLVSAMVGREKCLELYKLALEKGYRFYSYGDGMLIL

SEQ ID NO: 67291 - protein, 376 aa, unidentified
  source 1..376: note = Helicobacter jaachi
  REGION 1..376: note = tr|A0A4U8T7G1|A0A4U8T7G1_9HELI S-adenosylmethionine:tRNA ribosyltransferase-isomerase; OS = Helicobacter jaachi OX=1677920 GN=queA PE=3 SV=1
MSQIYDDFVLDNYNYTLPPHAIAQSPSVPRESAKLLVYERKSGKITHSNFYHFSDFVPKDTLLVFNDTKVLKARIYAHKLTHNAPSQKQYEIFFHKPIIESSSPQEATSYLVQIKGRIKCGDRLMLTRSLDSMDIDSINIESAKVDSIIAIVQACYDNGMREVIFTQNTLPLTYPQVLCMLNDYGHIPLPPYIKRDKKAYNAQDAAFYQSIFAKSIGSIAAPTASLHFGEQSMEALKKHFETCFITLHIGAGTFKSVDCPDIRQYNIHTESFSLSPQSAKAIDNARKVLCIGTTSARCVEYYAKYKILQGECDIFLYPSINLRRVDYLLTNFHLPKSSLIMLVSAMIGRKECLRLYEIALQEGYKFYSYGDGMLIL

SEQ ID NO: 67292 - protein, 363 aa, unidentified
  source 1..363: note = Helicobacter japonicus
  REGION 1..363: note = tr|A0A4U8TRU9|A0A4U8TRU9_9HELI S-adenosylmethionine:tRNA ribosyltransferase-isomerase; OS = Helicobacter japonicus OX=425400 GN=queA PE=3 SV=1
MSQYSLISNDFLLESYDYTLPQNAIAQNPANPRESAKLLVYERQSGRITHSNFYHFCDFIPQGTLIVLNDTKVIQARIYAHKINSLTQGLSQKHYEIFFHKPLDSINQSTLFLAQIKGRVKKGDRLIIADSISTQASIIVEIKECLTNGLRIVKFIQNNQDLNYPLVLNMLEKYGHIPLPPYIKRNDEKSDVLFYQSVFANHLGSIAAPTASLHFSEKSLESMRKHFELCFITLHVGAGTFMSVESADIRHHNIHTESYSLSIESAKALQKANKVLCVGTTSARCVEHYMRHKALNGECDIFLYPSVKFERVDYLLTNFHLPKSTLLMLVSAMIGREKCLELYQLALQQGYRFYSYGDGMLIL

SEQ ID NO: 67293 - protein, 411 aa, unidentified
  source 1..411: note = Helicobacter macacae
  REGION 1..411: note = tr|V8C984|V8C984_9HELI S-adenosylmethionine:tRNA ribosyltransferase-isomerase OS=Helicobacter macacae MIT 99-5501 OX=1357400 GN=queA PE=3 SV=1
MDSYALQSYEYDLPSELIASYPASPRESARLLIYERASKKITHSSFKNLFKFIPPSTTIILNDTRVLKARIYGTRLGKITAQNPLSKNDKANNKSQNQSSGGKREILFHRFISKDEVLQEISQDKNLAEILSQSKVDFCSLCQTKGKLKNGDIIALEKGYEARVLATLPSGYKVIAFFYRQRQCAQYEIIKMLETIGHIPLPPYIKREDSSLDESEYQTVFATQNGSIAAPTASLHFSKSMLKELYLRFPTATLTLHIGAGTFAPVVSEDIRLHNMHKEWLSIPPKTQKAIKNASKILCVGSSSMRSVECYARALTKLKTTQKSQHLSSDFTNDFTSEVASDFQTQCDIFLHPQNPPIKTDFLLTNFHLPKSTLIMLVASMVGLDEWRKIYNEAIAQKYRFYSYGDAMLIL

SEQ ID NO: 67294 - protein, 373 aa, unidentified
  source 1..373: note = Helicobacter magdeburgensis
  REGION 1..373: note = tr|A0A4U8SYI6|A0A4U8SYI6_9HELI S-adenosylmethionine:tRNA ribosyltransferase-isomerase; OS = Helicobacter magdeburgensis OX=471858 GN=queA PE=3 SV=1
MPHHNAHSKDSKDFLLSSYDYALPQSAIAQSPSNPRESAKLLVYERKSGKITHSDFYHFSDFIPKDTLLVFNNTKVINARIYAHKLNPQAKPNPKRMEIFFHKVLDSFRFLVQIKGRVKSGDRLILQSHKAFTCPIIAQVLECCENGMRIVEFMESIKTHSSQENRILNDKEVFELFNNHGYIPLPPYIKRDEANQNMQEDSVFYQSVFAKELGSVAAPTASLHFSKQSLESLQKSFQTCFVTLHIGAGTFMNVESEDIRHHTIHKEYFSISNSSAKAITHAKKVLCVGTTSARCVEYMMRYKVLCGECDIFLYPGVEFKRVDYLLTNFHLPKSTLIMLVSAMVGREKCLELYNIALEKGYKFYSYGDGILIL

SEQ ID NO: 67295 - protein, 350 aa, Helicobacter marmotae
  REGION 1..350: note = tr|A0A3D8I9H1|A0A3D8I9H1_9HELI S-adenosylmethionine:tRNA ribosyltransferase-isomerase; OS = Helicobacter marmotae OX=152490 GN=queA PE=3 SV=1
MKHKYMEYDFMLDGYNYTLPSSAIANHPANPRESAKLLVYERESGRITHSDFYHFCDFIPKETLVVLNNTKVIKARLYAHKLTNLQKSQKLYEIFFHKMLEDSLYLVQIRGRVKNGDRFILGDDICIELKECVDGGMRKVCFIKEGKLLKGEDVLEVLEHYGHMPIPPYIKRPSMESDTYFYQSVFAKNAGSVAAPTASLHFSTQSLEMLEQHFQTCFVTLHIGAGTFIGVEKPDIRDHIIHTESYSLSPQSAQSIEQAKKVLCIGSTSARCVEYYMRHKTLSGECDIFLYPGVALKRVDYLLTNFHLPKSTLLMLVSAMIGREKCLELYELALKENYRFYSYGDGMLIL

SEQ ID NO: 67296 - protein, 432 aa, Helicobacter muridarum
  REGION 1..432: note = tr|A0A377PUH5|A0A377PUH5_9HELI S-adenosylmethionine:tRNA ribosyltransferase-isomerase; OS = Helicobacter muridarum OX=216 GN=queA PE=3 SV=1
MIAYNKDYRDLFLDSYSFSLPQNLIATSPKYPKESAKLLVYYKDTGEIIHTTFASLFDFIPRDYLIVLNNTKVIPARFYASKLDKPISYDTSISISYLHNKVREFLYHKPLGELRHLVQIRGRVRQNDFFMASDLKTLVRVIRVLDYGYKEVLFYDILSISSATKHGNLEFTESNIYSISPMSDFQVIAFLRECGKVPIPPYIKREANIKDAVDYQSIFASIDGSVAAPTASLHFSESMFAFLKENFHYTFVTLHIGAGTFAPIKTNSILEHRIHSEYCSIADSSAIKIAKHNKILCVGTTALRCIEWFARTSAYEQGFDLEANLNNKCLHNDKSINIGISKDRLVLSKNIEDKQGQDRQIGVLCGENSLFLHPFNPPRLANALLTNFHLPKSSLLLLVSSLIGREEVLRVYDNAIRSRYRFYSYGDGMLII

SEQ ID NO: 67297 - protein, 342 aa, Helicobacter mustelae
  REGION 1..342: note = tr|D3UFV3|D3UFV3_HELM1 S-adenosylmethionine:tRNA ribosyltransferase-isomerase OS=Helicobacter mustelae (strain ATCC 43772 / LMG 18044 / NCTC 12198 / 12198); OX = 679897GN=queA PE=3 SV=1
MREFSLQSYDYALPQELIAKYPLERKEDARLLVYDRKSGGITHTHFDALFDFIPRDFTLVFNDTKVIKARIFGEKGSGGKIELLYHKSLPDGALVQIRGRVKVGEHIHFPHGYSAKVCALLDHGMRIVEFLYHGRPIRDLAPLFESIGHIPLPPYLKRADESADEQEYQSVFATHHGAIAAPTASLHFSPRMRDFALQHYPHAFVTLHVGAGTFLGVESEDIRGHEIHSEELWVSAANLSLIEGAKKILCIGTTALRSVEFLSQRDLLRQEGDYVGDCDIFLHCGNPPKKASALLTNFHLPKSSLIMLVASMVGLDTCKNLYAEAIAKKYRFYSYGDGMLIL

SEQ ID NO: 67298 - protein, 402 aa, Helicobacter pametensis
  REGION 1..402: note = tr|A0A3P6LFS9|A0A3P6LFS9_9HELI S-adenosylmethionine:tRNA ribosyltransferase-isomerase; OS = Helicobacter pametensis OX=95149 GN=queA PE=3 SV=1
MKEEQNRAGRERRFKNIGLKLLPIFQVAFASMRLPENANPNTQAKRLYNARFSPTAYCAMQLADFDFHLPEHLIAQQPPEQRGSSRLLDARPDRSLCDRLFAELPNLLEVGDLLVFNNTRVMKARLFGHKASGGRIEALIERVLDEHCALAHIRSSKSPKPGSLLEFDGSIQAQMEEREGELFKLRFSGSLNVYQILEQTGRLPLPPYIERAADAADDERYQTVYAKHQGAVAAPTAGLHFTPELLAGLQAKGIRRAEVTLHVGAGTFQPVRSENIAEHKMHKEWYSIPAKTVAAIAETKATSKRVWAVGTTSMRSLEAAAQNGCLQAGEGDTDIFITPGYRFQVADGLITNFHLPKSTLLMLVSAFSGVEHIRAAYRHAIEQQYRFFSYGDAMLLTRAEVS

SEQ ID NO: 67299 - protein, 347 aa, Helicobacter pullorum
  REGION 1..347: note = tr|A0A0N1ECJ5|A0A0N1ECJ5_9HELI S-adenosylmethionine:tRNA ribosyltransferase-isomerase; OS = Helicobacter pullorum OX=35818 GN=queA PE=3 SV=1
MNELLSTSYDYELPKELIATQPIIPKEDAKLLVYNRKDRSIIHSTFRDFMQFLPKETLLVFNDTKVIPARIYGVKIFQNAQQEGGKIEALFHKEISENLYLMQFRGRLKEGSRVKFEGGIFAKIIKDCGMGFKEASFFRIDDESPLDKQEFFGFLDSCGHTPLPPYIKREASQQDREEYNSVFAKNLGAIAAPTASLHFSQESFQQLQREFNNAFVTLHVGAGTFLGVSVENILEHKMHKESFIIPQESIQKIQEATHITAIGTTAARTIEYFARTKQAQGECDLFLHLQNKPILTDALLTNFHLPKTTLLMLVASFMGLEETKRIYQEAIKKKYRFYSYGDGMLVL

SEQ ID NO: 67300 - protein, 347 aa, Helicobacter pullorum
  REGION 1..347: note = tr|A0A377Q3N1|A0A377Q3N1_9HELI S-adenosylmethionine:tRNA ribosyltransferase-isomerase; OS = Helicobacter pullorum OX=35818 GN=queA PE=3 SV=1
MNELLSTSYDYELPKELIATQPITPKEDAKLLVYNRKDRSIIHSTFRDFKQFLPKETLLVFNDTKVIPARIYGVKIFQNTQQEGGKIEALFHKEIGENLYLMQFRGRLKEGSRVKFEGGIFAKIIKDCGMGFKEASFFKIDDESPLDKQEFFGFLDSCGHTPLPPYIKREASQQDREEYNSVFAKNLGAIAAPTASLHFSQESFQQLQREFNNAFVTLHVGAGTFLGVSVENILEHKMHKESFIIPQESIQKIQEATHITAIGTTAARTIEYFARTKQAQGECDLFLHLQNKPILTDALLTNFHLPKTTLLMLVASFVGLEETKRIYQEAIKKKYRFYSYGDGMLVL

SEQ ID NO: 67301 - protein, 345 aa, Helicobacter pylori
  REGION 1..345: note = sp|O25702|QUEA_HELPY S-adenosylmethionine:tRNA ribosyltransferase-isomerase OS=Helicobacter pylori (strain ATCC 700392 / 26695) OX=85962 GN=queA PE=3 SV=1
MKEFDLESYDYYLPKELIASYPVLPKEKAKLLVYERRSQKITHTTFEHVLDFFPKNALIVLNDTKVIKARLFGSKHAFLPSKTTEVFFHRFFKNNTALTQIKGKIKVGDKIFFDANYHAEVLELLHNGQRLIAFYDNKTPLNQENILKLLEQYGHMPLPPYIKRADESLDAHEYQSVFAKHMGAVAAPTASLHFSQNTLEKLLKDFKHAFLTLHVGAGTFLSVETKDIREHQIHTEVLRIPKKSQEILQKSQEILCVGTTALRSVEYFKRLENPNQEAFECDIFLHFANPILHVNYLLTNFHLPKSSLLMLVSTMIGLEKTKEIYKTAIEKKYRFYSYGDGMLIL

SEQ ID NO: 67302 - protein, 345 aa, Helicobacter pylori
  REGION 1..345: note = tr|J0NA56|J0NA56_HELPX S-adenosylmethionine:tRNA ribosyltransferase-isomerase OS=Helicobacter pylori Hp H-6; OX = 992061 GN=queA PE=3 SV=1
MKEFDLESYDYHLPKELIANYPVLPKERAKLLVYERRSQTITHTTFEHVLDFFPKNALVVLNDTKVIKARLFGSKHAFLPSKTTEVFFHRFFKGNTALTQIKGKIKAGDKIFFDANYYAEVLELLHNSQRLIAFYDNQTPLNQENILKLLEQYGHMPLPPYIKRADESLDAHEYQSVFAKHIGAVAAPTASLHFSQNTLEKLLKDFKHAFLTLHVGAGTFLGVETKDIREHQIHTEVLRIPKKSQEILQESQEILCIGTTALRSVEYFKRLKNPNQESFECDIFLHLANPIQHVNHLLTNFHLPKSSLLMLVSAMIGLEKTKEIYKIAIEKKYRFYSYGDGMLIL

SEQ ID NO: 67303 - protein, 436 aa, unidentified
  source 1..436: note = Helicobacter saguini
  REGION 1..436: note = tr|A0A347VS94|A0A347VS94_9HELI S-adenosylmethionine:tRNA ribosyltransferase-isomerase; OS = Helicobacter saguini OX=1548018 GN=DCO59_09325 PE=3 SV=1
MQDSINIDSKDCLLESYDFILPSHLIAFEPCNPKENAKLLVYKNGEIIHTTFKHFFDFVPRDYLIVLNDTRVIKARIFGEKILNLDSIKSYENTNFENFKVTCDLESNATFHKKSREIFYHKALDSNNHLVQIKGRVKENDIFKLDSNIFMCVVKLRNDGFREVVFFKIIESSKLYSIKNSKNNNFIESSTINSKIPNFLESKFGENIQILNQSEIFSLLENKGKIPLPPYIKRESTKRDCKDYQSLFAKVNGSVAAPTASLHFSREMLGFLESNFNVAYVTLHVGAGTFKPVETADITTHKMHEEYCEISLKNAKKILNTQKILCVGSTAMRSVEWLNDNILKSSKNTNLENFKVSPDSKDFIESKLIGQNSIFLHPQNKPKKVNALLTNFHLPKSSLIMLVSSLIGRENTLKLYHEAILHNYKFYSYGDCMLII

SEQ ID NO: 67304 - protein, 342 aa, Helicobacter sp.
  REGION 1..342: note = tr|A0A553UL06|A0A553UL06_9HELI S-adenosylmethionine:tRNA ribosyltransferase-isomerase; OS = Helicobacter sp. L8b OX=2593541 GN=queA PE=3 SV=1
MPVPREFLRTSYTYHLPPHLIATHPISPKEEAKLMVYERTSDKLTHTTFKEIFNFFPPNALVVLNDTKVIKARLYGYKEQGKPVEILIHQPQGLLDCMVQMRGRVRAGLVLDLRHGYCVQVQKVLENGMRLVRFIKEREGFLEWAGVLEMLELLGHVPLPPYLKRSDEVQDLQDYQSVFAKYPGAIAAPTASLHFSQSAKNHLLKNFRHVFITLHVGAGTFLSVQSEDIRQHPMHAEFVQVSPQAGEALDNAPYILCVGTTALRATEHYKRGFGLEPCNLFLHPGNPVRHAQALLTNFHLPESTLIMLVASMVGLDKCLELYKIAIEHHYRFYSYGDGMLIL

SEQ ID NO: 67305 - protein, 378 aa, Helicobacter sp.
  REGION 1..378: note = tr|A0A4U8SIQ9|A0A4U8SIQ9_9HELI S-adenosylmethionine:tRNA ribosyltransferase-isomerase; OS = Helicobacter sp. MIT 03-1616 OX=1548148 GN=queA PE=3; SV = 1
MSYNPSDFLLSNYDYNLPQNAIAQNPANPRENAKLLVYERSSGRIIHSDFYHFCDFVPQDTLIVMNDTKVLKARIYAHKLDSNTQSLSQKKYEIFFHKALDCVNPTNHPASATRFLAQIKGRVKIGSRLVLSSESKADNANISHTQHSANPPIIAEVKECLRNGLRVVCFMQGEKILSYLDVLSMLEVCGHIPLPPYIKRDDSLSDETFYQSVFAHNLGSIAAPTASLHFSERSLESLQNCFETCFITLHIGAGTFMSVESDDIRQHEIHTETYSLEKNCANAIENARKVLCVGTTSARCVEHYMRCKSLSGECDMFLYPSVEFKRVDYLLTNFHLPKSTLLMLVSAMIGREKCLELYTLALSKGYRFYSYGDGMLIL

SEQ ID NO: 67306 - protein, 341 aa, Helicobacter suis
  REGION 1..341: note = tr|A0A510HCN4|A0A510HCN4_9HELI S-adenosylmethionine:tRNA ribosyltransferase-isomerase; OS = Helicobacter suis OX=104628 GN=queA PE=3 SV=1
MSIPKEFLRASYTYHLPKHLIASHPIKPKEEAKLMIYERARNRLTHTTFAHIFEFFPKNALIVLNDTKVIKARLFGRKKSGHLVEILIHHPKDNFCLVQIRGKVHVGLILQLDHGYFCQVLEVLSNGMRLVGFFKESGHFLEWVEVLDMLEILGHMPIPPYLKRADEIKDLQDYQSVFAKNLGAIAAPTASLHFSESTKAYLLSHFKHAFLTLHVGAGTFLGVECEDIREHGMHSEFVDIPLITQQALDHAPCILCIGTTALRAVEHYKRGFKTPHCDLFLHAGNPVKHVQALLTNFHLPQSTLIMLVASMLGLDKCLELYKQAIKHHYRFYSYGDGMLIL

SEQ ID NO: 67307 - protein, 349 aa, Helicobacter suis
  REGION 1..349: note = tr|E7G2Y9|E7G2Y9_9HELI S-adenosylmethionine:tRNA ribosyltransferase-isomerase OS=Helicobacter suis HS5; OX = 710394 GN=queA PE=3 SV=1
MLPPKKKKMSIPKEFLRASYTYHLPKHLIASHPIKPKEEAKLMIYERARNRLTHTTFAHIFEFFPKNALIVLNDTKVIKARLFGRKKSGHLVEILIHHPKDNFCLVQIRGKVHVGLILQLDHGYFCQVLEVLSNGMRLVGFFKESGHFLEWVEVLDMLEILGHMPIPPYLKRADEIKDLQDYQSVFAKNLGAIAAPTASLHFSESTKAYLLSHFKHAFLTLHVGAGTFLGVECEDIREHGMHSEFVDIPLITQQALDHAPCILCIGTTALRAVEHYKRGFKTPHCNLFLHAGNPVKHVQALLTNFHLPQSTLIMLVASMLGLDKCLELYKQAIKHHYRFYSYGDGMLIL

SEQ ID NO: 67308 - protein, 388 aa, Helicobacter trogontum
  REGION 1..388: note = tr|A0A4U8TDE2|A0A4U8TDE2_9HELI S-adenosylmethionine:tRNA ribosyltransferase-isomerase; OS = Helicobacter trogontum OX=50960 GN=queA PE=3 SV=1
MCDDLDLLGYDFVLPNNLIATTPIIPKENARLLIYHDGKITHTTFHRLFDYIPQDYLIVLNDTKVINAQLFVNKLSLESLHKTRPHEMQTLQDYILPTKREIFYHKWLSNNLHLVQIKGKAKLYDIFVLRWNNIDVFIQVLDIKNDGYKLVSFFTLHDIAAVREIALCKSHTDIFSHVDILSQSQVLSVLQACGNIPLPPYMKRTSTEKDSKDYQSIFARHDGSVAAPTASLHFSESMFKVLKEKYDHAFVTLHVGAGTFKPVTSQNILNHKIHSESCLIKEQEVKKILNAEKLLCVGTTSMRSVEWLIREDLTQLNGDIMGENTIFLHPLNPPKKVHALLTNFHLPKSSLLMLVSSMIGRKETLRIYQEVIENKYRFYSYGDGMLII

SEQ ID NO: 67309 - protein, 388 aa, Helicobacter trogontum
  REGION 1..388: note = tr|A0A4U8SDJ3|A0A4U8SDJ3_9HELI S-adenosylmethionine:tRNA ribosyltransferase-isomerase; OS = Helicobacter trogontum OX=50960 GN=queA PE=3 SV=1
MCDDLDLLGYDFVLPNNLIATTPITPKENARLLIYHDGKITHTTFHKLFDYIPQDYLIVLNDTKVINARLFVNKLSLESLHKTRPHEMQTLQDYILPTKREIFYHKWLSNNLHLVQIKGKAKLYDIFVLRWNNIDIFIQVLDIKNDGYKLVSFFTLHDIAAVREIALCKSHTDIFSHVDVLSQSQVLSVLQACGNIPLPPYMKRTSTEKDSKDYQSIFARHDGSVAAPTASLHFSESMFKVLKEKYDHAFVTLHVGAGTFKPVTSQNILNHKIHSESCLIKEQEVKKILNAKKLLCVGTTSMRSVEWLIREDLTQLNGDIMGENTIFLHPLNPPKKVHALLTNFHLPKSSLLMLVSSMIGRKETLRIYQEAIENKYRFYSYGDGMLII

SEQ ID NO: 67310 - protein, 378 aa, Helicobacter typhlonius; identical to SEQ ID NO: 67305
  REGION 1..378: note = tr|A0A0S4PYZ1|A0A0S4PYZ1_9HELI S-adenosylmethionine:tRNA ribosyltransferase-isomerase; OS = Helicobacter typhlonius OX=76936 GN=queA PE=3 SV=1

SEQ ID NO: 67311 - protein, 343 aa, unidentified
  source 1..343: note = Helicobacter valdiviensis
  REGION 1..343: note = tr|A0A2W6NIH0|A0A2W6NIH0_9HELI S-adenosylmethionine:tRNA ribosyltransferase-isomerase; OS = Helicobacter valdiviensis OX=1458358 GN=queA PE=3 SV=1
MNELTLSAYDYHLPSHLIASKPLKNKEDSKLLVYNRQDRSIIHSTFLEFAKFLPKNTLIVFNDTKVIPARIYGSKIHENLQEGAKIEGLFHKILGENLYLFQFRGRLKEGNRVDFYGITCKILKDLEMGFKEVGFFKNNKALNLEEFLKFLEEFGHIPLPPYLKREDTKEDREDYQSVFAKNIGAIAAPTASLHFSEESYKYLKENFQTTFVTLHVGAGTFLPVSVENILEHKMHKESYEINKNTQEMLEKAEHITAIGTTATRTIEFYARTKQESGECDLFLHPKNPPLKTHALLTNFHLPKSTLLMLVASFVGLEEMQRIYQEAILKEYRFYSYGDGMLIL

SEQ ID NO: 67312 - protein, 361 aa, unidentified
  source 1..361: note = Helicobacter winghamensis
  REGION 1..361: note = tr|A0A2N3PIZ3|A0A2N3PIZ3_9HELI S-adenosylmethionine:tRNA ribosyltransferase-isomerase; OS = Helicobacter winghamensis OX=157268 GN=queA PE=3 SV=1
MNILSLSSYNYTLPKECIATEPITPKEAAKLLVFNRKDCSITHSTFRNFANFLPKDTLLVFNNTKVLPARIYGKKILQNLKNDSNLCGAKIEALFHKEISENRYLMQFKGRLKAGSIISFGSVYARILGNLANIGIGFKEAEFFILKENKEIPLSRDAFFAFLEHSGHIPLPPYIKRDDTQADKQDYQSVFAKHLGAIAAPTASLHFSKEAYKYLKEHFSTTEITLHTGAGTFLGVNTENILEHKMHTESFFIPQDSAKKMKVASHITAIGTTAARTIETYARSEAFKEGKALSGECDLFLHPQNPPKATSALLTNFHLPKTTLLMLVASFIGLEQTLKLYQEAIAKNYRFYSYGDGMLIL

SEQ ID NO: 67313 - protein, 342 aa, unidentified
  source 1..342: note = Helicobacteraceae bacterium
  REGION 1..342: note = tr|A0A1J5F708|A0A1J5F708_9HELI S-adenosylmethionine:tRNA ribosyltransferase-isomerase; OS = Helicobacteraceae bacterium CG2_30_36_10 OX=1805215; GN = queA PE=3 SV=1
MSNPELLTSSYDFHLPQELIATHPASPRDHARLLVYDRTTQQITHANFYEFEKFIPKECALIFNDTKVIKARLFGKKHSGGKLELLINRALNANDVNVYIRGKVKVGSEIFFDENLVAVVKELHDDGSRIVNFWACGNSLRFEEILPIIDRIGHVPLPPYIQREDNKEDESEYQSVFALNEGAVAAPTASLHFTPEQHKKVCKKFAHAYVTLHVGSGTFKPVEAETITDHPMHSEYYDISPKAKELLDSGRAILSVGTTSTRTIEFYARNRHATSGEANLFLHPNNKPLRVNHLLTNFHLPKSTLLMLVASFVGVEKAQELYAEAIKNRYRFYSYGDAMLIL

SEQ ID NO: 67314 - protein, 340 aa, unidentified
  source 1..340: note = Helicobacteraceae bacterium
  REGION 1..340: note = tr|A0A1W9PPN9|A0A1W9PPN9_9HELI S-adenosylmethionine:tRNA ribosyltransferase-isomerase; OS = Helicobacteraceae bacterium 4484_230 OX=1968531 GN=queA; PE = 3 SV=1
MQNPLKTSSYDFILPQELIATHPAEPRENARLLVYRRDTDTIIHARFYEIEKFLPENSAVIFNDTKVIKARLFGKKESGGKIELLINRMLDACRINVYIRGKVKVGTKLFFDEDLAAAVTALHDDGSRDVNFFRHEKMLRFEELLPIVDKIGHTPLPPYIQREDNKEDEADYQSVFAKKEGAVAAPTASLHFSDTLFRQICEKHDNAYVTLHVGAGTFKPVESEIITDHPMHSEYYSVSPEAEEIINGKQPLLCVGTTSTRTVEYYVRTKKLSGEANLFLHPGNPPQRVNYLLTNFHLPKSTLLMLVASFAGLETTHRLYEEAIKEKYRFYSYGDAMLIV

SEQ ID NO: 67315 - protein, 344 aa, Heliobacterium modesticaldum
  REGION 1..344: note = sp|B0TF76|QUEA_HELMI S-adenosylmethionine:tRNA ribosyltransferase-isomerase OS=Heliobacterium modesticaldum (strain ATCC 51547 / Ice1) OX=498761 GN=queA; PE = 3 SV=1
MEVALYDYELPKEAIAQTPVEPRDASRLMVLERRTGAVDHRIFRDLVHILHPGDLLVVNRTRVIPARLFGKKRDSDVTVEIVLLTPMGDDRWEVLVRPGRRLKPGVFVDLGEGRLAAEIVETTDFGGRVVRFHYSGDFDTLIDEIGQMPLPPYIETALPRQEAERYQTVYSQERGSAAAPTAGLHFTPQLLEDLKKRGIEITSVLLHVGLGTFRPVQVDRIEEHKMHSEFFQVDPEAARAIAKAKQEGRRVIAVGTTVARTLETAAGLHNGTVAAGSGWTDIFIYPGYTFQCIDGLITNFHLPRSTLLMLVSAFAGREQVLAAYREALEKGYRFFSFGDAMLII

SEQ ID NO: 67316 - protein, 344 aa, Heliophilum fasciatum
  REGION 1..344: note = tr|A0A4R2RYY2|A0A4R2RYY2_9FIRM S-adenosylmethionine:tRNA ribosyltransferase-isomerase; OS = Heliophilum fasciatum OX=35700 GN=queA PE=3 SV=1
MEVALFDYHLPPEAIAQYPIEPRDASKLMILDRRDGTVEHKQFRDLLEELQRGDVLVLNRSRVLPARLYGQKAGTDVAVEMVLLTPQGNDCWDVLVRPGRRLKPGSTIIFADGRLHADVIGTTAFGGRRVKLRYAGDLAPLLDEIGQMPLPPYIVQALPPEQAERYQTVYARERGSAAAPTAGLHFTPELLEALAARGVEITSVLLHVGLGTFRPVQAERIDEHVMHAEFYQIEADAAERINRARQEGRRVIAVGTTVTRTLETVASQHSGKIIAASGWTDIFIYPGYTFQAIDGLITNFHLPKSTLLMLISALAGREAVLNAYQQAIAADYRFFSFGDAMFIR

SEQ ID NO: 67317 - protein, 350 aa, unidentified
  source 1..350: note = Henriciella algicola
  REGION 1..350: note = tr|A0A399RE17|A0A399RE17_9RHOB S-adenosylmethionine:tRNA ribosyltransferase-isomerase; OS = Henriciella algicola OX=1608422 GN=queA PE=3 SV=1
MDLSAFAFELPEELIALRPVEPQDAARLLVVHGDGRLEDAGVRDLPRYLSAGDTLVFNDTRVIPAALKGVRPARDETGADVNVDANLVERVSPDTWRALARPGKRLKPGDTIAFGEGFEATVREKGDGADLLLVFNRAGDALDEALDAFGAMPLPPYIARRRAADAKDRETYQTSFAGEEAQSVAAPTAGLHFTPRLREEIAAAGIKSEWVRLHVGLGTFSPLQESQLESGRLHEEWRRVSPEVAEKLNAVRAKGGRVVPVGTTALRTLESSVEGGTIVPTLGPTDIFLKPGDRLQATDALVTNFHLPESSLFMLVCALMGTDIMQAAYAHAIKEGYRFYSYGDACLLRP

SEQ ID NO: 67318 - protein, 350 aa, unidentified
  source 1..350: note = Henriciella barbarensis
  REGION 1..350: note = tr|A0A399QND7|A0A399QND7_9RHOB S-adenosylmethionine:tRNA ribosyltransferase-isomerase; OS = Henriciella barbarensis OX=86342 GN=queA PE=3 SV=1
MDLSAFAFELPDELIALRPVEPQDSARLLVVHGDGRLEDAGIRHLPRYLTSGDTLVFNDTRVIPAALKGVRPARDAAGTDVNIDANLVERVSPDTWRALARPGKRLRLGDAIAFGENFEAIITEKGQGADLLLQFNRAGEALDEALDAFGAMPLPPYIARRRSADAKDRETYQTSFAGEEAQSVAAPTAGLHFTPRLRDEITASGIASEWVRLHVGLGTFSPLQESQLESGRLHEEWRRVSPEVADRLNKVRAAGRRVVPVGTTALRTLESSVEDGKIVPTLGPTDIFLKPGDRLQATDALVTNFHLPESSLFMLVCALMGTEVMQAAYAHAVKEKYRFYSYGDACLLLP

SEQ ID NO: 67319 - protein, 350 aa, Henriciella sp.
  REGION 1..350: note = tr|A0A399RED3|A0A399RED3_9RHOB S-adenosylmethionine:tRNA ribosyltransferase-isomerase; OS = Henriciella sp. JN25 OX=2305466 GN=queA PE=3 SV=1
MDLTAYAFDLPEALIALRPAEPQDAARLLVVHGDGRLEDAGVRDLPRYLAAGDTLVFNDTRVIPAALKGTRLARDSSGSDIAVDANLVERAGPSEWRALARPGKRLKPGDRIIFGEGFEAALTSKAETGEITLDFNVEGEALDLALDAFGAMPLPPYIARRRAADGKDRETYQTSFAGEDAQSVAAPTAGLHFTPRLREELAAVGILNETVRLHVGLGTFSPLKESQLESGKLHEEWRRVSPEVAERLNAVREAGKRIVPVGTTALRTLESSVAGGLIVPTVGPTDIFLKPGDRLQATDALVTNFHLPESSLFMLVCALMGTDVMQAAYAHAIRQEYRFYSYGDACLLLP

SEQ ID NO: 67320 - protein, 350 aa, Henriciella sp.
  REGION 1..350: note = tr|A0A2E6L5L1|A0A2E6L5L1_9RHOB S-adenosylmethionine:tRNA ribosyltransferase-isomerase; OS = Henriciella sp. OX=1968823 GN=queA PE=3 SV=1
MDLSAFAFDLPEELIALRPVEPQDAARLLVVHGDGRLEDAGVRDLPRYLSAGDTLIFNDTRVIPAALKGVRPARDEAGSDVPVDANLVERLAPETWRALARPGKRLKPGDMIRFGEGFEAIVAEKGDGADLLLTFNRSGDALDEALDAFGAMPLPPYIARRRAADARDRETYQTSFAGDEAQSVAAPTAGLHFTPRLREEIAAAGIGTEWVRLHVGLGTFSPLQESQLESGRLHEEWRRVSPEVAERLNGVRAGGRRLVPVGTTALRTLESSVEGGQIVSTLGPTDIFLKPGDRLKATDALVTNFHLPESSLFMLVCALMGTEVMQAAYAHAIKEKYRFYSYGDACLLLP

SEQ ID NO: 67321 - protein, 344 aa, unidentified
  source 1..344: note = Hephaestia caeni
  REGION 1..344: note = tr|A0A397NQ51|A0A397NQ51_9SPHN S-adenosylmethionine:tRNA ribosyltransferase-isomerase; OS = Hephaestia caeni OX=645617 GN=queA PE=3 SV=1
MKVDLFDFELPPERIALRPATPRDAARMLVLDGAGTRDARVSDLPQMLRPGDLLVFNDTRVIPAQLDGRRGDATIGATLHKREGPRRWRAFIRNAKRLREGDAIDFGNAVSAIASDRAEDGSFALTFAGDDPVELLLERAGRMPLPPYIAGKRATDARDAEDYQTMFARAAGAVAAPTAALHFTPALIEALTAAGIGHTTLTLHVGAGTFLPVKTDDTNDHRMHAEWGRLDAATADRLNAVRASGGRVIAIGTTSLRVIESATGDDNIIRPFEGDTAIFITPGYRFKGIDGLMTNFHLPRSTLFMLVSALMGRERMQAAYAHAIESGYRFYSYGDASLLLPERS

SEQ ID NO: 67322 - protein, 338 aa, Herbaspirillum aquaticum
  REGION 1..338: note = tr|A0A225SML8|A0A225SML8_9BURK S-adenosylmethionine:tRNA ribosyltransferase-isomerase; OS = Herbaspirillum aquaticum OX=568783 GN=queA PE=3 SV=1
MYSLSDFDFELPPELIAQTPLAERSASRLLQVQGAQLTDRRFSDIVDLLQPGDLLVFNDTRVIKARLFGVKETGGKIEALVERILDARTVHAQVRASKSPPPGTRIRLADAFDVTVGERFGEFFTLHFPADAFELLEQYGSLPLPPYIDHEADAYDETRYQTVYAKEPGAVAAPTAGLHFDEALLQQLTARGVKQAFVTLHVGAGTFQPVRVEDLSQHKMHSEWYTISPETVEAVRATKAAGRRVIAVGTTSMRALESGSQSGELKAGSDDTQLFITPGYTFKTVDQLVTNFHLPKSTLLMLVSAFAGYEHIRAAYAHAIAHKYRFFSYGDAMLLTRT

SEQ ID NO: 67323 - protein, 349 aa, Herbaspirillum hiltneri
  REGION 1..349: note = tr|A0A561JIQ7|A0A561JIQ7_9BURK S-adenosylmethionine:tRNA ribosyltransferase-isomerase; OS = Herbaspirillum hiltneri OX=341045 GN=queA PE=3 SV=1
MYSLSDFDFDLPSGLIAQLPLPERSASRLLQVDAQSGSLALTDRRFADVVDLLAPGDLLVFNNTRVLKARFFGVKETGGKVEVLVERVLDNRSVYAQVRASKSPPPGTGIRLADAFDVVVGERYGEFYTLQFPSDVFALLEQYGSLPLPPYIEHAADEFDETRYQTVYAKEPGAVAAPTAGLHFDEALLAQLKAKGIDTAFVTLHVGAGTFQPVRVEDLSEHKMHSEWYTIAQETVDKVRAVKAAGGKIVAVGTTSMRALESASQSGALEAGSADTKLFITPGYTFKTVDRLITNFHLPKSTLLMLVSAFAGYDNIRAAYAHAIAQQYRFFSYGDAMLLTCDALTSDHA

SEQ ID NO: 67324 - protein, 338 aa, Herbaspirillum huttiense
  REGION 1..338: note = tr|A0A561K7R0|A0A561K7R0_9BURK S-adenosylmethionine:tRNA ribosyltransferase-isomerase; OS = Herbaspirillum huttiense OX=863372 GN=queA PE=3 SV=1
MYSLSDFDFELPPELIAQTPLAERSASRLLQVQGAQLTDRRFSDIVDLLQSGDLLVFNDTRVIKARLFGVKETGGKIEALVERILDPRTVHAQVRASKSPPPGTRIRLADAFDVTVGERFGEFFTLHFPADAFELLEQYGSLPLPPYIDHEADAYDETRYQTVYAKEPGAVAAPTAGLHFDEALLQQLAARGVKQAFVTLHVGAGTFQPVRVEDLSQHKMHSEWYTISPETVAAVRATKAAGGRVIAVGTTSMRALESGSQSGELKAGSDDTQLFITPGYTFKTVDQLVTNFHLPKSTLLMLVSAFAGYEHIRAAYAHAIAQKYRFFSYGDAMLLTRT

SEQ ID NO: 67325 - protein, 338 aa, Herbaspirillum huttiense
  REGION 1..338: note = tr|A0A4P7A722|A0A4P7A722_9BURK S-adenosylmethionine:tRNA ribosyltransferase-isomerase; OS = Herbaspirillum huttiense OX=863372 GN=queA PE=3 SV=1
MYSLSDFDFELPPELIAQTPLAERSASRLLQVQGAQLTDRRFSDIVELLQPGDLLVFNDTRVIKARLFGVKETGGKIEALVERILDPRTVHAQVRASKSPPPGTRIRLADAFDVTVGERFGEFFTLHFPADAFELLEQYGSLPLPPYIDHEADAYDETRYQTVYAKQPGAVAAPTAGLHFDEALLQQLAARGVKQAFVTLHVGAGTFQPVRVEDLSQHKMHSEWYTISPETVEAVRATKAAGGRVIAVGTTSMRALESGSQSGQLQAGSDDTQLFITPGYTFKTVDQLVTNFHLPKSTLLMLVSAFAGYEHIRAAYAHAIAQQYRFFSYGDAMLLTRT

SEQ ID NO: 67326 - protein, 343 aa, unidentified
  source 1..343: note = Herbaspirillum robiniae
  REGION 1..343: note = tr|A0A246WLB0|A0A246WLB0_9BURK S-adenosylmethionine:tRNA ribosyltransferase-isomerase; OS = Herbaspirillum robiniae OX=2014887 GN=queA PE=3 SV=1
MYSLSDFDFELPPELIAQTPLAERSASRLLQVDGAQLSDRRFADILDLLNPGDLLVFNDTRVLKARFFGVKETGGKIEALVERVLDARTVHAQVRASKSPPPGTRIRLADAFDVTVGERFGEFFTLHFPSDVFELLEQYGSLPLPPYIEHEADAYDETRYQTVYAKEPGAVAAPTAGLHFDQALLDQLSARGVRQAFVTLHVGAGTFQPVRVEDLSQHKMHSEWYTISQATVDAVRATKAAGGRVVAVGTTSMRALESGSQSGRLEAGSADTQLFITPGYTFKTVDRLVTNFHLPKSTLLMLVSAFAGYDHIRAAYAHAIAQKYRFFSYGDAMLLTCNKANEG

SEQ ID NO: 67327 - protein, 338 aa, Herbaspirillum rubrisubalbicans
  REGION 1..338: note = tr|A0A0U3CIN3|A0A0U3CIN3_9BURK S-adenosylmethionine:tRNA ribosyltransferase-isomerase; OS = Herbaspirillum rubrisubalbicans M1 OX=1078773 GN=tsaA; PE = 3 SV=1
MYSLSDFDFALPPELIAQTPLAERSASRLLQVQGAQLSDRRFSDIVDLLQPGDLLVFNDTRVIKARLFGVKETGGKIEALVERILDARTVHAQVRASKSPPPGTRIRLADAFDVTVGERFGEFYTLHFPADAFDLLEQYGSLPLPPYIDHEADAYDETRYQTVYAKEPGAVAAPTAGLHFDQTLLEQLSARGVQQAFVTLHVGAGTFQPVRVEDLSQHQMHSEWYTIPPETVAAVRAAKAAGGRVVAVGTTSMRALESGSQSGELKAGSDDTQLFITPGYTFKTVDQLVTNFHLPKSTLLMLVSAFAGYEHIRAAYAHAIAQKYRFFSYGDAMLLTRT

SEQ ID NO: 67328 - protein, 338 aa, Herbaspirillum rubrisubalbicans
  REGION 1..338: note = tr|A0A328IST8|A0A328IST8_9BURK S-adenosylmethionine:tRNA ribosyltransferase-isomerase; OS = Herbaspirillum rubrisubalbicans OX=80842 GN=queA PE=3; SV = 1
MYSLSDFDFALPPELIAQTPLAERSASRLLQVQGAQLSDRRFSDIVDLLQPGDLLVFNDTRVIKARLFGVKETGGKIEALVERILDARTAHAQVRASKSPPPGTRIRLADAFEVTVGERFGEFYTLHFPADAFDLLEQYGSLPLPPYIDHEADAYDETRYQTVYAKEPGAVAAPTAGLHFDQALLEQLSARGVQQAFVTLHVGAGTFQPVRVEDLSQHQMHSEWYTIPPETVAAVRATKAAGGRVVAVGTTSMRALESGSQSGELKAGSDDTQLFITPGYTFKTVDQLVTNFHLPKSTLLMLVSAFAGYENIRAAYAHAIAQKYRFFSYGDAMLLTRT

SEQ ID NO: 67329 - protein, 338 aa, Herbaspirillum seropedicae
  REGION 1..338: note = tr|A0A5B8E0B6|A0A5B8E0B6_HERSE S-adenosylmethionine:tRNA ribosyltransferase-isomerase; OS = Herbaspirillum seropedicae OX=964 GN=queA PE=3 SV=1
MYSLSDFDFELPPELIAQTPLAERSASRLLQVQGAQLTDRRFSDIVDLLQAGDLLVFNDTRVIKARLFGVKETGGKIEALVERILDPRTVHAQVRASKSPPPGARIRLADAFEVTVGERFGEFYTLHFPEDAFALLEQYGSLPLPPYIDHEADAYDETRYQTVYAKEPGAVAAPTAGLHFDQALLEQLAARGVQQAFVTLHVGAGTFQPVRVEDLSQHKMHSEWYTIPPETVEAVRAAKAAGRRVIAVGTTSMRALESGSQSGALKAGSDDTQLFITPGYTFKTVDQLVTNFHLPKSTLLMLVSAFAGYEHIRAAYAHAIAQKYRFFSYGDAMLLTRT

SEQ ID NO: 67330 - protein, 338 aa, Herbaspirillum seropedicae
  REGION 1..338: note = tr|D8INS4|D8INS4_HERSS S-adenosylmethionine:tRNA ribosyltransferase-isomerase OS=Herbaspirillum seropedicae (strain SmR1) OX=757424 GN=tsaA PE=3 SV=1
MYSLSDFDFELPPELIAQTPLAERSASRLLQVQGAQLTDRRFSDIVDLLQAGDLLVFNDTRVIKARLFGVKETGGKIEALVERILDPRTVHAQVRASKSPPPGTRIRLADAFEVTVGERFGEFYTLHFPEDAFALLEQYGSLPLPPYIDHEADAYDETRYQTVYAKEPGAVAAPTAGLHFDQALLEQLAARGVQQAFVTLHVGAGTFQPVRVEDLSQHKMHSEWYTIPPETVEAVRAAKAAGRRVIAVGTTSMRALESGSQSGALKAGSDDTQLFITPGYTFKTVDQLVTNFHLPKSTLLMLVSAFAGYELIRAAYAHAIAQKYRFFSYGDAMLLTRT

SEQ ID NO: 67331 - protein, 373 aa, Herbaspirillum sp.
  REGION 1..373: note = tr|J3DH85|J3DH85_9BURK S-adenosylmethionine:tRNA ribosyltransferase-isomerase OS=Herbaspirillum sp. CF444; OX = 1144319 GN=queA PE=3 SV=1
MSRKRKIEGSALFYCVYLQCCRFHDLFSMYSLSDFDFDLPPELIAQLPLAERSASRLLQVDAQSGNLALTDRRFADVVDLLSPGDLLVFNDTRVLKARFFGVKETGGKVEVLVERVLDSRSVHAQVRASKSPPAGTQIRLADAFDVIVGERYGEFYTLQFPSDVFELLEQYGSLPLPPYIEHEADEFDETRYQTVYAKEPGAVAAPTAGLHFDETLLDKLKAKGIDTAFVTLHVGAGTFQPVRVENLSEHKMHSEWYTIAQETVDKVRAVKAAGGKVVAVGTTSMRALESASQSGTLEAGSADTRLFITPGYAFKTVDRLITNFHLPKSTLLMLVSAFAGYDNIRAAYAHAIAHQYRFFSYGDAMLLTCTHHA

SEQ ID NO: 67332 - protein, 354 aa, Herbaspirillum sp.
  REGION 1..354: note = tr|J3CC32|J3CC32_9BURK S-adenosylmethionine:tRNA ribosyltransferase-isomerase OS=Herbaspirillum sp. YR522; OX = 1144342 GN=queA PE=3 SV=1
MPAAYVWFLQVFFMYSLSDFDFVLPPELIAQTPLPERSGSRLLEVAGAQLTDRHFGDIVSLLAPGDLLVFNDTRVLKARFFGVKETGGKIEALVERVLDTRTVHAQVRASKSPPAGTRIRLADAFDVTVGERCGEFFTLHFPSDVFALLEQYGSLPLPPYIEHEADSFDETRYQTVYAKTPGAVAAPTAGLHFDQALLAALAARGVRHAFVTLHVGAGTFQPVRVEDLSQHNMHSEWYTIGQATVDAVRATKAAGARVVAVGTTSMRALESASQGAQLEAGSADTRLFITPGYRFRTVDRLVTNFHLPKSTLLMLVSAFAGYDNIRAAYAHAIAQHYRFFSYGDAMLLTCTNHA

SEQ ID NO: 67333 - protein, 325 aa, Herbidospora sp.
  REGION 1..325: note = tr|A0A4V5UZT6|A0A4V5UZT6_9ACTN S-adenosylmethionine:tRNA ribosyltransferase-isomerase; OS = Herbidospora sp. NEAU-GS14 OX=2575442 GN=FDA94_08080; PE = 3 SV=1
MSIDFALPSVNEAHRPPEARDSVKLMVSERETGAITHHAFTDLPELLDPGDLVVVNNSRTLPAAVKLDRLWVHFSTELPWGEWLVELRCPGGTTYKGGAPGEWLPLPGGATLRLVERFTPRLWKARLDTDVVGYLQRHGTPIRYSYVDRDWPIDDYQTVFGRILGSAEMPSAGRPFTTRLVTDLVARGITIAPVTLHTGVASPEKDEPPYAERFDVPAATRRLVAMTKENGGRVVAVGTTVVRALETSHDSGWTSRIVSPEHPPEVVDGLLTGLHEPRSTHLMMLSAIGGADLVMKSYEAALDDGYLWHEFGDVHLILGTRRIDI

SEQ ID NO: 67334 - protein, 342 aa, unidentified
  source 1..342: note = Herbihabitans rhizosphaerae
  REGION 1..342: note = tr|A0A4Q7KJU8|A0A4Q7KJU8_9PSEU S-adenosylmethionine:tRNA ribosyltransferase-isomerase; OS = Herbihabitans rhizosphaerae OX=1872711 GN=EV193_10663; PE = 3 SV=1
MKTLEFTLPAELEAPAPPEARGLERDGVRLLAGSAATGRVSHHRFTELPSLLKPGDVLVVNTSATLPAAVGVVGSGLVVHFSTELAHGRWLIELRRSDGKATAQYVEGMAGDRYPLPGGGSVTLREPFSTGRLWEADVDTGTVLGVRSFLRHFGSPIRYGYVRRPWPLSFYQSVFATTPGSAEMPSAARPFTDAVVTRLVSAGVEFAPLLLHTGVASPEAHERPYPERYAVSEHTARVVNQARAAGGRVIAIGTTAVRALETATGEDGVVRAASGWTELVVTPERGVRAVDGLLTGFHEPRASHLDMLAAVAGFGLLERVYAEAVAEGYLWHEFGDVNLLLP

SEQ ID NO: 67335 - protein, 351 aa, unidentified
  source 1..351: note = Herbinix hemicellulosilytica
  REGION 1..351: note = tr|A0A0H5SE15|A0A0H5SE15_HERHM S-adenosylmethionine:tRNA ribosyltransferase-isomerase; OS = Herbinix hemicellulosilytica OX=1564487 GN=queA PE=3; SV = 1
MKTSDFYYDLPQELIAQDPLEDRSSSRLMVLDKNTGKYEHRIFKDITEYLRKGDCLVLNNTKVIPARLIGEKINMTGENSGEPGRGARIELLLLKRKENDIWETLVKPGKKAKPGTKISFGDGILFGEILDVVEEGNRLVKFYYQGIFEEILDRLGQMPLPPYITRELKDKNRYQTVYAKYEGSAAAPTAGLHFTNELLEEIKSMGVNIAYVTLHVGLGTFRPVKVDDVSKHHMHSEYYQVLKEEADKVNEAKKNGGRIICVGTTSCRTIESSCDENGYLKAGSGETSIFIYPGYRFKIMDGLITNFHLPESTLLMLVSAFAGRENILNAYKEAVDKRYRFFSFGDAMLII

SEQ ID NO: 67336 - protein, 371 aa, unidentified
  source 1..371: note = Herbinix hemicellulosilytica
  REGION 1..371: note = tr|A0A428MBL1|A0A428MBL1_HERHM S-adenosylmethionine:tRNA ribosyltransferase-isomerase; OS = Herbinix hemicellulosilytica OX=1564487 GN=queA PE=3; SV = 1
MRTHDFYYELPEELIAQDPLEDRASSRLMVLDKETGRIEHKIFRQIKDYLRPGDCLVINDTKVIPARLIGEKLHESRQAAADKEMTDKREVQDNKAAAARDESVRGAKIELLLLKRRENDIWETLVKPGKKAKPGARISFGDGILTAEIIDCLEDGNRLVKFYYKGIFEEILDRLGQMPLPPYITHQLSDKNRYQTVYAKYEGSAAAPTAGLHFTRELLEEIKAMGVHLVSVTLHVGLGTFRPVKVEDISQHHMHSEFYNVSREAADMINRVKAAGGRIICVGTTSCRTVESAADEQGIVHPGSDETSIFIYPGYRFKVMDGLITNFHLPESTLMMLVSAFAGREKIMAAYKEAVKERYRFFSFGDAMFIQ

SEQ ID NO: 67337 - protein, 349 aa, unidentified
  source 1..349: note = Herbinix luporum
  REGION 1..349: note = tr|A0A0K8J6Z7|A0A0K8J6Z7_9FIRM S-adenosylmethionine:tRNA ribosyltransferase-isomerase; OS = Herbinix luporum OX=1679721 GN=queA PE=3 SV=1
MLTRDFYYDLPEELIAQDPLRDRSGSRLLVLDRHTGEYEHRIFKDISKYLKAGDCLVLNNTKVIPARLIGEKVSGHSPDNNSPGARIELLLLKRKENDIWETLVKPGKKAKPKTKISFGNGLLMGEILDIVDEGNRLVKFSYDGIFEEILDQLGEMPLPPYITHKLEDKNRYQTVYARYEGSAAAPTAGLHFTEELLEEIKKMGVEIAYVTLHVGLGTFRPVKVEDISQHHMHSEYYQILQEEADKINKAKKKGGRIICVGTTSCRTLESSSDEDGYLRAGSGDTSIFIYPGYKFKIMDGLITNFHLPESTLLMLVSAFAGREHILRAYNEAVKERYRFFSFGDGMLII

SEQ ID NO: 67338 - protein, 341 aa, Herminiimonas arsenicoxydans
  REGION 1..341: note = sp|A4G1Z2|QUEA_HERAR S-adenosylmethionine:tRNA ribosyltransferase-isomerase OS=Herminiimonas arsenicoxydans OX=204773 GN=queA PE=3 SV=1
MYSLSDFDFELPQELIAQTPLAERSASRLLHVAQDGMIDRAFADIVDLLNPGDLLVFNDTRVLKARFFGVKETGGKVEVLVERVIDSAHVHAQIRASKSPVPGMKIRLADAFDVIVGERAGEFYELQFPGDIFALIEAHGRLPLPPYIEHAADAYDETRYQTVYAKTPGAVAAPTAGLHFDQALLDTLKAKGVQFAYVTLHVGAGTFQPVRNENLAEHNMHSEWYTISQETVGAVHAAQAAGHNIVAVGTTSMRALESASQSGSLQAGSADTRLFITPGYTFKTVTRLITNFHLPKSTLLMLVSAFAGYDAIRAAYQHAISQRYRFFSYGDAMFLTRMPPC

SEQ ID NO: 67339 - protein, 341 aa, Herminiimonas fonticola
  REGION 1..341: note = tr|A0A4R6G5E3|A0A4R6G5E3_9BURK S-adenosylmethionine:tRNA ribosyltransferase-isomerase; OS = Herminiimonas fonticola OX=303380 GN=queA PE=3 SV=1
MYSLSDFDFELPQELIAQTPLAERSASRLLQVTQDKMTDRAFADIVDLINPGDLLVFNDTRVLKARFFGIKETGGKVEVLVERVIDSAYVHAQIRASKSPVPGMKIRLADAFDVIVGERVGEFYELQFPGDVFELIEAHGRLPLPPYIEHAADAYDETRYQTVYAKTPGAVAAPTAGLHFDQALLDALQAKGVQFAYVTLHVGAGTFQPVRNENLAEHNMHSEWYTISQETVDAVRATQAAGHNIVAVGTTSMRALESASQSGSLQAGSADTRLFITPGYTFKTVTRLITNFHLPKSTLLMLVSAFAGYDAIRAAYQHAISQRYRFFSYGDAMFLTRMPTC

SEQ ID NO: 67340 - protein, 341 aa, Herminiimonas sp.
  REGION 1..341: note = tr|A0A3N6ZW80|A0A3N6ZW80_9BURK S-adenosylmethionine:tRNA ribosyltransferase-isomerase; OS = Herminiimonas sp. KBW02 OX=2153363 GN=queA PE=3 SV=1
MYSLSDFDFDLPQELIAQTPLAQRSASRLLQVLPGQMADRNFADIVDLLSPGDLLVFNDTRVLKARFFGVKETGGKVEVLVERVIDQRNVHAQIRASKSPAAGMRIRLADAFDVIVGERAGEFYELQFPDDVFELIEAHGRLPLPPYIEHAADAYDETRYQTVYAKTPGAVAAPTAGLHFDQALLDTLTAKGVKLAYITLHVGAGTFQPVRSENLAEHNMHSEWYTISQQTVDLVQATQAAGGNVVAVGTTSMRALESASQSGVLQAGSADTRLFITPGYTFKTVTRLITNFHLPKSTLLMLVSAFAGYDTIRAAYQHAISQRYRFFSYGDAMFLTRMPPC

SEQ ID NO: 67341 - protein, 346 aa, Herpetosiphon aurantiacus
  REGION 1..346: note = tr|A9B1Z1|A9B1Z1_HERA2 S-adenosylmethionine:tRNA ribosyltransferase-isomerase OS=Herpetosiphon aurantiacus (strain ATCC 23779 / DSM 785 / 114-95) OX=316274 GN=queA P; E = 3 SV=1
MLPIADFDYHLPPERIAQTPIEPRDHSRLLVLDRATGQLEHRHFYEIGRYLRPGDLLVANDSRVLPARLYGQKASGGKTELLLLKQRDAQRWEALIKGKVAVGTRLIITGHRGAQVQATVEELLESGSRIICFEQPINDRLPELGSMPTPPYITAPLTDPERYQTVYSAQAGSAAAPTAGLHWTPALIEQVKALGVGWASVTLHVGLDTFRPVQTENALDHQIHSEWYELSAETAQAINATRAAGGRIITVGTTSTRVLETVSQSQDVSLTAGEIQAAAGWSSIYIYPPYEYRVVNSLITNFHLPKSTLLLLVSALASRDLIMQAYAEAVERQYRFFSFGDAMLII

SEQ ID NO: 67342 - protein, 349 aa, Herpetosiphon aurantiacus
  REGION 1..349: note = tr|A9B1X6|A9B1X6_HERA2 S-adenosylmethionine:tRNA ribosyltransferase-isomerase OS=Herpetosiphon aurantiacus (strain ATCC 23779 / DSM 785 / 114-95) OX=316274 GN=Haur_2 780 PE=3 SV=1
MLATIDFELPAVLEAGEPPEARGLERDQVRLMVSHSRSNTIEHYRFDQLSMILQAGDVLAINTSGTLNAAIPATDASGQRFMVHLSTQLLAELWLVEVRLPHGTSSQPYRAALAGNSLNLPSGGQIDIHRGYANDGSAINRLWIASLRLPQPLPHYLAEHAKPIHYQYVAADWPNSYYQTVYATELGSAEMPSAGRAFSERLLTRLVAQGIQIAPLLLHTGVASLEDHEPPYAEWYRVPATSADLINRARADHRRVIAVGTTSVRAIESTVDQRGLVHPQAGWTELVITPEHGLQAVDGILTGLHEPKATHLAMLAALAGYQHLELCYQAALEQHYLWHEFGDLHLILP

SEQ ID NO: 67343 - protein, 346 aa, Herpetosiphon geysericola
  REGION 1..346: note = tr|A0A0N8GT59|A0A0N8GT59_9CHLR S-adenosylmethionine:tRNA ribosyltransferase-isomerase; OS = Herpetosiphon geysericola OX=70996 GN=queA PE=3 SV=1
MLPIADFDYHLPPERIAQTPVEPRDHSRLLVLDRATGQLEHRHFYEIGHYLRPGDLLVANDSRVLPARLYGQKASGGKTELLLLKQRDAQRWEALIKGKVAIGTRLIITGHSGAQAEATVEELLESGSRIVCFNQPINQRLPELGSMPTPPYITAPLTDPERYQTVYSAQAGSAAAPTAGLHWTPALIEQVKAQGVGWASVTLHVGLDTFRPVQTENALDHQIHSEWYELSAETAQAINATRAAGGRIITVGTTSTRVVETVAQAQGIHLDAGEIQPASGWSDIYIYPPYEYRVVNSLITNFHLPKSTLLLLVSALASREQIMHAYAEAVEHEYRFFSFGDAMLIL

SEQ ID NO: 67344 - protein, 349 aa, Herpetosiphon geysericola
  REGION 1..349: note = tr|A0A0P6YKQ9|A0A0P6YKQ9_9CHLR S-adenosylmethionine:tRNA ribosyltransferase-isomerase; OS = Herpetosiphon geysericola OX=70996 GN=SE18_07125 PE=3; SV = 1
MLTTIDFELPTILEAGEPPEARGLERDQVRLMVSHSRSNQIEHYRFNQLPTILQPGDVLAINTSGTLNAAIPATTKAGQQLIVHLSTQLLAELWMVEIRLPHGTSSQPYREALATTSLALPAGGSLDIHRSYAANGATTNRLWIASLRLPKPLPKYLAEHAKPIHYSYVDQDWPTSYYQTVYATELGSAEMPSAGRAFSERLLTRLVAQGIQIAPLLLHTGVASLEDHEPPYAEWYSLPATSADLINRARADGRRVIAVGTTSVRAIESTVDQRGLVHPQTGWTELVITAERGLRAIDGILTGLHEPKATHLAMLAALAGYEHLELCYRAALEQHYLWHEFGDLHLLLS

SEQ ID NO: 67345 - protein, 364 aa, Hespellia stercorisuis
  REGION 1..364: note = tr|A0A1M6PCH4|A0A1M6PCH4_9FIRM S-adenosylmethionine:tRNA ribosyltransferase-isomerase; OS = Hespellia stercorisuis DSM 15480 OX=1121950 GN=queA; PE = 3 SV=1
MNSDNNKTNMKKEDFFFDLPEELIAQDPLEDRSSSRLLVMDKETGEVSHHVFREITDYLNAGDCLVINDTKVIPARLIGAKVGTDAKIEVLLLKRKEVAASVDEAGQATGTDTVWETLVKPGKKAKVGTKISFGDGLLVGEVIDVVEEGNRLIRFTYDGIFEEILDQLGQMPLPPYITHQLQDKNRYQTVYAKHTGSAAAPTAGLHFTPELLREIEEKGVDIARVTLHVGLGTFRPVKVENILEHHMHSEFYHIDEEAAQKINRTKENGGRVICVGTTSCRTIESAADENGRLKECSGWTEIFIYPGYRFKALDCLITNFHLPESTLIMLVSALAGREHVLAAYEEAVKERYRFFSFGDAMFIK

SEQ ID NO: 67346 - protein, 343 aa, Hippea maritima
  REGION 1..343: note = tr|F2LXW0|F2LXW0_HIPMA S-adenosylmethionine:tRNA ribosyltransferase-isomerase OS=Hippea maritima (strain ATCC 700847 / DSM 10411 / MH2) OX=760142 GN=queA PE=3 SV=1
MEVSLFDYNLPKELIAQHPHIPRDECKLLVCNRQNHTIEHRIFKEIINYIDENDLLVLNDTKVIPARIFAQKPTGGKIEIFLLEEIGKGRFLCLTRGKLKKDTIVYLKNSKTARITRIENSDKRIVEFETNENIYELLEDIGEVPLPPYIQRNYDNYNKEKDFKYYQTVFAKKEGAVASPTAGLHFTEKLINSIKAKGVKIAYITLHVGIGTFRPVKEKEVEKHKMHSEKYQISKETADLFNQTKSKRRRVIAVGTTVVRALESSINKDGILKPQKSSTDIFIYPGYKYKAVDALITNFHLPKSTLLMLVSAFYEREKILNCYKEAIDKHYRFFSFGDAMFIY

SEQ ID NO: 67347 - protein, 351 aa, unidentified
  source 1..351: note = Histidinibacterium lentulum
  REGION 1..351: note = tr|A0A3N2R9J6|A0A3N2R9J6_9RHOB S-adenosylmethionine:tRNA ribosyltransferase-isomerase; OS = Histidinibacterium lentulum OX=2480588 GN=queA PE=3 SV=1
MKLSEFDFDLPEALIATRPARPRSSARLLLAEGDGIEDRLVRDLVEILRPGDRLILNDTRVIPARLTGERRRTGEAGESAARIEVTLLEPQPDGLWTALVKPLRKLREGEEVVFSPDLAARLEGRRDGQGLLRFNCAGEDFDRALAEAGAMPLPPYIAALRAPDEADKEDYQTVWASRPGAVAAPTASLHFDAPLLEALERRGVAFTHVTLHVGAGTFLPVKVDDVSLHRMHAEWGEVSESAAAEITATRAAGGRVLPVGTTALRLIESAADGRGGVRPFRGDTDIFITPGFEFRVADGLMTNFHLPKSTLMMLVSALMGVERIRAIYAHAVAERYRFFSYGDASLLLPKG

SEQ ID NO: 67348 - protein, 349 aa, unidentified
  source 1..349: note = Histidinibacterium sp.
  REGION 1..349: note = tr|A0A5J5GKX3|A0A5J5GKX3_9RHOB tRNA preQ1(34) S-adenosylmethionine ribosyltransferase-isomerase QueA; OS = Histidinibacterium sp. 176SS1-4 OX=2613962 GN=queA PE=4; SV = 1
MKLSEFDFDLPEELIATRPARPRSSARLLLAQGDAIEDRVVSELPDILRPGDRLVLNDTKVIPARLSGRRYREGPEGEGGARIEATLLEPRADGAWSALVKPLKKLRDGEEVIFSPRLSARLEGRDEGVGRLRFNLAGEDFDAALAEAGAMPLPPYIAAKRPADEADKQDYQTIWAERPGAVAAPTASLHFDDPLMEALAVRGVQFTHVTLHVGAGTFLPVKVDDISEHRMHAEWGEVSERAAAEIEATRAEGGRIIPVGTTALRLIESAATGDGLGPWRGETDIFITPGFRFRVADGLMTNFHLPKSTLMMLVSALMGVDRIRAVYRHAISERYRFFSYGDASLLLPG

SEQ ID NO: 67349 - protein, 356 aa, Histophilus somni; identical to SEQ ID NO: 67100
  REGION 1..356: note = tr|A0A1Y0JWJ9|A0A1Y0JWJ9_HISSO S-adenosylmethionine:tRNA ribosyltransferase-isomerase; OS = Histophilus somni OX=731 GN=queA PE=3 SV=1

SEQ ID NO: 67350 - protein, 356 aa, Histophilus somni; identical to SEQ ID NO: 67100
  REGION 1..356: note = sp|B0UWJ9|QUEA_HISS2 S-adenosylmethionine:tRNA ribosyltransferase-isomerase OS=Histophilus somni (strain 2336) OX=228400 GN=queA PE=3 SV=1

SEQ ID NO: 67351 - protein, 358 aa, unidentified
  source 1..358: note = Hoeflea halophila
  REGION 1..358: note = tr|A0A286IFR9|A0A286IFR9_9RHIZ S-adenosylmethionine:tRNA ribosyltransferase-isomerase; OS = Hoeflea halophila OX=714899 GN=queA PE=3 SV=1
MRVDLFDFELPDERIALRPAAPRDSARLLRVDADGSLKDLSVSDLAGLLAPGDALVFNDTRVIPAQLEGFRLRGENRQRISATLHMRAGPDRWKAFVRPAKRIKQGDRLHFGGDGATCLSGVLDATAGTRGEGGELELIFDLSGPALDEAIMASGQIPLPPYIASKRGEDDQDRKDYQTIYAREDGAVAAPTAGLHFTDALFDKLDARGISRHFVTLHVGAGTFLPVKADDTTEHRMHSEVGHVSAKTAEALNQVHARGGRVVSVGTTSLRLLESATSEDGTIQPWSGPTDIFITPGYRFRAVDVLMTNFHLPRSTLFMLVSAFSGLETMRAAYRHAIDNGYRFYSYGDSSLLFRSAP

SEQ ID NO: 67352 - protein, 361 aa, Hoeflea marina
  REGION 1..361: note = tr|A0A317PUK6|A0A317PUK6_9RHIZ S-adenosylmethionine:tRNA ribosyltransferase-isomerase; OS = Hoeflea marina OX=274592 GN=queA PE=3 SV=1
MRVDLFDFDLPDERIALRPASPRDAARMLRVDAGGQFSDFTVTDLPDLLEPGDALVFNDTRVIPAQLEGFRVRGENRAGMSATLHMRTGPDRWKAFVRPAKRVREGDRVEFGGTANACLAGRLDASIGARGEAGEIELIFDLSGPALDEAIAGVGHIPLPPYIASKRGEDERDRLDYQTIYAREDGAVAAPTAGLHFTPDLFARLEARGVSSHFVTLHVGAGTFLPVKVDDTADHKMHAEIGQVSPETADALNAVHARGGRIVSVGTTSLRLLESATGADGVIAPWTGATSIFITPGYRFRAVDVLMTNFHLPRSTLFMLVSAFSGYETMVVAYRRAIDTGYRFYSYGDSSLLFRPRESAE

SEQ ID NO: 67353 - protein, 358 aa, unidentified
  source 1..358: note = Hoeflea olei
  REGION 1..358: note = tr|A0A1C1YXM7|A0A1C1YXM7_9RHIZ S-adenosylmethionine:tRNA ribosyltransferase-isomerase; OS = Hoeflea olei OX=1480615 GN=queA PE=3 SV=1
MRVDLFDFDLPEERIALRPASPRDSARMLRVGPDGALSDRVVAELPDLLEPGDALVFNDTKVIPAQLEGVRLREEAESRISATLHMRSGPDRWKAFVRPAKRVKEGDRLRFGARGETCLDGVLDATAGERGEGGEIELLFDLSGPALDQAIAAAGHIPLPPYIASKRPEDARDRFDYQTIYAREEGAVAAPTAGLHFTPDLISRLDARGIGRQFVTLHVGAGTFLPVKADDTAEHRMHSEIGHVSAETADALNAVRARGGRIVSVGTTSLRLLESAAREDGRLVAWSGATDIFITPGYRFRAVDVLMTNFHLPRSTLFMLVSAFSGLETMQAAYRHAIDEGYRFYSYGDSSLLFRSVG

SEQ ID NO: 67354 - protein, 359 aa, Hoeflea phototrophica
  REGION 1..359: note = tr|A9D9G3|A9D9G3_HOEPD S-adenosylmethionine:tRNA ribosyltransferase-isomerase OS=Hoeflea phototrophica (strain DSM 17068 / NCIMB 14078 / DFL-43) OX=411684; GN = queA PE =3 SV=1
MRVDLFDFHLPDESIALRPASPRDSARMLCVAPDGGLSDAIVRDLAAQLQPGDALVFNDTRVIPAQLEGFRNRGDNQVRVSATLHMRSGPDRWKAFVRPGKRIKPGDRLSFGGDGSACLQGVLDATAGERGEGGEIELIFDLSGPALDEAIMATGHIPLPPYIASKRGEDAQDRKDYQTIYAREDGAVAAPTAGLHFTDALFASLDARGIVRHFVTLHVGAGTFLPVKADDTAEHRMHSEIGHVSAETAAALNQVRASGGRIVSVGTTSLRLLESAADENGTIQPWSGPTDIFITPGYRFRAVDVLMTNFHLPRSTLFMLVSAFCGLETMRAAYDHAIETGYRFYSYGDSSLLFRSDQR

SEQ ID NO: 67355 - protein, 357 aa, Hoeflea sp.
  REGION 1..357: note = tr|A0A2E2X0Z2|A0A2E2X0Z2_9RHIZ S-adenosylmethionine:tRNA ribosyltransferase-isomerase; OS = Hoeflea sp. OX=1940281 GN=queA PE=3 SV=1
MRVDLFDFDLPEDNIALRPANPRDSAKLLSVKPDGTLDDLVVRDLPSLLQPGDALVFNDTRVIPAQLEGWRIRGENRSRISATLHMRAGPDTWLAFVRPAKRVSEGDRLSFGDDNPACDQGSLLATAGPRGNRGEFELRFDLSGPALDQAIMTAGHIPLPPYIASKRAEDERDRADYQTIYAREEGAVAAPTAGLHFTPELFAALEARGISRHFVTLHVGAGTFLPVKADDTDDHRMHSEIGHVSDEVAHALNETRAKGGRIVSVGTTSLRLLESAASEDGVIHPWSGATDIFITPGYAFRAVDLLMTNFHLPRSTLFMLVSAFSGSETMKAAYAHAIENNYRFYSYGDSSLLERAP

SEQ ID NO: 67356 - protein, 358 aa, Hoeflea sp.
  REGION 1..358: note = tr|A0A0F7PN85|A0A0F7PN85_9RHIZ S-adenosylmethionine:tRNA ribosyltransferase-isomerase; OS = Hoeflea sp. IMCC20628 OX=1620421 GN=queA PE=3 SV=1
MRVDLFDFELPDERIALRPANPRDSARLLRVGADGTLADLSVGDLADLLEPGDALVFNDTKVIPAQLEGFRTRGENLQRISATLHMRSGPDRWKAFVRPGKRIKEGDRLSFGGDGAVCLTGVLDATAGKRGEGGELELIFDLSGPALDEAIMATGHIPLPPYIASKRGEDDQDRLDYQTIYAREDGAVAAPTAGLHFTDALFAKLDARGISRHFVTLHVGAGTFLPVKVDDTAEHLMHSEIGHVSAETAAALNAVHARGGRVVSVGTTSLRLLESATEADGTIKAWSGPTDIFITPGYRFRAVDILMTNFHLPRSTLFMLVSAFSGFETMHGAYRHAIDNNYRFYSYGDSSLLFRSDL

SEQ ID NO: 67357 - protein, 341 aa, unidentified
  source 1..341: note = Holdemanella biformis
  REGION 1..341: note = tr|A0A412IVR9|A0A412IVR9_9FIRM S-adenosylmethionine:tRNA ribosyltransferase-isomerase; OS = Holdemanella biformis OX=1735 GN=queA PE=3 SV=1
MKVSELDFFLPSELLAREPRETRGESRSDSKLMVMNRKTQTIEHKKFNDVIDYLEKGDVLVLNNSKVINANLIGWLGYKERKIKIDLAGILDNGNWQIYIDDNEINPGDTCEFGDGMLTGTFEKMEENHVWQIKFDQDNVIELANKIGRPIMSPYVKKQYDLSYYQNVYASKEGSAELPSAGRHFTKELLEKIKQKGVRVVYVTLHTGLSSMMVTEDTFEEHHMHKEYIEITSAVANTINEAKKNGHSVVCVGTTVVRTLETVADEQGNLKPFTGYSTLYIYPGYCFKIVDKFITNFHGPNTSRIAMAAAFTGKDLLLKGYAEAIQRKYLFYEFGDTTLTI

SEQ ID NO: 67358 - protein, 340 aa, Holdemania filiformis
  REGION 1..340: note = tr|B9YAX0|B9YAX0_9FIRM S-adenosylmethionine:tRNA ribosyltransferase-isomerase OS=Holdemania filiformis DSM 12042 OX=545696 GN=queA PE=3 SV=1
MKTSEFDFELPQELIAQTPLAKRSASRLLVLHRSTGAIEHRHFYDIVDYLKPGDVLVRNNTRVIPARLFGTKEGTGAHVELLLLRQEGDEWECLVGNAKVVKLGTIISFNEGELKAECIGIGEKGLRQFRMIYDGIFYEILEKLGNVPLPPYIKEKLNDPERYQTVYAKVKGSAAAPTAGLHFTPELFDQLKAKGVEVEDITLHVGLGTFRPMDTEDIADHHMHSEFFMMDQATADRLNQAKAEGRRIIAVGTTSCRTLEAIMSKYGEFRECHEDTDIFIFPGYSFQAIDGLITNFHLPKSTLVMLVSAFATKDQIMTAYQAAIDEKYRFFSFGDSMFIE

SEQ ID NO: 67359 - protein, 340 aa, Holdemania filiformis
  REGION 1..340: note = tr|A0A412FH25|A0A412FH25_9FIRM S-adenosylmethionine:tRNA ribosyltransferase-isomerase; OS = Holdemania filiformis OX=61171 GN=queA PE=3 SV=1
MKTSEFDFELPQELIAQTPLAKRSASRLLVLHRSTGEIEHRHFYDIVDYLKPGDVLVRNNTRVIPARLFGTKEETGAHVELLLLRQEGDEWECLVGNAKVVKLGTIIPFNEGELKAECIGIGEKGLRQFRMIYDGIFYEILEKLGNVPLPPYIKEKLNDPERYQTVYAKVKGSAAAPTAGLHFTPELFDQLKAKGVEVEDITLHVGLGTFRPMDTEDIADHHMHSEFFMMDQATADRLNQAKAEGRRIIAVGTTSCRTLEAIMSKYGEFRECHEDTDIFIYPGYSFQAIDGLITNFHLPKSTLVMLVSAFATKDQIMTAYQAAIDEKYRFFSFGDSMFIE

SEQ ID NO: 67360 - protein, 436 aa, unidentified
  source 1..436: note = Hormoscilla sp.
  REGION 1..436: note = tr|A0A533P6U6|A0A533P6U6_9CYAN S-adenosylmethionine:tRNA ribosyltransferase-isomerase; OS = Hormoscilla sp. GUM202 OX=2480853 GN=queA PE=3 SV=1
MSCNDFSNWINQTEPVPVCQVAFFILLQLGLYSNLDGRNFTPVLSPDRSNLDLTLASYDYDLPPDLIAQNPVTPRDSSRLLVVDSPTHHQHRYFRDLPDLLQPGDLLVLNDTRVLRARLYGRKDTGTPVEVLLLEPRQSNCWLALVKPGRRLKPGAKIIFTPCINIDRELKATVVATDADTAGRLLQFELPPGTDLEQLLPDFGHVPFPPYITASQALPEQYQTVYARPADFRFRSAHPCSAQDATQQGGRSRKRPKNRQPGSVAAPTAGLHFTPELLRRLRQRGIEQRYVTLHVGVGTFRPVEVEDVTSHQMHGEWISVPETTVAQIHQTQVRGGRVLAVGTTVARSLEGAADSGGLEAYTGKTELFIYPGYHWRVVDGLITNFHLPRSSLLMLVSAMLGRDRLLHLYREAIGHQYRFYSFGDAMLILPEAWKNI

SEQ ID NO: 67361 - protein, 405 aa, unidentified
  source 1..405: note = Hormoscilla sp.
  REGION 1..405: note = tr|A0A533NLI4|A0A533NLI4_9CYAN S-adenosylmethionine:tRNA ribosyltransferase-isomerase; OS = Hormoscilla sp. GUM007 OX=2480854 GN=queA PE=3 SV=1
MPCKDFSNFINQTEPVPVCQVAFFILLQLGLYSNLDGRNFTPVLSPDRSNLDLTLASYDYELPEDLIAQNPVTPRDSSRLLVVDSPTHHQHRYFRDLPDLLQPGDLLVLNDTRVLRARLYGRKDTGTPVEVLLLEPRQSNCWLALVKPGRRLKPDAKIIFTPCINIDKKLKATVVATDADTAGRLLQFELPPGTDLEQLLPDFGHVPFPPYITASQALPEQYQTVYARQPGSVAAPTAGLHFTPELLKRLRQRGIEQRYVTLHVGVGTFRPVEVEDVTSHQMHGEWISVPETTVAQIHQTQVRGGRVLAVGTTVARSLEGAAHSGGLEAYTGKTELFIYPGYHWRVVDGLITNFHLPRSSLLMLVSAMLGRDRLLHLYREAIGHQYRFYSFGDAMLILPDAWKII

SEQ ID NO: 67362 - protein, 357 aa, unidentified
  source 1..357: note = Humitalea rosea
  REGION 1..357: note = tr|A0A2W7I653|A0A2W7I653_9PROT S-adenosylmethionine:tRNA ribosyltransferase-isomerase; OS = Humitalea rosea OX=990373 GN=queA PE=3 SV=1
MTGWLQGGPDPATRPRVHTSDFDFCLPEALIAQEPARPRDMARLLVLRDGAIADHRMLDLPDLLEPGDVLVVNDTQVIPARLTARRGEARVGLLLNRNEGGGIWHALVRNARRLHAEDIIAIEGAENCTARVLEAPEDGAVRLDFGPDQGALARALEVAGEIPLPPYIPRPDGPRPEDATDYQTIFARTPGAVAAPTASLHFSERLLAALDARGVTRATVTLHVGAGTFLPMRAEDPREHRIHAEWGEITEAAAATINAAKRVIAVGTTALRLLESAAREDGTVAPFRGLTDIFILPGFRFRVTDGLVTNFHLPKSTLFMLVCAFAGTEAVKSAYAHAIAEGYRFYSYGDGSLMWRA

SEQ ID NO: 67363 - protein, 346 aa, unidentified; identical to SEQ ID NO: 62897
  source 1..346: note = Hungateiclostridiaceae bacterium
  REGION 1..346: note = tr|A0A1C7GVC8|A0A1C7GVC8_9FIRM S-adenosylmethionine:tRNA ribosyltransferase-isomerase; OS = Hungateiclostridiaceae bacterium KB18 OX=1834198; GN = queA PE=3 SV=1

SEQ ID NO: 67364 - protein, 341 aa, unidentified
  source 1..341: note = Hungateiclostridium clariflavum
  REGION 1..341: note = tr|G8LZ37|G8LZ37_HUNCD S-adenosylmethionine:tRNA ribosyltransferase-isomerase OS=Hungateiclostridium clariflavum (strain DSM 19732 / NBRC 101661 / EBR45); OX = 720554 G N=queA PE=3 SV=1
MKVSEFYYDLPQELIAQEPLKDRKQSRLMVLDRETGAIEHRIFKDIIEYLNPGDCLVLNDTRVIPARLLGEKEGTGGKIEFVLLKNVGGDIWEVILKPGKRAKPGARFVFGNGELKAEIVDVIEEGNRLVRFEYDGIFEQILDKIGIMPLPPYITKPLEDRERYQTVYSKHKGSAAAPTAGLHFTKDLLEQIKQKGVEIAYVTLHVGLGTFRPVKVENVSEHKMHSEYYNLSEEECNKINTTKKKGGNVIAVGTTSCRVLETVGDESGLLNPKSGWTDIFIYPGYKFKVVDKLITNFHLPESTLLMLVSALAGKDKIMNAYSEAIKEKYRFFSFGDAMFIK

SEQ ID NO: 67365 - protein, 341 aa, unidentified
  source 1..341: note = Hungateiclostridium saccincola
  REGION 1..341: note = tr|A0A2K9EQF7|A0A2K9EQF7_9FIRM S-adenosylmethionine:tRNA ribosyltransferase-isomerase; OS = Hungateiclostridium saccincola OX=1677857 GN=queA PE=3; SV = 1
MKVSDFYYDLPEELIAQEPLKDRHLSRLLVLDRETGNIEHRVFKDIIGYLNKGDCLVLNDTRVLPARLLGKKEGTGGKIEFVLLKKIEKDIWEVILKPGKRAKPKARFIFGDGELKAEILEIVEEGNRLVKFEYDGVFEEVLDRVGIVPLPPYITKKLDDSERYQTVYSKHKGSAAAPTAGLHFTKELLEEARNKGVEIAFVTLHVGLGTFRPVKAEDVKEHKMHSEYYWIDEKNCNRINKAKKDGKKVISVGTTSSRVLETVGDENGMVKPQRGWTDIFIYPGYNFKVVDALITNFHLPCSTLLMLVSALAGRENILKAYNEAVQERYRFFSFGDAMFIK

SEQ ID NO: 67366 - protein, 341 aa, unidentified
  source 1..341: note = Hungateiclostridium sp.
  REGION 1..341: note = tr|A0A4Q0I647|A0A4Q0I647_9FIRM S-adenosylmethionine:tRNA ribosyltransferase-isomerase; OS = Hungateiclostridium sp. N2K1 OX=2487273 GN=queA PE=3; SV = 1
MKVSDFYYDLPQELIAQEPTAKRDMSRLLVLDREAGGICHKQFKDIGEYINKGDCLVLNDTRVIPARLLGEKEGTGGKIEFVLLKKINGDVWEVILKPGKKAKPGSRFVFGNGELKAEVIEIIEEGNRLVRFEYDGIFEQILDRVGIVPLPPYITKKIDDAERYQTVYSKYRGSAAAPTAGLHFTVELLEELANRGVNIAYVTLHVGLGTFRPVKVENLQEHKMHSEFYRINEEDCNKINAAKENGCKVIAVGTTSCRVLETVGDEKGRLKPQSGWTDIFIYPGYEFKVVDSLITNFHLPESTLIMLVSALAGRDRIMEAYNAAVREKYRFFSFGDAMFIK

SEQ ID NO: 67367 - protein, 339 aa, unidentified
  source 1..339: note = Hungateiclostridium straminisolvens
  REGION 1..339: note = tr|W4V6Z7|W4V6Z7_9FIRM S-adenosylmethionine:tRNA ribosyltransferase-isomerase OS=Hungateiclostridium straminisolvens JCM 21531 OX=1294263 GN=queA PE=3 SV=1
MKVSDFYYDLPQELIAQEPIAKRDMSRLLVLDKETGRICHKKFKDIVEYINKGDCLVLNDTRVMPARLLGEKEGTGGKIEFVLLKRINGDVWEVILKPGKKAKPGARFVFGNGELKAEIIEIIEEGNRLVRFEYDGIFEEILDRVGIVPLPPYITKRLDDAERYQTVYSKYKGSAAAPTAGLHFTVELLDELASRGVNIAYVTLHVGLGTFRPVKAENLEEHKMHSEFYRINEEDCRKINEAKENGCRVIAVGTTSCRVLETVGDEKGKLNPQSGWTDIFIYPGYKFKVVDSLITNFHLPESTLIMLVSALAGRDKIMEAYNAAVRERYRFFSFAMPCL

SEQ ID NO: 67368 - protein, 341 aa, unidentified
  source 1..341: note = Hungateiclostridium thermocellum
  REGION 1..341: note = sp|A3DE14|QUEA_HUNT2 S-adenosylmethionine:tRNA ribosyltransferase-isomerase OS=Hungateiclostridium thermocellum (strain ATCC 27405 / DSM 1237 / JCM 9322 / NBRC 10340 0 / NCIMB 10682 / NRRL B-4536 / VPI 7372) OX=203
MKVSDFYYDLPQELIAQEPVEKRDMSRLMVLDKETGKISHKRFKDIVEYINKGDCLVLNDTRVIPARLLGEKEGTGGKIEFVLLKRINGDVWEVILKPGKKAKPGARFVFGNGELKAEVIEIVEEGNRLVRFEYDGIFEEILDRIGIVPLPPYITKKLDDAERYQTVYSRYKGSAAAPTAGLHFTLELLEELAGRGVKIAYVTLHVGLGTFRPVKVENLEEHKMHSEFYRIKEEDCDKINSTKQNGGKIIAVGTTSCRVLETVGDENGIVRPQSGWTDIFIYPGYKFKVVDSLITNFHLPESTLIMLVSALAGREKILEAYNIAVKERYRFFSFGDAMFIK

SEQ ID NO: 67369 - protein, 341 aa, unidentified; identical to SEQ ID NO: 67368
  source 1..341: note = Hungateiclostridium thermocellum
  REGION 1..341: note = tr|A0A4S5EY38|A0A4S5EY38_HUNTH S-adenosylmethionine:tRNA ribosyltransferase-isomerase; OS = Hungateiclostridium thermocellum OX=1515 GN=queA PE=3; SV = 1

SEQ ID NO: 67370 - protein, 377 aa, unidentified
  source 1..377: note = Hungatella effluvii
  REGION 1..377: note = tr|A0A2V3Y0L4|A0A2V3Y0L4_9CLOT S-adenosylmethionine:tRNA ribosyltransferase-isomerase; OS = Hungatella effluvii OX=1096246 GN=queA PE=3 SV=1
MNVKDFDFELPQELIAQDPLEDRSSSRLLVLDKKTGEIEHRTFRDILSYLRKGDCLVINDTKVIPARLFGVKEGTEAKIEILLLKRRENDIWETLVKPGKKAKIGTVITFGDGLLTGTVVDIVEEGNRLIQFSYEGIFEEILDRLGQMPLPPYITHQLKDQTRYQTVYAKHEGSAAAPTAGLHFTKDLLAEIEAMGVAIAHVTLHVGLGTFRPVKVDEIEEHHMHSEFYIVDEAEAKKVNDTKKNGGRIVCVGTTSCRTVESASTDDGVLKAGSGWTEIFIYPGYRFKTLDCLITNFHLPESTLVMLVSALAGREHVLNAYEEAIRERYRFFSFGDAMFITDLHEGAVPDVGEQNGDGDQAGDGDQVGNEAGERTEK

SEQ ID NO: 67371 - protein, 365 aa, unidentified; identical to SEQ ID NO: 65431
  source 1..365: note = Hungatella hathewayi
  REGION 1..365: note = tr|A0A174X1W4|A0A174X1W4_9CLOT S-adenosylmethionine:tRNA ribosyltransferase-isomerase; OS = Hungatella hathewayi OX=154046 GN=queA_3 PE=3 SV=1

SEQ ID NO: 67372 - protein, 349 aa, unidentified
  source 1..349: note = Hungatella hathewayi
  REGION 1..349: note = tr|A0A3E2UB80|A0A3E2UB80_9CLOT S-adenosylmethionine:tRNA ribosyltransferase-isomerase; OS = Hungatella hathewayi OX=154046 GN=queA PE=3 SV=1
MDVKDFDYELPEELIAQDPLEDRSASRLMVLDRETGEVQHRIFKDITEYLRPGDCLVINDTKVIPARLFGVKKDTGAKIEILLLKRRENDIWETLVRPGKKAKPGTVIEFGEGLLTGTVVDTVDDGNRLIQFHYTGIFEEILDQLGQMPLPPYITHQLKDKNRYQTVYARHEGSAAAPTAGLHFTQELLAEIEGMGVKIAHVTLHVGLGTFRPVKVENVQDHHMHSEFYIVEESEAKKVNDTRAAGGRVICVGTTSCRTVESASTEEGVLKAGTGWTEIFIYPGYRFKVLDALITNFHLPQSTLVMLVSALAGREHILDAYREAVKKGYRFFSFGDAMFIAAHPAAEKR

SEQ ID NO: 67373 - protein, 349 aa, unidentified
  source 1..349: note = Hwanghaeella grinnelliae
  REGION 1..349: note = tr|A0A437QL33|A0A437QL33_9PROT S-adenosylmethionine:tRNA ribosyltransferase-isomerase; OS = Hwanghaeella grinnelliae OX=2500179 GN=queA PE=3 SV=1
MKVDLFDFDLPAELIAQHPVEPRDAARMLDLTSGSPVDRIVSALPDLLRPDDVMVVNDTKVIPARLIGRRGQAKVEVTLHRRVDGNRWRAFAKPAKKLKIGDDFVCELGLVGEVVEKFDGGEVELLFPYSGEALLDQIRMQGVMPLPPYIKRQDIAEDAEAQQQDREDYQPIFAKHEGAVAAPTASLHFTDRLLAALEAKGVTRETLTLHVGAGTFLPVKVSDTDDHVMHEEIGILTPEVAERLNAAKAEGRRIVAVGTTALRLLESAADEGGKIHPFDATTDLFITPGYRFKAVDLLLTNFHLPKSTLFMLVSAFAGLERMKAAYEHAKAEGYRFYSYGDCCLLERTE

SEQ ID NO: 67374 - protein, 352 aa, Hwanghaeicola aestuarii
  REGION 1..352: note = tr|A0A2W7Q2P6|A0A2W7Q2P6_9RHOB S-adenosylmethionine:tRNA ribosyltransferase-isomerase; OS = Hwanghaeicola aestuarii OX=568105 GN=queA PE=3 SV=1
MKLSEFDFELPDEFIATRPARPRSSARMLVAQGAAITDAQVSDLPDWLRPGDRLVLNDTRVIPARLAGTRTRDGHVAKVEATLLEPEPDGRWTALVKHLRKIEDGEEIAFDAGLRAQLFRRGDGMVSLRFNLEGEAFDAALAEAGLMPLPPYIAARRPADAQDMQDYQTIWARHTGAVAAPTASLHFDDALMKALRERGVELTYVTLHVGAGTFLPVKVDDILEHRMHAERGLVTAEAAAEIAATRADGGRVIAVGTTALRLIETAAQKTGAIEPWEGATDIFITPGFRFAVADGLVTNFHLPKSTLMMLVSAFLGVEEIRAVYAHAIAGAYRFYSYGDASLLLPRGGNPRA

SEQ ID NO: 67375 - protein, 341 aa, Hyalangium minutum
  REGION 1..341: note = tr|A0A085W4Z8|A0A085W4Z8_9DELT S-adenosylmethionine:tRNA ribosyltransferase-isomerase; OS = Hyalangium minutum OX=394096 GN=DB31_3875 PE=3 SV=1
MNPAHWPREHPEANRLLHVSPSSGRISDRRVEHLPELLRSGDLLVVNDAATLPSSLHGLTVAGGPIELRLLAREEEGTWTAVLFGAGDWRMRTEDRPAPPLLTVGTQLVLGTLKACVVEVLPPSPRLLRVAFEAQGAELWAGLYRSGKPVQYSYLSGPLALWHIQTAYAARPWAAEAPSAGLPLTWALLLELRRRGVRFASLTHAAGLSSTGDAALDAALPRPERFELPASTVEAIHATRASGGRVVAVGTTVVRALEGRAAQAGGRLTAGEGVTDLLMGPGFIPKVVSGLLTGVHEPATSHYMLLQAFAPLALLREAAQIAEKRGYLGHEFGDSCLILDA

SEQ ID NO: 67376 - protein, 361 aa, Hyalangium minutum
  REGION 1..361: note = tr|A0A085WFY3|A0A085WFY3_9DELT S-adenosylmethionine:tRNA ribosyltransferase-isomerase; OS = Hyalangium minutum OX=394096 GN=queA PE=3 SV=1
MSSLLSDYDFELPEAQIAQQPLGTRDASRLMTVSRSSGTWEHRRFSDLPSLLRSGDVLVVNDARVIPARLLGAKSGTGGRVELLVVRPAASTLTSAALSQAAEASDWICLGQASKGLKPGARVDFPSGLSAEVLEALGGGEYRVRFHAPPGASFQELLQQAGKLPLPPYITREPDAADAERYQTVYARASGSVAAPTAGLHFTEATFAALEARGVKRVTVTLDVGPGTFLPVREEDLDRHKMHPERYGVSEETAATINAAKAEGRRIVAVGTTVVRTLESATDPQTGKLRAGLGDTVLFIRPGFPFRQVDLLLTNFHLPRSTLVMLVSALLGRERTLAAYREAVQAGYRFFSYGDAMLVTE

SEQ ID NO: 67377 - protein, 349 aa, unidentified
  source 1..349: note = Hydrobacter penzbergensis
  REGION 1..349: note = tr|A0A1H2RIF6|A0A1H2RIF6_9BACT S-adenosylmethionine:tRNA ribosyltransferase-isomerase; OS = Hydrobacter penzbergensis OX=1235997 GN=queA PE=3 SV=1
MKLSQFKFDLPLNLIAQNPTKRREDSRMMVVDRKSGHMENRHFRDIIEYFDDKDVFVVNNTKVFPARMYGRKEKTGAKIEVFLLRELNKPNRLWDVIVDPARKIRVGNKLYFGDNEELVAEVIDNTTSRGRTIRFLWDDDDESFKKMLEFLGETPLPKYIKRKPDEEDKERYQTVYAKYEGAVAAPTAGLHFSKELIKRCEILGIRFAEVTLHTGLGTFRPIEVEDLSKHKMDAEYYAITEEACRIVNKAKETGRRVCSIGTTTMRAMESSFTAQKLLKPSEGWTNHFIHPPYTFNVADSLVTNFHLPKTSLLIMTCAFAGYDLAMEAYKKAIKDKYRFFSYGDALLII

SEQ ID NO: 67378 - protein, 408 aa, unidentified
  source 1..408: note = Hydrobacter penzbergensis
  REGION 1..408: note = tr|A0A1H2WTE3|A0A1H2WTE3_9BACT S-adenosylmethionine:tRNA ribosyltransferase-isomerase; OS = Hydrobacter penzbergensis OX=1235997; GN = SAMN05444410_10692 PE=3 SV=1
MHPKALSILDFTYTLPDDRIARFPLEARDQSRLLVYRGGQISETVYVSLAGELPGGSLLVFNNTKVVEARLLFQKNTGSIIEIFCLEPHEQYPDITSAMLEKGKVWWKCLVGGAKKWKEPVLHKALSDSGIVLSAKKIEQRADHYIIELSWNDANLSFAELLHLAGALPLPPYLNRAAEESDKERYQTIYARYDGSVAAPTAGLHFTDAVFASLSQKNIRHEFVTLHVGAGTFKPVKSATMEEHDMHAEFIDVPLSVIEKLLQQWPDTIVPVGTTSLRTIESLYWLGVKTILHPDIQPAALHLTQWEPYQLKHEAISPSLALQSLINWMQQHQLQKLLTKTQIIMAPGYTLKIAKGLITNFHQPQSTLLLLVAAIVGDDWKRIYNYALEHGFRFLSYGDGCLLMSDIV

SEQ ID NO: 67379 - protein, 350 aa, unidentified
  source 1..350: note = Hydrocarboniclastica marina
  REGION 1..350: note = tr|A0A4P7XHD3|A0A4P7XHD3_9ALTE S-adenosylmethionine:tRNA ribosyltransferase-isomerase; OS = Hydrocarboniclastica marina OX=2259620 GN=queA PE=3 SV=1
MQVSDFDFHLPDELIARYPLKNRSDSRLLCLDSDSGQISHRHFREIETLLEPGDLLVFNDTRVIPARLYAQKETGGKVEILIERVTGERTCLAHVRASKSPKAGQALVLEDGTRLAVTGREDALFMLAVERDEPVFRVLERLGHMPLPPYIDRPDELADRERYQTVYARNAGAVAAPTAGLHFDRNLLERLTAKGVSQAFVTLHVGAGTFQPVRVDRVEDHQMHSEWLEVGQEAVAAVERTRTLGGRVIAVGTTSVRALESAAADGALRPFQGETTIFIYPGRPFRVIDSLITNFHLPQSTLLMLVSALAGRDAVMQAYQAAIAERYRFFSYGDAMFIDDRLGLTGEQPE

SEQ ID NO: 67380 - protein, 354 aa, Hydrocarboniphaga daqingensis
  REGION 1..354: note = tr|A0A1M5RME4|A0A1M5RME4_9GAMM S-adenosylmethionine:tRNA ribosyltransferase-isomerase; OS = Hydrocarboniphaga daqingensis OX=490188 GN=queA PE=3; SV = 1
MRRSDFSYDLPPELIAQTPAGQRSGSRLLDVGLDGDAPLADLRMTDLPDLLDPRDLLIFNDTRVIPARLFGRKPTGGRVQMLVERVLGEHEMLAQIGASKTPKPGGTILIDLPDGRIAELVMIGRDDDLFHLRLSSGGTVMQLLDTAGRLPLPPYITHSPGSEDAERYQTLFAAKPGAVAAPTAGLHFDDALLQRLRERGLRIETLTLHVGAGTFQPMRVDDLSEHRMHAERYEIPPALADAIAQTRANGGRVVAVGTTVARALESAATAPGIVAVGEGETRLFITPGYRFRIVDRLVTNFHLPESTLLMLVSAFAGYERIFDAYRHAVAQRYRFFSYGDAMLLTRAEPAHPTE

SEQ ID NO: 67381 - protein, 346 aa, Hydrocarboniphaga effusa
  REGION 1..346: note = tr|I8T7S5|I8T7S5_9GAMM S-adenosylmethionine:tRNA ribosyltransferase-isomerase OS=Hydrocarboniphaga effusa AP103 OX=1172194 GN=queA PE=3 SV=1
MRRSDFNYELPPELIAQFPAERRSASRLLELAPNGTLADRQMRDFASLIEPGDLLIFNDTRVIPARLFGRKPTGGRVEILIERLLGEREALAQVGASKTPKPGGEILIDLADGEAPAVLVMIDRQDDMFRLQLHSAGSFERLMERVGRLPLPPYIEHAPGGFDAERYQTVFAAKPGAVAAPTAGLHFDDTLLADLNSRGVRTATLTLHVGAGTFQPLRVDDVSEHRMHAERYEISPELCEAIVRTKARGGRVVAVGTTVTRALESAALSGTLQSGAGETRLFITPGYRFNVVDRLLTNFHLPESTLLMLVSAFAGYERIMAAYRHAVQQRYRFFSYGDAMLLTRQG

SEQ ID NO: 67382 - protein, 379 aa, Hydrococcus rivularis
  REGION 1..379: note = tr|A0A1U7HB62|A0A1U7HB62_9CYAN S-adenosylmethionine:tRNA ribosyltransferase-isomerase; OS = Hydrococcus rivularis NIES-593 OX=1921803 GN=queA PE=3; SV = 1
MTDPPEKTANQLLSNYDYELPTELIAQNPVVPRDNSRLLVVNSPTTHVHSIFRDLPDWLQPGDLLVLNNTRVIPARLYGHKSTGSPVEILLLEEKQENCWLALVKPGKRFKIGTKILFHPASGELPEGVFLKATVIARDEATSGRLLEFELPSGQSLWDLLDKFGQIPFPPYVTHSQALPDQYQTIYAQQAGSVAAPTAGLHFTEELFQRLEEKGIQKAHITLHVGVGTFRPIEVEDITQHVMHQEWLEVPEATVEKIKGTKAKGGRIIAVGTTVARALEGAAQETEKAGEEFLRPFRGKTDLFIYPGYRWRVVEGMITNFHLPRSSLLILLSALIGRDRVLALYREAVQQRYRFYSFGDAMLILPAATISNQSFDAIN

SEQ ID NO: 67383 - protein, 367 aa, Hydrocoleum sp.
  REGION 1..367: note = tr|A0A261KKI0|A0A261KKI0_9CYAN S-adenosylmethionine:tRNA ribosyltransferase-isomerase; OS = Hydrocoleum sp. CS-953 OX=1671698 GN=queA PE=3 SV=1
MTDLDWSIESYDYELPLELIAQNPVVPRDSSRLMVVESLTHRNCIFRDLPDLLQPEDLLVLNNTRVIPARLYGQKTSGAQVEILLLKPITSDSWLALVKPGKRFITGATIEFEPNSSFACDYKLQARVLATDGETGGRVLKFDLPPGVSLINLLDKFGHVPFPPYVTDSQTLSEQYQTVYSKVAGAIAAPTAGLHFTDELLEKLEQRNIGQAFITLHVGIGTFRPVEVKDITTHNIHSEWVEVSSLTVDKILQTKAKGGRIIAVGTTVVRAIEGAALANDSYGSDECLIKPFCDYTDIYIYPGYKWRVVDGLITNFHLPRSSLLMLVSAMIGRKRLLSLYKEAITQKYRFYSFGDAMLILPSARIDF

SEQ ID NO: 67384 - protein, 390 aa, unidentified
  source 1..390: note = Hydrogenibacillus schlegelii
  REGION 1..390: note = tr|A0A179ITY8|A0A179ITY8_HYDSH S-adenosylmethionine:tRNA ribosyltransferase-isomerase; OS = Hydrogenibacillus schlegelii OX=1484 GN=queA PE=3 SV=1
MDVSLFDYALPEELIAQRPLERRDASRLMVLDRFRRTIEHRQFDALPDLLRRGDVLVLNDSRVIPARLFGEKPETGAHVEVLLLHPTTDGPDVWATLVRPARRARVGTAIVFGRDGRRGAAAGGQREGRAGEGGTARSDEPSSAAGEDRGDGVGEAPGREEGPLWAEVVREGEEGVRFLRFRYRGTFEAVLQALGEMPLPPYIRERLDDPERYQTVFAREPGSVAAPTAGLHFTPELIDRLRAAGIETVFVTLHVGLGTFRPVTAASVEAHRMHSEFFRVSPEAAEALNRFRNEGRRIIAVGTTAVRALESAADEGGRLRAREGWTDLFIVPGYRFRAVDGLITNFHLPRSTLLMLVAAFAGRAFILEAYQEAIRKRYRFYSFGDAMLIL

SEQ ID NO: 67385 - protein, 349 aa, Hydrogenimonas sp.
  REGION 1..349: note = tr|A0A3G9GXI3|A0A3G9GXI3_9PROT S-adenosylmethionine:tRNA ribosyltransferase-isomerase; OS = Hydrogenimonas sp. OX=2231112 GN=queA PE=3 SV=1
MRPEAKSLPKNSLKTESYDYTLPPELIATEPAEPKESSRLLVIERESGKITHALFKDILSFIPEGCAVLYNDTKVIKARLFGRKSSGGSVELLINRPLGGSRYSVLIRGRVRAGTILHFGKTLKAGVEKLCGDGSRVVTFFDKEDRPLPFEELLPYLERLGHMPLPPYIGREDTKADEKSYQPVFAEKEGAVAAPTASLHFSDKLFEELKKRFETAPVTLHVGAGTFKPVEAETITDHPMHSEYYEIPDKAASIIDSQKEILAIGTTVTRTVEYYVRTAKRSGECDLFLHPGNPPMRVDHLLTNFHLPKSTLIMLVASFLGIEETIKVYNEAIKKRYRFYSYGDAMLIL

SEQ ID NO: 67386 - protein, 348 aa, Hydrogenimonas sp.
  REGION 1..348: note = tr|A0A432R330|A0A432R330_9PROT S-adenosylmethionine:tRNA ribosyltransferase-isomerase; OS = Hydrogenimonas sp. OX=2231112 GN=queA PE=3 SV=1
MRVSESETPDILKTDSYDYQLPSELIATEPANPKDSSRLMVIDRTNGTITHTIFREILSFIPKECAIIYNNTKVIKARLFGEKPSGGKIELLINRQLDANRYNVLIRGKVKPQTELIFDDQLKATVLELCDDGSRIVHFMNHKGEILSFETLLPHLERLGHVPLPPYMQREDRKEDEELYQPIFAKHEGAVAAPTASLHFTETLFETMQKQFTTAPITLHVGAGTFKPVEADIITQHPMHSEYYEISPQTEALINSDRDILAIGTTVTRTIEYYARTSKPFGECDLFLHPKNPPIRVNHLLTNFHLPKSTLIMLVASFLGLEMTMKVYNIAIQERYRFYSYGDAMLII

SEQ ID NO: 67387 - protein, 341 aa, Hydrogenimonas thermophila
  REGION 1..341: note = tr|A0A1I5MLE8|A0A1I5MLE8_9PROT S-adenosylmethionine:tRNA ribosyltransferase-isomerase; OS = Hydrogenimonas thermophila OX=223786 GN=queA PE=3 SV=1
MSKELKTESYDYTLPPELIATEPAEPRDSARLLVVDRKSGKVAHTIFSDIFSFLPQESAIIYNNTKVIKARLFGKKSSGGKIELLINKQLDANRYNVLIRGKVKEDTQLIFDENLYAKVLQLCDDGSRVVSFYDQNDRLIKFEELLQHLDRLGHIPLPPYMQREDSKEDEKNYQPVFAKYEGAVAAPTASLHFTDKLFEKMQQNYTTSPITLHVGAGTFKPVEADIITDHPMHSEYYDIPLQTKKIIDSDTPITAIGTTVTRTIEYYARSGKPFGECDLFLHPKNKPIRVNHLLTNFHLPKSTLIMLVSSFLGIEMTMKVYNLAIKERYRFYSYGDAMLII

SEQ ID NO: 67388 - protein, 340 aa, unidentified
  source 1..340: note = Hydrogenispora ethanolica
  REGION 1..340: note = tr|A0A4V2QDU9|A0A4V2QDU9_9FIRM S-adenosylmethionine:tRNA ribosyltransferase-isomerase; OS = Hydrogenispora ethanolica OX=1082276 GN=queA PE=3 SV=1
MLVSQFDYELPPELIAQEAVEPRDHSRLMVIRRAGPSVTDHHFYDLPEFLRAGDLLVFNDTRVIPARLHGQKDGPDGARVEVFLLKECRAGHWECLVRPGKRLKVGAVIRFPGDMTGRVVESGAEGTRIIAFSGPSDFREWLRANGTTPLPPYITKPVADPERYQTVYGVHEGSVAAPTAGLHFTTRLLDQLRQAGIAFGYLTLNVGLGTFRPVQAETIEEHHMHSEIFTLPEELVAQIAATKQAGGRVIAVGTTVVRVLESQARGGPLQAGSGDTDIFIYPGFQFRVIDGLVTNFHLPKSTLLMLVSALAGRELILESYRHAVAEGYRFFSFGDATLIL

SEQ ID NO: 67389 - protein, 334 aa, Hydrogenivirga caldilitoris
  REGION 1..334: note = tr|A0A497XPQ2|A0A497XPQ2_9AQUI S-adenosylmethionine:tRNA ribosyltransferase-isomerase; OS = Hydrogenivirga caldilitoris OX=246264 GN=queA PE=3 SV=1
MRVEEFDYELPEELIAKYPAVPRHSARLMVLDRRTQEIKHDTFWNLPDYLERGDLLVFNNTKVLPARLYGRKSTGGKVEVVLTDYIKPDMWRALIGGKKIKPGLVIDIAPDFKVEVLEHIEESKFLIRLVGDNPLKLLDRYGYIPIPPYLGREEESIDREYYQTVFAKEEGAVAAPTASLHFSEELLGKLEDRGIEKTFVTLHVSYGTFKPVKVNEVEKHHVEPEYVKVDEEAVEKIVKAKRRGSRVIAVGTTVVRALETSPFKSYEGWTELYIYPGFGFKVVDALITNFHLPRSSLLFLVCAFGGKDFVLRAYREAVSKRYRFYSYGDGMLIL

SEQ ID NO: 67390 - protein, 334 aa, Hydrogenivirga sp.
  REGION 1..334: note = tr|A8UTB1|A8UTB1_9AQUI S-adenosylmethionine:tRNA ribosyltransferase-isomerase OS=Hydrogenivirga sp. 128-5-R1-1 OX=392423 GN=queA PE=3 SV=1
MRVEEFDYELPEELIAKYPVVPRHSARLMVLDRGSQSIKHDTFWNLPDHLEEGDLLVFNNTKVIPARLYGRKPTGGKVEVVLTDYVKPDLWKALVGGKKIRKGLSIEIAPDFGIEVLEHIEDGKFLVRLMGKDPLKLVDRYGHIPIPPYLRREEEDIDREYYQTIFAEEEGAVASPTASLHFSEELLEKLERKGIGRTFVTLHVSYGTFKPVKTDSVEEHVVEPEYIRVPEETVEKIHNTKERGGRVVAVGTTVVRALETSPFKSYEGWTELYIYPGYEFKVVDALITNFHLPRSSLLFLVSAFGGKEFVLKAYREAVSKEYRFYSYGDGMLIL

SEQ ID NO: 67391 - protein, 355 aa, Hydrogenoanaerobacterium saccharovorans
  REGION 1..355: note = tr|A0A1H7ZPT9|A0A1H7ZPT9_9FIRM S-adenosylmethionine:tRNA ribosyltransferase-isomerase; OS = Hydrogenoanaerobacterium saccharovorans OX=474960; GN = queA PE=3 SV=1
MKTSDFWFDLPEELIAQTPIEPRNHSRMLCMNGDTGELKHKHFYDLTQMLQAGDTLILNDSRVLPARLYGVKEHTGAAIEFLLLEQHQKDVWEILVRPGKKAKTGVRFVFGDGLLVAEILETIDGGNRLVKFTYPEGENFYTILEKIGQMPLPPYITKRLEDKERYQTVYSKELGSAAAPTAGLHFTKDMMQELRDKGVNIGYVTLHVGLGTFRPVKVDNVNDHHMHSEHYHMPQETVDLINCTKANGHRVIGVGTTACRTVESVATKFGGVLQADDGYTDIFIYPGYDFKVLDCLITNFHLPESTLIMLVSAFAGYNHILNAYKVAVEEKYRFFSFGDCMFLTKCNGDTKNGLE

SEQ ID NO: 67392 - protein, 334 aa, Hydrogenobacter hydrogenophilus
  REGION 1..334: note = tr|A0A285NRY9|A0A285NRY9_9AQUI S-adenosylmethionine:tRNA ribosyltransferase-isomerase; OS = Hydrogenobacter hydrogenophilus OX=35835 GN=queA PE=3; SV = 1
MRLEDFDYELPPELIAKYPLTERHKARLMVLDRKDKSIKHDIFWNLPLYLEEGDLLVFNNTKVLPARLYGEKPTGGKVEVLLTDFVENNLWEALVGGKNIKGGLSIRIADDFEVKILKHISEGKFLVELCAHDPVQALYKHGHIPIPPYLEREEEEIDKVYYQTVFAQKEGSVAAPTASLHFSEELLKRLDEFGIRKAFITLHVSYGTFKPVKVSDVKEHKVDAEYAEVPEETVELIKQVKEEGKRVVAVGTTVVRALETKPFCAFRGKTDLYIYPGYEFKVVSAMITNFHLPRSSLLLLVSAFAGREFVLEAYKLAVKERYRFYSYGDGMLIL

SEQ ID NO: 67393 - protein, 334 aa, Hydrogenobacter thermophilus
  REGION 1..334: note = tr|D3DIM9|D3DIM9_HYDTT S-adenosylmethionine:tRNA ribosyltransferase-isomerase OS=Hydrogenobacter thermophilus (strain DSM 6534 / IAM 12695 / TK-6); OX = 608538 GN=queAPE=3 SV=1
MRLEDFDFELPPELIAKYPLKERHMARLMVLNRKDKSIKHDIFWNLPLYLEEGDLLVFNNTKVIPARLYGKKPTGGRVEILLTDMLKEHLWYALVSGKNIREGLCVYIAQDLSVNILKHISEGKFLVELLSQDPIKALYTYGHIPIPPYLEREEEHIDRVYYQTVFAQKEGSVAAPTASLHFSEELLNRLDEYGIRKAFITLHVSYGTFKPIKVSDIREHKVDEEYMEVPEETVELIKKVKQEGKKVVAVGTTVVRALETKPFSPFSGKTDLYIYPGYTFKVVDAMITNFHLPRSSLLLLVSAFAGREFILSAYQIAIKERYRFYSYGDGMLIL

SEQ ID NO: 67394 - protein, 343 aa, Hydrogenobaculum sp.
  REGION 1..343: note = sp|B4U7T2|QUEA_HYDS0 S-adenosylmethionine:tRNA ribosyltransferase-isomerase OS=Hydrogenobaculum sp. (strain Y04AAS1) OX=380749 GN=queA PE=3 SV=1
MDISLFDYDLPEELIAKYPVNPRHSAKLMVLDRKSSNITHSTFWHIDEFLEEGDLLIFNDTKVLPARLLGKKKGIENSNVEILLLRHLENEKWEALVGGKNIKPGLVIEISYDFEAIVESQIEKSKFLVLLKAKNQNQIEAINKYGKIPIPPYLGRDEEPIDKEFYQTVFAKKEFSVAAPTASLHFSNELLEKLKKKVNIDFVTLHVSYGTFKPVTVQNIEEHKVDEEYIEVSESLIKNIKKTKKMCKRVIAVGTTVTRALETAIDKPYFGFTDLYIKPGFKFKVLDGFITNFHLPKSSLLILVSAFCNEENLDGREFILKSYKEAVKHKYRFYSYGDGMLIL

SEQ ID NO: 67395 - protein, 343 aa, Hydrogenobaculum sp.
  REGION 1..343: note = tr|M1RCK6|M1RCK6_9AQUI S-adenosylmethionine:tRNA ribosyltransferase-isomerase OS=Hydrogenobaculum sp. HO; OX = 547144 GN=queA PE=3 SV=1
MDISLFDYDLPEELIAKYPVNPRHSAKLMVLDRKSSNITHSTFWHIDEFLEEGDLLIFNDTKVLPARLLGKKKGIENSNVEILLLRHLENEKWEALVGGKNIKPGLVIEISDDFEAIIHSQIEKSKFLVLLKAKNQNQIEAINKYGKIPIPPYLGRDEEPIDKEFYQTVFAKKEFSVAAPTASLHFSKELLEKLKKKVNIDFVTLHVSYGTFKPVTVQNIEEHKVDEEYIEVSESLIKNIKKTKEMGKRVIAVGTTVTRALETAIDKPYFGFTDLYIKPGFKFKVLDGLITNFHLPKSSLLILVSAFCNTKNLNGREFILKAYKEAVKHKYRFYSYGDGMLIF

SEQ ID NO: 67396 - protein, 372 aa, unidentified
  source 1..372: note = Hydrogenophaga crassostreae
  REGION 1..372: note = tr|A0A162SVW5|A0A162SVW5_9BURK S-adenosylmethionine:tRNA ribosyltransferase-isomerase; OS = Hydrogenophaga crassostreae OX=1763535 GN=queA PE=3 SV=1
MQPQRTRDFTVADFDFTLPDELIAQHPAAERSASRLLDGRSDEAPVDRIFRELPSLLNPGDLLVFNDTQVVKARLFGEKASGGKLELLIERVLLPHEALDGSANEVVGHIRVSKKPQPGGLLHMVGGLKGGGFDATFLGRWPDAQGQLFRLRLQGPGTETPYDLMAQHGHVPLPPYITHADDADDERRYQTVFARVPGAVAAPTASLHFDEGVLAALKARGVETASVTLHVGAGTFAPMKTEQISEHVMHHERYAMPPETVQAIAACQARGGRVVAVGTTTVRTLETWARNSETQGDTNIFITPGFRFEVVDLLVTNFHLPKSTLMMLVSAFAGYERVMDLYRHAVASRYRFFSYGDAMLLQRQPPSTQRCS

SEQ ID NO: 67397 - protein, 347 aa, Hydrogenophaga intermedia
  REGION 1..347: note = tr|A0A1L1PP37|A0A1L1PP37_HYDIT S-adenosylmethionine:tRNA ribosyltransferase-isomerase; OS = Hydrogenophaga intermedia OX=65786 GN=queA PE=3 SV=1
MTISSAPRAFTLSDFDFALPPELIAQHPAPERSGSRLLDGSATAPVDRVFRELPDLLNPGDLLVFNDTQVIKARLFGRKATGGALELLVERVLQNHEVVAHMKVSKKPLVGAVVEMDGGFTAELLGRWPDDDGTLFRFRFSGEPHALMAAHGHVPLPPYIEHGDTAEDERRYQTVFAKHPGAVAAPTAALHFDEALLAALRARGVHMAEVTLHVGAGTFQPVKTENIAEHTMHAEWYRVPEPTIAAIEACRARGARVVAVGTTTVRTLESWAAFGHTEGDTQIFITPGFRFQVVDRLITNFHLPRSTLMMLVSAFAGYERVMALYAHAIAQRYRFFSYGDAMLLQRR

SEQ ID NO: 67398 - protein, 369 aa, Hydrogenophaga pseudoflava
  REGION 1..369: note = tr|A0A4P6WWF5|A0A4P6WWF5_HYDPS S-adenosylmethionine:tRNA ribosyltransferase-isomerase; OS = Hydrogenophaga pseudoflava OX=47421 GN=queA PE=3 SV=1
MTSSSSSSARHFTVADFDFSLPEHLIAQHPAAERSASRLLDGTGELPVDRIFRELPGLLQPGDLLVFNDTQVVKARLFGEKASGGKLELLIERVLLPHEALDGSPNEVVGHLRVSKKPLPGGRLHLAGGLKGGGFDAVFIGRWPDEHGQLFRLRLEGPAGEDPYTLMARHGHVPLPPYITHADEADDERRYQTVFARVPGAVAAPTAALHFDEGVLSGLEARGVHRANVTLHVGAGTFAPMKTERIEEHVMHHERYAIPPATVRAIEECRARGGRVVAVGTTTVRTLESWAKTGELQGDTNIFITPGFDFRVVDVLVTNFHLPKSTLMMLVSAFAGYDHVMALYRHAVAQGYRFFSYGDSMLLARSTQA

SEQ ID NO: 67399 - protein, 370 aa, Hydrogenophaga sp.
  REGION 1..370: note = tr|A0A1B3LWY2|A0A1B3LWY2_9BURK S-adenosylmethionine:tRNA ribosyltransferase-isomerase; OS = Hydrogenophaga sp. RAC07 OX=1842537 GN=queA PE=3 SV=1
MPSSASSARTLTVADFDFRLPPELIAQHPAPERSASRLLDGTGSAPVDRIFRELPGLLKDGDLLVFNDTQVMKARLFGQKASGGQLEMLIERVLLPLEASDGTVHEVVAHLRVSKKPQLGGRLHMAGGLGRGGFDAVFIGRWPDEQGQLFRFRLHGPAGETPYELMARHGHVPLPPYITHTDEADDERRYQTVFARVPGAVAAPTAALHFDETVLAALDARGVRRASVTLHVGAGTFAPMKAGRIEDHVMHHERYAIPPATLQAIADCRARGGRVVAVGTTTVRTLESWARSGETEGDTNIFITPGFGFQVVDLMVTNFHLPQSTLMMLVSAFAGFDHIRALYAHAIEHRYRFFSYGDAMLLSRNPDAAV

SEQ ID NO: 67400 - protein, 353 aa, Hydrogenophaga sp.
  REGION 1..353: note = tr|A0A1Y2QFX6|A0A1Y2QFX6_9BURK S-adenosylmethionine:tRNA ribosyltransferase-isomerase; OS = Hydrogenophaga sp. IBVHS2 OX=1985170 GN=queA PE=3 SV=1
MTSSPAAPRAFTLGDFDFALPPELIAQHPAAERSASRLLDGTGPAPVDRVFRDLPGLLQPGDLLVFNDTQVIKARLFGEKSTGGKVELLVERVLTDHEVVAHMKVSKKPAVGGVIHLAGGCTATLTGRWPDEHGALFRFRFSEEPHAVMQAHGHVPLPPYITHEDTADDERRYQTVFAKNPGAVAAPTAALHFDEGVLAGLRERGVHTAEVTLHVGAGTFQPVKTDNIAEHTMHAEWYRVPASTIAAIEACRARGGRVVAVGTTSVRTLESWARTGQTEGDTSIFITPGFAFRVVDLLITNFHLPKSTLMMLISALAGHREVMDLYAHAIAQRYRFFSYGDAMLLSRNPHAAV

SEQ ID NO: 67401 - protein, 344 aa, unidentified
  source 1..344: note = Hydrogenophilaceae bacterium
  REGION 1..344: note = tr|A0A1J4Z5P3|A0A1J4Z5P3_9PROT S-adenosylmethionine:tRNA ribosyltransferase-isomerase; OS = Hydrogenophilaceae bacterium CG1_02_62_390 OX=1805218; GN = queA PE=3 SV=1
MKTSDFDYFLADDLIARYPLPDRTASRLLHVDGPAKRFEDRLFADLPAFFKPGDLLIFNDTRVIKARLFGEKATGGRVEALVERVLSDREALAFIRASHKPKPGARLRFSDAFEAEVVERQDDLYRLAFDPTRTVLSWLDQYGLLPLPPYIDRAAEVSDDARYQTVYARDPGAVAAPTAGLHFDQAMLTRLQEAGVETAFVTLHVGAGTFQPVRVEAIADHHMHSECYEIPVATVAAVAKAQAAGGRIGAVGTTSLRALESAARAGELKAGAGETDIFITPGYKFRLIERLVTNFHLPKSTLLMLVSAFGGHDLMRRAYDHAVAERYRFFSYGDAMLIEKNDEI

SEQ ID NO: 67402 - protein, 247 aa, unidentified
  source 1..247: note = Hydrogenophilales bacterium
  REGION 1..247: note = tr|A0A258SLF7|A0A258SLF7_9PROT S-adenosylmethionine:tRNA ribosyltransferase-isomerase (Fragment) OS=Hydrogenophilales bacterium 16-62-9; OX = 1970520 GN=B7Y33_04395 PE= 3 SV=1
MQVSDFDFDLPDELIAQLPPEVRGGSRLLHVEASGLRHDRSFSDLPSLLHPDDLLVMNDTRVIKARLFGNKDSGGKVELLVERVTDEFDALAFIRASHAPKPGSRILLADDVWADVLARQDDLTQLRFQRPVLEVLEQLGRLPLPPYITHTPTADDEARYQTVYANEPGAVAAPTAGLHFTPDLMARLRDNGISIEFVTLHVGAGTFLPVKADRIEDHQMHAEWGSIDDQTALRLNAARATGGRIIA

SEQ ID NO: 67403 - protein, 345 aa, unidentified
  source 1..345: note = Hydrogenophilales bacterium
  REGION 1..345: note = tr|A0A259FK66|A0A259FK66_9PROT S-adenosylmethionine:tRNA ribosyltransferase-isomerase; OS = Hydrogenophilales bacterium 17-64-34 OX=1970527 GN=queA; PE = 3 SV=1
MRVADFDFDLPPDLIAQFPPATRGASRLLHIDPAGACHDRQFADLPDLLRPDDLLVLNDTRVIKARLFGQKDSGGKVELLVERVTDEFEALAFIRASHAPKPGSRIVLADSTALDVLARQADLTRLRFPRPVLDVLDALGRLPLPPYIEHDPTVDDDARYQTVYANEPGAVAAPTAGLHFDDAMLARLAAQGTRTARVTLHVGAGTFQPVRVDEVADHKMHSERYTIPQATVDAIAETRARGGRVVAVGTTSLRALESAAQAGPLRAGSDETDIFITPGFTFRVVDALITNFHLPKSTLLMLVSAFSSLDIIHAAYAHAIQNRYRFFSYGDATFLERPANLNRPT

SEQ ID NO: 67404 - protein, 358 aa, Hydrogenophilus thermoluteolus
  REGION 1..358: note = tr|A0A2Z6DVW6|A0A2Z6DVW6_HYDTE S-adenosylmethionine:tRNA ribosyltransferase-isomerase; OS = Hydrogenophilus thermoluteolus OX=297 GN=queA PE=3 SV=1
MRLCQELDRLDAYDFPLPPERIARYPQPERDASRLLVVGEERFDDRTFRDLPALLVPGDLLVLNDSRVIHARLFGHKATGGEVEVLFERLIGEKEALALVRASKSPKPGTTLHLAKAFTVEVVDRHGDLFHVRLRDDGTLFDWIERFGQLPIPPYLERQPEETDETRYQTVFARHPGSVAAPTAGLHFTEPLLAQLQNQGVGLAWVTLHVGAGTFQPVRTERVNEHRMHAERFVIPEATVEAIARTKAAGKRVIAVGTTAMRTLEGAAHHWGRLRAGQGETDLFIRPGFRFQVVDALITNFHLPRSTLIMLVAAFAGYQRTMAAYRHALAGDYRFFSYGDAMFLPQRYDTDWAPHETH

SEQ ID NO: 67405 - protein, 337 aa, Hydrogenothermus marinus
  REGION 1..337: note = tr|A0A3M0B830|A0A3M0B830_9AQUI S-adenosylmethionine:tRNA ribosyltransferase-isomerase; OS = Hydrogenothermus marinus OX=133270 GN=queA PE=3 SV=1
MIKLSDFDYNLPKELIAKYPHEPRDECRLMVLNRKKKTIEHKIFKDIIDYLEEGDLLVLNDTKVIPARLKGKKKTGANIEIFLLRPFSENQWEVLIKNIKRLKEGQEVIIANDFKIKLIEKYEEGKAKVELIGENINQLIKKYGHIPLPPYIEREDEEKDKDYYQTVFAKKEGAVASPTAGLHFTERLLKQLEEKGVKKAFCTLHVGLGTFRPIKTEDITKHKMHEEFYQIPDETLQLINETKKKGKKVVAVGTTVVRTLETYAQTNKKEGFSDIFIYPPYKFKIVDTLITNFHLPKSTLLLLVSAFANRDFILKAYEIAIKERYRFFSYGDAMLII

SEQ ID NO: 67406 - protein, 337 aa, Hydrogenothermus sp.
  REGION 1..337: note = tr|A0A432R9L1|A0A432R9L1_9AQUI S-adenosylmethionine:tRNA ribosyltransferase-isomerase; OS = Hydrogenothermus sp. OX=2231113 GN=queA PE=3 SV=1
MIKLSDYDYELPKELIAKYPVEPRDSCKLMVLNRKTKTIEHRIFRDLGDYLEEGDLLVLNDTKVIPARLKGKKKTGANIEIFLLRPFSENIWEVLVKNIKRLKEGQEVIIAPDFKVKLLEKYEEGKAKVELIGENIKQLIEKYGHVPLPPYIEREDEEKDKDYYQTVFAKKEGAVASPTAGLHFTKELLEKLEKKGVKKAFCTLHVGLGTFRPIQTEDITKHKMHEEFYQIPDETLKLIKETKQKGKKVVAVGTTVVRTLETYAQTGKKEGFSDIFIYPPYKFKIIDALITNFHLPKSTLILLVSAFADRDFILKAYKIAVEKKYRFFSYGDAMLIL

SEQ ID NO: 67407 - protein, 351 aa, unidentified
  source 1..351: note = Hydrogenovibrio crunogenus
  REGION 1..351: note = tr|A0A4P7P085|A0A4P7P085_9GAMM S-adenosylmethionine:tRNA ribosyltransferase-isomerase; OS = Hydrogenovibrio crunogenus OX=39765 GN=queA PE=3 SV=1
MRRQDFNFELPEALIAQQPAKERTQSRLLVMNGDGSVSDCHFPDILSYVNENDCLIFNNTKVIPARLFGQKLTGGKVELLIERVLDEHRVLTHIRSSNAPKSGAQLRIADAFEAEVLGRDGALFELRLSKDDAPELTALELIEAYGHMPLPPYIEREDQLEDKERYQTVYSEKPGAVAAPTAGLHFDNDLLDKIKAKGAATGFVTLHVGAGTFKPVQVDDISEHVMHSEVIEVLPETVELIKQTRQKGGRVIAVGTTSIRCLESAATFSETGELAPYQGETDIFITPGYDFKVVDVLLTNFHLPESTLIMLVSALAGYERTMQAYAHAVEQKYRFFSYGDAMLVHPPTSES

SEQ ID NO: 67408 - protein, 351 aa, unidentified
  source 1..351: note = Hydrogenovibrio crunogenus
  REGION 1..351: note = sp|Q31FZ4|QUEA_HYDCU S-adenosylmethionine:tRNA ribosyltransferase-isomerase OS=Hydrogenovibrio crunogenus (strain XCL-2) OX=317025 GN=queA PE=3 SV=1
MRRQDFNFELPEALIAQQPAKERTQSRLLVMNADGSVSDCHFPDILSYVNENDCLIFNNTKVIPARLFGQKLTGGKVELLIERVLDERRVLTHIRSSNAPKSGAKLRIEEAFDAEVLGREGALFEVQLSKDEAPELTALELIEAHGHMPLPPYIEREDQLEDKERYQTVYSEKPGAVAAPTAGLHFDNDLLDKIKAKGAAAGFVTLHVGAGTFKPVQVDDISEHVMHSEVIEVLPETVELIKQTRQKGGRVIAVGTTSVRCLESAASFSENGELAPYQGETDIFITPGYDFKVVDVLLTNFHLPESTLIMLVSALAGYDRTMQAYAHAVEQKYRFFSYGDAMLVHPPTSDS

SEQ ID NO: 67409 - protein, 349 aa, Hydrogenovibrio marinus
  REGION 1..349: note = tr|A0A066ZSU9|A0A066ZSU9_HYDMR S-adenosylmethionine:tRNA ribosyltransferase-isomerase; OS = Hydrogenovibrio marinus OX=28885 GN=queA PE=3 SV=1
MKRQDFYFDLPETLIAQTPAKERTGSRLLVIEPNGGVSDKQFPDLLDYIQPNDCLIFNNTKVIPARLFGHKHSGGKVEFLVERILDDQRVLTHIRSSNAPKPGTKIRIEDQIEVEVLGRDDALFEVAFELPDGETALSLIEACGHMPLPPYIERADGEEDKSRYQTVYSEKPGAVAAPTAGLHFDEIMLDKIRQKGTQIGFVTLHVGAGTFKPVQVDDISEHRMHSEVIEVLPETVELIHSTKQKGGRVFAIGTTSVRSLESAATFNDGVLTAYQGETDIFITPGYDFKVVDVLLTNFHLPESTLIMLVSALAGYEATMNAYRHAVEEKYRFFSYGDAMLVHPAKKAKS

SEQ ID NO: 67410 - protein, 350 aa, Hydrogenovibrio marinus
  REGION 1..350: note = tr|A0A5A4WP26|A0A5A4WP26_HYDMR S-adenosylmethionine:tRNA ribosyltransferase-isomerase; OS = Hydrogenovibrio marinus OX=28885 GN=queA PE=3 SV=1
MMKRQDFYFDLPETLIAQTPAKERTGSRLLVIEPNGGVSDKQFPDLLDYIQPNDCLIFNNTKVIPARLFGHKHSGGKVEFLVERILDDQRVLTHIRSSNAPKPGTKIRIEDQIEVEVLGRDDALFEVAFELPDGETALSLIEACGHMPLPPYIERADGEEDKSRYQTVYSEKPGAVAAPTAGLHFDEIMLDKIRQKGTQIGFVTLHVGAGTFKPVQVDDISEHRMHSEVIEVLPETVELIHSTKQKGGRVFAIGTTSVRSLESAATFNDGVLTAYQGETDIFITPGYDFKVVDVLLTNFHLPESTLIMLVSALAGYEATMNAYRHAVEEKYRFFSYGDAMLVHPAKKAKS

SEQ ID NO: 67411 - protein, 350 aa, Hydrogenovibrio sp.
  REGION 1..350: note = tr|A0A2I2A2G5|A0A2I2A2G5_9GAMM S-adenosylmethionine:tRNA ribosyltransferase-isomerase; OS = Hydrogenovibrio sp. SC-1 OX=2065820 GN=queA PE=3 SV=1
MRRQDFHFKLPDELIAQKPPQSRTDSRLLVMEADGSLSDRHFPDILDYLQPNDCLIFNNTRVIPARLFGHKQSGGKVELLIERVLDDQRVLTHIRASNAPKPGVQLKIADAFNAVVLGREGALFELVFQSDDEPDLTALDLIERHGHMPLPPYITREDVVEDKTRYQTVYSEKPGAVAAPTAGLHFDEALLDQVADLGVKVGFVTLHVGAGTFKPVQVDDIATHKMHSEVIEVLPETVALIEQTRQNGGRVIAVGTTSVRCLESAARFSKTGELAPYQGETDIFITPGVDFKVVDVLLTNFHLPESTLIMLVSAFAGHQRTLEAYTHAVAQSYRFFSYGDAMLVFPKNKV

SEQ ID NO: 67412 - protein, 354 aa, unidentified
  source 1..354: note = Hydrogenovibrio thermophilus
  REGION 1..354: note = tr|A0A410H3I2|A0A410H3I2_9GAMM S-adenosylmethionine:tRNA ribosyltransferase-isomerase; OS = Hydrogenovibrio thermophilus OX=265883 GN=queA PE=3 SV=1
MRRQDFYFDLPEELIAQQPTEERTQSRLLVMEADGGVSDQHFPDLLSYLNENDCLIFNDTKVIPARLFGQKSTGGQVELLIERVLDNERVLSHVRSSRAPKAGAVLHIADAFEAEVLGREGALFELKLSQKESDLSALELIEAHGHMPLPPYIEREDELEDKERYQTVYSAKPGAVAAPTAGLHFDEALLERIRAKGVSTGFVTLHVGAGTFKPVQVDDIAEHVMHSEVIEVLPETVALIEETKRKGGRVIAVGTTSVRCLESAARFSGDGPLQPYQGETDIFITPGYEFQVVDVLLTNFHLPESTLIMLVSALAGYKRTMQAYAHAVAQGYRFFSYGDAMLVHPAQKTAAKAE

SEQ ID NO: 67413 - protein, 366 aa, unidentified
  source 1..366: note = Hydromonas duriensis
  REGION 1..366: note = tr|A0A4R6Y3F8|A0A4R6Y3F8_9BURK S-adenosylmethionine:tRNA ribosyltransferase-isomerase; OS = Hydromonas duriensis OX=1527608 GN=queA PE=3 SV=1
MNMIENRFPTPLPTDATPLTLAHFNYDLPEQLIAQMPAAERSASRLLVVHGENDVVDERFTDIVKHLKAGDVLVMNNTKVIKARLFGHKASGGKVEVMFDRVTGTHRGIAQIRASKTPAIGSTLRINDAFHLTVLAKNDRFYELESDAPILEMLEQHGHLPLPPYIDHAADDFDANRYQTVFAEHAGAVAAPTAGLHFDEHILKALTDKGVQLAYVTLHVGAGTFLPVSSENLDAHVMHQEWFEIPAHTADVINAARLKGGRVVAVGTTSLRALESAAALQNPEYARDWQLQPHSADTKLFIRPPYRFRLVDVLVTNFHLPQSTLLMLVSAFSGVETMRGAYNHAISQGYRFFSYGDAMILTCCQK

SEQ ID NO: 67414 - protein, 370 aa, unidentified
  source 1..370: note = Hydromonas sp.
  REGION 1..370: note = tr|A0A345DE32|A0A345DE32_9BURK S-adenosylmethionine:tRNA ribosyltransferase-isomerase; OS = Hydromonas sp. F02 OX=2268024 GN=queA PE=3 SV=1
MSQSGQNPLNAFSTALPDDWAKLTLAHFNYELPDALIAQMPAAERSASRLLMVSDGELADGHFSDIIAHLHQGDVLVMNNTKVIKARLFGQKASGGKVEVMLDRITASNECIAQIRASKTPAIGSALNINGAFHFTVLAKNDRFYQLRSDAPLLEMLDAHGHLPLPPYIDHAADDFDETRYQTVFAEHAGAVAAPTAGLHFDEVILKALQDKGVRLAYVTLHVGAGTFLPVQTDDLDAHVMHQEWFEVPEETAALINQARAQGGRVVAVGTTSLRALESAAALQNPEHEAAWQLAAQSADTRLFIRPPYRFRLVDVLITNFHLPQSTLLMLVSAFSGVHTMRGAYNHAIANDYRFFSYGDAMLLTRQDTL

SEQ ID NO: 67415 - protein, 349 aa, unidentified
  source 1..349: note = Hydrotalea sandarakina
  REGION 1..349: note = tr|A0A2W7RRU2|A0A2W7RRU2_9BACT S-adenosylmethionine:tRNA ribosyltransferase-isomerase; OS = Hydrotalea sandarakina OX=1004304 GN=queA PE=3 SV=1
MKLSQFRFDLPLNLIAQTPTKRREDSRMMVVDRKTGNMENKHFRDILDYFDDKDVFVVNNTKVFPARMYGRKEKTGAKIEVFLLRELNKPNRLWDVIVDPARKIRVGNKLYFGDNEELVAEVIDNTTSRGRTIRFLWDGDDASFKEMLETLGETPLPKYIKRKPDEEDKERYQTVYAKYEGAVAAPTAGLHFSKELIKRCEIKGIRFAEVTLHTGLGTFRPIEVEDLSKHKMDAEYYQITEEACRIVNTAKQTGHRVCSIGTTTMRAMESSFTAQKLLKPSEGWTNHFIHPPYEFSVADSLVTNFHLPKTSLLIMTCAFAGYELTMEAYKKAIKDKYRFFSYGDALLIL

SEQ ID NO: 67416 - protein, 415 aa, unidentified
  source 1..415: note = Hydrotalea sandarakina
  REGION 1..415: note = tr|A0A2W7S970|A0A2W7S970_9BACT S-adenosylmethionine:tRNA ribosyltransferase-isomerase; OS = Hydrotalea sandarakina OX=1004304 GN=queA PE=3 SV=1
MKPIPYIEIKDYQYELPEKAIAKYPLPERDASKLLVYKNGKIETSQYKFLAEFLPENATLVFNNTKVVEARLQFSKPTGGQIEIFCLEPFDENEDIIVAMQTTGKVNWKCLIGGAKKWKSGNLEKNIATPNGNVLLQACKKEQSNETGVYVIEFIWNNDSLSFAEILHYAGIIPLPPYLNRETEKEDAVRYQTVYAQKDGSVAAPTAGLHFTTRLMNELQQKGIKEVYITLHVGAGTFKPVKANNIAQHEMHAEFIDVQKNTIVHLLQQINAPIVAVGTTSLRTLESLYWIGVKIHEWFQIHRNYNELNDLHVEQWAPYQLNNNSITASEALQAILYWMDAKGTERLITKTSIIIVPGYTFKIIKGLITNFHQPQSTLLLLIAAIIGSEWKKVYQFALNNNFRFLSYGDGSLLWL

SEQ ID NO: 67417 - protein, 418 aa, Hydrotalea sp.
  REGION 1..418: note = tr|A0A4V1J9H2|A0A4V1J9H2_9BACT S-adenosylmethionine:tRNA ribosyltransferase-isomerase; OS = Hydrotalea sp. AMD OX=2501297 GN=EO766_02190 PE=3 SV=1
MQKSINPQQIAIQEYQYELPENAIAKYPLAKRDESKLLVYKQSTIHTSTYQHLPDFLPEDSILIFNNTKVVEARLLFTKSTGSTIEIFCLEPFDTHKDITIAMQQTGNVQWKCLIGGAKKWKETILEKVITMPNGTLLLQAAKKEVLDEAGTYLVEFNWNDANVSFAEILHFAGIIPLPPYLNRATEQEDAIRYQTIYAEKDGSVAAPTAGLHFTPELMDALKQKGIQTDYVTLHVGAGTFKPVKAAYLAAHEMHAEFIDVSKQFIQHIQMQLNYPIVAVGTTSLRTLESLYWIGIKIHQYYQKNKTLNSLQDITVEQWLPYQQQENVSIDQALNYILQWMDIQGKERLITKTSIIIVPGYDFKLAKGIITNFHQPQSTLLLLIAAMIGDDWKRVYDYALNNSFRFLSYGDGSLLWRI

SEQ ID NO: 67418 - protein, 349 aa, Hydrotalea sp.
  REGION 1..349: note = tr|A0A4Q0AXQ0|A0A4Q0AXQ0_9BACT S-adenosylmethionine:tRNA ribosyltransferase-isomerase; OS = Hydrotalea sp. AMD OX=2501297 GN=queA PE=3 SV=1
MKLSQFRFDLPLNLIAQNPTKRREDSRMMVVDRKTGNMENKHFRDILEYFDDKDVFVVNNTKVFPARMYGRKEKTGAKIEVFLLRELNKPNRLWDVIVDPARKIRVGNKLYFGDNEELVAEVIDNTTSRGRTIRFLWEGDDASFKEMLETLGETPLPKYIKRKPDEEDKERYQTVYAKYEGAVAAPTAGLHFSKELIKRCEIQGIRFAEVTLHTGLGTFRPIEVEDLSKHKMDAEYYQITEEACRIVNTAKQTGHRICSIGTTTMRAMESSFTAQKLLKPSEGWTNHFIHPPYEFSVADSLVTNFHLPKTSLLIMTCAFAGYDLTMEAYKKAIKDKYRFFSYGDALLII

SEQ ID NO: 67419 - protein, 331 aa, unidentified
  source 1..331: note = Hyella patelloides
  REGION 1..331: note = tr|A0A563VV28|A0A563VV28_9CYAN S-adenosylmethionine:tRNA ribosyltransferase-isomerase; OS = Hyella patelloides LEGE 07179 OX=945734 GN=queA PE=3; SV = 1
MVVNSQTSHVHSSFCNLTNWLLPGDLLILNNTRVIPARLYGQKVGGASVEILLLEEIKSNCWLALVKPGKRFKLGAEIIFTGNSAHDSDYLKATVIESARATGGRILQFEIPEGKTFWSMLDRLGEMPLPPYITSRESEAEQYQTIFAQERGAVAAPTAGLHFTDDLFTKLSNQGVETAYITLHVGVGTFRPVETETITEHNMHHEWIEVSSETVAKIKATKARGGRVIAVGTTAVRALEGTAHNSQTSEGKDLQPFRGKTNLFIYPGYQWQIVDGLITNFHLPGSSLLMLVSALTGRERLLNLYQEAIANDYRFYSFGDAMLILPDARVN

SEQ ID NO: 67420 - protein, 382 aa, Hylemonella gracilis
  REGION 1..382: note = tr|A0A016XM79|A0A016XM79_9BURK S-adenosylmethionine:tRNA ribosyltransferase-isomerase; OS = Hylemonella gracilis str. Niagara R OX=1458275 GN=queA; PE = 3 SV=1
MERARPALKPMPHSSASSASQPLSTPSARVHTLSDFDFALPPELIAQHPAPERSASRLLDGRDSRPGAQPVDRIFRELPQLLQAGDLLVFNDTKVVKARLFGNKPAPTRGASSPIGGKLELLIERVLTNHEVVAHMKVSKKPAVGTVLEMTGGYTATLLGRWPDEDGKLFRLRFSDEPHALMEQHGHVPLPPYIQHSDSADDVARYQTVFAAKPGAAAAPTAALHFDESVLAALDARGVRRANVTLHVGAGTFSPVKTENLAEHRMHREWYEVPAATQQAIRETKAQGGRIVAVGTTTIRTLESWAKTGAASGDTDIFITPGFEFKVADLLVTNFHLPKSTLMMLVSAFAGFGHIMGLYRHAIAQRYRFFSYGDAMVLERAR

SEQ ID NO: 67421 - protein, 389 aa, Hylemonella gracilis
  REGION 1..389: note = tr|F3KTQ8|F3KTQ8_9BURK S-adenosylmethionine:tRNA ribosyltransferase-isomerase OS=Hylemonella gracilis ATCC 19624 OX=887062 GN=queA PE=3 SV=1
MERARPALKPMPHSPASGASLPSSAPHPRAHTLSDFDFALPPELIAQHPAPERSASRLLDGRDARPGALPVDRIFRELPGLLQPGDLLVFNDTKVVKARLFGNKPAPARGATSPIGGKLELLIERVLTGHEVVAHMKVSKKPAVGTVLQMAGGYTAELLGRWPDEDGQLFRLRFSDEPHKLMEQHGHVPLPPYINHSDNDDDVARYQTVFAAKPGAAAAPTAALHFDEAVLAALDARGVKRANVTLHVGAGTFSPVKTENLAEHRMHREWYDVPAATQQAIRDTQANGGRIVAVGTTTIRTLESWARSAGPGLSGGQTSGDTDIFITPGFEFKVADLLITNFHLPKSTLMMLVSAFAGYEHIMALYRHAIAQRYRFFSYGDAMVLERVR

SEQ ID NO: 67422 - protein, 349 aa, Hymenobacter actinosclerus
  REGION 1..349: note = tr|A0A1I0J1J6|A0A1I0J1J6_9BACT S-adenosylmethionine:tRNA ribosyltransferase-isomerase; OS = Hymenobacter actinosclerus OX=82805 GN=queA PE=3 SV=1
MKLSEFKFELPENLVAQHPAKNRDESRLMVLHRDSGKIEHRSFKDILEYFDEGDVFVVNDTKVFPARMFGNKEKTGAQIEVFLLRELNTEIHLWDVLVDPARKIRVGNKLYFGESDMVAEVIDNTTSRGRTIKFLYDGPPEDFYKALYSLGETPIPKEFITRDTEAADKERYQTIYANNIGAVAAPSAGLHFTREVMKRLEIKGIEVAPVTLHIGLGTFRTVDVEDLTKHKMDSENFVVPGTTAVVVNKALDAKKRVCAIGTTAMRAMESSVSAHTRLKANEGWTDRFIFPPYDFKIANALLTNFHTPESTLMMMASAFAGHDLLIEAYKLAIKEKYRFFSYGDAMLII

SEQ ID NO: 67423 - protein, 408 aa, Hymenobacter actinosclerus
  REGION 1..408: note = tr|A0A1I0AUU3|A0A1I0AUU3_9BACT S-adenosylmethionine:tRNA ribosyltransferase-isomerase; OS = Hymenobacter actinosclerus OX=82805 GN=queA PE=3 SV=1
MTDPRRLSIHDFTYQLPPERIAPEPLTNRDQSKLLVYQQGLLGDRTFRDLPALLPENSLLVFNDTKVVRARLFARRPTGGMVELFCLEPVAPHRAIEPAMQQTGACVWKCLVGNGRRWKDGPVTLDFEANGQPATLHAERTEQHDGYALIAFIWEPAELPFAEVLRGAGHLPLPPYLNRPDTDVDAVRYQTVYAAHEGAVAAPTAGLHFSEAVLAELAERRTAAARVTLHVGAGTFQPVKAEQMADHPMHGEPFSVTADTLRRLLAHLAEGHPLIPVGTTSLRTLESLYWLGAALVQQPARLPSWHVSQWQPYETGAEVSTPQALAALLDQLALTGSDTLHATTQLLIAPGYRFRVVRGLITNFHQPESTLLLLVAALLGPDWRRVYDHALAHDYRFLSYGDSSLLLP

SEQ ID NO: 67424 - protein, 349 aa, unidentified
  source 1..349: note = Hymenobacter amundsenii
  REGION 1..349: note = tr|A0A246FPM5|A0A246FPM5_9BACT S-adenosylmethionine:tRNA ribosyltransferase-isomerase; OS = Hymenobacter amundsenii OX=2006685 GN=queA PE=3 SV=1
MKLSEFKFELPENLVAQHPAKNRDESRLMVLHRDSGKIEHRSFKDILEYFDEGDVFVVNDTKVFPARLFGNKEKTGAQIEVFLLRELNTEIHLWDVLVDPARKIRVGNKLYFGESDMVAEVIDNTTSRGRTIKFLYDGPDEDFYKALYSLGETPIPKEFIPRDTEAADKERYQTIYAQNIGAVAAPSAGLHFTKEVMKRLEIKGIDVAPVTLHVGLGTFRTVDVEDLTKHKMDSENFMVPAATAVVVNKALDANKRVCAIGTTSMRAMESSVSAHVRLKANEGWTDRFIFPPYDFKIANALLTNFHTPESTLMMMASAFAGHDLLIEAYKLAIKEKYKFFSYGDAMLII

SEQ ID NO: 67425 - protein, 408 aa, unidentified
  source 1..408: note = Hymenobacter amundsenii
  REGION 1..408: note = tr|A0A246FNX6|A0A246FNX6_9BACT S-adenosylmethionine:tRNA ribosyltransferase-isomerase; OS = Hymenobacter amundsenii OX=2006685 GN=queA PE=3 SV=1
MSDPRQLSIHDFTYQLPAGRIAPEPLPNRDQSRLLVYEAGTLRNQTFRELPGLLPADSLLVFNDTKVVRARLFARRPTGGAVELFCLEPVAPHQAIEPAMQQTGSCVWKCLVGNGRRWKEGPVTVEFEALGQPATLQAMRTEQHDGYALIAFSWEPAELPFAEVLRAAGHLPLPPYLNRADTDVDAVRYQTVYAAQEGAVAAPTAGLHFSEAVLAELAERRTLAARVTLHVGAGTFQPVKADQMAGHPMHGEPFSVSVDTLRRLRAHLAAGLPIIPVGTTSLRTLESLYWLGTRLLQRPAQLPAWHVEQWQPYESQQNTTTPDALDALLTQLELTGADTLHATTQLLIAPGYQFRLVRGLITNFHQPESTLLLLVAALIGPDWRQVYEHALAQNYRFLSYGDSSLLLP

SEQ ID NO: 67426 - protein, 410 aa, unidentified
  source 1..410: note = Hymenobacter aquaticus
  REGION 1..410: note = tr|A0A4Z0Q0N4|A0A4Z0Q0N4_9BACT S-adenosylmethionine:tRNA ribosyltransferase-isomerase; OS = Hymenobacter aquaticus OX=1867101 GN=queA PE=3 SV=1
MSAFPDPRLLSIHDFTYQLPAGRIAPEPLPNRDQSQLLVYRRGQVQDKRFTDLPAELPADALLVFNNTKVVRARLFCQKPTGGVVELFCLEPVAPHRSVELAMQQTGGCVWKCLVGNGKRWKSGPVQVEFSVNEHSAVLSAVRLETAEGYSLIQFSWQPAELPFAEILRAAGHLPLPPYLNRADTEVDAVRYQTVYAAHEGAVAAPTAGLHFSDAVFAELKSRGIATAELTLHVGAGTFQPVKADRMEGHPMHAEPISVNAALLRQLLHHAPHPIIAVGTTSLRTLESLYWLGARLARQPTLSSPDFLVTQWQPYEGGPEVSMPEALQALLDYLERTGSDTIQATTQLLIAPGYAFRVVQGLVTNFHQPESTLLLLVAALIGPDWRRIYDHALAHDYRFLSYGDSSLLLP

SEQ ID NO: 67427 - protein, 349 aa, unidentified
  source 1..349: note = Hymenobacter aquaticus
  REGION 1..349: note = tr|A0A4Z0PTC4|A0A4Z0PTC4_9BACT S-adenosylmethionine:tRNA ribosyltransferase-isomerase; OS = Hymenobacter aquaticus OX=1867101 GN=queA PE=3 SV=1
MKLSEFKFDLPESLLAQHPAKTRDESRLMVLHRDSGKIEHRVFKDIIEYFNEGDVFVVNDTQVFPARLYGNKEKTGAKIEVFLLRELNKEIHLWDVLVDPARKIRVGNKLYFGESDMVAEVIDNTTSRGRTIKFLFDGSDEEFYKALNDLGETPLPREVITRDAEPADKERYQTIYAKNKGAVAAPSAGLHFTREVIKRLEIRGVDMVPVTLHVGLGTFRPVDVEDLTKHKMDSENFIVPAESAVVVNRALDAKKRVCAVGTTTMRALESSVSAHARLKENQGWTDKFIFPPHEFKIANSLLTNFHMPESTLMMMASAFAGHEFLIEAYQTAIKEKYKFFTYGDAMLIL

SEQ ID NO: 67428 - protein, 349 aa, Hymenobacter chitinivorans
  REGION 1..349: note = tr|A0A2M9AS42|A0A2M9AS42_9BACT S-adenosylmethionine:tRNA ribosyltransferase-isomerase; OS = Hymenobacter chitinivorans DSM 11115 OX=1121954 GN=queA; PE = 3 SV=1
MKLSEFKFDLPESLLAQHPAKTRDESRLMVLHRETGKIEHRVFKEIIEYFTDGDVFVLNDTQVFPARLYGNKEKTGAKIEVFLLRELNKEIHLWDVLVDPARKIRVGNKLYFGESDMVAEVIDNTTSRGRTIKFLFDGSDEEFYKALNDLGETPLPREVITRDAEPADKERYQTIYAKHKGAVAAPSAGLHFTREVMKRLEIKGVDVVPVTLHVGLGTFRPVDVEDLTKHKMDSENFIVPAESAVVVNRALDAKKRVCAVGTTTMRALESSVSAHARLKENQGWTDKFIFPPHEFKIANALLTNFHMPESTLMMMASAFAGHEFLIEAYQTAIKEKYKFFTYGDAMLIL

SEQ ID NO: 67429 - protein, 411 aa, Hymenobacter chitinivorans
  REGION 1..411: note = tr|A0A2M9AQJ3|A0A2M9AQJ3_9BACT S-adenosylmethionine:tRNA ribosyltransferase-isomerase; OS = Hymenobacter chitinivorans DSM 11115 OX=1121954; GN = CLV45_4649 PE=3 SV=1
MSATPDPRLLSIFDYTYELPAARIAPEPLPHRDQSQLLVYRAGAIADKRFTDLPAELPADALLVFNNTKVVRARLFCQKPTGGVVELFCLEPVAPHRSVELAMQQTGSCVWKCLVGNGKRWKTGPVEVAFSLQDTPAVLKAERLEAAEGYSLIQFSWQPAEVPFAEILRAAGHLPLPPYLNREDTDVDAVRYQTVYAAHEGAVAAPTAGLHFSDAVFADLKARGIATAELTLHVGAGTFQPVKAAQMEGHPMHAEPISVNAALLRQLLSHAPRPIIAVGTTSLRTLESLYWLGTRLVREPDSAKEPVFHVTQWQPYEEGAEVTLAAALQALLDYLVRTGSDTIQATTQLLIAPGYTFRIIRGLVTNFHQPESTLLLLVAALIGPDWRRVYEHALAHEYRFLSYGDSSLLLP

SEQ ID NO: 67430 - protein, 349 aa, unidentified
  source 1..349: note = Hymenobacter coccineus
  REGION 1..349: note = tr|A0A1G1THR4|A0A1G1THR4_9BACT S-adenosylmethionine:tRNA ribosyltransferase-isomerase; OS = Hymenobacter coccineus OX=1908235 GN=queA PE=3 SV=1
MKLHEFKFELPQELVATHPARNRDDSRLMVLNRATGTIEHRNFKDILDYFTEGDTFVLNDTKVFPARMYGNKEKTGATIEVFLLRELNKELRLWDVLVDPARKIRVGNKLYFGESDMVAEVIDNTTSRGRTIKFLFDGSDEDFRKALYELGETPIPKETLQRETEPADKERYQTIYAENIGAVAVPAAGLHFTREVMKRMEIKGIETAAVTLHVGLGTFRTVDVEDLTKHKTDSENFIVGPEACAIVNKALDAKKRVCAIGTTTLRAMESSVSANARMKPTQGWNDRFIFPPYEFKIANALLTNMHLPESTLIMITAAFAGYPLLMEAYKEAIKEKYRFFSYGDAMLIL

SEQ ID NO: 67431 - protein, 349 aa, Hymenobacter daecheongensis
  REGION 1..349: note = tr|A0A1M6IQ20|A0A1M6IQ20_9BACT S-adenosylmethionine:tRNA ribosyltransferase-isomerase; OS = Hymenobacter daecheongensis DSM 21074 OX=1121955; GN = queA PE=3 SV=1
MKLSEFKFDLPENLLAQHPAKNRDEARLMVLHRDSGKIEHRVFKDIIEYFGEGDAFVLNDTKVFPARLYGNKEKTGAKIEVFLLRELNKEIHLWDVLVDPARKIRVGNKLYFGESDMVAEVIDNTTSRGRTIKFLFDGPDEEFYKALHDLGETPLPREAITREAEPADKERYQTIYAKHTGAVAAPSAGLHFTREVMKRLEIKGVDVTSVTLHIGLGTFRPVDVEDLTKHKMDSENFIVPAEAVAVVNKALDAKKRVCAVGTTTMRALESSVSANSRLKENQGWTDRFIFPPYDFKIANALLTNFHMPESTLMMMTSAFAGHALLTEAYKLAIKEKYKFFSYGDAMLIL

SEQ ID NO: 67432 - protein, 410 aa, Hymenobacter daecheongensis
  REGION 1..410: note = tr|A0A1M6C8Z3|A0A1M6C8Z3_9BACT S-adenosylmethionine:tRNA ribosyltransferase-isomerase; OS = Hymenobacter daecheongensis DSM 21074 OX=1121955; GN = queA PE=3 SV=1
MSAFPDPRQLSIHDFTYQLPPERIAPEPLPDRDQSRLLVYRGGTITDQRFAQLPQVLPPDALLVFNDTKVVRARLFCQKPTGGLIELFCLEPVAPHRAIEPAMQQTGSCVWKCLVGNGKRWKTGPVTLEFMAEDQPATLTAERLEAAEGYSLIRFSWEPAALPFAEVLRGAGHLPLPPYLNRTDTAADAVRYQTVYAAHEGAVAAPTAGLHFSEAVLADLTRRGITEARVTLHVGAGTFQPVKANQMAGHAMHGEPFVVTTAVVRQLLAHAPRPVLAVGTTSLRTLESLYWLGAKLAQNPAATEETLHVSQWQPYETGPEVSTAAALQAVLDYLAQTGADALHATTQLLIAPGYRFRVAQGLITNFHQPESTLLLLVSALIGPDWRRVYDHALAHDYRFLSYGDSSLLLP

SEQ ID NO: 67433 - protein, 410 aa, Hymenobacter elongatus
  REGION 1..410: note = tr|A0A4Z0PLN5|A0A4Z0PLN5_9BACT S-adenosylmethionine:tRNA ribosyltransferase-isomerase; OS = Hymenobacter elongatus OX=877208 GN=queA PE=3 SV=1
MSAFPDPRLLSIHDYTYQLPASRIAPEPLPDRDQSRLLVYRGGEVQDHVFTDLPGELPADALLVFNNTKVVRARLFCQKPTGGAVELFCLEPVAPHRSVELAMQQTGSCVWKCLVGNGKRWKTGPVQVAFSWQESDALLTAERLEAADGYSLIQFSWQPAAVPFAEVLRAAGHLPLPPYLNRADTDVDAVRYQTVYAAHEGAVAAPTAGLHFSNAVFADLKNRGIATAELTLHVGAGTFQPVKAAHMEGHAMHGEPISVNAALLHHLLRHAPRPIIAVGTTSLRTLESLYWLGARLLLQPATNLTALHVTQWQPYEDGPAVTTEEALQALLAHLERTGSDTLEATTQLLIAPGYTFRLIRGLITNFHQPESTLLLLVAALVGPDWRRIYDHALAHDYRFLSYGDSSLLLP

SEQ ID NO: 67434 - protein, 349 aa, Hymenobacter elongatus
  REGION 1..349: note = tr|A0A4Z0PF82|A0A4Z0PF82_9BACT S-adenosylmethionine:tRNA ribosyltransferase-isomerase; OS = Hymenobacter elongatus OX=877208 GN=queA PE=3 SV=1
MKLSEFKFDLPENLLAQHPAKTRDESRLMVLHRDSGKIEHRVFKEIIEYFTEGDVLVLNDTQVFPARLYGNKEKTGAKIEVFLLRELNKEIHLWDVLVDPARKIRVGNKLYFGESDMVAEVIDNTTSRGRTIKFLFDGTDEEFYKALNDLGETPLPRDIITREAEPADKERYQTIYAKHKGAVAAPSAGLHFTREVMKRLEIKGVDVVPVTLHVGLGTFRPVDVEDLTKHKMDSENFIVSAESAVVVNRALDAKKRVCAIGTTSMRALESSVSAHNRLKENQGWTDKFIFPPHEFKIANTLLTNFHMPESTLMMMASAFAGHELLTEAYRLAIKEKYKFFTYGDAMLIL

SEQ ID NO: 67435 - protein, 349 aa, Hymenobacter gelipurpurascens
  REGION 1..349: note = tr|A0A212UGF1|A0A212UGF1_9BACT S-adenosylmethionine:tRNA ribosyltransferase-isomerase; OS = Hymenobacter gelipurpurascens OX=89968 GN=queA PE=3 SV=1
MKLSEFKFDLPENLLAQHPAKNRDESRLMVLHRDTGKIEHRIFKDIIEYFGEGDVFVVNDTKVFPARLYGNKEKTGAKIEVFLLRELNKEIHLWDVLVDPARKIRVGNKLYFGESDMVAEVIDNTTSRGRTIKFLFDGPDEEFYKALHDLGETPIPKEFIPRETEAADKERYQTIYAKNTGAVAAPSAGLHFTREVMKRLEIKGVEVAPVTLHVGLGTFRPVDVEDLTKHKMDSENFIVPAETATIVNRALDNKKRVCAIGTTSMRAMESSVSAHSRLKATEGWTDKFIFPPYEFKISNALLTNFHTPESTLMMMASAFAGHPLLIEAYQLAIKEKYKFFSYGDAMLIL

SEQ ID NO: 67436 - protein, 412 aa, Hymenobacter gelipurpurascens
  REGION 1..412: note = tr|A0A212U9F5|A0A212U9F5_9BACT S-adenosylmethionine:tRNA ribosyltransferase-isomerase; OS = Hymenobacter gelipurpurascens OX=89968 GN=queA PE=3 SV=1
MFVPVPPDPRQLSIHDFTYQLPPERIAPEPLANRDQSKLLLYQAGELTDRSFQELPGLLPSDSLLVFNDTKVVRARLFAHKPTGGIVELFCLEPVAPHKAIEPAMQQIESCIWKCLVGNGKRWKSGPVLLEFEANGQPATLTAERVEQGEGYALIRFSWQPSGLPFAEVLRAAGHLPLPPYLNRADTEVDAVRYQTVYAAHEGAVAAPTAGLHFSDAVLAELATLHIPSAHVTLHVGAGTFQPVKADNMLGHSMHGEPISVTAATLRQLLEHLPKPIIPVGTTSLRTLESLYWLGSRLLQQTDSAAPEWHVGQWQPYEPGADVSAADALQALLQHLETTGEQELHATTQLLIAPGYKFRLVRGLITNFHQPESTLLLLVAALIGPSWRTVYEHALGHNYRFLSYGDSSLLLP

SEQ ID NO: 67437 - protein, 432 aa, unidentified
  source 1..432: note = Hymenobacter glacialis
  REGION 1..432: note = tr|A0A1G1SUN8|A0A1G1SUN8_9BACT S-adenosylmethionine:tRNA ribosyltransferase-isomerase; OS = Hymenobacter glacialis OX=1908236 GN=queA PE=3 SV=1
MNAPHPRDLSIHDFSYPLPPDRIAPEPLPDRAASRLLVSRNGQLTDQRFRDLPNELPAGALLIFNDTRVVRARLLARRPTGGQVELFCLEPVAPHRSLEMALQQTGSCTWRCLVGNGRRWKEGPVLLEFETADGQPATLWAERQVQEAGTALIDFRWEPAELPFAEVLRAGGHLPLPPYLGRPDTATDALRYQTVYAVAEGAVAAPTAGLHFTPELLAELAQQGFSTGHITLHVGAGTFQPVKAGRMADHPMHTEPIIVTAALLRQLLSHRPQPVLAVGTTSLRTLESLYWLGVGLLKPATVAAGEVAGQPELLVTQWQPYDMAAAADNISAEVALEALLKHLEANGTDTLQASTRLLIAPGYRFRLIDGLITNFHQPESTLLLLVAALLGPGWRTVYYHALTHEYRFLSYGDSSLLLPGTAEVSANSTERC

SEQ ID NO: 67438 - protein, 349 aa, unidentified
  source 1..349: note = Hymenobacter glacialis
  REGION 1..349: note = tr|A0A1G1TAU7|A0A1G1TAU7_9BACT S-adenosylmethionine:tRNA ribosyltransferase-isomerase; OS = Hymenobacter glacialis OX=1908236 GN=queA PE=3 SV=1
MKLHEFKFELPEELVALHPARNRDESRLMVVHRATGQIEHRAFKDILDYFVEGDVFAFNDTKVFPARLYGNKEKTGAKIEVFLLRELNKELRLWDVLVDPARKIRVGNKLYFGESDMVAEVIDNTTSRGRTIKFLFDGTDEEFRKALYELGETPIPKEVINRETEPADKERYQTIYAENIGAVAAPSAGLHFTREVMKRMEIKGIEPAFVTLHVGLGTFRTVDVEDLTKHKMDSENFVVTAPACDVVNKALDTKRRVCAVGTTTVRAMEASVSANARMKPTQGWIDRFIFPPHDFKIANALLTNFHMPESTLIMLAAAFAGYPLLMEAYKEAIKEKYRFFSYGDAMLIL

SEQ ID NO: 67439 - protein, 350 aa, unidentified
  source 1..350: note = Hymenobacter gummosus
  REGION 1..350: note = tr|A0A431TZC0|A0A431TZC0_9BACT S-adenosylmethionine:tRNA ribosyltransferase-isomerase; OS = Hymenobacter gummosus OX=1776032 GN=queA PE=3 SV=1
MKLSEFKFDLPESLVAQHPAKNRDESRLMVVHRDSGRIEHRSFKDIIEYFDDGDVFVVNDTKVFPARLYGNKEKTGAKIEVFLLRELNKELHLWDVLVDPARKIRVGNKLYFDDDSIMVAEVIDNTTSRGRTIKFLFDGPEEDFYKALHDLGETPLPKEVITRDPEAADKERYQTIFAKHTGAVAAPSAGLHFTREVIKRLEIKGVDMVPVTLHVGLGTFRPVDVEDLTKHKMDSENFIVPADSAVVVNKALDQKKRVCAVGTTTMRAMESSVSANARLKPTEGWTDRFIFPPYDFKIANALLTNFHLPESTLMMMASAFSGYDLLIEAYQTAIKEKYKFFSYGDAMLIL

SEQ ID NO: 67440 - protein, 409 aa, unidentified
  source 1..409: note = Hymenobacter gummosus
  REGION 1..409: note = tr|A0A3S0QID2|A0A3S0QID2_9BACT S-adenosylmethionine:tRNA ribosyltransferase-isomerase; OS = Hymenobacter gummosus OX=1776032 GN=queA PE=3 SV=1
MNTPVDPRLLSIQDYTYELPAGRIAPAPLPNRDASRLLVYRRGQIADHGFRELPAQLPPDALLVFNNTKVVRARLYLHKPSGGQIELFCLEPVAPQRAIEPAMQQTSECVWRCLVGNGKRWKTGPVQATFTTPDGQPATLEAERVAAEEGSSLIRFRWQPAELPFAQVLAGAGRLPLPPYLGREATGEDDERYQTVYAAHDGAVAAPTAGLHFTPAVLAELAGRGIQSAQLTLHVGAGTFQPVKAERMADHPMHAEPISATRQVLRQLLEHAPRPVIAVGTTSLRTLESLYWLGAALVRTGELPAQVQQWDPYQPGAGEVPTATALQALLTELERRGDDALQASTQLLIAPGYQFQVVQGLVTNFHQPESTLLLLVAALLGPDWRRVYEHALGHDYRFLSYGDSSLLLP

SEQ ID NO: 67441 - protein, 432 aa, unidentified
  source 1..432: note = Hymenobacter lapidarius
  REGION 1..432: note = tr|A0A1G1T2F3|A0A1G1T2F3_9BACT S-adenosylmethionine:tRNA ribosyltransferase-isomerase; OS = Hymenobacter lapidarius OX=1908237 GN=queA PE=3 SV=1
MNAPHPRDLSIHDFSYPLPPERIAPEPLPDRAASRLLVSRNGQLTDQRFRELPNELPADALLVFNDTRVVRARLLARRPTGGQVELFCLEPMAPHRSLEMALQQTGSSTWRCLVGNGRRWKEGPVLLEFETADGQPATLWAERQAQEAGTALIDFRWEPAALPFAEVLRAGGHLPLPPYLGRPDTATDALRYQTVYAAAEGAVAAPTAGLHFTPELLAELEQRGFSTGHITLHVGAGTFQPVKADRMADHPMHTEPIIVTAALLRQLLRHRPKPVLAVGTTSLRTLESLYWLGVGLLQPATTEGGEAAGQPELLVTQWQPYDMAAAAAGISTEVALEALLEYLEANGTDTLQANTRLLIAPGYRFRLIDGLITNFHQPESTLLLLVAALLGPGWRTVYNHALAHDYRFLSYGDSSLLLPGTEQTNAGIADHR

SEQ ID NO: 67442 - protein, 349 aa, unidentified
  source 1..349: note = Hymenobacter lapidarius
  REGION 1..349: note = tr|A0A1G1SVD2|A0A1G1SVD2_9BACT S-adenosylmethionine:tRNA ribosyltransferase-isomerase; OS = Hymenobacter lapidarius OX=1908237 GN=queA PE=3 SV=1
MKLHEFKFELPEELVALHPARNRDESRLMVVHRATGQIEHRSFKDILDYFVEGDVFAFNDTKVFPARLYGNKEKTGAKIEVFLLRELNKELRLWDVLVDPARKIRVGNKLYFGESDMVAEVIDNTTSRGRTIKFLFDGTDEEFRKALYELGETPIPKEVINRETEPADKERYQTIYAENIGAVAAPSAGLHFTREVMKRMEIKGIEPAFVTLHVGLGTFRTVDVEDLTKHKMDSENFMVTAPACEVVNKALDTKRRVCAVGTTTVRAMEASVSANARMKPTQGWIDRFIFPPHDFKIANALLTNFHMPESTLIMLAAAFAGYPLLMEAYKEAIKEKYRFFSYGDAMLIL

SEQ ID NO: 67443 - protein, 349 aa, unidentified
  source 1..349: note = Hymenobacter mucosus
  REGION 1..349: note = tr|A0A238YVX1|A0A238YVX1_9BACT S-adenosylmethionine:tRNA ribosyltransferase-isomerase; OS = Hymenobacter mucosus OX=1411120 GN=queA PE=3 SV=1
MKLTEFKFDLPENLLAQHPAKNRDESRLMVLHRDSGKIEHRVFKDIIEYFGDGDVFVVNDTKVFPARLYGNKEKTGAQIEVFLLRELNKEIHLWDVLVDPARKIRVGNKLYFGESDMVAEVIDNTTSRGRTIKFLFDGSDEEFYKALHDLGETPIPKEFIPRETEAADKERYQTIYAKHTGAVAAPSAGLHFTREVMKRLEIKGVDVVPVTLHVGLGTFRPVDVEDLTKHKMDSENFIVPADSATVVNRALDAKKRVCAVGTTSMRAMESSVSAHSRLKPTEGWTDRFIFPPYDFKIANALLTNFHTPESTLMMMAAAFAGYELLIEAYQTAIKEKYKFFSYGDAMLIL

SEQ ID NO: 67444 - protein, 410 aa, unidentified
  source 1..410: note = Hymenobacter mucosus
  REGION 1..410: note = tr|A0A238W2F9|A0A238W2F9_9BACT S-adenosylmethionine:tRNA ribosyltransferase-isomerase; OS = Hymenobacter mucosus OX=1411120 GN=queA PE=3 SV=1
MSVPAIPDPRQLSIHDFTYELPAERIAPEPLPDRDQSRLLYYQGGTIHDQQFQDLPSLLPPSTLLVFNDTKVVRARLFAQKPTGGIVELFCLEPVAPHRAIEPAMQQTGSCVWKCLVGNGKRWKSGPVQLEFAVQGQSATLTAERVEHGEGYALIRFSWEPATLPFAEVLRAAGHLPLPPYLNRADTDVDAVRYQTVYAAHEGAVAAPTAGLHFSEAVLAELRARHISSARVTLHVGAGTFQPVKAAQMAEHPMHGEPISVTAATLRQLLAHLPAPIIPVGTTSLRTLESLYWLGAYLAQHPNTPVWHVRQWQPYEAATEVSAAEALTALLHHLEANGVEELHATTQLLIAPGYQFRLVRGLVTNFHQPESTLLLLVAALVGPTWRQLYEHALTHNYRFLSYGDSSLLLP

SEQ ID NO: 67445 - protein, 420 aa, unidentified
  source 1..420: note = Hymenobacter nivis
  REGION 1..420: note = tr|A0A2Z3GNG3|A0A2Z3GNG3_9BACT S-adenosylmethionine:tRNA ribosyltransferase-isomerase; OS = Hymenobacter nivis OX=1850093 GN=queA PE=3 SV=1
MNPLTDQPTDPRQLAIQDFVYDLPPGRIAPEPLPDRAASRLLVNRGGVIEDRIFRDLPGELPAGALLVFNDTKVVRARLLAHRPTGGAVELFCLEPVAPHRALEPALAQMGACTWRCLVGNGRRWKEGPVAVEFIAPDGQPATLWATRQARESGGTALINFRWAPGALTFAEVLQGAGRLPLPPYLGRPDTDADAVRYQTVYAAHEGAVAAPTAGLHFTPELLAELQAQGFETAHVTLHVGAGTFQPVKATRMAEHPMHTEPLLVTAALLRQLLAHRPRPVIAVGTTSLRTLESLYWLGAALATGEAAGPALAVGQWQPYENAADVSVEAALGALLRHLEASGTNTLQASTRLLIGPGYRFRLVQGLITNFHQPESTLLLLVAALLGPGWRAVYDHALAHGYRFLSYGDSSLLLPGQDRI

SEQ ID NO: 67446 - protein, 418 aa, unidentified
  source 1..418: note = Hymenobacter nivis
  REGION 1..418: note = tr|A0A502H2S9|A0A502H2S9_9BACT S-adenosylmethionine:tRNA ribosyltransferase-isomerase; OS = Hymenobacter nivis OX=1850093 GN=queA PE=3 SV=1
MNQLPAPPTDPRQLAILDFVYDLPPGRIAPEPLPDRAASRLLVSRGGVIQDRTFRDLPTELPAGALLVFNDTKVVRARLLAHRLTGGAVELFCLEPVAPHRALEPALAQAEACTWRCLVGNGRRWKEGPVAVEFTAPGGQPATLWATRQAREAGGTALVDFHWAPGALTFAEVLQAAGHLPLPPYLGRPNTAADAVRYQTVYAAHEGAVAAPTAGLHFTPELLAELRTQGFETAHVTLHVGAGTFQPVKAARMAEHPMHTEPLLVTAALLRQLLAHRPRPVIAVGTTSLRTLESLYWLGAALAAGAPAGPALAVGQWQPYEEAPDVSAEEALGALLRHLEATGTDTLEASTRLLIGPGYRFRLVQGLVTNFHQPESTLLLLVAALLGPGWRAVYDHALAHDYRFLSYGDSSLLLPEQE

SEQ ID NO: 67447 - protein, 410 aa, Hymenobacter perfusus
  REGION 1..410: note = tr|A0A428KH62|A0A428KH62_9BACT S-adenosylmethionine:tRNA ribosyltransferase-isomerase; OS = Hymenobacter perfusus OX=1236770 GN=queA PE=3 SV=1
MSVLPPDPRQLSIHDFTYQLPPERIAPEPLPNRDQSKLLLYQQGSIADRQFQELPALLPAGSLLVFNDTKVVRARLFARRPTGGMVELFCLEPVAPYQAIEPAMQQTSSCVWKCLVGNGRRWKEGPVTLEFEALGQPALLTAERVEQHDGYALIRFSWEPAVLPFAEVLHGAGHLPLPPYLNRADTDVDAVRYQTVYAAHEGAVAAPTAGLHFSEAVLAELTERQISAARVTLHVGAGTFQPVKAEHMAAHAMHGEPISVTAATLRQLLAHLPQPIIPVGTTSLRTLESLYWLGARLVQHPDAEPIWHVSQWQPYEEQREIPVEDALTALLRQLETTGSDTLHATTQLLIAPGYQFRLVRGLITNFHQPESTLLLLVAALLGPGWRQVYQHALENNYRFLSYGDSSLLLS

SEQ ID NO: 67448 - protein, 342 aa, Hymenobacter perfusus
  REGION 1..342: note = tr|A0A428JXP5|A0A428JXP5_9BACT S-adenosylmethionine:tRNA ribosyltransferase-isomerase; OS = Hymenobacter perfusus OX=1236770 GN=EI293_20570 PE=3; SV = 1
MNIEEFRYTLAPENLEGTPREIRLGRRDLSRLLVVDRTSGALTHSTVFDLPKWLAPGDVLVLNNSKRIPGVLKGFTAVGGQVELRFVDLDSDNTGLCRIFPMHDVRPGERIELRRGGSVEVLATELTKYKLARVRPENDSLRELLKSQGIPILGFFYEGIWTAEHLNPYFATEEGSVESPLAGLHFTPELVESLKQHGVHVCFVTLHSVGSWLPFLESKVEEHEMWAESFCVPKETVNVVLNARKHGNKVVACGSTSLRALESAVGDDGQLTATSGRSKLYITPGYKFHVVDAYFTNFHQYQNSLIVLDAAFAGMENAMHTYREASSLHYSFYEFGDAVLYL

SEQ ID NO: 67449 - protein, 349 aa, Hymenobacter psychrophilus
  REGION 1..349: note = tr|A0A1H3HWG1|A0A1H3HWG1_9BACT S-adenosylmethionine:tRNA ribosyltransferase-isomerase; OS = Hymenobacter psychrophilus OX=651662 GN=queA PE=3 SV=1
MKLSEFKFELPENLVAQHPAKNRDESRLMVLHRDSGKIEHRSFKDILEYFDEGDVFVVNDTKVFPARMYGNKEKTGAQIEVFLLRELNTEIHLWDVLVDPARKIRVGNKLYFGESDMVAEVIDNTTSRGRTIKFLYDGPQEDFYKALYSLGETPIPKEFITRDTEAADKERYQTIYASNIGAVAAPSAGLHFTKEVMKRLEIKGIEVAPVTLHIGLGTFRTVDVEDLTKHKMDSENFVVPGTTAVVVNKALDTKKRVCAIGTTAMRAMESSVSAHVRLKANEGWTDRFIFPPYDFKIANALLTNFHTPESTLMMMASAFAGHDLLIEAYKLAIKEKYRFFSYGDAMLII

SEQ ID NO: 67450 - protein, 408 aa, Hymenobacter psychrophilus
  REGION 1..408: note = tr|A0A1H3FQF9|A0A1H3FQF9_9BACT S-adenosylmethionine:tRNA ribosyltransferase-isomerase; OS = Hymenobacter psychrophilus OX=651662 GN=queA PE=3 SV=1
MSDPRRLSIHDFTYQLPPERIAPEPLANRDQSKLLVYQQGLLADRTFRDLPALLPPDSLLVFNDTKVVRARLFAQRPTGGMVELFCLEPVAPHRAIEPAMQQTGACVWKCLVGNGRRWKDGPVTLEFEAHGQSATLRAERTEQHDGYALIAFNWEPAELPFAEVLRAAGHLPLPPYLNRPDTDVDAVRYQTVYAAHEGAVAAPTAGLHFSEAVLAELAERRTAAARVTLHVGAGTFQPVKAGQMADHPMHGEPFSVTADTLRRLYEHLAADRPIIPVGTTSLRTLESLYWLGARMVQQPAKLPAWHVSQWQPYEPGVEVSIQQSLEALLAQLALTGSDTLHATTQLLIAPGYRFRLVRGLITNFHQPESTLLLLVAALLGPDWRRVYEHALAHDYRFLSYGDSSLLLP

SEQ ID NO: 67451 - protein, 350 aa, Hymenobacter psychrotolerans
  REGION 1..350: note = tr|A0A1M6PP20|A0A1M6PP20_9BACT S-adenosylmethionine:tRNA ribosyltransferase-isomerase; OS = Hymenobacter psychrotolerans DSM 18569 OX=1121959; GN = queA PE=3 SV=1
MKLSEFKFELPEALLAQHPAKNRDESRLMVLHRDSGKIEHRVFKDIIEYFGEGDVFVVNDTKVFPARLYGNKEKTGAKIEVFLLRELNKEIHLWDVLVDPARKIRVGNKLYFDDEGIVVAEVIDNTTSRGRTIKFLFDGSDEEFYKALHNLGETPLPRESITRDAEPADKERYQTIYAKNTGAVAAPSAGLHFTREVMKRLEIKGVEIAPVTLHVGLGTFRTVDVEDLTKHKMDSENFIVPGSSAVIVNRALDAKKRVCAVGTTSMRAMESSVSANSRLKANEGWTDRFIFPPYDFKIANSLITNFHTPESTLMMMASAFAGHEFLIEAYQTAIKEKYKFFSYGDAMLIL

SEQ ID NO: 67452 - protein, 412 aa, Hymenobacter psychrotolerans
  REGION 1..412: note = tr|A0A1M6TZ33|A0A1M6TZ33_9BACT S-adenosylmethionine:tRNA ribosyltransferase-isomerase; OS = Hymenobacter psychrotolerans DSM 18569 OX=1121959; GN = queA PE=3 SV=1
MSTSLPADPRQLSIHDYTYQLPPERIAPEPLAQRDQSRLLVSRHGALHDLTFQELPAQLPPDALLVFNDTKVVRARLFCHKPTGGIIELFCLEPVAPHRAIEPAMQQTGACVWKCLVGNGKRWKSGPVTLEFENNGQPALLTAERQEAADGYSLIHFSWKPAELPFAEVLRGAGHLPLPPYLNREDTAVDAVRYQTVYAAHEGAVAAPTAGLHFSEQVLAELAQRGIQSARVTLHVGAGTFQPVKAERMEGHAMHGEPISVSRATLEQLLGHLPRPVVAVGTTSLRTLESLYWLGVQATQGQLSADVVPHVSQWQPYEPGSELPATEALQALLHFLAAQQLDTLHATTQLLIAPGYRFRVIGGLVTNFHQPESTLLLLVAALLGPGWRQVYEHALANGYRFLSYGDSSLLLP

SEQ ID NO: 67453 - protein, 409 aa, Hymenobacter rigui
  REGION 1..409: note = tr|A0A428KMN4|A0A428KMN4_9BACT S-adenosylmethionine:tRNA ribosyltransferase-isomerase; OS = Hymenobacter rigui OX=334424 GN=queA PE=3 SV=1
MSASASNPRQLSIHDFTYQLPPERIAPEPLPARDQSKLLLYQQGAISDRSFQELPGLLPSDSLLVFNDTKVVRARLFARRPTGGIVELFCLEPVAPHTAIEPAMQQTGNCVWKCLVGNGKRWKEGQITLEFEAQGQPALLTAERVEQREGYALIQFNWQPAQLSFAEVLRGAGHLPLPPYLNRADTDVDAIRYQTVYAAHEGAVAAPTAGLHFSDAVLADLEARRIASTRVTLHVGAGTFQPVKAESMDGHDMHGEAISVTADTLRHLLTHLPAPIIPVGTTSLRTLESLYWLGARLVQQPQAANWHVSQWQPYEEQPEVSAADAIRALLHHLETTGTEALQATTQLLIAPGYQFRLVRGLVTNFHQPESTLLLLVAALIGPDWRRVYEHALAHDYRFLSYGDSSLLLP

SEQ ID NO: 67454 - protein, 349 aa, Hymenobacter rigui
  REGION 1..349: note = tr|A0A428KSP8|A0A428KSP8_9BACT S-adenosylmethionine:tRNA ribosyltransferase-isomerase; OS = Hymenobacter rigui OX=334424 GN=queA PE=3 SV=1
MKLSEFKFDLPENLLAQHPAKNRDESRLMVLHRDSGKIEHRTFKDILEYFGEGDVFVVNDTKVFPARLYGNKEKTGAQIEVFLLRELNKEIHLWDVLVDPARKIRVGNKLYFGESDMVAEVIDNTTSRGRTIKFLFDGSDEEFYKALHDLGETPIPKDFITRETEAADKERYQTIYAKHTGAVAAPSAGLHFTREVMKRLEIKGVEVVPVTLHVGLGTFRTVDVEDLTKHKMDSENFIVPAESAVVVNKALDTKKRVCAIGTTSMRAMESSVSANSRLKPTEGWTDKFIFPPYDFKIANSLLTNFHTPESTLMMMASAFAGHELLIEAYQTAIKEKYKFFSYGDAMLIL

SEQ ID NO: 67455 - protein, 416 aa, Hymenobacter roseosalivarius
  REGION 1..416: note = tr|A0A1W1VVV0|A0A1W1VVV0_9BACT S-adenosylmethionine:tRNA ribosyltransferase-isomerase; OS = Hymenobacter roseosalivarius DSM 11622 OX=645990; GN = queA PE=3 SV=1
MSAFPDPRQLSIQDFTYELPPHRIAPEPLPHRDQSRLLVYRGGQISDQRFRNLSSELPPSALLVFNDTKVVRARLFCQKPTGGAVELFCLEPVAPHRAVEPAMQQTGSCVWKCLVGNGKRWKTGPVQLAFAVDDEPALLTAERREVADGYSLIQFSWEPAALPFAEVLRYAGHLPLPPYLNRADTDVDAVRYQTVYAAHEGAVAAPTAGLHFSDAVLADLSKHGFQTARVTLHVGAGTFQPVKAEHMAGHAMHDEPFVVEASVLRQLLEQAPQPIIAVGTTSLRTLESLYWLGARLTQQPDRMSVTGLHVTQWQPYEEGPLVTVAEALQALLRYVEGSGNTFLRATTQLLIAPGYEFRVVQGLVTNFHQPESTLLLLVAALIGPAWRRVYNHALAHEYRFLSYGDSSLLLPTEHKL

SEQ ID NO: 67456 - protein, 349 aa, Hymenobacter roseosalivarius
  REGION 1..349: note = tr|A0A1W1VK16|A0A1W1VK16_9BACT S-adenosylmethionine:tRNA ribosyltransferase-isomerase; OS = Hymenobacter roseosalivarius DSM 11622 OX=645990; GN = queA PE=3 SV=1
MKLSEFKFDLPENLLAQHPAKNRDESRLMVLHRDTGKIEHRIFKDIIEYFSDGDVFVMNDTKVFPARLYGNKEKTGAKIEVFLLRELNKESHLWDVLVDPARKIRVGNKLYFGESDMVAEVIDNTTSRGRTIKFLFDGPDDEFYKALHDLGETPLPREAITRDAEPADKERYQTIYAKHIGAVAAPSAGLHFTREVLKRLEIKGVETTAVTLHVGLGTFRPVDVEDLTKHKMDSENFIVPAEAATVVNKALDAKNRVCSVGTTTMRALESSVSAHNRLKANQGWTDRFIFPPYEFKIANTLLTNFHTPESTLMMMTAAFAGYDLLAEAYKVAIKEKYRFFSYGDAMLIL

SEQ ID NO: 67457 - protein, 408 aa, unidentified
  source 1..408: note = Hymenobacter rubripertinctus
  REGION 1..408: note = tr|A0A418R431|A0A418R431_9BACT S-adenosylmethionine:tRNA ribosyltransferase-isomerase; OS = Hymenobacter rubripertinctus OX=2029981 GN=queA PE=3; SV = 1
MSDPRQLSIHDFTYELPADRIAPEPLPSRDQSRLLVCERGIIEDRTFLELPGLLPADSLLVFNDTKVVRARLFARRPTGGLVELFCLEPVSPHRAIEPAMQQTQACVWKCLVGNGRRWKDGPVTVEFEAQGQPAVLRAKRVEQHEGYALIAFSWAPDGLPFAEVLRGAGHLPLPPYLNRADTDVDAIRYQTVYASQEGAVAAPTAGLHFSEAVLAELAERRTAAARVTLHVGAGTFQPVKARQMSDHPMHGEPISVTAETLSRLLAHLREGGPIIPVGTTSLRTLESLYWLGAGLVQRPALAPAWHVGQWQPYEPQTEVPAAAALAALLAQLELTGSDTLHATTQLLIAPGYRFRLVQGLITNFHQPESTLLLLVAALIGADWRRVYDHALAHHYRFLSYGDSSLLLP

SEQ ID NO: 67458 - protein, 349 aa, unidentified
  source 1..349: note = Hymenobacter rubripertinctus
  REGION 1..349: note = tr|A0A418QRS9|A0A418QRS9_9BACT S-adenosylmethionine:tRNA ribosyltransferase-isomerase; OS = Hymenobacter rubripertinctus OX=2029981 GN=queA PE=3; SV = 1
MKLSEFKFELPENLLAQHPAKNRDESRLMVLHRDSGKIEHRMFKDILEYFDEGDVFVVNDTKVFPARLFGNKEKTGAQIEVFLLRELNKEIHLWDVLVDPARKIRVGNKLYFGESDMVAEVIDNTTSRGRTIKFLYDGPDEDFYKALYNLGETPIPKDFISRDTEAADKERYQTIYAKNIGAVAAPSAGLHFTKEVMKRLEIKGIDVASVTLHVGLGTFRTVDVEDLTKHKMDSENFMVPAETATMVNKALDAKKRVCAIGTTSMRAMESSVSAHVRLKGNEGWTDRFIFPPYDFKIANALLTNFHTPESTLMMMASAFAGHELLIEAYKLAIKEKYKFFSYGDAMLII

SEQ ID NO: 67459 - protein, 349 aa, unidentified
  source 1..349: note = Hymenobacter sedentarius
  REGION 1..349: note = tr|A0A0U4C1H8|A0A0U4C1H8_9BACT S-adenosylmethionine:tRNA ribosyltransferase-isomerase; OS = Hymenobacter sedentarius OX=1411621 GN=queA PE=3 SV=1
MKLHEFKFELPEELVALHPARNRDESRLMVVHRATGQIEHRTFKDILDYFVEGDVMVLNDTKVFPARLYGNKEKTGAKIEVFLLRELNKELRLWDVLVDPARKIRVGNKLYFGESDMVAEVIDNTTSRGRTIKFLFDGTDEEFRKALYELGETPIPKEVINRETEPADKERYQTIYAEHIGAVAAPSAGLHFTREVMKRMEIKGVEPAYVTLHVGLGTFRTVDVEDLTKHKMDSENFIVTAPACEIVNKALDAKKKVCAVGTTTIRAMEASVSANARMKPTQGWIDRFIFPPHDFKIANCLLTNFHMPESTLIMLAAAFAGYPLLMEAYKEAIKEKYKFFSYGDAMLIL

SEQ ID NO: 67460 - protein, 420 aa, unidentified
  source 1..420: note = Hymenobacter sedentarius
  REGION 1..420: note = tr|A0A0U4BPY2|A0A0U4BPY2_9BACT S-adenosylmethionine:tRNA ribosyltransferase-isomerase; OS = Hymenobacter sedentarius OX=1411621 GN=queA PE=3 SV=1
MTSPHPRDLSIHDFTYPLPADRIAPEPLPDRAASRLLVSRHGQLSDKQFRDLSQELPAGSLLIFNDTRVVRARLLARRPTGGQVELFCLEPVAPHRSLELALQQTGQCTWRCLVGNGRRWKEGPVTLEFETADGQTATLWAERQAQEAGTALIDFRWEPASLPFAEVLRAGGHLPLPPYLGRTDTPADAIRYQTVYAAAEGAVAAPTAGLHFTPELLAELRAKGFDIGHVTLHVGAGTFQPVKADHMAGHPMHTEPILVTAALLRQLLAHRPLPVLAVGTTSLRTLESLYWLGVGLLHAHQADDTELAVTQWQPYDMAAAAASISPGMALEALLHHLQATGADTLQASTRLLIAPGYQFRLVDGLITNFHQPESTLLLLVAALLGPGWRDVYEHALSHGYRFLSYGDSSLLLPGTVMEGQ

SEQ ID NO: 67461 - protein, 408 aa, Hymenobacter sp.
  REGION 1..408: note = tr|A0A495VEW7|A0A495VEW7_9BACT S-adenosylmethionine:tRNA ribosyltransferase-isomerase; OS = Hymenobacter sp. YR204 OX=2135668 GN=queA PE=3 SV=1
MNANPRQLSIHDFTYQLPPERIAPEPLPQRDQSRLLVYRQGQLTDRRFYELPAELPAGSLLVFNDTKVVRARLFAHKPTGGIIELFCLEPVAPHRAIEPAMQQTGSCVWKCLVGNGKRWKSGPVLLEFMAHGKPATLTAERQEVADGYSLIQFSWEPAELPFAEVLRGAGHLPLPPYLNRPDTDVDAVRYQTVYAAQEGAVAAPTAGLHFSEEVLQELQAKGIETAHVTLHVGAGTFQPVKADRMAEHPMHAEPISVTPTLLRQLLTHNQGPVLAVGTTSLRTLESLYWLGVQLLQNPASADEALHVGQWQPYEPGSDILAAEALQALLQYLEKTGADVLNATTQLLIAPGYRFRIVQGLITNFHQPESTLLLLVAALVGPQWRQLYEHALSHDYRFLSYGDSSLLLP

SEQ ID NO: 67462 - protein, 349 aa, Hymenobacter sp.
  REGION 1..349: note = tr|A0A495VMC0|A0A495VMC0_9BACT S-adenosylmethionine:tRNA ribosyltransferase-isomerase; OS = Hymenobacter sp. YR204 OX=2135668 GN=queA PE=3 SV=1
MKLSEFKFDLPENLVAQHPAKTRDESRLMVLHRDSGKIEHRVFKDIIEYFDEGDVFVVNDTKVFPARLYGNKEKTGAKIEVFLLRELNKEIHLWDVLVDPARKIRVGNKLYFGESDMVAEVIDNTTSRGRTIKFLFDGTDEEFYKALHDLGETPLPRESITREAEPADKERYQTIYAKHTGAVAAPSAGLHFTREVMKRLEIKGVEVAAVTLHVGLGTFRAVDVEDLTKHKMDSENFVVPSETATIVNRALDRKKRVCAVGTTSMRAMESSVSANARLKATEGWTDKFIFPPYDFKIANCLLTNFHTPESTLMMLAAAFAGYDLLIEAYQTAIKEKYKFFSYGDAMLIL

SEQ ID NO: 67463 - protein, 349 aa, unidentified
  source 1..349: note = Hymenobacter swuensis
  REGION 1..349: note = tr|W8EZF5|W8EZF5_9BACT S-adenosylmethionine:tRNA ribosyltransferase-isomerase OS=Hymenobacter swuensis DY53; OX = 1227739 GN=queA PE=3 SV=1
MKLSEFKFDLPENLLAQHPAKNRDESRLMVLHRDSGKIEHRVFKDILEYFADGDVFVVNDTKVFPARLYGNKEKTGAQIEVFLLRELNKEIHLWDVLVDPARKIRVGNKLYFGESDMVAEVIDNTTSRGRTIKFLFDGSDEEFYKALHDLGETPIPKEFITRETEAADKERYQTIYAKNTGAVAAPSAGLHFTREVMKRLEIKGIEVTPVTLHVGLGTFRTVDVEDLTKHKMDSENFVVPAATATIVNKALDTKKRVCAIGTTSMRAMESSVSAHARLKANEGWTDRFIFPPYEFKIANALLTNFHTPESTLMMMASAFAGHELLIEAYQTAIKEKYKFFSYGDAMLIL

SEQ ID NO: 67464 - protein, 410 aa, unidentified
  source 1..410: note = Hymenobacter swuensis
  REGION 1..410: note = tr|W8FAJ2|W8FAJ2_9BACT S-adenosylmethionine:tRNA ribosyltransferase-isomerase OS=Hymenobacter swuensis DY53; OX = 1227739 GN=queA PE=3 SV=1
MSVLPPDPRQLSIHDFTYQLPPERIAPEPLPNRDQSKLLLYKQGSITDQQFQELPALLPTGSLLVFNDTKVVRARLFVRRPTGGMVELFCLEPVAPHQAIEPAMQQTGSCVWKCLVGNGRRWKKGPVTLEFEALGQPAVLTAERIEQHDGYALIRFSWEPATLPFAEVLHGAGHLPLPPYLNRADTDVDAVRYQTVYAAHEGAVAAPTAGLHFSEAVLAELKERQISAARVTLHVGAGTFQPVKAEHMAAHAMHGEPISVTAATLRQLQAHLPQPIIPVGTTSLRTLESLYWLGARLVQHPEAVPIWHVSQWQPYEEQREVTLEDALAALLRQLEITGSDTLHATTQLLIAPGYRFRMVRGLITNFHQPESTLLLLVAALLGPAWRQVYQHALANNYRFLSYGDSSLLLP

SEQ ID NO: 67465 - protein, 411 aa, unidentified
  source 1..411: note = Hymenobacter wooponensis
  REGION 1..411: note = tr|A0A4Z0MHB8|A0A4Z0MHB8_9BACT S-adenosylmethionine:tRNA ribosyltransferase-isomerase; OS = Hymenobacter wooponensis OX=1525360 GN=queA PE=3 SV=1
MFASAAPDPRQLSIHDFTYQLPPDRIAPEPLANRDQSRLLVYQAGQLEDRRFQELPTLLPPDSLLVFNDTKVVRARLFAHKPTGGLVELFCLEPVAPHTAIEPAMQQTGSCVWKCLVGNGKRWKTGPVLLDFTVDGQPATLTAERLEQGEGFAFIQFSWEPAHLPFAEVLRAAGHLPLPPYLNRPDTDVDAVRYQTVYAAHEGAVAAPTAGLHFSDSVLAELEARGVASAHVTLHVGAGTFQPVKADQMLGHPMHGEPISVTATTLRQLLEHWPRPILAVGTTSLRTLESLYWLGARLVQEPHAETKWHVGQWQPYEQTTEVPTEAALQALLAHLQATGTEEIHATTQLLIAPGYRFRLIKGLITNFHQSESTLLLLVAALVGPEWRHLYEHALENNYRFLSYGDSSLLLP

SEQ ID NO: 67466 - protein, 349 aa, unidentified
  source 1..349: note = Hymenobacter wooponensis
  REGION 1..349: note = tr|A0A4Z0MG55|A0A4Z0MG55_9BACT S-adenosylmethionine:tRNA ribosyltransferase-isomerase; OS = Hymenobacter wooponensis OX=1525360 GN=queA PE=3 SV=1
MKLSEFKFDLPENLLAQHPAKNRDESRLMVLHRDSGKIEHRVFKDIIEYFGEGDVFVVNDTKVFPARLYGNKEKTGAKIEVFLLRELNKEIHLWDVLVDPARKIRVGNKLYFGESDMVAEVIDNTTSRGRTIKFLFDGSDEEFYKALHDLGETPIPKEFIPRETEAADKERYQTIYAKHTGAVAAPSAGLHFTREVMKRLEIKGVDVVPVTLHVGLGTFRPVDVEDLTKHKMDSENFIVPADSAAVVNRALDAKKRVCAIGTTSMRAMESSVSAHSRLKPTEGWTDKFIFPPYDFKISNALLTNFHTPESTLMMMASAFAGHELLIEAYQLAIKEKYKFFSYGDAMLIL

SEQ ID NO: 67467 - protein, 357 aa, unidentified; identical to SEQ ID NO: 66548
  source 1..357: note = Hyphomicrobiaceae bacterium
  REGION 1..357: note = tr|A0A3R7TCH6|A0A3R7TCH6_9RHIZ S-adenosylmethionine:tRNA ribosyltransferase-isomerase; OS = Hyphomicrobiaceae bacterium TMED74 OX=1986774 GN=queA; PE = 3 SV=1
  VARIANT 43: note = Xaa can be any naturally occurring amino acid
  VARIANT 50: note = Xaa can be any naturally occurring amino acid
  VARIANT 81: note = Xaa can be any naturally occurring amino acid
  VARIANT 93: note = Xaa can be any naturally occurring amino acid
  VARIANT 240: note = Xaa can be any naturally occurring amino acid
  VARIANT 334: note = Xaa can be any naturally occurring amino acid
  VARIANT 357: note = Xaa can be any naturally occurring amino acid

SEQ ID NO: 67468 - protein, 370 aa, Hyphomicrobium denitrificans
  REGION 1..370: note = tr|D8JQL4|D8JQL4_HYPDA S-adenosylmethionine:tRNA ribosyltransferase-isomerase OS=Hyphomicrobium denitrificans (strain ATCC 51888 / DSM 1869 / NCIB 11706 / TK 0415) O X=582899 GN=queA PE=3 SV=1
MRTDLFDFELPDSAIALRPAEPRDSARLLVVHPVKGGCARDDAELSDKTVRDLPGLLNPGDALVFNDTRVIPAALSGVRTRGDVQAKVDFNLTKQVGDSSWRAFARPAKRLEVGDRVHFGHSGESCFLGALDATVSAKGEAGEVELAFDYSGSILDDAIRAVGVMPLPPYIALKRGADDRDRQSYQTVYAKNDGAVAAPTAGLHFTPELFAALDARGISRHFVTLHVGPGTFLPVKADDTSEHKMHSEWGEISAETAAALNETRARGGRIVAVGTTSLRVLESAAGDDGSIPAWSGDTSIFITPGYRFKAIDALMTNFHLPRSTLFMLVAAFSGLGTMRAAYGHAIHSGYRFYSYGDASLLFPADAEPST

SEQ ID NO: 67469 - protein, 369 aa, Hyphomicrobium denitrificans
  REGION 1..369: note = tr|N0B861|N0B861_9RHIZ S-adenosylmethionine:tRNA ribosyltransferase-isomerase OS=Hyphomicrobium denitrificans 1NES1 OX=670307 GN=queA PE=3 SV=1
MRTDLFDFELPDNAIALRPAEPRDSARLLVVHPVKGGCAHDDADLADKSVRDLPSLLNPGDALVFNDTRVIPAALAGMRIRGETQAKVDFNLTKQVNESSWRAFARPAKRLEVGDRVHFGHSGESCYLGALDATVSAKGEAGEVELAFDFSGDVLDDAIRTVGMMPLPPYIALKRGADDRDRQSYQTVYAKKDGAVAAPTAGLHFTPELLAALDARGISRHFVTLHVGPGTFLPVKTDDTDGHAMHSEWGEVSAATAAALNETRARGGRIVAVGTTSLRLLESAASENGTIAPWSGETSIFITPGYRFKAVDVLMTNFHLPRSTLFMLVAAFSGLGTMRAAYAHAIHSGYRFYSYGDASLLFPAKVPSS

SEQ ID NO: 67470 - protein, 366 aa, Hyphomicrobium facile
  REGION 1..366: note = tr|A0A1I7N2U8|A0A1I7N2U8_9RHIZ S-adenosylmethionine:tRNA ribosyltransferase-isomerase; OS = Hyphomicrobium facile OX=51670 GN=queA PE=3 SV=1
MRTDLFDFELPDSAIALYPAEPRDTARLLVVHPVQGSCARDDADLADRSVRDLPSLLRPGDALVFNDTKVIPAALTGVRIRGETRAKVDFNLTKRTGENSWRAFARPAKRLESGDRVHFGHSQDSCMLGALDATVSAKGEAGEVELAFDLTGAALDEAVKAVGLMPLPPYIALKRESDVRDRESYQTVYASKEGAVAAPTAGLHFTPELLAALDARGISRHFVTLHVGPGTFLPVKADDTDAHVMHSEWGEVSPETASALNDVKARGGRIVAVGTTSLRLLESAAKDDGAIAPWSGETAIFITPGYRFKAIDILMTNFHLPRSTLFMLVSAFAGLGTMRAAYGHAIRSGYRFYSYGDASLLFRTPG

SEQ ID NO: 67471 - protein, 373 aa, unidentified
  source 1..373: note = Hyphomicrobium nitrativorans
  REGION 1..373: note = tr|V5SFB2|V5SFB2_9RHIZ S-adenosylmethionine:tRNA ribosyltransferase-isomerase OS=Hyphomicrobium nitrativorans NL23 OX=1029756 GN=queA PE=3 SV=1
MRTDLFDFDLPEDLIALRPAEPRDGARMLVVDASGSPALADHAVRDLPDFLRPGDALVLNDTRVIPAALEGVRIRGEMRARVAFNLLQRVDGNRWRALARPAKRLQPGDRVRFGKDGEGMACLLDVLDATVAERRDGGEVELAFDLSGPDLDQAIHAQGEMPLPPYIAGRRAPDASDRTRYQTVYAAREGAVAAPTAGLHFTPELFAALEARGVSRHFVTLHVGAGTFLPVKVEDTATHKMHAEAGEVSAETAVALNAVRAAGGRIVAVGTTSLRLLESAAAEDGTIRPYAGETDIFITPGYRFRAVDLLMTNFHLPRSTLFMLVSAFAGLETMKAAYAHAVGSGYRFYSYGDASLLYPAPPASAVPYKDSHD

SEQ ID NO: 67472 - protein, 361 aa, Hyphomicrobium sp.
  REGION 1..361: note = tr|A0A258L1L9|A0A258L1L9_9RHIZ S-adenosylmethionine:tRNA ribosyltransferase-isomerase; OS = Hyphomicrobium sp. 32-62-53 OX=1970390 GN=queA PE=3 SV=1
MRTDLFDFELPEERIALYPLEPRDAARLLVVDPRAGGLRDLGVRDLPDLLEPGDALVFNDTRVIPAALDGVRVREGVTAKVAFNLIKRVDGTRWRAFARPAKRLEVGDRVRFGHANTSCLLGALDATVASRLDAGEVELAFDLTGDELDRAIAAVGEMPLPPYIALKRPPGEADRQSYQTMFAAKDGAVAAPTAGLHFTERLIAAIDARGIERHTVTLHVGAGTFLPVKAEDTAGHQMHSELGSIDATTAAALNAVRARGNRVVAVGTTSLRTLESAAADDGRLGAWAGETSIFITPGYRFRVTGALMTNFHLPRSTLFMLVSALSGLETMQAAYAHAIQHGYRFYSYGDACLLFPAAETG

SEQ ID NO: 67473 - protein, 367 aa, Hyphomicrobium sp.
  REGION 1..367: note = tr|F8J5W4|F8J5W4_HYPSM S-adenosylmethionine:tRNA ribosyltransferase-isomerase OS=Hyphomicrobium sp. (strain MC1) OX=717785 GN=queA PE=3 SV=1
MRTDLFDFVLPDASIALYPAEPRDSARLLVVHPVKGSCARDDADLEDKAIRDLPSLLQPGDALVFNDTKVIPAALSGVRARGDVRAKVDFNLTKRVSDNTWRAFARPAKRLEAGDRVRFGHGEDTCMLGALDATVAAKGEAGEVELAFDLSGAVLDEAIAAIGAMPLPPYIALKREPDARDRDTYQTIYADKDGAVAAPTAGLHFTPELFAALDARGISRHFVTLHVGAGTFLPVKADDTDGHKMHSEWGEVSPETAAALNEVRARGGRIVAVGTTSLRLLESAAREDGTIMPWSGETAIFITPGYRFKAIDVLMTNFHLPRSTLFMLVSAFSGLGTMRAAYGHAIHSGYRFYSYGDASLLFRDTGG

SEQ ID NO: 67474 - protein, 359 aa, Hyphomicrobium sulfonivorans
  REGION 1..359: note = tr|A0A109BJ25|A0A109BJ25_HYPSL S-adenosylmethionine:tRNA ribosyltransferase-isomerase; OS = Hyphomicrobium sulfonivorans OX=121290 GN=queA PE=3 SV=1
MRTDLFDFELPEDRIALRPATPRDSARLLSVPAGDVAFADLSVGDLPQLLQPGDALVFNDTRVIPASLSGVRQRGEYRSNVSLLLIERLAPDRWRTFARPAKRLQTGDRLQFGHGGEMCMLGALEGTVLSRGEGGEVDVAFDLSGPDLDAAIAAVGEMPLPPYIAGKRGVESTDRADYQTIYAARDGAVAAPTAGLHFTPELLAALEQRGVSSHFVTLHVGAGTFLPVKVEDTAEHKMHSEWGEVSAQTVQALNNVRANGGRIVAVGTTSLRLLESAAASGELQPFSDHTDIFITPGYRFRVVDVLMTNFHLPRSTLFMLVSAFAGRERMQAAYAHAIANDYRFYSYGDASLLMRAQHN

SEQ ID NO: 67475 - protein, 106 aa, unidentified
  source 1..106: note = Hyphomonadaceae bacterium
  REGION 1..106: note = tr|A0A0F2QRA0|A0A0F2QRA0_9RHOB S-adenosylmethionine:tRNA ribosyltransferase-isomerase (Fragment) OS=Hyphomonadaceae bacterium BRH_c29 OX=1629720; GN = VR75_02875 PE=3 S V=1
ARLNAARAAGYRAVPVGTTAMRTLESCVDTDGMIHAATGPTDIFLKPGDAVRATDALMTNFHLPGSSLFMLVCTLMGTDVMRAAYAHAIANDYRFYSYGDACLLLP

SEQ ID NO: 67476 - protein, 352 aa, unidentified
  source 1..352: note = Hyphomonadaceae bacterium
  REGION 1..352: note = tr|A0A354TY25|A0A354TY25_9RHOB S-adenosylmethionine:tRNA ribosyltransferase-isomerase; OS = Hyphomonadaceae bacterium OX=2026748 GN=queA PE=3 SV=1
MDLSAFDFELPDECIATRPAEPRDSCRLLCVHGDQITDRVFRDIGTELREGDLLIANDTRVVPALLFGVRPARDELSSDVDVQINLVAQKDDGVWECLGRPGRRLRPNDVIEFPAGLRGRILDKRPTGELVLEFSPKGEDFWSAVDAVGKMPIPPYIAKMRPADSKDHEDYQTVFADRAGSVAAPTAGLHFTDALVKQLGERGIGFERVTLHVGAGTFAGLSEESFKSGKLHEEWCEISEDVARKIAECKGRGGRVIAVGTTSLRTLESLADGQGSVLAASGDTDIFIQPGYKFQVVDGLITNFHLPKSSLFMLVSALMGTDVMQSAYAHAIKSGYKFYSYGDASLLMPRHD

SEQ ID NO: 67477 - protein, 351 aa, Hyphomonas adhaerens
  REGION 1..351: note = tr|A0A3B9GZV4|A0A3B9GZV4_9RHOB S-adenosylmethionine:tRNA ribosyltransferase-isomerase; OS = Hyphomonas adhaerens OX=81029 GN=queA PE=3 SV=1
MDLSQFQFDLPERLIALRPVEPQDSARLLVVHRDGRLEDASVRDLPRYLNAGDVLVFNDTRVLPAALKGVRPARDEIGQDVACDVNLTERIDAANWRALARPGRRLKDGDTIVFAEGFTAEITGHHDGGEIGLRFSLSGEDLTAALDRHGAMPLPPYIARRRPADAKDRETYQTEFAGEDAASVAAPTAGLHFTPRLLSECDAAGLVRETVRLHVGLGTFKPLEEKQLEENRLHQEWRRLTPETAARLNAARAGGSRVVPVGTTAMRTLESCVDTEGLLHPATGPTDIFLKPGDAVRGTDALVTNFHLPGSSLFMLVSALMGTEIMRAAYAHAIANEYRFYSYGDACLLLP

SEQ ID NO: 67478 - protein, 351 aa, Hyphomonas adhaerens
  REGION 1..351: note = tr|A0A069E168|A0A069E168_9RHOB S-adenosylmethionine:tRNA ribosyltransferase-isomerase; OS = Hyphomonas adhaerens MHS-3 OX=1280949 GN=queA PE=3 SV=1
MDLSQFQFDLPERLIALRPVEPQDSARLLVVHGDGRLEGASVRDLPRYLNAGDVLVFNDTRVLPAALKGVRPARDEIGQDVACDVNLTERIDAANWRALARPGRRLKDGDTIVFAEGFTAEITGHHDGGEIGLRFSLSGEDLTAALDRHGAMPLPPYIARRRPADAKDRETYQTEFAGEDAASVAAPTAGLHFTPRLLSECDAAGLVRETVRLHVGLGTFKPLEEKQLEENRLHQEWRRLTPETAARLNAARAGGGRIVPVGTTAMRTLESCVDTDGMLHPATGPTDIFLKPGDAVRGTDALVTNFHLPGSSLFMLVSALMGTEIMRAAYAHAIANEYRFYSYGDACLLLP

SEQ ID NO: 67479 - protein, 351 aa, unidentified
  source 1..351: note = Hyphomonas atlantica
  REGION 1..351: note = tr|A0A059DZD2|A0A059DZD2_9RHOB S-adenosylmethionine:tRNA ribosyltransferase-isomerase; OS = Hyphomonas atlantica OX=1280948 GN=queA PE=3 SV=1
MDLSQFQFDLPEERIALRPVEPQDSARLLVVHGDGRLEDAHIRDLPRFLSPGDVMVFNDTRVLPAALKGVRPARDETGQDVACDVNLTERIDARSWRALARPGRRLKEGDRIVFAEGFSAEITGRHEGGEIGLLFSLSGDELTAALDAHGAMPLPPYIARRRPADAKDRQTYQTEFAGDDAASVAAPTAGLHFTPRLLEEIDTAGIARETVRLHVGLGTFKPLEAAQLEANRLHEEWRRLTPEVAERLNAARSGGRRVVPVGTTAMRTLESCANADGMLRAATGPTDIFLKPGDAVRATDALVTNFHLPGSSLFMLVCALMGTDVMQAAYAHAIETEYRFYSYGDACLLLP

SEQ ID NO: 67480 - protein, 351 aa, unidentified
  source 1..351: note = Hyphomonas beringensis
  REGION 1..351: note = tr|A0A062UBF8|A0A062UBF8_9RHOB S-adenosylmethionine:tRNA ribosyltransferase-isomerase; OS = Hyphomonas beringensis OX=1280946 GN=queA PE=3 SV=1
MDISAFQFDLPERLIALRPVEPQDSARLLVVHGNGRLEDACVRDLPKYLSSGDVLVFNDTRVLPAALKGIRPARDETGQDVVCDVNLTERIDAETWRALARPGRRLKEGDVIQFADGFSAAIVNRMEGGEIELRFSLSGDALTAALDAYGAMPLPPYIARRRPADAKDRETYQTKFAGEDAASVAAPTAGLHFTPRLLAEIDAAGLSRQTVRLHVGLGTFKPLEEKHLQENRLHEEWRRLTHETASLLNQTRRDGHRVVPVGTTAMRTLESCVDTEGVLHAATGPTDIFLKPGDAVRATDALMTNFHLPGSSLFMLVCALMGTDIMQAAYAHAIENEYRFYSYGDACLLLP

SEQ ID NO: 67481 - protein, 351 aa, unidentified
  source 1..351: note = Hyphomonas chukchiensis
  REGION 1..351: note = tr|A0A062UMF6|A0A062UMF6_9RHOB S-adenosylmethionine:tRNA ribosyltransferase-isomerase; OS = Hyphomonas chukchiensis OX=1280947 GN=queA PE=3 SV=1
MNLADFHFDLPERLIALRPADPQDSARLLVVHGDGRLEDASVRDLPRYLTAGDVLVFNDTRVLPAALKGVRPARDEIGADVACDVNLVERIDDHTWRALARPGKRLKPGDPIHFAEGFRATITQRLDGGEIELAFDQSGPALEQALDAHGAMPLPPYIARRRPADASDRETYQTSFAGEDAASVAAPTAGLHFTPRLLAEIDAAGLARETVRLHVGLGTFKPLEEAQLAANRLHSEWRRLTPETATRLNAARAAGHRCVPVGTTAMRTLESCTTPDGTLAPATGPTDIFLKPGDAVRATDALVTNFHLPGSSLFMLVCALMGTDVMQAAYAHAIASDYRFYSYGDACLLLP

SEQ ID NO: 67482 - protein, 351 aa, Hyphomonas hirschiana
  REGION 1..351: note = tr|A0A059F909|A0A059F909_9RHOB S-adenosylmethionine:tRNA ribosyltransferase-isomerase; OS = Hyphomonas hirschiana VP5 OX=1280951 GN=queA PE=3 SV=1
MDLSVFQFDLPEDLIALRPAQPQDAARLLVVHGDGRLIDATVRDLPKYLNTGDVLVFNDTRVLPAALKGVRPARDGASRDVEVDVNLVERQGDCLWLALARPGRRLKDGDEIFFAEGFSARIASRREGGEILLDFNCEGEAMIAALDAHGAMPLPPYIARRRPADAEDRETYQTRFAGEDAASVAAPTAGLHFTPRLLAEVEAAGLKRETVRLHVGLGTFKPLEDRHLSENRLHEEWRRITPEVADRLNAARAAGARLVPVGTTAMRTLESCAGEDGQIHAATGPTDIFLKPGDPVRATDALMTNFHLPGSSLFMLVSALMGTSLMRAAYAHAIEEKYRFYSYGDACLLLP

SEQ ID NO: 67483 - protein, 351 aa, Hyphomonas jannaschiana
  REGION 1..351: note = tr|A0A059FC17|A0A059FC17_9RHOB S-adenosylmethionine:tRNA ribosyltransferase-isomerase; OS = Hyphomonas jannaschiana VP2 OX=1280952 GN=queA PE=3 SV=1
MDLSQFQFDLPERLIALRPAEPQDSARLLVVHGDGRLEDAGVRDLPRYLNKGDVLVFNDTRVLPAALKGIRPARDEAGQDVACDVNLTERVDGRNWRALARPGRRLKDGDTIVFAEGFTAEITGHHEGGEIGLRFSLEGEALTAALDKHGAMPLPPYIARRRPADAKDRETYQTEFAGEDAASVAAPTAGLHFTPRLLAECDAAGLVRETVRLHVGLGTFKPLEEKQLEENRLHQEWRRLTPETATRLNAARASGRRVVPVGTTAMRTLESCVDTEGVLHPATGPTDIFLKPGDAVRGTDALVTNFHLPGSSLFMLVSALMGTEVMRAAYAHAIANEYRFYSYGDACLLLP

SEQ ID NO: 67484 - protein, 96 aa, Hyphomonas johnsonii
  REGION 1..96: note = tr|A0A059FFV3|A0A059FFV3_9RHOB S-adenosylmethionine:tRNA ribosyltransferase-isomerase (Fragment) OS=Hyphomonas johnsonii MHS-2 OX=1280950; GN = HJO_14307 PE=3 SV=1
HRCVPVGTTAMRTLESCSRPDGTLAPATGPTDIFLKPGDAVRATDALVTNFHLPGSSLFMLVCALIGTDVMQAAYSHAIASDYRFYSYGDACLLLP

SEQ ID NO: 67485 - protein, 239 aa, Hyphomonas johnsonii
  REGION 1..239: note = tr|A0A059F9C7|A0A059F9C7_9RHOB S-adenosylmethionine:tRNA ribosyltransferase-isomerase (Fragment) OS=Hyphomonas johnsonii MHS-2 OX=1280950; GN = HJO_17344 PE=3 SV=1
MNLDAFQFDLPERLIALRPADPQDSARLLVVHGDGRLEDAHVRDLPRYLAPGDVLVFNDTRVLPAALKGVRPARDAVGADVACDVNLVERVDDHTWQALARPGKRLKPGDTIRFAEGFHAVITQRFEGGEIELAFSQSGAALERALDAHGAMPLPPYIARRRPADAADRDTYQTAFAGEDAASVAAPTAGLHFTPRLLSELDAAGLRRETVRLHVGLGTFKPLEEAQIEANRLHAEWRR

SEQ ID NO: 67486 - protein, 351 aa, Hyphomonas neptunium; identical to SEQ ID NO: 67482
  REGION 1..351: note = sp|Q0BYK7|QUEA_HYPNA S-adenosylmethionine:tRNA ribosyltransferase-isomerase OS=Hyphomonas neptunium (strain ATCC 15444) OX=228405 GN=queA PE=3 SV=1

SEQ ID NO: 67487 - protein, 354 aa, Hyphomonas oceanitis
  REGION 1..354: note = tr|A0A059GAK1|A0A059GAK1_9RHOB S-adenosylmethionine:tRNA ribosyltransferase-isomerase; OS = Hyphomonas oceanitis SCH89 OX=1280953 GN=queA PE=3 SV=1
MTPMNLADFHFDLPERLIALRPADPQDSARLLVVHGDGRLEDATVRDLPRYLTAGDVLVFNDTRVLPAALKGVRPARDEIGADVSCDVNLVERIDDHTWRALARPGKRLKAGDPIHFAEGFRATITQRLDGGEIELAFDQSGPALEQALDAHGGMPLPPYIARRRPADARDRETYQTSFAGDDAASVAAPTAGLHFTPRLLAEIDAAGLARETVRLHVGLGTFKPLEEAQLAANRLHAEWRRLTPETATHLNAARAAGHRCVPVGTTAMRTLESCTTPEGTLAPATGPTDIFLKPGDAVRATDALVTNFHLPGSSLFMLVCALMGTDVMQAAYAHAIASDYRFYSYGDACLLLP

SEQ ID NO: 67488 - protein, 351 aa, Hyphomonas polymorpha
  REGION 1..351: note = tr|A0A062VJT9|A0A062VJT9_9RHOB S-adenosylmethionine:tRNA ribosyltransferase-isomerase; OS = Hyphomonas polymorpha PS728 OX=1280954 GN=queA PE=3 SV=1
MDLSVFQFDLPEDLIALRPAEPQDSARLLVVHGDGRLEDATVRDLPKYLNAGDVLVFNDTRVLPAALKGIRPARDGASRDVEVDVNLVERQGDCVWLALARPGRRLKEGDEIHFAEGFTAMIGARREGGEILLNFNCEGEAMIAALDAHGAMPLPPYIARRRPADAKDRETYQTRFAGEEAASVAAPTAGLHFTPRLLGEVEAAGLKRETVRLHVGLGTFKPLEERHLAENRLHEEWRRVTPEVADRLNAARAAGARLVPVGTTAMRTLESCAGEDGHIHAASGPTDIFLKPGDPVRATDALMTNFHLPGSSLFMLVCALMGTDIMRAAYAHAIAEKYRFYSYGDACLLLP

SEQ ID NO: 67489 - protein, 351 aa, Hyphomonas sp.
  REGION 1..351: note = tr|A0A259LYK1|A0A259LYK1_9RHOB S-adenosylmethionine:tRNA ribosyltransferase-isomerase; OS = Hyphomonas sp. 34-62-18 OX=1970392 GN=queA PE=3 SV=1
MDLSVFQFELPEELIALRPVEPQDAARLLVVHGDGRLEDATVRDLPKYLKSGDLLVFNDTRVLPAALKGIRPARDGASRDVEVDVNLVERQGDCVWLALARPGRRLKEGDEIHFAEGFTATIGARREGGEILLNFNCEGEAMIAALEAHGAMPLPPYIARRRSADAKDRETYQTRFAGEEAASVAAPTAGLHFTPRLLAEVEAAGLMRETVRLHVGLGTFKPLEEKHLAENRLHEEWRRVTPEVADRLNAARAAGARIVPVGTTAMRTLESCAGEDGLIHAATGPTDIFLKPGDAIRATDALMTNFHLPGSSLFMLVCALMGTDIMRAAYAHAISEKYRFYSYGDACLLLP

SEQ ID NO: 67490 - protein, 157 aa, Hyphomonas sp.
  REGION 1..157: note = tr|A0A0F2RAF7|A0A0F2RAF7_9RHOB S-adenosylmethionine:tRNA ribosyltransferase-isomerase (Fragment) OS=Hyphomonas sp. BRH_c22 OX=1629710; GN = VR74_03055 PE=3 SV=1
PRLLSELDAAGLQRETVRLHVGLGTFKPLEAAQLEANRLHAEWRRLTPETAGRLNAARAAGHRCVPVGTTAMRTLESCATPSGTLVPATGPTDIFLKPGDAVSATDAIVTNFHLPGSSLFMLVCALMGTDVMQAAYAHAIASDYRFYSYGDACLLLP

SEQ ID NO: 67491 - protein, 341 aa, unidentified
  source 1..341: note = Hypnocyclicus thermotrophus
  REGION 1..341: note = tr|A0A4R7KZF0|A0A4R7KZF0_9FUSO S-adenosylmethionine:tRNA ribosyltransferase-isomerase; OS = Hypnocyclicus thermotrophus OX=1627895 GN=queA PE=3 SV=1
MNIKDFDYHLPEELIAQKPINPRDNSKLMIVDKRNKLIEHKIFKDIIDYLNPGDVLVRNSTKVIPARLIGKKETGGVLELFLLKRIDLNKWEVLLKPAKKLKLGQKLYIGKLNELVATLLEIKEDGNRIVEFKYNGIFEEILDKLGEMPLPPYIKEKLEEQDRYQTVYAQKGESVAAPTAGLHFTEELLKKIEDKGIEVVDIYLEVGLGTFRPVQTDNILEHKMHSEFFEIPEKSANIINKAKSEGRRIIAVGTTSVRTLESSVDENGKIISQKNNTEIFIYPGYKFKIVDALITNFHLPKSTLLMLVSAFSNKDFMMRTYKNAVENKYRFFSFGDAMFIK

SEQ ID NO: 67492 - protein, 349 aa, Hyunsoonleella jejuensis
  REGION 1..349: note = tr|A0A1H9CNR8|A0A1H9CNR8_9FLAO S-adenosylmethionine:tRNA ribosyltransferase-isomerase; OS = Hyunsoonleella jejuensis OX=419940 GN=queA PE=3 SV=1
MKLSHFGFDLPPELLAEYPSENRDESRLMVLNRKDQTIEHKQFKDLINYFDEDDVMILNNTKVFPARLYGNKEKTGARIEVFLLRELNEEQRLWDVLVDPARKIRIGNKLYFGEDESLVAEVIDNTTSRGRTLRFLYDGSYKEFRIKLNELGQTPLPKYIKRDVEPEDEERYQTIFAKNEGAVAAPTAGLHFSKHLLKRLEIKGINFAEVTLHVGLGTFNPVEVEDLSKHKMDSEEIKIGPEAVEIINRGIKERRRVCAVGTTAMRTIESAVSSSGLLNEMDGWTNKFIFPPYDFSIANCMVTNFHTPKSTLLMMISAFAGHDFVMEAYQEAIKEKYKFYSYGDAMLIL

SEQ ID NO: 67493 - protein, 349 aa, unidentified
  source 1..349: note = Hyunsoonleella pacifica
  REGION 1..349: note = tr|A0A4Q9FM79|A0A4Q9FM79_9FLAO S-adenosylmethionine:tRNA ribosyltransferase-isomerase; OS = Hyunsoonleella pacifica OX=1080224 GN=queA PE=3 SV=1
MKLSNFGFDLPAELLAEYPSENRDESRLMVLNRKEQTIEHKQFKDLINYFDEDDVMILNNTKVFPARLYGNKEKTGARIEVFLLRELNEEQRLWDVLVDPARKIRIGNKLYFGDDESLVAEVIDNTTSRGRTLRFLYDGSYKEFRIKLRELGQTPLPKYIKRDVEPEDEERYQTIFAKNEGAVAAPTAGLHFSKHLLKRLEIKGINFAEVTLHVGLGTFNPVEVEDLSKHKMDSEEIKIGPQAVDIINTGITNKKRVCAVGTTAMRTIESAVSSSGMLNEMDGWTNKFIFPPYDFSIANCMVTNFHTPKSTLLMMISAFAGHDFVMEAYQEAIKEKYKFYSYGDAMLII

SEQ ID NO: 67494 - protein, 349 aa, Hyunsoonleella sp.
  REGION 1..349: note = tr|A0A4Q9FBU9|A0A4Q9FBU9_9FLAO S-adenosylmethionine:tRNA ribosyltransferase-isomerase; OS = Hyunsoonleella sp. T58 OX=2527939 GN=queA PE=3 SV=1
MKLSNFGFDLPAELLAEYPSENRDESRLMVLNRKDETIEHKQFKDLIDYFDEDDVMILNNTKVFPARLYGNKEKTGARIEVFLLRELNEEQRLWDVLVDPARKIRIGNKLYFGDDESLVAEVIDNTTSRGRTLRFLYDGSYKEFRIKLNELGQTPLPKYIKREVEPEDEERYQTIFAKNEGAVAAPTAGLHFSKHLLKRLEIKGINFAEVTLHVGLGTFNPVEVEDLSKHKMDSEEIKIGPEAVDIINTGIKNRKRVCAVGTTAMRTIESAVSSSGMLNEMEGWTNKFIFPPYDFSIANCMVTNFHTPKSTLLMMISAFAGHDFVMHAYQEAIKEKYKFYSYGDAMLII

SEQ ID NO: 67495 - protein, 349 aa, unidentified
  source 1..349: note = Ichthyenterobacterium magnum
  REGION 1..349: note = tr|A0A420DFZ0|A0A420DFZ0_9FLAO S-adenosylmethionine:tRNA ribosyltransferase-isomerase; OS = Ichthyenterobacterium magnum OX=1230530 GN=queA PE=3; SV = 1
MKLSHFQFDLPEELLAERPSDLRDEARLMVLDRKNQTIEHKLFKDLIDYFEEDDVMILNNTKVFPARLYGNKEKTGARIEVFLLRELNEDQRLWDVLVDPARKIRIGNKLYFGEDDTLVAEVIDNTTSRGRTLRFLYDGSYTEFRRKLTELGETPLPKYIKRDVEPEDEERYQTIFAKNEGAVAAPTAGLHFSKHLLKRLEIKGVHLPEVTLHVGLGTFNPVEVEDLSKHKMDSEEAFIEQHAADIINNGINNKKRVCAVGTTAMRAIESSVSSNGRLNEYSGWTNKFIFPPYEFSIANCMITNFHTPKSTLLMMVSAFAGHDFMKKAYEEAVKEKYRFYTYGDAMLII

SEQ ID NO: 67496 - protein, 347 aa, unidentified
  source 1..347: note = Ichthyobacterium seriolicida
  REGION 1..347: note = tr|A0A1J1E1T9|A0A1J1E1T9_9FLAO S-adenosylmethionine:tRNA ribosyltransferase-isomerase; OS = Ichthyobacterium seriolicida OX=242600 GN=queA PE=3 SV=1
MKLSKFNYSLPKDLIAKWPSKERDECKLMVVHRDKGTIEHRLFKDIIEYFDEDDVMILNNTKVFPAKTHAVKEKTGAKIEVFLLRELNKQYKLWETLVDPARKIRIGNKLFFESGLVAEVVDNTTSGGRTLRFLHKGTYEEFRKELRDLGDTPIPKYMEREPDESDIERYQTVYSKHEGSIIAPAAGLHFSKNLLKRLEIKGINLAEITLHLGLPTFSVIEVEALPKHRMGSERVIIDVEACNIINKALDNERKVCAVGTTCIRSIESSVSTYRRLNPFDGWTNKFIYPPYDFSIANCMLTNFHMPKTALLTMVSAFAGDYPILDAYKEAIKHKYNFYSYGDCMLIL

SEQ ID NO: 67497 - protein, 356 aa, unidentified
  source 1..356: note = Ideonella sakaiensis
  REGION 1..356: note = tr|A0A0K8P1P9|A0A0K8P1P9_IDESA S-adenosylmethionine:tRNA ribosyltransferase-isomerase; OS = Ideonella sakaiensis (strain NBRC 110686 / TISTR 2288 / 201-F6) OX=1547922 G N=queA PE=3 SV=1
MATPTLTLSDFDFALPPELIAQQPSPERSGSRLLDGRGWPPGDHRFDALPDLLAPGDLLVFNDTRVIKARLLGHKDSGGAVEALVERVLPGHEVLAHLRASKSPKPGARLRFAAARDGGGPTFEAEVIGRAGPDDALFHLRFPDEPHALLERVGHVPLPPYITHADDADDERRYQTVFARRPGAVAAPTAALHFDEPLLAALAARGIGRATLTLHVGAGTFQPVRSEDLSAHRMHSEWFELPPATVDAIAATRAAGGRIVAVGTTSLRALESAARGGRLQAGAGETDIFIRPGFGFRVVDLLVTNFHLPKSTLMMLVSALAGHAHVMALYREAIARRYRFFSYGDAMLLARTGAAG

SEQ ID NO: 67498 - protein, 361 aa, Ideonella sp.
  REGION 1..361: note = tr|A0A437RRU7|A0A437RRU7_9BURK S-adenosylmethionine:tRNA ribosyltransferase-isomerase; OS = Ideonella sp. KYPY4 OX=1862385 GN=queA PE=3 SV=1
MKPSSSASTPAPAYTLHDFDFVLPPELIAQHPAAERSASRLLDGREAGAPPVDRVFRELPGLLRAGDLLVFNDTRVIKARLLGEKPTGGAAEALVERILPGEDVHEVWAHLRASKSPKAGSVVRFADAFDAEVLGRAGPEGALFHLRFPAPVLDLLARHGHVPLPPYITHDDNAEDEARYQTVFAAHPGAVAAPTAALHFDDAVLAALTAQGVGRAAVTLHVGAGTFQPVRVENIAEHRMHSEWFEVSEATVAAIEATRAAGGRVLAVGTTTLRALESAARAGGGALRPYRGDTDIFITPGFDFRVVDLLLTNFHLPKSTLMMLVSAFAGHAHIQALYRHAVESRYRFFSYGDAMLLQLAR

SEQ ID NO: 67499 - protein, 123 aa, Ideonella sp.
  REGION 1..123: note = tr|A0A523Q6F0|A0A523Q6F0_9BURK S-adenosylmethionine:tRNA ribosyltransferase-isomerase; OS = Ideonella sp. MAG2 OX=2083017 GN=C4K60_00430 PE=3 SV=1
MPEATVQAIHAARARGGRVVSVGTTALRALESAAAMTDPQGQARHIARACSGETEIFITPGFNFRVVDTLVTNFHLPKSTLMMLVSAFAGYEQVMALYRHAIEARYRFFSYGDAMVLNRSTHD

SEQ ID NO: 67500 - protein, 351 aa, Idiomarina abyssalis
  REGION 1..351: note = tr|A0A370Q9J6|A0A370Q9J6_9GAMM S-adenosylmethionine:tRNA ribosyltransferase-isomerase; OS = Idiomarina abyssalis OX=86102 GN=queA PE=3 SV=1
MSDTNHSTLKVSDFSFELPDELIARYPQEQRSASRLLSVKANENSIEHKHFKNIVDEINAGDLLVFNDTRVIPARLLGEKVSGGKVEVLVERLLDDHRVLAHVRANRAPKAGAELLLEGHVKITMLARHDALFELKFEHDETVLELLEQYGHMPLPPYIDRPDESSDKERYQTVYNREPGAVAAPTAGLHFDDEILQQLRDKGVNFAYVTLHVGAGTFQPVRVEDINDHVMHSEYAKVSAETCNAIKQTKASGGRVIAVGTTSVRSLESAAQASTNESIEPFFDDTDIFIYPGYEFKVVDSMITNFHLPESTLIMLVSAFVGRDLIMKAYNEAIKERYRFFSYGDAMLLQR

SEQ ID NO: 67501 - protein, 350 aa, unidentified
  source 1..350: note = Idiomarina aquatica
  REGION 1..350: note = tr|A0A4R6P682|A0A4R6P682_9GAMM S-adenosylmethionine:tRNA ribosyltransferase-isomerase; OS = Idiomarina aquatica OX=1327752 GN=queA PE=3 SV=1
MSRPETSLKVSDFNFDLPDELIARYPQQQRSASRLLRVDAATQHIGHNQFTDIIDLLEPGDLLIFNDTRVIPARLLGEKVSGGKVEVLVERILDDHRVLAHVRANRAPKADQQLRLEGEITATMIGRHDALFELRFEHQQTVLDLLEQYGHMPLPPYIDRPDEDSDKERYQTVYNKEPGAVAAPTAGLHFDNDILQQLQDKGVEFAYVTLHVGAGTFQPVRVDDIQQHVMHSEYAKVPEQTCEKIIATKAAGKRVIAVGTTSVRSVESAAAASQAKLIEPFFDDTDIFIYPGYEFRVIDGLITNFHLPESTLIMLVSAFAGRDLIMSAYQQAIDEKYRFFSYGDAMFLTC

SEQ ID NO: 67502 - protein, 348 aa, unidentified
  source 1..348: note = Idiomarina aquimaris
  REGION 1..348: note = tr|A0A432XEQ9|A0A432XEQ9_9GAMM S-adenosylmethionine:tRNA ribosyltransferase-isomerase; OS = Idiomarina aquimaris OX=641841 GN=queA PE=3 SV=1
MDVKDFTFVLPDELIARYPQPDRSASRMLRLDGATGAVEHSQFKAIVDELNEGDLLVFNDTRVIPARMLGEKVSGGKIEVLVERLLDDSRVLAHVRSNRAPKVGAKFLLEGAVEVEMLGREGALFELKFLTEAPVLEVLESYGHMPLPPYIDRPDEASDRERYQTVYNKKPGAVAAPTAGLHFDDAILAALAAKGVQFAYVTLHVGAGTFQPVRVDNIEEHHMHSEYAEVPQETVDAILATKAAGKRVVAVGTTSVRSLESAAQAALQQGELIAPFFSDTDIFIYPGYEFRIIDAMVTNFHLPESTLIMLISAFAGREQVLAAYAAAIEERYRFFSYGDAMFVTRKPS

SEQ ID NO: 67503 - protein, 348 aa, unidentified
  source 1..348: note = Idiomarina atlantica
  REGION 1..348: note = tr|A0A094IRK3|A0A094IRK3_9GAMM S-adenosylmethionine:tRNA ribosyltransferase-isomerase; OS = Idiomarina atlantica OX=1517416 GN=queA PE=3 SV=1
MNLKDFSFELPDELIARYPQADRSASRMLRLDGATGAVTHSQFKAIVDELNAGDLLVFNDTRVIPARLLGEKLSGGKVEVLVERLLDDQRVLAHVRSNRTPKAGARFLLEDAVEVEMLGRQDALFELKFLTEAPVLEVLESYGHMPLPPYIDRPDEASDRERYQTVYNKKPGAVAAPTAGLHFDDAILSALKAKGVQFAYVTLHVGAGTFQPVRVDNIEEHHMHSEYAEVPEETVAAILATQAAGHRVVAVGTTSVRSLESAAQAAKQKGEALAPFFSDTDIFIYPGYEFQVIDAMITNFHLPESTLIMLISAFAGRENVLNAYQQAIDEGYRFFSYGDAMFVTRQPS

SEQ ID NO: 67504 - protein, 266 aa, Idiomarina baltica
  REGION 1..266: note = tr|A0A348WQM8|A0A348WQM8_9GAMM S-adenosylmethionine:tRNA ribosyltransferase-isomerase (Fragment) OS=Idiomarina baltica OX=190892 GN=queA PE=3; SV = 1
KVEVLVERMLDDSRVLAHVRANRAPKPGAEFLLEGAVKATMLARHDALFELEFNHQETVLELLEAHGHMPLPPYIDRPDEESDKERYQTVYNREPGAVAAPTAGLHFDDAILQQLKDKGVEFGYVTLHVGAGTFQPVRVDSIEEHVMHSEYAKVDTKVCEQIRKVKQAGKRVIAVGTTSVRSLESAAQATDELIAPFFDDTDIFIYPGYEFKVIDGLVTNFHLPESTLIMLVSAFAGKELIMNAYQQAIDEKYRFFSYGDSMLILR

SEQ ID NO: 67505 - protein, 348 aa, Idiomarina donghaiensis
  REGION 1..348: note = tr|A0A432XFA9|A0A432XFA9_9GAMM S-adenosylmethionine:tRNA ribosyltransferase-isomerase; OS = Idiomarina donghaiensis OX=519452 GN=queA PE=3 SV=1
MNVKDFSFDLPDELIARYPQAERSASRLLCLNGTTGELAHEQFKDIIAHINSGDLLVFNDTRVIPARLLGEKVSGGKVEVLVERIINEQRVLAHLRSNRSPKPGAKMILEGAVEVEMVGRQDALFELQFNTAEPVLQVLEQYGHMPLPPYIDRPDEDSDRERYQTVYNKKPGAVAAPTAGLHFDDAILSELQAKGVEFAYVTLHVGAGTFQPVRVDNIEEHHMHSEYAEVPQETVDAIAAAHARGNRVIAVGTTSVRSLESAAQAAKQQGLSLQPFFADTDIFIYPGYEFQLVDAMITNFHLPESTLIMLVSAFAGRDHVLNAYQQAVQERYRFFSYGDAMFVTRTAR

SEQ ID NO: 67506 - protein, 349 aa, Idiomarina fontislapidosi
  REGION 1..349: note = tr|A0A432Y8G3|A0A432Y8G3_9GAMM S-adenosylmethionine:tRNA ribosyltransferase-isomerase; OS = Idiomarina fontislapidosi OX=263723 GN=queA PE=3 SV=1
MSYASDGLKVSDFSFDLPDELIARYPQQQRTASRMLRIFAEHNRIEHGQFVDIVEQLEPGDLLVFNDTRVIPARLLGEKTSGGKVEVLVERMLDDHRVLAHVRANRAPKPGAEFLLEGAVKATMLERHDALFELEFNHDETVLELLEAYGHMPLPPYIDRPDEDSDKERYQTVYNREPGAVAAPTAGLHFDDAILQQLKDKGVEFGYVTLHVGAGTFQPVRVDSIEEHVMHSEYAKVDAKVCEQIKQAKQAGKRVIAVGTTSVRSLESAAQATDELIAPFFDDTDIFIYPGYEFKVIDGLVTNFHLPESTLIMLVSAFAGKELIMNAYQQAIEQKYRFFSYGDSMLILR

SEQ ID NO: 67507 - protein, 348 aa, unidentified
  source 1..348: note = Idiomarina halophila
  REGION 1..348: note = tr|A0A432XS25|A0A432XS25_9GAMM S-adenosylmethionine:tRNA ribosyltransferase-isomerase; OS = Idiomarina halophila OX=1449799 GN=queA PE=3 SV=1
MDVKDFSFDLPDELIARYPQPERSASRLLVLDGATGSVNHDQFKAIVDHLQAGDLLVFNDTRVIPARMLGEKLSGGKVEILVERMLDDHRVLAHVRSNRAPKPGQRMRMEDAVEVEMLGREGALFELKFITEDKVLDVLEQHGHMPLPPYIDRPDEASDRERYQTVYNKKPGAVAAPTAGLHFDDAILAALQEKGVNFAYVTLHVGAGTFQPVRVDKIEEHHMHSEYAEVPAETVAAIKQTQANGGRVVAVGTTSVRSLESAAQAAVKEQRELVPFFADTDIFIYPGYKFQLIDAMITNFHLPESTLIMLISAFAGRDNVLGAYQQAIDNRYRFFSYGDAMFVTRQPS

SEQ ID NO: 67508 - protein, 348 aa, Idiomarina homiensis
  REGION 1..348: note = tr|A0A432XUG8|A0A432XUG8_9GAMM S-adenosylmethionine:tRNA ribosyltransferase-isomerase; OS = Idiomarina homiensis OX=364198 GN=queA PE=3 SV=1
MDVKDFTFALPDELIARYPQPDRSASRMLRLDGETGAVEHSQFKAIVDELEAGDLLVFNDTRVIPARMLGEKVSGGKIEVLVERLLDDQRVLAHVRSNRAPKPGAKFILEGKVDVEMVGREGALFELKFLTAAPVLEVLESYGHMPLPPYIDRPDEASDRERYQTVYNKKPGAVAAPTAGLHFDDAILTALKAKGVQFAYVTLHVGAGTFQPVRVDNIEEHHMHSEYAEVPQETVDAILATKAAGKRVVAVGTTSVRSLESAAQAALKSGQQLAPFFSDTDIFIYPGYEFQIIDAMVTNFHLPESTLIMLISAFAGREQVLNAYDQAIQERYRFFSYGDAMFVTRKPS

SEQ ID NO: 67509 - protein, 348 aa, unidentified
  source 1..348: note = Idiomarina indica
  REGION 1..348: note = tr|A0A1G6DI84|A0A1G6DI84_9GAMM S-adenosylmethionine:tRNA ribosyltransferase-isomerase; OS = Idiomarina indica OX=1159017 GN=queA PE=3 SV=1
MKVTDFQFELPDELIARYPQPERTASRLLHLDGTTGAIEHQQFKQILVHLKAGDLLVFNDTRVIPARLLGEKLSGGKVEVLVERILGEHRVLAHVRSNRAPKPGAKLLLEQAIEAEMIARHDTLFELEFNGPDTVLNLLERYGHMPLPPYIDRPDEASDRERYQTVYNRKPGAVAAPTAGLHFDDQLLQEIAAQGVEFAYVTLHVGAGTFQPVRVATLEEHQMHSEYVEVPAETVAAIAATRARGGRVIAVGTTSVRSLESAAQAALAQQQSLQPFFGDTDIFIYPGYQFQVVDAMVTNFHLPESTLIMLVSAFAGREHVLNAYNQAVQAGYRFFSYGDAMFVTRAGS

SEQ ID NO: 67510 - protein, 348 aa, Idiomarina insulisalsae
  REGION 1..348: note = tr|A0A432YCH3|A0A432YCH3_9GAMM S-adenosylmethionine:tRNA ribosyltransferase-isomerase; OS = Idiomarina insulisalsae OX=575789 GN=queA PE=3 SV=1
MDLKDFTFELPDELIARYPQPDRSASRMLRLDGATGAVEHSQFKAIVDELEAGDLLVFNDTRVIPARLLGEKVSGGKVEVLVERLLDEQRVLAHVRSNRAPKAGQKMLLEGAVEVEMIARQGALFELRFLTDAPVLEVLEQYGHMPLPPYIDRPDEASDRERYQTVYNKKPGAVAAPTAGLHFDAQILAALEAKGVKFAYVTLHVGAGTFQPVRVDKIEEHHMHSEYAEVPEETIAAIAATRAAGKRVVAVGTTSVRSLESAAQAAREKGETLAPFFSDTDIFIYPGYEFQIVDAMVTNFHLPESTLIMLISAFAGRENVLHAYEQAIAERYRFFSYGDAMFVTRKPS

SEQ ID NO: 67511 - protein, 351 aa, Idiomarina loihiensis
  REGION 1..351: note = sp|Q5QVL1|QUEA_IDILO S-adenosylmethionine:tRNA ribosyltransferase-isomerase OS=Idiomarina loihiensis (strain ATCC BAA-735 / DSM 15497 / L2-TR) OX=283942; GN = queA PE=3SV=1
MSDTNHSTLKVSDFSFELPDELIARYPQEQRSASRLLSVKANENSIEHKHFKNIVDEINAGDLLVFNDTRVIPARLLGEKVSGGKVEVLVERLLDDHRVLAHVRANRAPKAGAELLLEGHVKITMLARHDALFELKFEHDETVLELLEQYGHMPLPPYIDRPDESSDKERYQTVYNREPGAVAAPTAGLHFDDEILQQLRDKGVNSAYVTLHVGAGTFQPVRVEDINDHVMHSEYAKVSAETCNAIKQTKASGGRVIAVGTTSVRSLESAAQASTNESIEPFFDDTNIFIYPGYEFKVVDSMITNFHLPESTLIMLVSAFVGRDLIMKAYNEAIKERYRFFSYGDAMLLQR

SEQ ID NO: 67512 - protein, 351 aa, Idiomarina loihiensis
  REGION 1..351: note = tr|A0A349C5V9|A0A349C5V9_9GAMM S-adenosylmethionine:tRNA ribosyltransferase-isomerase; OS = Idiomarina loihiensis OX=135577 GN=queA PE=3 SV=1
MSDTNHSTLKVSDFSFELPDELIARYPQEQRSASRLLSVKASENSIEHKHFKNIVDEINAGDLLVFNDTRVIPARLLGEKVSGGKVEVLVERLLDDHRVLAHVRANRAPKAGAELLLEGHVKITMLARHDALFELKFEHDETVLELLEQYGHMPLPPYIDRPDESSDKERYQTVYNREPGAVAAPTAGLHFDDEILQQLRDKGVNFAYVTLHVGAGTFQPVRVEDINDHVMHSEYAKVSAETCNAIKQTKASGGRVIAVGTTSVRSLESAAQASTNESIEPFFDDTDIFIYPGYEFKVVDSMITNFHLPESTLIMLVSAFVGRDLIMKAYNEAIKERYRFFSYGDAMLLQR

SEQ ID NO: 67513 - protein, 348 aa, Idiomarina marina
  REGION 1..348: note = tr|A0A432YDG9|A0A432YDG9_9GAMM S-adenosylmethionine:tRNA ribosyltransferase-isomerase; OS = Idiomarina marina OX=502366 GN=queA PE=3 SV=1
MNVKDFSFELPDELIARYPQPERSASRLLCLNGTTGAVTHQTFKNIVDHIQAGDLLIFNDTRVIPARMLGEKVSGGKVEVLVERIIDEHRVLAHLRSNRSPKPGAKMILEGAVEVEMVGRQDALFELQFNTQEPVLNVLEQYGHMPLPPYIDRPDEDSDRERYQTVYNKKPGAVAAPTAGLHFDDAILAQLREKGAEFAYVTLHVGAGTFQPVRVDNIEEHHMHSEYAEVPEETVAAIAATRRRGGRVIAVGTTSVRSLESAAQAAKQNGEALQPFFSDTDIFIYPGYEFQVVDAMITNFHLPESTLIMLVSAFAGREHVLNAYSEAVHERYRFFSYGDAMFVTRTER

SEQ ID NO: 67514 - protein, 348 aa, Idiomarina maritima
  REGION 1..348: note = tr|A0A1I6HX20|A0A1I6HX20_9GAMM S-adenosylmethionine:tRNA ribosyltransferase-isomerase; OS = Idiomarina maritima OX=519453 GN=queA PE=3 SV=1
MNVKDFSFELPDELIARYPQPERSASRLLCLNGTTGTVAHETFKNIVAHIRPGDLLIFNDTRVIPARMLGEKVSGGKVEVLVERIIDEHRVLAHLRSNRSPKPGAKMILEGAVEVEMIGRQDALFELQFNTKEPVLNVLEQYGHMPLPPYIDRPDEDSDRERYQTVYNKKPGAVAAPTAGLHFDESILNQLREKGAEFAYVTLHVGAGTFQPVRVDNIEEHHMHSEYAEVPEVTIAAIEATRARGGRVIAVGTTSVRSLESAAQAAKQKGEPLQPFFSDTDIFIYPGYEFQVVDAMITNFHLPESTLIMLVSAFAGREHVLAAYAAAVQERYRFFSYGDAMFVTRTER

SEQ ID NO: 67515 - protein, 348 aa, Idiomarina maritima
  REGION 1..348: note = tr|A0A317Q9X5|A0A317Q9X5_9GAMM S-adenosylmethionine:tRNA ribosyltransferase-isomerase; OS = Idiomarina maritima OX=519453 GN=queA PE=3 SV=1
MNVKDFAFELPDELIARYPQPERSASRLLCLDGPTGQVQHQQFKQIVEQLQAGDLLVFNDTRVIPARLLGEKVSGGKVEVLVERIIDEHRAWVHLRSNRSPKAGARMILEGAVEVEMLGRNDALFELYFHTEQPLLEVLEQFGHMPLPPYIDRPDEASDKERYQTVYNKKPGAVAAPTAGLHFDETILQQLRAKGVEFAYVTLHVGAGTFQPVRVDNITEHHMHSEYAEVPEQTVAAIAATRARGGRVIAVGTTSVRSLESAAQAAKQAGTELAPFFADTDIFIYPGYEFQLVDAMITNFHLPESTLIMLVSAFAGQAQVMAAYAAAVAEKYRFFSYGDAMFVTRRTS

SEQ ID NO: 67516 - protein, 351 aa, unidentified
  source 1..351: note = Idiomarina piscisalsi
  REGION 1..351: note = tr|A0A432YRL5|A0A432YRL5_9GAMM S-adenosylmethionine:tRNA ribosyltransferase-isomerase; OS = Idiomarina piscisalsi OX=1096243 GN=queA PE=3 SV=1
MSENNPSSLKVSDFSFELPDELIARYPQEQRSASRLLQVNAESKSIGHKQFTDIVDALDSGDLLVFNDTRVIPARLLGEKVSGGKVEVLIERLLDEHRVLAHVRSNRSPKAGAELLLEGAVKVTMLARHDALFELKFEHEESVLDILEEYGHMPLPPYIDRPDESSDKERYQTVYNREPGAVAAPTAGLHFDDDILQKLRNKGVNFAYVTLHVGAGTFQPVRVENINDHVMHSEYAKVSEETCNAIKQTKANGGRVVAVGTTSVRSLESAANASENGDIQPFFDDTDIFIYPGYEFKVVDSLITNFHLPESTLIMLVSAFAGRDLIMDAYQQAINEKYRFFSYGDAMLLQR

SEQ ID NO: 67517 - protein, 347 aa, unidentified
  source 1..347: note = Idiomarina planktonica
  REGION 1..347: note = tr|A0A1Y6FY40|A0A1Y6FY40_9GAMM S-adenosylmethionine:tRNA ribosyltransferase-isomerase; OS = Idiomarina planktonica OX=1323738 GN=queA PE=3 SV=1
MKLSDFDFQLPDALIARYPQQQRSASRLLCLTGTSGELRDKHFTDIVGELNQGDLLVFNDTRVIPARLLGEKASGGKVEVLVERVLDEHRVLAHVRSSRSPKTGQLLKLEQALDVEMLGRHDALFELKFLHDQPVLELLEQYGHMPLPPYIDRPDESSDKERYQTVYNKNPGAVAAPTAGLHFDEGVLSQLQQKGVEFAYVTLHVGAGTFQPVRVDRIEEHVMHSEYAVVPAETVAAIEQTRARGGRVVAVGTTSVRSLESAAQAARKANTELTAYTAETDIFIYPGYEFQVVDAMITNFHLPESTLIMLVSAFAGKQHVMAAYDHAVQQEYRFFSYGDAMFITKAV

SEQ ID NO: 67518 - protein, 351 aa, Idiomarina ramblicola
  REGION 1..351: note = tr|A0A432YY59|A0A432YY59_9GAMM S-adenosylmethionine:tRNA ribosyltransferase-isomerase; OS = Idiomarina ramblicola OX=263724 GN=queA PE=3 SV=1
MSDTNHSSLKVSDFSFELPDELIARYPQEQRSASRLLSVKSSENSVEHKHFKNIVDELNAGDLLVFNDTRVIPARLLGEKVSGGKVEVLVERLLDDHRVLAHVRANRAPKAGAELLLEGHVKITMLARHDALFELKFEHDETVLELLEQYGHMPLPPYIDRPDESSDKERYQTVYNREPGAVAAPTAGLHFDDDILQQLRDKGVNFAYVTLHVGAGTFQPVRVEDINDHVMHSEYAKVSAETCHAIKQTKASGGRVIAVGTTSVRSLESAAQASATEDIEPFFEDTDIFIFPGYEFKVVDSLITNFHLPESTLIMLVSAFAGRDLIMKAYNEAIKERYRFFSYGDAMLLQR

SEQ ID NO: 67519 - protein, 349 aa, Idiomarina salinarum
  REGION 1..349: note = tr|A0A094L6P6|A0A094L6P6_9GAMM S-adenosylmethionine:tRNA ribosyltransferase-isomerase; OS = Idiomarina salinarum OX=435908 GN=queA PE=3 SV=1
MNLKDFSFELPDELIAHYPQPERSASRMLCLDGPSGTVTHRQFRDITEQLQAGDLLVFNDTRVIPARMLGEKASGGGKVEVLVERILDDHRVLAHVRSNRSPKPGQRLLMEQAVEVEMLGRQDALFELRFHTDEPVLAVLEQYGHMPLPPYIDRPDEASDRERYQTVYNKKPGAVAAPTAGLHFDEQILQQLKDKGVEFAYVTLHVGAGTFQPVRVDNIEEHHMHSEYAEVPQETVAAIAATRARGGRVVAVGTTSVRSLESAAQAAKLAGTDLVPFFADTDIFIYPGYEFQVIDAMITNFHLPESTLIMLISAFAGREAVLRAYGEAVAHKYRFFSYGDAMFVTRKPS

SEQ ID NO: 67520 - protein, 346 aa, Idiomarina sediminum
  REGION 1..346: note = tr|A0A432Z0V3|A0A432Z0V3_9GAMM S-adenosylmethionine:tRNA ribosyltransferase-isomerase; OS = Idiomarina sediminum OX=431675 GN=queA PE=3 SV=1
MDVKDFSFELPDELIARYPQQDRSASRLLCLDGPTGAVTHSQFTAIVDALQPGDLLVFNDTRVIPARMLGEKVSGGKVEVLVERIIDEHRVLAHVRSNRAPKPGQRLLLEQAVEVEMLGRQDALFELRFLTDAPVLDVLEQYGHMPLPPYIDRPDEASDRERYQTVYNKKPGAVAAPTAGLHFDDTILAALAAKGVNFAYVTLHVGAGTFQPVRVDSIEDHHMHSEYAEVPQEAVDAIHATKAAGGRVVAVGTTSVRSLESAAQAALKQGLPLAPFFADTDIFIYPGYQFQVIDAMITNFHLPESTLIMLVSAFAGREAVLGAYQQAIDNSYRFFSYGDAMFVTRR

SEQ ID NO: 67521 - protein, 349 aa, Idiomarina seosinensis
  REGION 1..349: note = tr|A0A432ZBE2|A0A432ZBE2_9GAMM S-adenosylmethionine:tRNA ribosyltransferase-isomerase; OS = Idiomarina seosinensis OX=281739 GN=queA PE=3 SV=1
MSQPESSFKVSDFNFDLPDELIARYPQQQRSASRLLAVDSRHQTIEHKQFVDIVDCLDAGDLLVFNDTRVIPARLLGEKLSGGKVEVLVERIIDEHRVLAHVRANRAPKTGQQLRLENAITATMIARHDALFELEFEHQQGVLELLESYGHMPLPPYIDRPDEDSDKERYQTVYNKEPGAVAAPTAGLHFDEQILQQLQDKGVNFAYVTLHVGAGTFQPVRVDSIEEHVMHSEYAKVPEATCAAVKATKAAGKRVVAVGTTSVRSLESAARDSDSLIEPFFDDTDIFIYPGYQFQVVDSLITNFHLPESTLIMLVSAFSGRELIMDAYQQAIEQKYRFFSYGDAMLLSR

SEQ ID NO: 67522 - protein, 351 aa, Idiomarina sp.
  REGION 1..351: note = tr|A0A2D8HWT9|A0A2D8HWT9_9GAMM S-adenosylmethionine:tRNA ribosyltransferase-isomerase; OS = Idiomarina sp. OX=1874361 GN=queA PE=3 SV=1
MSNTNHSSLKVSDFSFELPDELIARYPQEQRSASRLLSVNANENSIAHKQFRSIVDELNAGDLLVFNDTRVIPARLLGEKVSGGKVEVLVERLLDDHRVLAHVRANRAPKAGAELLLEGHVKVTMLARHDALFELKFEHEETVLELLEQYGHMPLPPYIDRPDESSDKERYQTVYNREPGAVAAPTAGLHFDDEILQQLRDKGVNFAYVTLHVGAGTFQPVRVEDINDHVMHSEYAKVSAETCHAIKQTKAAGGRVVAVGTTSVRSLESAAQASPSEDIEPFFDDTDIFIFPGYEFKVVDSLITNFHLPESTLIMLVSAFAGRDLIMKAYNEAIKERYRFFSYGDAMLLQR

SEQ ID NO: 67523 - protein, 349 aa, Idiomarina sp.
  REGION 1..349: note = tr|A0A1S2SWR4|A0A1S2SWR4_9GAMM S-adenosylmethionine:tRNA ribosyltransferase-isomerase; OS = Idiomarina sp. MD25a OX=1889913 GN=queA PE=3 SV=1
MSYASDGLKVSDFSFDLPDELIARYPQQQRTASRMLRISAEDDRIEHGQFTDIVDQLEAGDLLVFNDTRVIPARLLGEKTSGGKVEVLVERMLDDSRVLAHVRANRAPKPGAEFLLEGSVKATMLARHDALFELEFNHQETVLELLEAHGHMPLPPYIDRPDEESDKERYQTVYNREPGAVAAPTAGLHFDDAILQQLKDKGVEFGYVTLHVGAGTFQPVRVDSIEEHVMHSEYAKVDAKVCDQIKKVKQAGKRVIAVGTTSVRSLESAAQATDELIAPFFDDTDIFIYPGYEFKVIDGLVTNFHLPESTLIMLVSAFAGKELIMNAYQQAIEEKYRFFSYGDSMLILR

SEQ ID NO: 67524 - protein, 348 aa, Idiomarina tainanensis; identical to SEQ ID NO: 67515
  REGION 1..348: note = tr|A0A368UYV2|A0A368UYV2_9GAMM S-adenosylmethionine:tRNA ribosyltransferase-isomerase; OS = Idiomarina tainanensis OX=502365 GN=queA PE=3 SV=1

SEQ ID NO: 67525 - protein, 348 aa, Idiomarina taiwanensis
  REGION 1..348: note = tr|A0A432ZCJ0|A0A432ZCJ0_9GAMM S-adenosylmethionine:tRNA ribosyltransferase-isomerase; OS = Idiomarina taiwanensis OX=337250 GN=queA PE=3 SV=1
MKLSDFNFDLPDELIARYPQAERSASRLLCLDGATGAVAHRQFTDILALLEPGDLMIFNDTRVIPARLLGEKVSGGKVEVLIERITGEGRVLAHVRSNRSPKEGQRLILEGQVEVEMKGRQDGLFELEFLTAEPVLEVLEKYGHMPLPPYIDRPDEESDRERYQTVYGKKPGAVAAPTAGLHFDDQLLAAIAAKGINTAYVTLHVGAGTFQPVRVDDVTTHQMHSEYAEVPAETIAAINAARAAGKRIIAVGTTSVRSLESAAQQAKADGTELKPYFAETDIFIYPGYEFQLVDAMITNFHLPESTLIMLVSAFAGREETLAAYAQAVAERYRFFSYGDAMFVTRKPS

SEQ ID NO: 67526 - protein, 352 aa, unidentified
  source 1..352: note = Idiomarina tyrosinivorans
  REGION 1..352: note = tr|A0A432ZS47|A0A432ZS47_9GAMM S-adenosylmethionine:tRNA ribosyltransferase-isomerase; OS = Idiomarina tyrosinivorans OX=1445662 GN=queA PE=3 SV=1
MSDNDSGLTVKDFSFDLPDELIARHPQAQRSASRLLHVDAQQQQIHHGQFTDIVDHLQAGDLLVFNDTRVIPARLLGEKTSGGKVEVLVERILDEHRVLAHIGSNRSPKPGQQLLLEGAVKVEMVERHDALFELRFLHDEPVLELLERYGHMPLPPYIDRPDEDSDKERYQTVYASKPGAVAAPTAGLHFDQDILQRLQDKGVEFAYVTLHVGAGTFQPVRVENIKDHHMHSEYAQVPEQTVEAVLRTRANGGRVVAVGTTSVRSLESAAQAAQQQNEVIAPFFADTDIFIYPGYEFKVVDALVTNFHLPESTLIMLVSAFSGKPLIMNAYQQAIAQRYRFFSYGDAMLLTR

SEQ ID NO: 67527 - protein, 348 aa, unidentified
  source 1..348: note = Idiomarina woesei
  REGION 1..348: note = tr|A0A0K6HAT8|A0A0K6HAT8_9GAMM S-adenosylmethionine:tRNA ribosyltransferase-isomerase; OS = Idiomarina woesei OX=1381080 GN=queA PE=3 SV=1
MNVKDFSFDLPDELIARYPQAERSASRLLCLNGTTGEVAHEQFKDIIAHINSGDLLVFNDTRVIPARLLGEKVSGGKVEVLVERIIDEHRVLAHLRSNRSPKPGAKMILEGAVEVEMVGRQDALFELQFNTAEPVLQVLEQYGHMPLPPYIDRPDEDSDRERYQTVYNKKPGAVAAPTAGLHFDDVILSELQAKGVEFAYVTLHVGAGTFQPVRVDNIEEHHMHSEYAEVSQETVDAIAAAQARGNRVIAVGTTSVRSLESAAQAAKQQGLSLQPFFADTDIFIYPGYEFQVVDAMITNFHLPESTLIMLVSAFAGRDHVLNAYQQAVNERYRFFSYGDAMFVTRTAR

SEQ ID NO: 67528 - protein, 344 aa, Idiomarina xiamenensis
  REGION 1..344: note = tr|K2LCB5|K2LCB5_9GAMM S-adenosylmethionine:tRNA ribosyltransferase-isomerase OS=Idiomarina xiamenensis 10-D-4 OX=740709 GN=queA PE=3 SV=1
MQVSDFNFELPDELIARYPQAERSASRLLHLQRADGQVNHRHFKDIIDCLNAGDLLVFNDTRVIPARLLGQKRSGGKVEVLVERLLDEHRVLAHVRSNRAPKEGQLLWLEDAVEVEMLARHETLFELRFNHPKPVLEVLEQYGHMPLPPYIDRPDEHSDRERYQTVYNRKPGAVAAPTAGLHFDDNILQQLRQKGVNFAYVTLHVGAGTFQPVRVDSIEQHQMHSEYAEVPAETVAAINATRANGGRVVAVGTTSVRSLESAAKDAAAKGQALQPYFADTDIFIYPGYEFAVVDAMITNFHLPESTLIMLVSAFAGYDAVMAAYAEAVRERYRFFSYGDAMFIG

SEQ ID NO: 67529 - protein, 351 aa, Idiomarina zobellii
  REGION 1..351: note = tr|A0A1G7Q7Z4|A0A1G7Q7Z4_9GAMM S-adenosylmethionine:tRNA ribosyltransferase-isomerase; OS = Idiomarina zobellii OX=86103 GN=queA PE=3 SV=1
MSENNPSSLKVSDFSFELPDELIARYPQEQRSASRLLQVNAESKSIEHKQFTDIVDTLSSGDLLVFNDTRVIPARLLGEKVSGGKVEVLIERLLDEYRVLAHVRSNRSPKAGAELLLEGAVKVTMLARHDALFELKFEHEEPVLDILEEYGHMPLPPYIDRPDESSDKERYQTVYNREPGAVAAPTAGLHFDDDILEKLRNKGVNFAYVTLHVGAGTFQPVRVENINDHVMHSEYAKVSEETCNAIKETKANGGRVVAVGTTSVRSLESAANASNSDNIEPFFDDTDIFIYPGYEFKVVDSLITNFHLPESTLIMLVSAFAGRDLIMDAYQQAINEKYRFFSYGDAMLLQR

SEQ ID NO: 67530 - protein, 349 aa, unidentified
  source 1..349: note = Idiomarinaceae bacterium
  REGION 1..349: note = tr|A0A2D6I8L7|A0A2D6I8L7_9GAMM S-adenosylmethionine:tRNA ribosyltransferase-isomerase; OS = Idiomarinaceae bacterium OX=1898113 GN=queA PE=3 SV=1
MSYASEGLKVSDFSFDLPDELIARYPQQQRTASRMLRVFAQQSRIEHGQFTDIVDQLEAGDLLVFNDTRVIPARLLGEKTSGGKVEVLVERMLDDSRVLAHVRANRAPKPGAEFLLEGAVKATMLARHDALFELEFNHQETVLELLEAHGHMPLPPYIDRPDEESDKERYQTVYNREPGAVAAPTAGLHFDDAILQQLKDKGVEFGYVTLHVGAGTFQPVRVDSIEEHVMHSEYAKVDTKVCEQIRKVKQAGKRVIAVGTTSVRSLESAAQATDELIAPFFDDTDIFIYPGYEFKVIDGLVTNFHLPESTLIMLVSAFAGKELIMNAYQQAIDEKYRFFSYGDSMLILR

SEQ ID NO: 67531 - protein, 350 aa, unidentified
  source 1..350: note = Idiomarinaceae bacterium
  REGION 1..350: note = tr|A0A0P7WS27|A0A0P7WS27_9GAMM S-adenosylmethionine:tRNA ribosyltransferase-isomerase; OS = Idiomarinaceae bacterium HL-53 OX=1298881 GN=queA PE=3; SV = 1
MKRQDFTFELPDELIARYPQPDRTSSRLLHLDGPTGAVSHYQFKNLLDLVAPGDLMVFNDTRVIPARLMGEKVSGGKVEILIERVLDEHRALAHVRSNRSPKPGARLLMENAIDVEVVGRDDALFELKFDPSKTLLEWLEAYGHMPLPPYIDRPDEATDKERYQTVYGTKPGAVAAPTAGLHFDDALLAALRDKGVEIAHVTLHVGAGTFQPVRVDNIHEHKMHSEYAEVPDSVVIAVKAAKARGGRVIAVGTTSVRSLESAAWKSPTGEIEPLSGETDIFIFPGYEFKVVDAMITNFHLPESTLIMLVSAFAGQKAVLSAYREAVQAQYRFFSYGDAMFVTRKLNALNV

SEQ ID NO: 67532 - protein, 346 aa, unidentified
  source 1..346: note = Ignatzschineria cameli
  REGION 1..346: note = tr|A0A2U2ARF4|A0A2U2ARF4_9GAMM S-adenosylmethionine:tRNA ribosyltransferase-isomerase; OS = Ignatzschineria cameli OX=2182793 GN=queA PE=3 SV=1
MLKLSDYDYHLPEELIAQFPPKVRGTSRLLVPYEGEIRDHRFDALVEYLRPGDRIVINNTRVLPARLFGQKETGGKVEIMVERLLTESEILAQIKASKALKPGQKVLIEGAPRLEMVARDENFFQLRTTDGTPIAQLLETYGHLPLPPYITRSDEELDQSRYQTVFNKEEGAVAAPTAGLHFTEELLDQLRAKGVDITEITLHVGAGTFQPIRSENLDEHQMHKEWISVPASAVEEIKATKAAGKRVIAIGTTAVRALESAALSGELRPFVGDTDIFIKPGFEFKVIDGLLTNFHLPKSTLLVLVSTLMGKARIEEIYQHAVKERYRFFSYGDSMLLVPELDRVKE

SEQ ID NO: 67533 - protein, 346 aa, Ignatzschineria indica
  REGION 1..346: note = tr|A0A2U2AI43|A0A2U2AI43_9GAMM S-adenosylmethionine:tRNA ribosyltransferase-isomerase; OS = Ignatzschineria indica OX=472583 GN=queA PE=3 SV=1
MLKLSDYDYHLPEELIAQFPPKVRGTSRLLVPYQGEIRDHSFDALVEYLRPGDRIVINNTRVLPARLFGQKETGGKVEIMVERLLTETDVLAQIKASKALKVGQKVLIEGVPRLEMVERDENFFQLRTIDGSAIAQLLESYGHLPLPPYITRSDEELDQSRYQTVFNKEEGAVAAPTAGLHFTEELLDQLRQKGVDITEITLHVGAGTFQPIRSENLDEHQMHKEWISVPESAVAEIKATKASGKRVIAIGTTAVRALESAALSGELRPFVGDTDIFIKPGFEFRVIDGLLTNFHLPKSTLLVLVSTLMGKKRIEEIYQHAVKSQYRFFSYGDSMLLVPELDRAKE

SEQ ID NO: 67534 - protein, 346 aa, Ignatzschineria sp.
  REGION 1..346: note = tr|A0A256CRL1|A0A256CRL1_9GAMM S-adenosylmethionine:tRNA ribosyltransferase-isomerase; OS = Ignatzschineria sp. F8392 OX=1980117 GN=queA PE=3 SV=1
MLKLSDYDYHLPEELIAQFPPKVRGTSRLLIPYHGEIRDHSFDALVEYLHPGDRIVINNTRVLPARLFGQKETGGKVEIMVERLLTETDILAQIKASKALKVGKKVLIEGEPRLEMVARDDHFFQLRTIDGSAIAQLLETYGHLPLPPYITRSDEELDQSRYQTVFNKEEGAVAAPTAGLHFTEELLDQLRQKGVDITEITLHVGAGTFQPIRSENLDEHQMHKEWISVPESAVEEIKATKAAGKRVIAIGTTAVRALESAALSGELRPFVGDTDIFIKPGFKFRVIDGLLTNFHLPKSTLLVLVSTLMGKKRIEEIYQHAVKSQYRFFSYGDSMLLVPELDRAKE

SEQ ID NO: 67535 - protein, 344 aa, Ignatzschineria ureiclastica
  REGION 1..344: note = tr|A0A2U2ACC1|A0A2U2ACC1_9GAMM S-adenosylmethionine:tRNA ribosyltransferase-isomerase; OS = Ignatzschineria ureiclastica OX=472582 GN=queA PE=3 SV=1
MLKLSDYDYHLPEELIAQFPPKVRGTSRLLVPKAGEIYDHTFEDLIDYLEPGDRIVINNTRVLPARVFAEKETGGKVEIMVERLVSETEVLAQIKASKALKPGQKVIIDGKPLLEMVDRDEAFFLLKTINGSPIATILETYGHLPLPPYITRSDEELDQSRYQTVFNKEEGAVAAPTAGLHFTAEFLERIKAKGIDVTEITLHVGAGTFQPIRTEDLNEHQMHKEWINVPQSAVDDIVATKAAGKRVIAIGTTAVRALESAALTGELKPFVGDTNIFIKPGFEFRVIDGLLTNFHLPKSTLLVLVSTLMGKSRIEEIYQHAVNARYRFFSYGDSMLLIPSLDQK

SEQ ID NO: 67536 - protein, 343 aa, unidentified
  source 1..343: note = Ignavibacteria bacterium
  REGION 1..343: note = tr|A0A2M7ML76|A0A2M7ML76_9BACT S-adenosylmethionine:tRNA ribosyltransferase-isomerase; OS = Ignavibacteria bacterium CG_4_10_14_3_um_filter_37_18; OX = 1974037 GN=queA PE= 3 SV=1
MKLSEFSYNLPKTHIAKYPMHPRDKSKMMVLNRETQTIENKTFSHIVDYMEEGDVLVLNDTRVIQARLYGKKEKTNAKIEVFLLRELNTREWIWDVIVDPARKVRIGNKIYFDDDLFCEVIDNTTSRGRTVRFNRPDVFTSIEKIGHTPLPPYIKREPEKADKENYQTVYAKTDGSVAAPTAGLHFTTKLLEKINKKGVEIVPVLLHIGLGTFQPVEVEDLTKHRMHSEYFDVPASTAEIINKAKKNGKNVFVVGTSAVRALESSVTADGYVRGNKGWTDKFIYPPYEFQIGTKLITNFHYPESTLMMLVAAFGEIEFVLKAYKKALKEQYRFLSYGDAMLII

SEQ ID NO: 67537 - protein, 345 aa, unidentified
  source 1..345: note = Ignavibacteria bacterium
  REGION 1..345: note = tr|A0A1G0VG57|A0A1G0VG57_9BACT S-adenosylmethionine:tRNA ribosyltransferase-isomerase; OS = Ignavibacteria bacterium RIFOXYB2_FULL_37_11 OX=1798448; GN = queA PE=3 SV=1
MKLSDFKYNLPKTAIAKHPANPRDKAKMMVMNRADQSIESYKFSDITDFVQKGDVVVVNKSKVMQARLFGKKERTNAKIEVFVLRELNKEENIWDVIVDPARKVRIGNRIYFNDKLWCEVIDNTTSRGRTVRFNEDAGDIFKAIEKIGHTPLPPYIKRDAVAKDREDYQTIFAEIDGSVAAPTAGLHFTPTLVKKLEKMGVKTVPVILHIGLGTFRPVEVEDLTKHRMDSEYFEVPSETAEVINTALKNKKNVFVVGTSTCRALESSVTADGLAKPNFGWTDKFIFPPYDFKVTKKLITNFHAPESTLLMLAGAFSGYDFLMKAYKKAQKDGYRFLSYGDAMLIL

SEQ ID NO: 67538 - protein, 345 aa, unidentified
  source 1..345: note = Ignavibacteriae bacterium
  REGION 1..345: note = tr|A0A2E0W7N6|A0A2E0W7N6_9BACT S-adenosylmethionine:tRNA ribosyltransferase-isomerase; OS = Ignavibacteriae bacterium OX=2026749 GN=queA PE=3 SV=1
MKLSDFKYNMPKTVIAKHPAEPRDIAKLMVMDKKTGDIEHKIFKDIVDYFSKGDVLVVNETKVMQARLYGKKERTNAKIEVFVLRELNRDENIWDVIVDPARKVRIGNRIYFNDKLWCEVIDNTTSRGRTVRFNEDAGDIYKAIEKLGQTPLPPYIKRDVVDKDREDYQTIFAKYDGSVAAPTAGLHFTPDLIKEIKAKGVKVVTVLLHIGLGTFRPVEVEDLTKHKMDSEYFEIPDESAKAINKALETKKNVFVVGTSATRALESSVTAEGFVKPNFGWTDKFIFPPYEFKITKKLITNFHQPESTLLMLAAAFGGYDNIMKNYKKAMKEGYRFLSYGDAMLII

SEQ ID NO: 67539 - protein, 394 aa, unidentified
  source 1..394: note = Ignavibacteriae bacterium
  REGION 1..394: note = tr|A0A2N1V4H1|A0A2N1V4H1_9BACT S-adenosylmethionine:tRNA ribosyltransferase-isomerase; OS = Ignavibacteriae bacterium HGW-Ignavibacteriae-4; OX = 2013811 GN=queA PE=3 SV=1
MLPNININDFNYELPENRIAKYPLENRSKSKLLVANSVANTIVHHTFEDVVDILPENTSLYINKTKVISGRFYMVKETGGRAELLLVEPIVPSNDPQIALQASKTAVWKAIIGGKRIKVGAILEDINGQLTAEVLEKEANEVKVRLTWEYGTFSELLLNSGVLPLPPYLNRESEEADKESYQTVFAKDDGSIAAPTAGLHFTDEILSKLKDKGIKIRELTLHVGPGTFLPVSTDNVNEHKMHSEMFSINKSLLEDLKQDLEEKRIIVCVGTTSIRTLESLFWAGNYITEFTETSLVNQWSPYGSDKVISPIESLNNLINSTKDGVLQGKTELIIVPGYEFRFVNGLFTNYHVPKSTLLLLVSAFVGDMWTDIYKSALDNNYRFLSYGDSSLLWR

SEQ ID NO: 67540 - protein, 344 aa, unidentified
  source 1..344: note = Ignavibacteriales bacterium
  REGION 1..344: note = tr|A0A2M7I2D8|A0A2M7I2D8_9BACT S-adenosylmethionine:tRNA ribosyltransferase-isomerase; OS = Ignavibacteriales bacterium CG12_big_fil_rev_8_21_14_0_65_30_8 OX=1974046 GN =queA; PE = 3 SV=1
MKLSDFKFNFPKTLIAKYPVSPRDKSKLLVLDKETEEMEDKKFSDVINYMSKGDVMVVNETRVFQARLYGKKEKTNAKIEVFLLRELNEEDCIWDVIVDPARKVRIGNKIYFNDKLWCEVIDNTTSRGRTVRFNQPGNVFAAIEKIGLTPLPPYIKREAEPADKDNYQTVFAKVDGAVAAPTAGLHFTHKLLNKIKKKGIKIVPIILHIGLGTFRPVEVEDLTKHKMDSEFYEITPKVAETINKAKISKNKIIVVGTSTARALESSITAAGMVKPSRGWTDLFLYPPYKFKIADILITNFHAPESTLVMLASAFAGYDFLIKSYKKAMKDKYRFLSYGDAMLIK

SEQ ID NO: 67541 - protein, 344 aa, unidentified
  source 1..344: note = Ignavibacteriales bacterium
  REGION 1..344: note = tr|A0A2M7ZH21|A0A2M7ZH21_9BACT S-adenosylmethionine:tRNA ribosyltransferase-isomerase; OS = Ignavibacteriales bacterium CG_4_9_14_3_um_filter_30_11; OX = 1974043 GN=queA P E=3 SV=1
MKLSDFKFNFPKSYIAKYPVSPRDKSNLLVLDRETEVMEDKKFTDVINYMSKGDVMVVNETRVFQARLYGKKEKTNAKIEVFLLRELNEEDSIWDVIVDPARKVRIGNKIYFNDKLWCEVIDNTTSRGRTVRFNQPGNVFAAVEKIGLTPLPPYIKREAEPADKENYQTVFARVDGAVAAPTAGLHFTPKLLNKIKEKGIKIVPIILHIGLGTFRPVEVEDLTKHKMDSEFYEISPKTSDTINKAKASKNKIIVVGTSATRALESSITASGVVKPSRGWTDMFIYPPYKFRIADIIITNFHAPESTLIMLASAFAGYDFLIKAYKKAMKDKYRFLSYGDAMLIK

SEQ ID NO: 67542 - protein, 344 aa, Ignavibacterium album
  REGION 1..344: note = tr|I0AGE5|I0AGE5_IGNAJ S-adenosylmethionine:tRNA ribosyltransferase-isomerase OS=Ignavibacterium album (strain DSM 19864 / JCM 16511 / NBRC 101810 / Mat9-16); OX = 9457 13 GN=queA PE=3 SV=1
MKLSDFSYNLPKNQIAKYPVSPRDKAKLLVLDRKTGEMQDKHFYDVVDYMEKGDVLVVNETKVFQARLYGKKEKTNAKIEVFLLRELNKEDCIWDVIVDPARKVRIGNKIYFDDNLWCEIIDNTTSRGRTVRFNQPGKVFQMIEKIGLTPLPPYIKRDPEPSDKQNYQTVYAKVDGSVAAPTAGLHFTEKLLQKIEKKGIHIVPVILHIGLGTFRPVEVEDLTKHRMDSEYYEIPERSAEIINKAIRDKNNVFVVGTSTCRALETSTTAEGFVKPARGWTDKFIYPPYTFKVTQKLITNFHASESTLLLLVAAFAGTDLIMKAYKYAVKNKYRFLSYGDAMLIL

SEQ ID NO: 67543 - protein, 344 aa, Ignavigranum ruoffiae
  REGION 1..344: note = tr|A0A1H8ZNI2|A0A1H8ZNI2_9LACT S-adenosylmethionine:tRNA ribosyltransferase-isomerase; OS = Ignavigranum ruoffiae OX=89093 GN=queA PE=3 SV=1
MYTTKDFDYDLPESLIAQTPLKNRAASRLLVLNRKNHQLTDGHFPDIKNYLKAGDALVVNQTRVIPARIFGTKPDTGGHLEVLLLHNIEGNRWETLVKPARRAKVGTEIVFGYQETLRAEIVEELDHGGRIIEFDYQGVFLEILEELGQMPLPPYIKEKLNDPERYQTVYAKENGSAAAPTAGLHFTDQLLAEIKAMGVEIIPLVLHVGLGTFRPVSVDNIADHKMHSEFYQLSHESAERINQVRQAGGDIYAVGTTTVRTLETIASDHQGEIVPSSGWTDIFITPGYEFKAVDHLITNFHLPQSTLMMLVSAFYDREHILSAYQHAVAEEYRFFSFGDAMLIY

SEQ ID NO: 67544 - protein, 340 aa, Ilumatobacter fluminis
  REGION 1..340: note = tr|A0A4R7I150|A0A4R7I150_9ACTN S-adenosylmethionine:tRNA ribosyltransferase-isomerase; OS = Ilumatobacter fluminis OX=467091 GN=queA PE=3 SV=1
MLLSDFDYDLPDERIAQTPIEPRDAARLLVDRGSDAPDHRRVRDLPEILRPGDLLVVNETKVIPARLSVQRATGGKAEVLMLEPLDGERRVWEAMVRPARKLKPGEQLLAPDGTPVVEMGERTEAGDTFTVTVLGSIDSLDVLADHGEMPLPPYITERLGDPDRYQTVYAREPGSAAAPTAGLHFTSELLDRLAERGVETAKVELVVGLDTFRPVMEDDPTEHRMHTERYRVPPQTMDRCLATRAAGGRVVCVGTTSVRALESAATRGELEGRTDIFIHGDYDWQLVDVLMTNFHLPKTTLLMMIHAFVGDRWRSLYDEALEHDYRFLSFGDAMLLDRHA

SEQ ID NO: 67545 - protein, 341 aa, Ilumatobacter sp.
  REGION 1..341: note = tr|A0A2E3TVL5|A0A2E3TVL5_9ACTN S-adenosylmethionine:tRNA ribosyltransferase-isomerase; OS = Ilumatobacter sp. OX=1967498 GN=queA PE=3 SV=1
MQLSDFDYVLPDERIAQVPITPRDAARLLVAGNPVQHRHVSDLPDLLQPGDLLVVNETRVIPARLKLSRSTGGAAEVLLLETIDPDRRVWEALIRPGKKLKVRECLFADGVPLIKIGERTAAGDTFFVNLLGDADPLQLLEQHGQMPLPPYITAVLDDPDRYQTVFAATPGSAAAPTAGLHFTPELFSRLAARGIDRVAVELIVGLDTFQPISTENPLDHPMHTERYRVPPETMEACLRTRKQGGRLVAVGTTAVRALESAAKTGELAGRTKLFIHEGFDWQLIDVLMTNFHLPKTTLLMMIDAFFGPGWRSLYAEALREEYRFLSFGDAMLIERSRSQHP

SEQ ID NO: 67546 - protein, 343 aa, Ilyobacter polytropus
  REGION 1..343: note = tr|E3HAN4|E3HAN4_ILYPC S-adenosylmethionine:tRNA ribosyltransferase-isomerase OS=Ilyobacter polytropus (strain DSM 2926 / CuHBu1) OX=572544 GN=queA PE=3 SV=1
MSTRLSDYDYNLPEELIGQTPAEPRDHSRLMLVNKKTGDIEHKRFYNIIDSLKEGDVLVRNSTRVIPARLMGRKDTGAILEVFLLKRKDINTWECLIGNAKRLKIGQKVFIGENNELVAELKEIKEDGNRILTFDYEGVFEEILDKLGQMPLPPYISEKLSEKERYQTVYAIKGESVAAPTAGLHFTEDLLEKIREKGVEIADLFLEVGLGTFRPVQTEDVLDHKMHEETYEVPEKSVEIINRAKEEGRRIIAVGTTSIRTLESSVDENGKLVAGKGTTDIFIYPGYKFKIVDALITNFHLPKSTLLMLVSAFSSRELIMDVYEKAVIKKYQFFSFGDAMFIY

SEQ ID NO: 67547 - protein, 340 aa, unidentified
  source 1..340: note = Imhoffiella purpurea
  REGION 1..340: note = tr|W9VHJ9|W9VHJ9_9GAMM S-adenosylmethionine:tRNA ribosyltransferase-isomerase OS=Imhoffiella purpurea; OX = 1249627 GN=queA PE=3 SV=1
MRRSDFHYDLPPELIAQRPAAERAGARLMTLDGPNGAPRDLMFRDLPLLLRPDDLLVFNNTRVMRARLYGHKESGGRVEVLLERLLGPREALAHIRSSKSPRSGTCIRLAEGSPLEVMGREGALYRLRACEKDFDALMSAYGHLPLPPYIQRSDDEADESRYQTLFARREGAIAAPTAGLHFDEAMLNRLADMGIERAEVTLHVGAGTFQPVRTEDLDRHEMHSEWLEVSEEVCGQIARTRSRGGRVVAVGTTCVRSLETAAADGSLRPFRGESRLFIRPGYAFRVVDAMITNFHLPESTLLMLVAAFSGYDPIMNAYRHAISRRYRFFSYGDAMFLTGT

SEQ ID NO: 67548 - protein, 348 aa, unidentified
  source 1..348: note = Immundisolibacter cernigliae
  REGION 1..348: note = tr|A0A1B1YTV9|A0A1B1YTV9_9GAMM S-adenosylmethionine:tRNA ribosyltransferase-isomerase; OS = Immundisolibacter cernigliae OX=1810504 GN=queA PE=3; SV = 1
MRRQDFTYALPEALIAQQPLAQRSASRLLHLPAGSAVRDRAFTDLPSLLRAGDLLLLNDTRVIRARLRGRRASGGRIEALIERLAGDREALVQLRGGKSLAAGARLEFAGGGQRVMASVGDREGEFFRLHFDLPLREWLDEVGELPLPPYIGRAAEALDEHRYQTIYGRHPGAVAAPTAGLHFDNDLLAQIQAAGVEVGYLTLHVGAGTFKPVRVDDLAEHRMHAERVVVPAQVCAQVEATRARGGRVIAVGTTVVRALESAAAGGALAPFDGETALFITPGYRFAVVDALLTNFHLPESTLLMLVCAFGGYAPVMAAYRHAVQQEYRFFSYGDAMFVERPVEPTACP

SEQ ID NO: 67549 - protein, 348 aa, unidentified
  source 1..348: note = Imperialibacter sp.
  REGION 1..348: note = tr|A0A5E7XS20|A0A5E7XS20_9BACT S-adenosylmethionine:tRNA ribosyltransferase-isomerase; OS = Imperialibacter sp. EC-SDR9 OX=2038371 GN=queA PE=3 SV=1
MKLSEFKFDLPAGLVALYPSENRDESRLMVLHRDSGKIEHKTFKDIVDYFDEGDNFIINDTKVFPARLYGNKEKTGAKIEVFLLRELNKELHLWDVLVDPARKIRVGNKLYFGDGDLVAEVIDNTTSRGRTIRFLYDGEGVDFYKMIDTLGETPLPKYIKRKAEPDDRERFQTIYAENVGAVAAPTAGLHFTKQLMKRLEIKGVEINPITLHIGLGTFRPVDVEDLTKHKMDSENFFVRQPTVDMVNKAIDEKKRVVAVGTTVMRSLESSVSASNRLKPNEGWTDKFIFPPYEFKICNALISNFHMPESTLLMMASAFGGYDLVMEAYRVAIKEKYRFFSYGDAMLIL

SEQ ID NO: 67550 - protein, 400 aa, unidentified
  source 1..400: note = Imperialibacter sp.
  REGION 1..400: note = tr|A0A5E7XX51|A0A5E7XX51_9BACT S-adenosylmethionine:tRNA ribosyltransferase-isomerase; OS = Imperialibacter sp. EC-SDR9 OX=2038371 GN=queA PE=3 SV=1
MPPQINVSEYTYDLPDERIAKFPLEDRSASKLLFYNRGSIEHLRFKSIPSLLPENTSLYFNNTKVIPARLAFQKPTGAVIEIFLLQPTLPSPVISVAMEAKSPVVWKCMIGNAKRWKEGILERNIKLEGATVKVEVKRLGTDEVQLSWNKSAARFVDVVDAIGKTPLPPYLHREAIENDKKTYQTVYSEKDGAVAAPTAGLHFTDEVIQQLRGKGIITNFLTLHVSAGTFQPIKTTTAEEHVMHSEQVIIRRENLEQLLVPERFNVAVGTTSMRTLESTYWYGVMLGRNPDADFLIPKLLPYVQQASLLSSKESIMNILNRMDALGVDELTGSTEIFIFPGYKFKLVNGLITNFHQPNSTLILLVAAFVGPDWRKIYNEALGTGYRFLSYGDSSLLIPGN

SEQ ID NO: 67551 - protein, 349 aa, unidentified
  source 1..349: note = Imtechella halotolerans
  REGION 1..349: note = tr|I0WKK1|I0WKK1_9FLAO S-adenosylmethionine:tRNA ribosyltransferase-isomerase OS=Imtechella halotolerans K1; OX = 946077 GN=queA PE=3 SV=1
MKLSHFNFDLPKELLAEYPSENRDEARLMVVDRKTKTIEHRLFKDIIEYFDEGDVMVLNDTKVFPARLYGNKEKTGARIEVFLLRELNAEQRLWDVLVDPARKIRIGNKLYFGDDESLVAEVIDNTTSRGRTLRFLYDGSYEEFRNKLTELGETPLPKYISRNVEPEDEERYQTIYAKHEGAVAAPTAGLHFSKHLLKRLEIKGIDFAEITLHVGLGTFNPVEVEDLSKHKMDSEELVITPRACDVVNKAKKGKGKVCAIGTTVMRGLESSVSSEKTLNPYEGWTNKFIFPPYDFSIADCMVTNFHTPKSTLLMMVSAFAGHDLIKKAYAEAVKEGYKFYSYGDAMLIL

SEQ ID NO: 67552 - protein, 418 aa, Indibacter alkaliphilus
  REGION 1..418: note = tr|S2DHI6|S2DHI6_9BACT S-adenosylmethionine:tRNA ribosyltransferase-isomerase OS=Indibacter alkaliphilus LW1 OX=1189612 GN=queA PE=3 SV=1
MQAKLNTQNKKRMSLLKSIENIRLTEYEYTLPESRIAKFPLEKRDESKLLQYGPKGISHHSFKELDQLIPSGSLMVFNNTKVIPARLIFQRETGAKIEIFLLKPILPSTVINEIMISTTSVTWECMIGNLKKWKEGETLKGFVEIQGREVVIQAELENRESRSVKFLWSDQNMPFVSIVEASGEVPLPPYLNRKATEEDKPRYQTVYSKKEGAVAAPTAGLHFTNEVLEKLKAKGVKEEFLTLHVSAGTFQPIKAEVITEHNMHSEQMVVSFESIENIKTQSEKIIAVGTTSMRTLESLYWFGVKLFNNLGNTFFIDKLFAYQEFDSLPSRKESFQAISEYMKKNNLSEITGSTEIFIMPGYDFKVCEGLVTNFHQPSSTLILLIAAFTNGSWRDIYTEALEKDYRFLSYGDSNLYWK

SEQ ID NO: 67553 - protein, 321 aa, Indibacter alkaliphilus
  REGION 1..321: note = tr|S2E6I9|S2E6I9_9BACT S-adenosylmethionine:tRNA ribosyltransferase-isomerase OS=Indibacter alkaliphilus LW1 OX=1189612 GN=A33Q_0108 PE=3 SV=1
MVVHRKTGEIEHRVFKDIVDYFGDGDVFVMNDTKVFPARLYGNKEKTGAKIEVFLLRELNQDLRLWDVLVDPARKIRVGNKLYFGDSDLVAEVIDNTTSRGRTIRFLFDGTDEEFYKTIDTLGETPILKEWIDRKVEAEDRERYQTIFAQNVGAVAAPTAGLHFTPHLLKRLELKGVEVTPITLHVGLGTFRQVDVEDLTKHKMDSENYSIPEKTVELVNEAIDNKKRVVSVGTTSLKTIESSVTANNRLKASSGWTDKFIIPPYEFKIANSLITNFHLPESTLLMTASAFGGYDLVMKAYQEAIKEKYRFFSYGDAMLIL

SEQ ID NO: 67554 - protein, 344 aa, Inhella sp.
  REGION 1..344: note = tr|A0A437LHI8|A0A437LHI8_9BURK S-adenosylmethionine:tRNA ribosyltransferase-isomerase; OS = Inhella sp. CCP-18 OX=2499851 GN=queA PE=3 SV=1
MPAQTYTLSDFDYELPPELIAQHPAAERSASRLLDARGPALVDRVFRELPHLLEARDLLVFNDTQVIKARLHGVKATGGSVEALIERLLPGAHEVWAHVRASKSPKPGSTVRFAEAFDAEVLGRCGPENGLFHLRFPADPLTLLDAHGHVPLPPYIEHEDSADDVRRYQTVFAQNPGAVAAPTAALHFDEALLAALPCPRANVTLHVGAGTFQPVRVENIAEHQMHSEWFKVPQATVDAIEACRARGGRVVAVGTTTLRALESAARGGRLQAGAAETDIFITPGFHFQVVDALITNFHLPKSTLMMLVSALAGYEHIRAVYGHAVAERYRFFSYGDAMLLARLG

SEQ ID NO: 67555 - protein, 342 aa, unidentified
  source 1..342: note = Inmirania thermothiophila
  REGION 1..342: note = tr|A0A3N1Y1W3|A0A3N1Y1W3_9GAMM S-adenosylmethionine:tRNA ribosyltransferase-isomerase; OS = Inmirania thermothiophila OX=1750597 GN=queA PE=3 SV=1
MRVADFDYELPEALIAQHPLPERSAARLLHVSAAGLADRRVADLPALLRPGDLLVLNDTRVLKARLLGRKESGGRVEVLVERIEAPRRALAHVRASRAPRPGTGIEVEGGGRLTVRGRAGGLFEVESDEPLEALLERCGRVPLPPYIRRAAEAEDLARYQTVWARRPGAVAAPTAGLHFDEALLAAVRARGVETAQVTLHVGAGTFQPVRVEEVERHAMHAERVVVDEAAVAAVARTRARGGRVVAVGTTVVRALESAAAAGALRPLRGETRLFIYPGHRFRVVDALLTNFHLPRSTLLMLVCAFAGRERVLAAYRHAVAQRYRFFSYGDAMFLDETARHAL

SEQ ID NO: 67556 - protein, 349 aa, Inquilinus limosus
  REGION 1..349: note = tr|A0A211ZS71|A0A211ZS71_9PROT S-adenosylmethionine:tRNA ribosyltransferase-isomerase; OS = Inquilinus limosus OX=171674 GN=BWR60_06470 PE=3 SV=1
MIAADRPDHPAARLCAVDADGRIRHLPRAALATVLTRGDLVVANDAATLPASLHGLHAATGRPVEVRLAGWVAPGDPTRFAALVFGAGDHRLRTEDRPAPPDLAAGDHLSLGPLNAVVERGLGHPRLVRLRFLGRRNRVLAGLARHGRPVQYAHVPEPLALWDVWTRIAADPVAFEPPSAGFALDWALLAAWRRHGIGFATLTHAAGISSTGDAALDRRLPFDEPYRIPEATATAVAQAKAAGRRVVAIGTTVVRALEAAAGEDGSVRAGDGVAANRIGPGTRLRVADALLTGMHQPGESHFELLRAFAPGGVLDGLPAALTAAGYRGHEFGDVMLIERQAREAGSVAA

SEQ ID NO: 67557 - protein, 346 aa, Inquilinus limosus
  REGION 1..346: note = tr|A0A211ZRM6|A0A211ZRM6_9PROT S-adenosylmethionine:tRNA ribosyltransferase-isomerase; OS = Inquilinus limosus OX=171674 GN=queA PE=3 SV=1
MRVDEFDFDLPRQLIADRPAEPREAARLLEVAADGLVDRHIADLPGRLRSGDLLVVNDTRVIPARLHGKRGLAGIEIMLHQPAEAGRWRAFARPAKKLKPGDVVRFADDFAATIVAKGEAGEVEVAFDDPAGLAAQLQRHGEIPLPPYIDRPDGPDERDRTDYQTVFAKYDGAVAAPTAGLHFTPPLLDALAARGIDTVRLTLHVGAGTFLPVKSDTVEGHVMHAERGVLTAEVADRINAVRAAGGRIVSVGTTSLRLLESAAAEDGTMRPFDGSTAIFITPGYRFRAVDLLVTNFHLPRSTLFMLVCAFAGTERMKQAYSHAISAGYRFYSYGDACLLHRSDKDD

SEQ ID NO: 67558 - protein, 349 aa, Inquilinus sp.
  REGION 1..349: note = tr|A0A554SIK7|A0A554SIK7_9PROT S-adenosylmethionine:tRNA ribosyltransferase-isomerase; OS = Inquilinus sp. KBS0705 OX=2578108 GN=queA PE=3 SV=1
MKLSQFKFNLPESLIAHSPSDIRDESRLMVLHRDSGKIEHKIFKDILDYFDDKDVMILNNTKVFPARMYGNKEKTGATIEVFLLRELNKELRLWDVLVDPARKIRVGNKLYFGDDDLLIAEVVDNTTSRGRTIRFLFDGTDEEFRRNVEILGETPLPKYIKRKATAEDKERYQTIFAKHEGAVAAPTAGLHFSRELMKRLELKGVEFAEVTLHVGLGTFRPVEVEDLTKHKMDSEQFIIEERQANIVNKAIERKSRICAVGTTSMRAVESAVSAGKTLKAANDWTSKFIFPPYDFSIANSMVTNFHTPESTLLMMVSAFGGYEHVMNAYEVAVKEKYRFYSYGDAMLII

SEQ ID NO: 67559 - protein, 362 aa, Insolitispirillum peregrinum
  REGION 1..362: note = tr|A0A1N7JYT7|A0A1N7JYT7_9PROT S-adenosylmethionine:tRNA ribosyltransferase-isomerase; OS = Insolitispirillum peregrinum OX=80876 GN=queA PE=3 SV=1
MRVDAFDFDLPRALIADRPARPRDSARLLDVTGAAFADRGVLDLPALLQPGDVMVFNDTRVIPARLFGTRRLSDAPAASDGPGSDGVARIEATLHQALGLDSWAAFVKGSKKLRPGQTVVFSDDDGFAAEVTSKGEAGEVTFRFNRSGADLVLALEKHGHLPLPPYMGREDDPQDRTDYQTVYARHDGAVAAPTAGLHFTDRLLEALDQRGIQRVHVTLHVGAGTFLPVKVDDTDDHRMHSEFGIISPEAAETIAHARTNGGRLVCVGTTSLRLIESAALPDGSVPAWSGSTDIFITPGYRFKAVDLLMTNFHLPRSTLFMLVSAFAGHARMQAAYAHAIAEGYRFYSYGDSSLLAREDLIR

SEQ ID NO: 67560 - protein, 341 aa, unidentified
  source 1..341: note = Intestinibacter bartlettii
  REGION 1..341: note = tr|W1UJE2|W1UJE2_9FIRM S-adenosylmethionine:tRNA ribosyltransferase-isomerase OS=Intestinibacter bartlettii DORA_8_9 OX=1403940 GN=queA PE=3 SV=1
MKTSDFNFDLPEELIAQVPIKDRTSSKLMVLDKETGEIEHRIFRDIIDYLNPGDCLVLNDTRVIPARLIGSKVETGGKIEFLLLKRTEDDTWETLVKPGKRAKIGARFSFGDGKLIAEVVGMGEDGARIVKFEYNGIFEEILDELGNMPLPPYITEKLDERERYQTVYSKHNGSAAAPTAGLHFTEELLTKIKEKGVDLAFVTLHVGLGTFRPVKVDDVDNHQMHSEFYMVTQEAADKINKAKANGNRVISVGTTSTRTIESVADENGIVKATSGWTNIFIYPGYKWKVIDNLITNFHLPESTLIMLVSSLAGKEHVLNAYNEAVKERYRFFSFGDAMFIK

SEQ ID NO: 67561 - protein, 341 aa, unidentified
  source 1..341: note = Intestinibacter bartlettii
  REGION 1..341: note = tr|B0A9R6|B0A9R6_9FIRM S-adenosylmethionine:tRNA ribosyltransferase-isomerase OS=Intestinibacter bartlettii DSM 16795 OX=445973 GN=queA PE=3 SV=1
MKTSDFNFDLPEELIAQVPIKDRTSSKLMVLDKETGEIEHRIFRDIIDYLNPGDCLVLNDTRVIPARLIGSKVETGGKIEFLLLKRTEDDTWETLVKPGKRAKIGARFSFGDGKLIAEVVGMGEDGARIVKFEYNGIFEEILDELGNMPLPPYITEKLDERERYQTVYSKHNGSAAAPTAGLHFTEELLAKIKEKGVDLAFVTLHVGLGTFRPVKVDDVDNHQMHSEFYMVTQEAADKINKAKANGNRVISVGTTSTRTIESVADENGIVKATSGWTNIFIYPGYKWKVIDNLITNFHLPESTLIMLVSSLAGKEHVLNAYNEAVKERYRFFSFGDAMFIK

SEQ ID NO: 67562 - protein, 351 aa, unidentified
  source 1..351: note = Intestinimonas butyriciproducens
  REGION 1..351: note = tr|A0A0S2W3Y3|A0A0S2W3Y3_9FIRM S-adenosylmethionine:tRNA ribosyltransferase-isomerase; OS = Intestinimonas butyriciproducens OX=1297617 GN=queA; PE = 3 SV=1
MRTRRKLEQYLKTSDFYYDLPQELIAQTPLERRDGSRLMVLDKKTGATAHRHFYDIPTLLRPGDCLVLNDSRVLPARLLGHREPTGGAVEVLLLTDRGDKVWECLVRPGKKVRPGARLSFGDGLLTAEVVETLEGGNRLIRFDYDGIFLEILERLGKMPLPPYIKEELSDPERYQTVYSKEVGSAAAPTAGLHFTRELLEQIQTMGVNLAYVTLHVGLGTFRPVKEEEITDHEMHAEYCAISRETADLINRTKKNGGRIICVGTTSCRTIESWAAEDGTLREAAGWTSIYIYPGYRFKVLDGLITNFHLPESTLVMLVSALAGREHILAAYEEAVREKYRFFSFGDAMFIG

SEQ ID NO: 67563 - protein, 341 aa, unidentified
  source 1..341: note = Intestinimonas butyriciproducens
  REGION 1..341: note = tr|A0A2U1CDV8|A0A2U1CDV8_9FIRM S-adenosylmethionine:tRNA ribosyltransferase-isomerase; OS = Intestinimonas butyriciproducens OX=1297617 GN=queA; PE = 3 SV=1
MKTSDFYYDLPQELVAQTPLERRDGSRLMVLDKKTGATAHRHFYDIPTLLRPGDCLVLNDSRVLPARLLGHREPTGGAVEVLLLTDRGDKVWECLVRPGKKVRPGARLSFGDGLLTAEVVETLEGGNRLIRFDYDGIFLEILERLGKMPLPPYIKEELSDPERYQTVYSKEVGSAAAPTAGLHFTRELLEQIQTMGVNLAYVTLHVGLGTFRPVKEEEITDHEMHAEYCAISRETADLINRTKKNGGRIICVGTTSCRTIESWAAEDGTLREAAGWTSIYIYPGYRFKVLDGLITNFHLPESTLVMLVSALAGREHILAAYEEAVREKYRFFSFGDAMFIG

SEQ ID NO: 67564 - protein, 370 aa, Intrasporangium oryzae
  REGION 1..370: note = tr|W9G6Y9|W9G6Y9_9MICO S-adenosylmethionine:tRNA ribosyltransferase-isomerase OS=Intrasporangium oryzae NRRL B-24470 OX=1386089 GN=N865_14545 PE=3 SV=1
MTTTALAHAPHTVFRRTEDLTADAPPEARGIRRDGVRLLVAAASQDGGPSVEHTSFDRIGEHLRPGDLLLVNDSATVVGEVDGLLVGRGTVVVHVATELNDGSWVLELRVAPDAARPVLDAVEGDVVEFTGRSRRGRSGPRLRLEAPYPEPGSSPTGRGNRLWRARELGGPALTPWLVRHGRPIAYGYLRGRYPIGDYQTVFGHLPGSAEMASAGRPFTTGLVTRLVSSGVLVAPVTLHTGLSSQEAGEAPQPERFAVSATTAALVNHVRAHHGRVVAVGTTATRAIESAASADGVVRAAAGWTDLVISPSRPAHVVDGLVTGWHDPEASHLLLVESVAGPALTQRAYDEAVAHRYAWHEFGDAGLFLRG

SEQ ID NO: 67565 - protein, 342 aa, Iodobacter fluviatilis
  REGION 1..342: note = tr|A0A377Q464|A0A377Q464_9NEIS S-adenosylmethionine:tRNA ribosyltransferase-isomerase; OS = Iodobacter fluviatilis OX=537 GN=queA PE=3 SV=1
MQVADFDYHLPESLIAQFPPDARGESRLLHVDGLTRQDSHFRELPQFLRAGDVLIFNDTKVIKARVFGKKESGGAIEALIERVLDEHSALAHIRSSKAPKPGARLIFADRWTATMTERKDDLFKLQFDGEESVLDILEQAGQLPLPPYITHIPDDEDAKRYQTIYARDPGAVAAPTAGLHFTEDLLAQLQAMGVKTGYLTLHVGAGTFQPVRVDNIAEHTMHHERYSIPAATVALIQDAKAQGGRVIAVGTTSLRALEAASQQGLLAEPEGDTNIFITPGYQFRVVDRLITNFHLPKSTLLMLVAAFAGYDTMRAAYQHAVEQEYRFFSYGDAMLLEPATLK

SEQ ID NO: 67566 - protein, 341 aa, Iodobacter sp.
  REGION 1..341: note = tr|A0A3S8ZNP8|A0A3S8ZNP8_9NEIS S-adenosylmethionine:tRNA ribosyltransferase-isomerase; OS = Iodobacter sp. H11R3 OX=2496266 GN=queA PE=3 SV=1
MQVADFDYHLPESLIAQFPPQVRGESRLLHINGLVRQDSHFCELPQFLRAGDVLIFNDTKVIKARVFGKKDSGGAIEALIERVLDERSALAHIRSSRAPKPGARLIFADRWTATMIERKDDLFKLQFDGEESVLDILEQAGQLPLPPYITHIPDDEDARRYQTVYARDPGAVAAPTAGLHFTEDLLAKLQAMGVKTGYLTLHVGAGTFQPVRVDDIAEHIMHHERYSIPAATIALIEKAKAQGGRVIAVGTTSLRALEAASQQGFLAQPEGDTNIFITPGYQFRVVDRLITNFHLPKSTLLMLVAAFAGYDTMLAAYQYAVEQKYRFFSYGDAMLLEPDTL

SEQ ID NO: 67567 - protein, 342 aa, Iodobacter sp.
  REGION 1..342: note = tr|A0A2G3JAR9|A0A2G3JAR9_9NEIS S-adenosylmethionine:tRNA ribosyltransferase-isomerase; OS = Iodobacter sp. BJB302 OX=1506510 GN=queA PE=3 SV=1
MQVADFDYHLPESLIAQFPPEVRGESRLLHINGLTRQDSHFRELPQFLRAGDVLIFNDTKVIKARVFGKKESGGAIEALIERVLDEHSALAHIRSSKAPKPGARLIFADRWTATMTERKDDLFKLQFDGEESVLDILEQAGQLPLPPYITHIPDDEDAKRYQTIYARDPGAVAAPTAGLHFTEDLLAQLQAMGVKTGYLTLHVGAGTFQPVRVDNIAEHTMHHERYSIPAATVALIQDAKAQGGRVIAVGTTSLRALEAASQHGLLAEPEGDTNIFITPGYQFRVVDRLITNFHLPKSTLLMLVAAFAGYDTMRAAYQHAVEQEYRFFSYGDAMLLEPATLK

SEQ ID NO: 67568 - protein, 351 aa, Isobaculum melis
  REGION 1..351: note = tr|A0A1H9RL26|A0A1H9RL26_9LACT S-adenosylmethionine:tRNA ribosyltransferase-isomerase; OS = Isobaculum melis OX=142588 GN=queA PE=3 SV=1
MRRKEGTSVLTTEDFDFELPEELIAQTPLEDRASSKLLVLNSKTGAYEDKVFSNIVDELNPGDALVLNDTRVLPARLYGEKPDTGGHLEVLLLKNTKNDEWETLVKPAKRAKVGTKVSFGDGRLTGVVTEELEHGGRIVDFKYEGIFLEVLESLGEMPLPPYIKERLDDQERYQTVYSKESGSAAAPTAGLHFTEELLTQIKAKGIKLVFLTLHVGLGTFRPVSVENLADHHMHSEFYRLTEEAAAILREVKAAGGRVVAVGTTSIRTLETIGTKFEGNIQADSGWTSIFIAPGYTFKIVDAFSTNFHLPKSTLVMLVSAFAGRENVLAAYHHAVEARYRFFSFGDAMFVK

SEQ ID NO: 67569 - protein, 375 aa, Isosphaera pallida
  REGION 1..375: note = tr|E8R5Y4|E8R5Y4_ISOPI S-adenosylmethionine:tRNA ribosyltransferase-isomerase OS=Isosphaera pallida (strain ATCC 43644 / DSM 9630 / IS1B) OX=575540 GN=queA PE=3 SV=1
MHISEFDFELPPDRIAQYPAERRDHARLMVVDRRAGTMTHHRFYELPDLLTSGDLLVRNTSKVVPARLLGRREATGGRWEGLFVRAEVDASGLVWELLAQTRGHPRPGEWIVINRRSDLELPTGSTDHEHEGLRLQLVGRGPGGTWKARLHLPDGPATDPDSVWTLLERFGEVPLPPYIRHGREGTGDRDRYQTTYAQTPGSVAAPTAGLHFTPELFETLERRGVGVADLTLHVGIGTFRPLNVETIEAHHMHAETAHLPLATARRLNECRARGGRIVAVGTTSARTLEHVAHQVVTKTGTVGFESFEGDVDLYIKPGHEFLGLDALITNFHLPRSSLIVLVSALAGVELIRDAYRVAIAEGYRFYSYGDAMFIR

SEQ ID NO: 67570 - protein, 369 aa, unidentified
  source 1..369: note = Isosphaeraceae bacterium
  REGION 1..369: note = tr|A0A432MI84|A0A432MI84_9BACT S-adenosylmethionine:tRNA ribosyltransferase-isomerase; OS = Isosphaeraceae bacterium GM2012 OX=2080755 GN=queA PE=3; SV = 1
MRTDDFDFHLPDELIAQHPADRRDRSRLMVVRRDAGEIEHRCFADLPDLLRSGDVLVRNDSKVVPARLLGRRSATGGRWEGLFLSELPDGSWELMAQTRGRPQAGEIILIAGNGNSDSGGDGGGDGGGGGGDSGGGGLRLELLDRLDSGHWRARPLDPRPAFELLDAFGRVPLPPYIRRVGDADDPEDRERYQTIYASRPGSVAAPTAGLHFTAEVFDRLAALGVATLDVTLHVGPGTFRPIKAERVEDHRMHAEWAAISPAVADRLNAARSSGGRVVAVGTTATRVLETGVTPSGTFLPFTGQTDIYLRPGVPVLGTDALVTNFHLPRSSLLVLVSALAGIDLIRAAYAEAVSHRYRFYSFGDAMLIL

SEQ ID NO: 67571 - protein, 356 aa, unidentified
  source 1..356: note = Izhakiella australiensis
  REGION 1..356: note = tr|A0A1S8YH78|A0A1S8YH78_9ENTR S-adenosylmethionine:tRNA ribosyltransferase-isomerase; OS = Izhakiella australiensis OX=1926881 GN=queA PE=3 SV=1
MRVADFSFDLPDSLIAHYPQAQRSGCRLLSLDGETGNLSHGVFTDLLDKLHPGDLLVFNNTRVIPARVYGRKASGGKIEVLVERMLDDNRVLAHVRASKAPKPGSALLLGDDESVNATMVARHDALFEIVFADPRPVLEILNAVGHMPLPPYIDRPDEEADRELYQTVYSQKPGAVAAPTAGLHFDQPLLQALRARGIETAFVTLHVGAGTFQPVRVDSIEDHIMHAEYAEVPQEVVDAVLACKARGNRVIAVGTTSVRSLESAAQAAQNALIAPFFDDTSIFIYPGYHYQIIDALVTNFHLPESTLIMLVSAFAGYRHTMHAYQQAVAQQYRFFSYGDAMFISRNPAAPDERVGE

SEQ ID NO: 67572 - protein, 356 aa, unidentified
  source 1..356: note = Izhakiella capsodis
  REGION 1..356: note = tr|A0A1I4YIF7|A0A1I4YIF7_9ENTR S-adenosylmethionine:tRNA ribosyltransferase-isomerase; OS = Izhakiella capsodis OX=1367852 GN=queA PE=3 SV=1
MRVSDFSFDLPDSLIAHYPQAERSGCRLLSLDGETGNLSHGIFTDLLDKLQPGDLLVFNNTRVIPARLYGRKASGGKIEVLVERMLDDKRALAHVRASKAPKPGSALLLGDDESVTATMVARRDALFEIVFDDPRPLLEILNAVGHMPLPPYIDRPDEEADRELYQTVYSQKPGAVAAPTAGLHFDQPLLQALSAKGVEIAFVTLHVGAGTFQPVRVDSIENHVMHAEYAEVPQEVVDAVLACKSRGNRVIAVGTTSVRSLESAAHAAQNALIAPFFDDTSIFIYPGYHYQIIDALVTNFHLPESTLIMLVSAFAGYRHTMDAYQQAVAEQYRFFSYGDAMYISRNPDAPDESVVK

SEQ ID NO: 67573 - protein, 365 aa, unidentified
  source 1..365: note = Izhakiella sp.
  REGION 1..365: note = tr|A0A4P8YJI0|A0A4P8YJI0_9ENTR S-adenosylmethionine:tRNA ribosyltransferase-isomerase; OS = Izhakiella sp. KSNA2 OX=2579935 GN=queA PE=3 SV=1
MRLADFSFELPESLIAHYPQPNRSACRLLSLDGPTGQLTHGTFTDLLDKLNPGDLLVFNNTRVIPARLFGRKASGGRIEVLVERMLDEHRVLAHIRASKAPKPGAELLLGEDESIQATMVARHDALFEVQFNDPCPVLEILNAIGHMPLPPYIDRPDEEADRELYQTVYSEKPGAVAAPTAGLHFDEPLLEALRRKGVEMAFVTLHVGAGTFQPVRVESIEDHVMHSEYAEVPQEVVDAVLACKARGNRVIAVGTTSVRSLESAAQAAQQDIIEPFFDDTQIFIYPGYQYRIIDALVTNFHLPESTLIMLVSAFAGYQHTMHAYQEAVKAEYRFFSYGDAMFITYNPQAINDPLTLTLSPQGRGD

SEQ ID NO: 67574 - protein, 350 aa, Jannaschia donghaensis
  REGION 1..350: note = tr|A0A0M6YN35|A0A0M6YN35_9RHOB S-adenosylmethionine:tRNA ribosyltransferase-isomerase; OS = Jannaschia donghaensis OX=420998 GN=queA PE=3 SV=1
MRLSDFDFDLPEDLIATRPVTPRSASRLLVGRGDGIADAVFSDLPEWLRPGDRLVLNDTRVIPARLNGTRVRATTDGSGRAKVEFTLTTAQPDGSWRALARPLRKLRAGDAIELDAGHRATILDRAEGDVVLRFDCEAEDVHALLDAAGQMPLPPYIAAKRAPDAQDRDDYQTVWARHTGAVAAPTASLHFDAPLLDRLRAMGVDFTEVTLHVGAGTFLPVKVEDVTTHRMHSEWGEVTPAAAAAIAATKAAGGRVIPVGTTALRLIESAAATGTIAPFRGDTDIFIYPGYEFRVADGLITNFHLPQSTLLMLVSALMGRDRMRAIYAHAIAERYRFFSYGDGSLLLPDG

SEQ ID NO: 67575 - protein, 349 aa, unidentified
  source 1..349: note = Jannaschia faecimaris
  REGION 1..349: note = tr|A0A1H3RRG3|A0A1H3RRG3_9RHOB S-adenosylmethionine:tRNA ribosyltransferase-isomerase; OS = Jannaschia faecimaris OX=1244108 GN=queA PE=3 SV=1
MKLSDFDFDLPDDLIATRPASPRSSSRLMVGQGDAITDAVFTDLPRWLRPGDRLILNDTKVIPARLNGTRVRDTTDGSGRAKVEFTLTAAQPDGSWRALVKPLRKLKIGDTIELDAGHRAIIVDRTATDVALRFDCAPEDVHALLDAAGQMPLPPYIAAKRAPDAQDRDDYQTVWARHSGAVAAPTASLHFDAPLLEELRAQGVDFTEVTLHVGAGTFLPVKVEDVTTHKMHAEWGEVTPEAAAAIAQTQANGGRVIPVGTTALRLIESAAVAGQIAPFRGNTEIFIYPGYEFRVADGLITNFHLPQSTLLMLVSAMMGRDRMLRMYAHAIAGKYRFFSYGDASLLLPE

SEQ ID NO: 67576 - protein, 352 aa, Jannaschia helgolandensis
  REGION 1..352: note = tr|A0A1H7MQH5|A0A1H7MQH5_9RHOB S-adenosylmethionine:tRNA ribosyltransferase-isomerase; OS = Jannaschia helgolandensis OX=188906 GN=queA PE=3 SV=1
MKLSDFDFDLPDDLIATRPATPRSSSRLMVMEGDRISDAVFTDLTRWLRPGDRLVLNDTKVIPARLNGTRVRQTADGSGRAKVELTLTAPQPDGSWKALAKPLRKLRAGDLIELAAGHTAQVIARGETDLTLRFDCDSSALHAVLEAAGEMPLPPYIAAKRAPDARDKDDYQTVWARHSGAVAAPTASLHFDTPLLEALRNQGVEFTEVTLHVGAGTFLPVKVEDVTTHRMHAEWGEVTPDAAAAIAATKAAGGRIIPVGTTALRLIESAAANGEINPFQGDTDIFIYPGYDFRVADGLITNFHLPQSTLLMLVSALMGRDRMLAAYAHAISRSYRFFSYGDASLLLPTPRH

SEQ ID NO: 67577 - protein, 352 aa, Jannaschia pohangensis
  REGION 1..352: note = tr|A0A1I3I4G3|A0A1I3I4G3_9RHOB S-adenosylmethionine:tRNA ribosyltransferase-isomerase; OS = Jannaschia pohangensis OX=390807 GN=queA PE=3 SV=1
MKLSDFDFDLPEDLIATRPARPRSSARMLVAEGDRLTDAVVRDLTRWLRPGDRLVLNNTKVIPARLAGVRHRVTPEGPVAAQVELTLTAPQAAGTWRTLAKPLRKLKAGDRLALPEGLGAEVVARDETDAVIRFDRDGAALQAALDAVGHMPLPPYIAAKRKPDAQDRDDYQTIWARHAGAVAAPTASLHFDAPLLAALRDQGVDFTEVTLHVGAGTFLPVKVEDVTTHRMHAEWGEVTPEAAAAIAATKAAGGRVIPVGTTALRLIESAAAGPEGMIAPFRDETDIFIYPGFEFRVADGLITNFHLPQSTLLMLVSALMGRDRMLAAYAHAVAERYRFFSYGDASLLLPAP

SEQ ID NO: 67578 - protein, 356 aa, Jannaschia rubra
  REGION 1..356: note = tr|A0A0M6XUR2|A0A0M6XUR2_9RHOB S-adenosylmethionine:tRNA ribosyltransferase-isomerase; OS = Jannaschia rubra OX=282197 GN=queA PE=3 SV=1
MQLSDFDFDLPDDLIATRPARPRSSSRLLVAEGGRTTDAVFTDLIRWLRPGDRLVLNDTRVIPARLPAIRVRDSSDGTGRARVELTLTAPRADGTWRALARPLRKLRADDRLELAAGHTARVTDRTEADAGIAFNCEPKDLHDVLQAAGQMPLPPYIAAKRPPDAQDMDDYQTVWARHSGAVAAPTASLHFDAPMLEKLRAMGVEFTEVTLHVGAGTFLPVKVEDVTTHRMHAEWGEVTPAAAEAIAATKRAGGRVIPVGTTALRLIESAAAGGRIAPFRGDTDIFIYPGYDFRVTDGLITNFHLPQSTLLMLVSALMGRDRMLALYRHAIAERYRFFSYGDASLLLPDRSALDRP

SEQ ID NO: 67579 - protein, 351 aa, Jannaschia seohaensis
  REGION 1..351: note = tr|A0A2Y9B4A5|A0A2Y9B4A5_9RHOB S-adenosylmethionine:tRNA ribosyltransferase-isomerase; OS = Jannaschia seohaensis OX=475081 GN=queA PE=3 SV=1
MKLTDFDFDLPDDLIATRPAAPRSSARMMVVQPDRTTDARVTDLTRWLRPGDRLILNDTKVIPARLDGERVRETRDGSGRARCEFTLLEARPDGAWRALGKPLRKLREGDRIEFSHGLTARVAGKDETEVVLAFDGEGEALQAALDAAGQMPLPPYIAAKRPPDARDREDYQSIWARHSGAVAAPTASLHFDAPLLEALRARGVAFSEVTLHVGAGTFLPVKVEDVTTHRMHAEWGNIDPEVAEAIARTKAEGGRVIPVGTTALRLIETAARGGAIAPFRGETDIFIYPGFTFRAADGLITNFHLPQSTLLMLVSAMMGRDRMLAAYAHAVRERYRFFSYGDASLLLPNGA

SEQ ID NO: 67580 - protein, 350 aa, Jannaschia seosinensis
  REGION 1..350: note = tr|A0A0M7BFD6|A0A0M7BFD6_9RHOB S-adenosylmethionine:tRNA ribosyltransferase-isomerase; OS = Jannaschia seosinensis OX=313367 GN=queA PE=3 SV=1
MKLSDFDFDLPEELIATRPARPRSSARLLVSDGDAITDARVTDLTRWLRPGDRLVLNDTRVIPARLEGERVRETRDGSGRARVEMTLTAPQADGTWRALGRPLRKMRTGDRIEFAAGLTARVTEKGGTDVALAFDSGGKDLQEVLQVAGQMPLPPYIAAKRAPDAADRDDYQTIWARHAGAVAAPTASLHFDAPLLEELRTHGVDFTEVTLHVGAGTFLPVKVEDVTTHRMHAEWGEVTLEAAEAIARTRAAGGRVIPVGTTALRLIETAARGGAIAPFRGETDIFIYPGFDFRVTDGLMTNFHLPQSTLLMLVSALMGQDHILKIYDHAVRAGYRFFSYGDASLLLPRG

SEQ ID NO: 67581 - protein, 350 aa, Jannaschia sp.
  REGION 1..350: note = tr|A0A1B6YYW7|A0A1B6YYW7_9RHOB S-adenosylmethionine:tRNA ribosyltransferase-isomerase; OS = Jannaschia sp. EhC01 OX=1849359 GN=queA PE=3 SV=1
MKLDDFDFDLPDGLIATRPARPRSSAKLLVAEGAQTRDLTVADLPSTLRPGDRLVLNDTRVIPARLSGTRTRMSAQGEVTAKIEVTLMEPQADGTWSALGKPMRKLKVGEKVIFSNDLQAEVKAMDEGLRLAFNVTGDDFDAALNAAGAMPLPPYIAGKRAPDARDLEDYQTIWARRAGAVAAPTASLHFDENLMAALSARGVDVTFVTLHVGAGTFLPVTVDDVTSHKMHAEWGEVSEAAAAEINATKAAGGRIIPVGTTALRLIESAAREGEIHPFEGTTEIFIYPGYTWQITDALMTNFHLPKSTLLMLVSALMGKDRMDAVYAHAIAQGYRFFSYGDASLLIPSQT

SEQ ID NO: 67582 - protein, 355 aa, Jannaschia sp.
  REGION 1..355: note = sp|Q28RM8|QUEA_JANSC S-adenosylmethionine:tRNA ribosyltransferase-isomerase OS=Jannaschia sp. (strain CCS1) OX=290400 GN=queA PE=3 SV=1
MKLDDFDFDLPDGLIATRPARPRSSARLLVADGPETHDLTVADLPSMLRRGDRLVLNDTRVIPARLTGTRTRMSAQGEVTARIEVTLMEPQADGTWSALAKPMRKLKAGEKIIFSNALQADVHAMDEGLRLAFNVEGDDFDAALNAAGAMPLPPYIAGKRAPDARDYHDYQTIWAKRAGAVAAPTASLHFDEHLMDALTSRGVDVTFVTLHVGAGTFLPVTVDDVTTHKMHAEWGEVRATAAAEINATKAAGGRIIPVGTTALRLIESAAQDGTIHPFEGTTDIFIYPGYRWQITDALMTNFHLPKSTLLMLVSALMGKDRMDAVYAHAIANQYRFFSYGDASLLFPSQKGQTSR

SEQ ID NO: 67583 - protein, 351 aa, Janthinobacterium agaricidamnosum
  REGION 1..351: note = tr|A0A3G2EFE3|A0A3G2EFE3_9BURK S-adenosylmethionine:tRNA ribosyltransferase-isomerase; OS = Janthinobacterium agaricidamnosum OX=55508 GN=queA PE=3; SV = 1
MYSLSDFDFNLPQENIAQTPLAERSASRLLHLDGETVVDRQFADIVGQLAAGDLLVMNDTRVLKARFFGVKESGGKIEALVERVLDDRTVLAQVRASKSPPPGCRIRLADAFDVTVGQRAGEFFTLHFEADVFELIEAHGRLPLPPYIEHDADEFDETRYQTVFNKVPGAVAAPTAGLHFDQALLDQLKAKGVNFAYVTLHVGAGTFQPVRTEVLAEHKMHTEWYTMPQETVDAVRAAQQAGRDVVAVGTTSLRALESASQSGQLVAGSADTALFITPGYAFKTVTRLITNFHLPKSTLLMLVSAFAGYEPIRNAYAHAIAQNYRFFSYGDAMLLTTQSRAALNLDTPVKD

SEQ ID NO: 67584 - protein, 349 aa, Janthinobacterium agaricidamnosum
  REGION 1..349: note = tr|W0V028|W0V028_9BURK S-adenosylmethionine:tRNA ribosyltransferase-isomerase OS=Janthinobacterium agaricidamnosum NBRC 102515 = DSM 9628 OX=1349767 GN=queA; PE = 3 SV= 1
MYSLSDFDFNLPQENIAQIPLPQRSASRLLHLDGDTLADRSFADIVGLLQAGDLLVMNDTRVLKARFFGVKESGGKIEALVERVLDNRTVLAQVRASKSPPPGCRIRLADAFDVTVGQRAGEFFTLHFDADVFDLIEAHGRLPLPPYIEHDADEFDETRYQTVFNKVPGAVAAPTAGLHFDQALLDQLKAKGVNFAYVTLHVGAGTFQPVRTEVLAEHKMHTEWYTMPQETVDAVRTAKAAGRDVVAVGTTSLRALESASQSGELLAGSADTALFITPGYQFKTVTRLITNFHLPKSTLLMLVSAFAGYQPIRDAYAHAIARNYRFFSYGDAMLLTTQSRAAPLGNPES

SEQ ID NO: 67585 - protein, 351 aa, Janthinobacterium lividum
  REGION 1..351: note = tr|A0A377RQ34|A0A377RQ34_9BURK S-adenosylmethionine:tRNA ribosyltransferase-isomerase; OS = Janthinobacterium lividum OX=29581 GN=queA PE=3 SV=1
MYSLSDFDFNLPQENIAQTPLAERSASRLLHLDGETLVDRQFADIVGLLQAGDLLVMNDTRVLKARFFGVKESGGKIEALVERVLDDRTVLAQVRASKSPPPGCRIRLADAFDVTVGQRAGEFFTLHFEADVFELIEAHGRLPLPPYIEHDADEFDETRYQTVFNKVPGAVAAPTAGLHFDQALLDQLKAKGVNFAYVTLHVGAGTFQPVRTEVLSEHKMHTEWYTMPQETVDAVRAAQLAGRDVVAVGTTSLRALESASQSGQLVAGSADTALFITPGYAFKTVTRLITNFHLPKSTLLMLVSAFAGYAPIRSAYAHAIAQNYRFFSYGDAMLLTTQSRAALNLDTPVKD

SEQ ID NO: 67586 - protein, 351 aa, Janthinobacterium lividum
  REGION 1..351: note = tr|A0A377QYU9|A0A377QYU9_9BURK S-adenosylmethionine:tRNA ribosyltransferase-isomerase; OS = Janthinobacterium lividum OX=29581 GN=queA PE=3 SV=1
MYSLSDFDFNLPQENIAQTPLAERSASRLLHLDGDTLADRQFADIVGLLQAGDLLVMNDTRVLKARFFGVKESGGKIEALVERVLDDRTVLAQVRASKSPPPGCRIRLADAFDVTVGQRAGEFFTLHFEADVFELIEAHGRLPLPPYIEHDADEFDETRYQTVFNKVPGAVAAPTAGLHFDQALLDQLKAKGVNFAYVTLHVGAGTFQPVRTEVLAEHKMHTEWYTMPQETVDAVRAAQLAGRDVVAVGTTSLRALESASQSGQLVAGSADTALFITPGYAFKTVTRLITNFHLPKSTLLMLVSAFAGYEPIRSAYAHAIAQNYRFFSYGDAMLLTTQSRAALNLDTPVKD

SEQ ID NO: 67587 - protein, 341 aa, Janthinobacterium sp.
  REGION 1..341: note = sp|A6SUU3|QUEA_JANMA S-adenosylmethionine:tRNA ribosyltransferase-isomerase OS=Janthinobacterium sp. (strain Marseille) OX=375286 GN=queA PE=3 SV=1
MYSLSDFDFELPQELIAQTPLAERSASRLLQVLPEQMTDRNFAYIVDLLSPGDLLVFNDTRVLKARFFGIKETGGKVEVLVERVIDQRNVHAQIRASKSPAVGMRIRLADAFDVIVGERAGEFYELQFPDDVFELIEAHGRLPLPPYIEHAADAYDETRYQTVYAKTPGAVAAPTAGLHFDQALLDALTAKGVKLAYITLHVGAGTFQPVRNENLAEHNMHSEWYTISQQTVDLVKATQVAGGNIVAVGTTSMRALESASQSGSLQAGSADTRLFITPGYTFKTVTRLITNFHLPKSTLLMLVSAFAGYDTIRAAYQHAISQRYRFFSYGDAMFLTRMPPC

SEQ ID NO: 67588 - protein, 346 aa, Janthinobacterium sp.
  REGION 1..346: note = tr|A0A349KYT3|A0A349KYT3_9BURK S-adenosylmethionine:tRNA ribosyltransferase-isomerase; OS = Janthinobacterium sp. OX=1871054 GN=queA PE=3 SV=1
MYSLSDFDFDLPPENIAQIPLPERSASRLLHLDGDALIDRRFADIVEQLQAGDLLVMNDTRVLKARFFGVKESGGKIEVLVERVLDSRTVLAQVRASKSPPPGCKLRLADAFDVTVGVRAGEFFTLHFDADVFELIEAHGRLPLPPYIEHTADAFDETRYQTVFNKVPGAVAAPTAGLHFDQALLDQLQAKGVRFAYVTLHVGAGTFQPVRTEVLAEHKMHTEWYTLPQATVDAVEATRAAGRDVVAVGTTSLRALESASQTGRLLAGSADTALFITPGYQFKTVTRLITNFHLPKSTLLMLVSAFAGYARIRAAYAHAIAQNYRFFSYGDAMLLTTQSRAPRLPE

SEQ ID NO: 67589 - protein, 351 aa, unidentified
  source 1..351: note = Janthinobacterium svalbardensis
  REGION 1..351: note = tr|A0A290X2Y3|A0A290X2Y3_9BURK S-adenosylmethionine:tRNA ribosyltransferase-isomerase; OS = Janthinobacterium svalbardensis OX=368607 GN=queA PE=3; SV = 1
MYSLSDFDFNLPQENIAQTPLAQRSASRLLHLDGDALVDRSFADIVGLLQAGDLLVMNDTRVLKARFFGVKESGGKIEALVERVLDDRTVLAQVRASKSPPPGCRIRLADAFDVTVGQRAGEFFTLHFEADVFELIEAHGRLPLPPYIEHDADEFDETRYQTVFNKVPGAVAAPTAGLHFDQALLDQLKAKGVNFAYVTLHVGAGTFQPVRTEVLAEHKMHTEWYTMPQDTVDAVRATQLAGRDVVAVGTTSLRALESASQSGQLVAGSADTALFITPGYAFKTVTRLITNFHLPKSTLLMLVSAFAGYAPIRNAYAHAIAQNYRFFSYGDAMLLTTQSRAALNLDTPVKD

SEQ ID NO: 67590 - protein, 340 aa, unidentified
  source 1..340: note = Jatrophihabitans endophyticus
  REGION 1..340: note = tr|A0A1M5EBQ1|A0A1M5EBQ1_9ACTN S-adenosylmethionine:tRNA ribosyltransferase-isomerase; OS = Jatrophihabitans endophyticus OX=1206085; GN = SAMN05443575_0846 PE=3 SV=1
MSGPRVPSGVAGGVAATEPPSARDGVRLLVAHRGGVEHARFPALVDYLSAGDLLVVNTSRTLPAAVDGVRAYGRAVTVHFATALDDGTWVVEIRPREDAAGPVPDARAGETITLPDRVPMRLLAAHPAGQRRLWRASVAVEGGVAALLDRHGRPIRYSYVARPHPLPDYQTVFAREPGSAEMPSAGRPFTVELVTELVTRGIAVAPIVLHTGVSSQEPGEQPQPERFRVPGATARYVNTTRAAGGRVVAVGTSVTRALESATDDVGVVRERRGWTDLVLGPAREARVVSGLLTGWHESGASHLDLLRAVAGRELVERAYAAASARGYRWHEFGDSCLLLP

SEQ ID NO: 67591 - protein, 360 aa, unidentified
  source 1..360: note = Jatrophihabitans sp.
  REGION 1..360: note = tr|A0A286EV28|A0A286EV28_9ACTN S-adenosylmethionine:tRNA ribosyltransferase-isomerase; OS = Jatrophihabitans sp. GAS493 OX=1907575; GN = SAMN05892883_3994 PE=3 SV=1
MTALLPTPTTIFRLTDDLTAAEPPEQRGLSRDGVRLLVAQHRPDQLEHISHHRFRELPDFLGAGDLLVVNNSETLAGEIEGSWRHSEPVIVHFATGLDDGTWVVELRSAPDGAAPVLTATAGEVVRLPQQLTLRLIEAYGGIAASPTGEGNRLWRAEVDSAVAVAVYLARYGRPISYGYLRRHWPLRDYQTVFSREPGSAEMPSAGRPFTTELVTELVSRGVGLAPITLHTGVSSQDAGEPPQPERFEVGASTARLVNQTRRAGGRVVAVGTTVTRALESAADDAGEVQPCSGWTEHIVGGENPARVVTGLITGLHNPEASHLLLVESVAGARLTQLAYDAAVAHRYLWHEFGDSCLLLP

SEQ ID NO: 67592 - protein, 151 aa, Jejuia pallidilutea
  REGION 1..151: note = tr|A0A090VS91|A0A090VS91_9FLAO S-adenosylmethionine:tRNA ribosyltransferase-isomerase; OS = Jejuia pallidilutea OX=504487 GN=JCM19301_749 PE=3 SV=1
MLKRLEIKGVNFAEVTLHVGLGTFNPVEVEDLSKHKMDSEEIKIGPEAVDIINTGIKNRKRVCAVGTTAMRTIESAVSSSGLLNEMDGWTNKFIFPPYDFSIANCMVTNFHTPKSTLLMMISAFAGHDFVMEAYQEAIKEKYKFYSYGDAC

SEQ ID NO: 67593 - protein, 182 aa, Jejuia pallidilutea
  REGION 1..182: note = tr|A0A090VQ94|A0A090VQ94_9FLAO S-adenosylmethionine:tRNA ribosyltransferase-isomerase; OS = Jejuia pallidilutea OX=504487 GN=JCM19301_748 PE=3 SV=1
MKLSNFGFDLPAELLAEYPSENRDESRLMVLNRKDQTIEHKQFKDLINYFNEDDVMILNNTKVFPARLYGNKEKTGARIEVFLLRELNEEQRLWDVLVDPARKIRIGNKLYFGEDESLVAEVIDNTTSRGRTLRFLYDGSYQEFRIKLRELGETPLPKYIKREVEPEDEDRYQTIFAKNEVL

SEQ ID NO: 67594 - protein, 348 aa, Jeongeupia sp.
  REGION 1..348: note = tr|A0A1D9BHH6|A0A1D9BHH6_9NEIS S-adenosylmethionine:tRNA ribosyltransferase-isomerase; OS = Jeongeupia sp. USM3 OX=1906741 GN=queA PE=3 SV=1
MQLSDFDYFLPEHLIAQFPPEERGASRLLHVDGRTLHDGRFRDLPTLLRAGDLLVFNDTKVIKARLFGKKDSGGAVEALVERVLDTHRALAHVRASKAPKPGSRLVFGDRWHATMVERRGDLFLLEFDRTGADGNASVLDILEQAGALPLPPYITHTPDDDDARRYQTVYARDPGAVAAPTAGLHFTDALLERLRAQGVGTAFLTLHVGAGTFMPVRVDDIAEHTMHHERYSIPQATQDAIRATKAAGGRVIAVGTTSLRALEASSQQGLLAEPEGDTDIFITPGYAFRVVDRLITNFHLPKSTLLMLVAAFAGLETMKAAYAHAVASEYRFFSYGDAMLLERQHSGQ

SEQ ID NO: 67595 - protein, 348 aa, unidentified
  source 1..348: note = Jeotgalibaca dankookensis
  REGION 1..348: note = tr|A0A1S6INC4|A0A1S6INC4_9LACT S-adenosylmethionine:tRNA ribosyltransferase-isomerase; OS = Jeotgalibaca dankookensis OX=708126 GN=queA PE=3 SV=1
MKTSDFDFDLPEELIAQVPLKDRTSSRLLLLDSDTGQIEDSHFPSILDELKAGDALVLNNTRVLPARLHGVKPDTGAHMEVLLLNNTEGDRWETLVKPAKRAKVGTVLSFGKGQLIAVVKEVLDHGGRIIEFQYEGIFLEILEALGEMPLPPYIKEKLDDAERYQTVYAKENGSAAAPTAGLHFTKELIAQAEAKGVQIVYLTLHVGLGTFRPVSVEDLDSHEMHSEFYELSEESAQKLKEVKQTGGRIIAVGTTSIRTLETIGTKFNGEIKADSGWTDIFISPGYTFKLVDGFITNFHLPKSTLIMLVSAFAGRERVLEAYEHAVREKYRFFSFGDAMFVKPKSESI

SEQ ID NO: 67596 - protein, 342 aa, unidentified
  source 1..342: note = Jeotgalibaca sp.
  REGION 1..342: note = tr|A0A3Q9BN47|A0A3Q9BN47_9LACT S-adenosylmethionine:tRNA ribosyltransferase-isomerase; OS = Jeotgalibaca sp. H21T32 OX=2496265 GN=queA PE=3 SV=1
MKTSDFDFYLPEELIAQTPLENRADSRLLIVDSSSGDVSDNRFPAIINELQAGDALVLNNTRVLPARLHGVKPDTGGHLEVLLLNNQEGDTWETLVKPAKKAKKGTRVSFGGDTLTAVVTEELEHGGRIIEFEYEGIFLEVLESLGEMPLPPYIKERLDDPDRYQTVYAKENGSAAAPTAGLHFTKDLLEQIEEKGIHIAYLTLHVGLGTFRPVSADELDDHEMHSEFYYLPAETAEILNRVKKNGGRIIAVGTTSIRTLETVGTKYAGEIKADSDWTSIFISPGYKFKVVDAFITNFHLPKSTLVMLVSAFAGRETILNAYAHAVKERYRFFSFGDAMFIK

SEQ ID NO: 67597 - protein, 343 aa, unidentified
  source 1..343: note = Jeotgalibaca sp.
  REGION 1..343: note = tr|A0A1U7EB36|A0A1U7EB36_9LACT S-adenosylmethionine:tRNA ribosyltransferase-isomerase; OS = Jeotgalibaca sp. PTS2502 OX=1903686 GN=queA PE=3 SV=1
MLKTSDFDFYLPEELIAQTPLENRTASRLLKLDSSANQLEDKHFYDVIDEFEAGDVLVLNNTRVLPARLHGVKPDTGGHLEVLLLNNEEGDRWETLVKPAKKAKIGTKISFGDGMLTAEVVGEKDHGGRIIEFSYEGIFLEVLESLGEMPLPPYIKERLDDPDRYQTVYAKENGSAAAPTAGLHFTQELLAKIEAKGVKVAYLTLHVGLGTFRPVSADDLSEHEMHSEFYSLPQETADLLNEAKAKGGRIIAVGTTSIRTLETVGTKFNGEIKADSDWTSIFIAPGYQFKVVDAFITNFHLPKSTLVMLVSAFAGRETVLNAYAHAVKERYRFFSFGDAMFVK

SEQ ID NO: 67598 - protein, 341 aa, Jeotgalibacillus alimentarius
  REGION 1..341: note = tr|A0A0C2W9U4|A0A0C2W9U4_9BACL S-adenosylmethionine:tRNA ribosyltransferase-isomerase; OS = Jeotgalibacillus alimentarius OX=135826 GN=queA PE=3; SV = 1
MNINDFDFDLPEELIAQVPLEDRTSSRLMVLDKETGQVEHQSFTHILDYLHEGDCLVLNDTKVLPARLIGEKTETGAAIEVLLLKQIEGDTWETLVKPAKRIKPGTVITFGDGLLTAECIETGDQGARILEYKYDGIFYELLDQLGDMPLPPYIKEKLDDKDRYQTVFAKERGSAAAPTAGLHFTEEILDEIRSRGVNIAFITLHVGLGTFRPVSVDSIEEHDMHSEYYQLSEENAELLNRTRENGGRIITVGTTSTRTLETIADEKGIFKPQSGWTDIFIYPGYTFKASDVLLTNFHLPKSTLIMLVSAMAGRENTLAAYRAAVEEKYRFFSFGDAMLIK

SEQ ID NO: 67599 - protein, 341 aa, Jeotgalibacillus campisalis
  REGION 1..341: note = tr|A0A0C2VNU3|A0A0C2VNU3_9BACL S-adenosylmethionine:tRNA ribosyltransferase-isomerase; OS = Jeotgalibacillus campisalis OX=220754 GN=queA PE=3 SV=1
MNINDFDFYLPEELIAQVPLQDRTSSRLMVLDKQTGGISHESFRSIESYLQKGDCLVLNDTKVLPARLIGEKENTGAAIELLLLKQVNGDQWETLAKPAKRIKVGTTVVFGDGELKAVCTSIGEQGSRIMEFSYEGIFYELLDHLGDMPLPPYIKEKLDDRDRYQTVFAKERGSAAAPTAGLHFTDELLETLKQKGVNIAFITLHVGLGTFRPVSVDSIEEHDMHSEYYQLNEETAQLLNQVRKSGGKIITVGTTSTRTLETIADSDGLFRASSGWTNIFIYPGYTFKAVDALLTNFHLPKSTLIMLVSALAGQDETLLAYQEAVKEKYRFFSFGDAMLIK

SEQ ID NO: 67600 - protein, 341 aa, unidentified
  source 1..341: note = Jeotgalibacillus malaysiensis
  REGION 1..341: note = tr|A0A0B5AMW4|A0A0B5AMW4_9BACL S-adenosylmethionine:tRNA ribosyltransferase-isomerase; OS = Jeotgalibacillus malaysiensis OX=1508404 GN=queA PE=3; SV = 1
MNINDFDFELPEELIAQVPLEDRTSSRLMVLDKKTGKVEHQSFKHILNYLHEGDCLVLNDTKVLPARLIGEKTETGAAIEVLLLKQLEGDTWETLVKPAKRVKPGTVITFGDGLLTAECVETGDQGARILEFSYDGIFYELLDQLGDMPLPPYIKEKLDDKDRYQTVFAKERGSAAAPTAGLHFTEEILEEIKAKGVKVAFITLHVGLGTFRPVSVDSIEEHDMHSEYYQLSEENASVLNETRAGGGRIITVGTTSTRTLETIADDAGHFKAQSGWTDIFIYPGYEFKASDVLLTNFHLPKSTLIMLVSAMAGREHTLAAYEAAVKERYRFFSFGDAMLIK

SEQ ID NO: 67601 - protein, 342 aa, Jeotgalibacillus marinus
  REGION 1..342: note = tr|A0A0M0KWH8|A0A0M0KWH8_9BACL S-adenosylmethionine:tRNA ribosyltransferase-isomerase; OS = Jeotgalibacillus marinus OX=86667 GN=queA PE=3 SV=1
MKVDLFDFELPERLIAQVPLEQRDASRLMVLDKHTGELTDSSFKHIISFFKEGDCLVLNNTRVLPARLFGTKEDTGAKVELLLLKQEAGDRWETLAKPAKRVKKGTVVTFGDGRLKAVCTEELEHGGRKMEFQYDGIFYEVLESLGEMPLPPYIKEQLDDRERYQTVYSKEIGSAAAPTAGLHFTEEILQQLKDKGVQIEFITLHVGLGTFRPVSADDVEEHNMHAEFYQMSEETAAALNKVREKGGRIISVGTTSTRTLETIAGEHDGQFKASSGWTSIFIYPGYEFKAIDGMITNFHLPKSSLIMLVSALAGRENVLRAYNHAVEEEYRFFSFGDAMLIL

SEQ ID NO: 67602 - protein, 338 aa, unidentified
  source 1..338: note = Jeotgalibacillus proteolyticus
  REGION 1..338: note = tr|A0A2S5GCS8|A0A2S5GCS8_9BACL S-adenosylmethionine:tRNA ribosyltransferase-isomerase; OS = Jeotgalibacillus proteolyticus OX=2082395; GN = C4B60_08415 PE=3 SV=1
MLKGAEKFTIPPHLHASVPLEMLGQTRDSARLLVLNRFTGETDHSRFAQLGDFLSEGDVLVLNNSRTIPAVLKGRQGGNEVEVRLSRKIKEGEWDGLVLNRQLATEVIHFNGDLQAVVVGSGSENPLVRFRFNKKGTDFYNFLYKEAEPVRYEYVKASWPLESYQNVYSSVPGSVEMASAGRAFTWRLLRSLESQGVKLAFIQLHAGLSYYGDDQWPSPKNHPEEFCLPKETVQLIKEAKRNGNRVIAAGTTVVRALETAVTQGGDSQAMRGLTHLHVSKETPLQVADGLLTGFHEPEASHLDMLGAFIDEEVLLRTYKEALEKEYLWHEFGDINLIL

SEQ ID NO: 67603 - protein, 341 aa, unidentified
  source 1..341: note = Jeotgalibacillus proteolyticus
  REGION 1..341: note = tr|A0A2S5GF36|A0A2S5GF36_9BACL S-adenosylmethionine:tRNA ribosyltransferase-isomerase; OS = Jeotgalibacillus proteolyticus OX=2082395 GN=queA PE=3; SV = 1
MDIKDFDFHLPEELIAQVPLEDRTSSRLMVMNKKTGDITHEGFKKIVSYLSPGDCLVLNDTKVLPARLIGEKEGTGAAVELLLLKQLEGDRWETLAKPAKRLKPGTVLVFGNGALKATCIDSGDQGSRIMEFSYDGIFYELLDQLGDMPLPPYIKEKLEDRDRYQTVFARERGSAAAPTAGLHFTEELLNELRKKGVKIAFLTLHVGLGTFRPVSVDSIEDHDMHSEFYQLTAKTADLLNEVRQNGGKIITVGTTSTRTLETIADEKGLFKEASGWTSIFIYPGYTFRAVDALITNFHLPKSTLIMLVSAMAGREATLAAYEEAVKEKYRFFSFGDAMLIK

SEQ ID NO: 67604 - protein, 341 aa, Jeotgalibacillus salarius
  REGION 1..341: note = tr|A0A4Y8LEF0|A0A4Y8LEF0_9BACL S-adenosylmethionine:tRNA ribosyltransferase-isomerase; OS = Jeotgalibacillus salarius OX=546023 GN=queA PE=3 SV=1
MNIHDFDFELPEELIAQVPLEDRTSSRLMVLDKVTGKVEHQSFKNILDYLHEGDCLVLNDTKVLPARLIGEKKETGAAIEVLLLKQLEGERWETLVKPAKRIKPGTVITFGEGLLTAECIDTGDQGGRILEFSYDGIFYELLDQLGDMPLPPYIKEKLDDKDRYQTVFAKERGSAAAPTAGLHFTEDILDEIRSKGVSIAFITLHVGLGTFRPVSVDSIEEHDMHSEYYQLSAENADILNQARANGGKIITVGTTSTRTLETIADEQGHFEAQSGWTDIFIYPGYTFKASDVLLTNFHLPKSTLIMLVSAMAGREQTLTAYQAAVEKKYRFFSFGDAMLIK

SEQ ID NO: 67605 - protein, 341 aa, Jeotgalibacillus soli
  REGION 1..341: note = tr|A0A0C2VKP1|A0A0C2VKP1_9BACL S-adenosylmethionine:tRNA ribosyltransferase-isomerase; OS = Jeotgalibacillus soli OX=889306 GN=queA PE=3 SV=1
MKIEDFDFYLPDELIAQVPLEDRTSSRLMIVDKHTGAVSHQSFIEIIDYLNDGDCLVLNDTKVLPARLIGQKEDTGATIELLLLKQREGDQWETLVKPAKRLKVGTVISFGDGRLKATCKSIGEQGARVVEFSYEGIFYELLDQLGDMPLPPYIKEKLDDRDRYQTVFAKERGSAAAPTAGLHFTEELLERIHAKGVRIAFVTLHVGLGTFRPVSVNSIEDHDMHSEYYQMSKETAELLNNTKAQGGRIITVGTTSTRTLETIATENGHFAEANGWTSIFIYPGYTFKAVDALITNFHLPKSTLIMLVSALAGREATLSAYREAVEKNYRFFSFGDAMLIK

SEQ ID NO: 67606 - protein, 340 aa, Jeotgalibacillus sp.
  REGION 1..340: note = tr|A0A4R5XJA0|A0A4R5XJA0_9BACL S-adenosylmethionine:tRNA ribosyltransferase-isomerase; OS = Jeotgalibacillus sp. S-D1 OX=2552189 GN=E2R51_13130; PE = 3 SV=1
MHKVSGEFQIPPHLHASVPLEMKGLSRDSARMMVVNRTTGKAVHTLFTRLGDYLYAGDVVVLNNSRTIPAVLKGKQGKKQLEIRLSRKVKANQWDVLVIGEYCHKGGPISFIKGIQGEIVGSGSENPLMRMQFSVHGAEFYDFLYKAGEPVRYEYIETSWALDMYQTVYGSVPGSVEMASAGRAFSWKLLQSLKEMGIRIAFVQLHAGLSYYGDDRWPAPINHPEEFFVPEETAAMIQQAKKKGNRVVAVGTTVVRALESAVTAKGELQAKSGITDLYITKESSLKVVDCLLTGLHEPEASHMDLLTAFISENLLLDSYQQALMENYHWHEFGDVNLILN

SEQ ID NO: 67607 - protein, 341 aa, Jeotgalibacillus sp.
  REGION 1..341: note = tr|A0A4R5XS26|A0A4R5XS26_9BACL S-adenosylmethionine:tRNA ribosyltransferase-isomerase; OS = Jeotgalibacillus sp. S-D1 OX=2552189 GN=queA PE=3 SV=1
MNINDFDFHLPEELIAQVPLEDRTASRLMVLDKQTGDVSHRSFKDIVSFLNKGDCLVLNDTKVLPARLIGEKEGTGAAIELLLLKQIEGDRWETLVKPAKRLKIGTTVIFGDGRLRAVCAGIGDQGSRIMEFSYEGIFYELLDQLGDMPLPPYIKEKLDDRDRYQTVFAKERGSAAAPTAGLHFTEELLDRLRDGGVTIAFITLHVGLGTFRPVSVDSIEEHDMHSEYYQISNETACTLNEVREAGGRIITVGTTSTRTLETIADDQGRFSESSGWTNIFIYPGYTFKAVDALITNFHLPKSTLIMLVSALAGRNETLAAYQEAVKERYRFFSFGDAMFIK

SEQ ID NO: 67608 - protein, 340 aa, Jeotgalicoccus halophilus
  REGION 1..340: note = tr|A0A1G9E2X7|A0A1G9E2X7_9STAP S-adenosylmethionine:tRNA ribosyltransferase-isomerase; OS = Jeotgalicoccus halophilus OX=586411 GN=queA PE=3 SV=1
MKLDEFDFHLPENLIAQTPLKERTNSRLLAVNKKTGELSDKHFYNVADYFEAGDVLVLNDTKVLPARLFGIKEDTGAKIEMLLLKPIDTGYEVLIRPSKKVSPGTKVVFGEGKLQAVCIEKFDEGIHHMELIYDGILENVLDELGEMPLPPYIKEKLDDKDRYQTVFARESGSAAAPTAGLHFTETLLAEIKNKGVDIVYITLHVGLGTFRPVAAETIEDHKMHSEFYTMTAEAADMLNQAKADGKKIISVGTTSTRTLETIIHDHGEFKAASGFTDIFIYPGFEYKAVDVLITNFHLPKSSLVMLVSAFSSRENILNAYAHAVESKYRFFSFGDAMILY

SEQ ID NO: 67609 - protein, 340 aa, Jeotgalicoccus halotolerans
  REGION 1..340: note = tr|A0A3E0B1E2|A0A3E0B1E2_9STAP S-adenosylmethionine:tRNA ribosyltransferase-isomerase; OS = Jeotgalicoccus halotolerans OX=157227 GN=queA PE=3 SV=1
MKLEEFDFHLPENLIAQTPLKERTNSRLLAVNKTTGELTDKHFYDVADYFNPGDVLVLNDTKVLPARLFGIKEETGAKIEMLLLKPLDGGYEVLIRPAKKISIGTRINFGEGKLVAECTAKFEEGIHHMKLIYDGILEQVLDELGEMPLPPYIKEKLDDKDRYQTVFARESGSAAAPTAGLHFTETLLKEIQDKGVEIVYITLHVGLGTFRPVAAETIEDHKMHSEFYTMTADAAEKLNRAKDAGGKIISVGTTSTRTLETIMHEHGEFKEASGFTDIFIYPGFIYKAVDVLITNFHLPKSSLVMLVSAFSSREHILNAYAHAVDSEYRFFSFGDAMILY

SEQ ID NO: 67610 - protein, 340 aa, Jeotgalicoccus nanhaiensis
  REGION 1..340: note = tr|A0A4Y9HM05|A0A4Y9HM05_9STAP S-adenosylmethionine:tRNA ribosyltransferase-isomerase; OS = Jeotgalicoccus nanhaiensis OX=568603 GN=queA PE=3 SV=1
MKLEEFDFHLPENLIAQTPLKERTNSRLLAVNKTTGDLTDKHFYDVADYFTPGDVLVLNDTKVLPARLFGIKEETGAKIEMLLLKPLDGGYEVLIRPAKKISIGTRITFGEGKLVAECTAKFEEGIHHMKLIYDGILEQVLDELGEMPLPPYIKEKLDDKDRYQTVFARESGSAAAPTAGLHFTETLLKEIQDKGVEIVYITLHVGLGTFRPVAAETIEDHKMHSEFYMMTADAAEKLNRAKDAGGKIISVGTTSTRTLETIMHEHGEFKEASGFTDIFIYPGFIYKAVDVLITNFHLPKSSLVMLVSAFSSREHILNAYAHAVDSEYRFFSFGDAMILY

SEQ ID NO: 67611 - protein, 340 aa, unidentified
  source 1..340: note = Jeotgalicoccus saudimassiliensis
  REGION 1..340: note = tr|A0A078M3J8|A0A078M3J8_9STAP S-adenosylmethionine:tRNA ribosyltransferase-isomerase; OS = Jeotgalicoccus saudimassiliensis OX=1461582 GN=queA; PE = 3 SV=1
MKLEEFDFHLPENLIAQTPLKDRTSSRLLAVNKAAGELSDKHFYDVADYFNPGDVLVLNDTKVLPARLFGVKEDTGAKIEMLLLKPIDEGYEVLIRPSKKVNIGTRVVFGEGKLTAECTAKFEEGIHHMKLIYDGILENVLDELGEMPLPPYIKEKLDDKDRYQTVFARESGSAAAPTAGLHFTEELMQEIKNKGVEIVYITLHVGLGTFRPVAADTIEDHKMHSEFYTMTADAAKTLNDKKAAGGKIISVGTTSTRTLETIIHDHGEFKEASGFTDIFIYPGFEYKAVDVLITNFHLPKSSLVMLVSAFSSREHILNAYAHAVDSEYRFFSFGDAMILH

SEQ ID NO: 67612 - protein, 340 aa, Jeotgalicoccus sp.
  REGION 1..340: note = tr|A0A358JSJ7|A0A358JSJ7_9STAP S-adenosylmethionine:tRNA ribosyltransferase-isomerase; OS = Jeotgalicoccus sp. OX=1871619 GN=queA PE=3 SV=1
MKLDEFDFHLPEHLIGQTPLKERTNSRLLAVNKTTGELNDKHFYDVADYFKAGDVLVLNDTKVLPARLFGVKEETGAKIEMLLLKPLDDGYEVLIRPSKKISIGTRITFGEGKLVAECTAKFEEGIHHMKLIYDGILENVLDDLGEMPLPPYIKEKLEDQDRYQTVFARESGSAAAPTAGLHFTEELLKEIEDKGVDIVYITLHVGLGTFRPVAAETIEEHKMHSEFYTMTSSAAETLNNAKANGGKIISVGTTSTRTLETIIHDHGEFKEVSGFTDIFIYPGFEYKAVDVLITNFHLPKSSLVMLVSAFSSREHILNAYAHAVDSEYRFFSFGDAMILY

SEQ ID NO: 67613 - protein, 348 aa, Jhaorihella thermophila
  REGION 1..348: note = tr|A0A1H5WI60|A0A1H5WI60_9RHOB S-adenosylmethionine:tRNA ribosyltransferase-isomerase; OS = Jhaorihella thermophila OX=488547 GN=queA PE=3 SV=1
MKLSDFDFDLPEDLIATRPVTPRSSARLLVAEGDAITDAIVRDLGNWLRPGDRLVLNDTRVIPARLSGRRHRATPQGEVSARIEVTLLEPRAGGGWAALLKPLKKVKPGEEIAFEGGLSARLGSVEGGQGILRFNLEGDDFDAALARAGQMPLPPYIAARRPADERDREDYQTVFARHSGSVAAPTASLHFDEPLLARLRGMGVQFTHVTLHVGAGTFLPVKVEDVTTHKMHAEWGRVTEQAAAEITATRASGGRIIPVGTTALRLIESAARDGVIRPWEGKTDIFIYPGFRFQVTDALMTNFHLPKSTLMMLVSALMGQERIRRIYDHAIRERYRFFSYGDASLLIP

SEQ ID NO: 67614 - protein, 364 aa, unidentified
  source 1..364: note = Jiella sp.
  REGION 1..364: note = tr|A0A4Y8RU64|A0A4Y8RU64_9RHIZ S-adenosylmethionine:tRNA ribosyltransferase-isomerase; OS = Jiella sp. CBS5Q-3 OX=2558362 GN=queA PE=3 SV=1
MRVDLFDFDLPEERIALRPAVPREAARCLHVGSGGRLADHTIGDLPDLLAPGDVLVFNDTRVIPARLSGTRRREGVTTGEGIARVEATLHMRLAQDCWKAFLRPAKRVKAGDRIVFGSESDAACLMAGLVASVEERGEGGEATLRFELSGPALDEAIAAIGHIPLPPYIASKRAEDEADRRDYQTIFAKESGAVAAPTAGLHFTPELMERFAARGVATEFLTLHVGAGTFLPVKADDTADHRMHAEIGHVDEATATRLNAAREAGGRLVAVGTTSLRLLESAAGEDGIVRPFAGPTEIFITPGYRFRAVDRLVTNFHLPRSTLFMLVSAFSGLETMRAAYAHAIEAGYRFYSYGDACLLDPQDF

SEQ ID NO: 67615 - protein, 402 aa, unidentified
  source 1..402: note = Jiulongibacter sediminis
  REGION 1..402: note = tr|A0A0N8H9X9|A0A0N8H9X9_9BACT S-adenosylmethionine:tRNA ribosyltransferase-isomerase; OS = Jiulongibacter sediminis OX=1605367 GN=queA PE=3 SV=1
MLSPIHIEDYNYELPDEKIAKYPVEPRDSSKLLLLKNGEISSESFSNLVNELPPKAHLVFNNTKVIPARLYFRKETGALIEIFLLNPVSFGGEISQNMETFGPVVWQCMIGNKKKWKTGALRREFEIEGQSLEVSAEITDTEKNLIRFKWSGNEITFASLVKAFGEIPLPPYLNRNTEEKDLETYQTVYSEKEGAVAAPTAGLHFTKNTFAELSKAKIPTSYITLHVGAGTFQPVKAGNALEHDMHSEQMVFNKEFIKKLIENHETVIPVGTTSMRSLESLYWFGVKLIKEQENSVFQIPKLYPYQWGNQTLPEPKEALQAIDKFLEEKQVKQLTGSTEIFIFPGYQFRICKGIITNFHQPKSTLLLLISALIGEKWKEVYDFALQNKFRFLSYGDSSLLLP

SEQ ID NO: 67616 - protein, 350 aa, unidentified
  source 1..350: note = Jiulongibacter sediminis
  REGION 1..350: note = tr|A0A0P7CB11|A0A0P7CB11_9BACT S-adenosylmethionine:tRNA ribosyltransferase-isomerase; OS = Jiulongibacter sediminis OX=1605367 GN=queA PE=3 SV=1
MKLSQFKFDLPHSLIAMQPKEQRDGARMMVVDRATGKIEHKMFTDIVDYFDEGDIMVTNNTKVFPARLYGSKEKTGAKIEVFLLRELNREMRLWDVLVDPARKIRVGNKLYFGESDLVAEVIDNTTSRGRTIRFLFDGDHEEMMQTIHELGETPLPKDIIQREVNDLDRERFQTIFATEEGAVSAPTAGMHFTKNIMRKMQIKGVDFSPITLHIGIGTFRGVEVEDLTKHKTDSENFSIPQATCDVVNTALDSGKRVCAVGTTALKTLESSVSASDRLKAIENSWTDKFLFPPYEFKIGNSLLTNFHLPQSIVLMSACAFGGYDLIMEAYQVAIKEKYEFFTYGDVMLIL

SEQ ID NO: 67617 - protein, 343 aa, Johnsonella ignava
  REGION 1..343: note = tr|G5GJK0|G5GJK0_9FIRM S-adenosylmethionine:tRNA ribosyltransferase-isomerase OS=Johnsonella ignava ATCC 51276 OX=679200 GN=queA PE=3 SV=1
MKKSDFYYELPQELIAQDPLEVRSLSRLLVLHRTGAGIGIEHRQFTDILEYLKPGDCLVLNETRVIPARLFALKETTGAKIELLLLRRLSEGSWECIVKPGKRCRENTVLIFGDGLLKGVITGIGTGGNRIIKFEYNGIFEEILDKLGHMPLPPYIKHELKDKNRYQTVYAKNDGSAAAPTAGLHFTKELLEKVKDMGVNLAKITLHVGLGTFRPVKEDDILKHHMHSEYYIIDEEAANSINFAKQNGYRVICVGTTACRTVESASDNNGAVHAKSDMTDIFIYPGYKFKVMDGLITNFHLPESTLIMLVSAFAGHGRTLDAYREAVEHNYRFFSFGDAMLII

SEQ ID NO: 67618 - protein, 361 aa, Jonquetella anthropi
  REGION 1..361: note = tr|C9M7E6|C9M7E6_9BACT S-adenosylmethionine:tRNA ribosyltransferase-isomerase OS=Jonquetella anthropi E3_33 E1 OX=645512 GN=queA PE=3 SV=1
MSAEKAGLECRPAEETPHEPDFFSVQTYQYDLPQEQIAQVPVSPRDSCRLMTLDRRTGRVGHKVFRDLLDLLRPDDLLVRNDTRVLAGRLTGRKISGTAEVEVLLLRQEKENTWQALVRPGRRLPPGTEVDLQGAIAVVGPSISDDGVRLVTFSEGLDVKVWCDLHGQMPLPPYITSRESKNDDYQTVYAKDANSAAAPTAGLHFTEGLLAAIREKGVQILDVTLEVGLGTFRPVSEPDIRRHVMHSERCRVPAATLEAIRAAKSTGRRVIAVGTTVVRTLEGLWSTGKVDDRWFETQLFIYPGFHYQVVDGLITNFHLPGSTLMMLVSAFGGYEPVMAAYREAVAKGYRFFSFGDAMFIV

SEQ ID NO: 67619 - protein, 361 aa, Jonquetella anthropi
  REGION 1..361: note = tr|H0UK83|H0UK83_9BACT S-adenosylmethionine:tRNA ribosyltransferase-isomerase OS=Jonquetella anthropi DSM 22815 OX=885272 GN=queA PE=3 SV=1
MSAEKAGLECRPAEETPHEPDFFSVQTYQYDLPQEQIAQVPVSPRDSCRLMTLDRRTGRVGHKVFRDLLDLLRPDDLLVRNDTRVLAGRLTGRKISGTAEVEVLLLRQEKENTWQALVRPGRRLPPGTEVDLQGAIAVVGPSISDDGVRLVTFSEGLDVKAWCDLHGQMPLPPYITSRESKNDDYQTVYAKDANSAAAPTAGLHFTEGLLAAIREKGVQILDVTLEVGLGTFRPVSEPDIRRHVMHSERCRVPAATLEAIRAAKSTGRRVIAVGTTVVRTLEGLWSTGKVDDRWFETQLFIYPGFHYQVVDGLITNFHLPGSTLMMLVSAFGGYEPVMAAYREAVAKGYRFFSFGDAMFIV

SEQ ID NO: 67620 - protein, 349 aa, Joostella marina
  REGION 1..349: note = tr|I3C5W3|I3C5W3_9FLAO S-adenosylmethionine:tRNA ribosyltransferase-isomerase OS=Joostella marina DSM 19592; OX = 926559 GN=queA PE=3 SV=1
MKLSHFNFELPKELLAEYPSEHRDESRLMVLHRKEQKIEHKMFKDLIDYFDEGDVMVLNNTKVFPARLFGNKEKTGARIEVFLLRELNEEQRLWDVLVDPARKIRIGNKLYFGDDESLVAEVIDNTTSRGRTLRFLYDGSYEEFRKKLNDLGETPLPKYIKREVEETDEERYQTIYAKTEGAVAAPTAGLHFSKHLLKRLEIKGIDFAELTLHVGLGTFNPVEVEDLSKHKMDSEELFINDKAVEIVNSAKKNKRKVCAIGTTAMRGLESSVSSDLKLNPYEGWTNKFIFPPYDFSIANCMVTNFHTPKSTLLMMISAFAGHDFVMKAYKEAIKEGYKFYSYGDAMLIL

SEQ ID NO: 67621 - protein, 360 aa, unidentified
  source 1..360: note = Kaistia algarum
  REGION 1..360: note = tr|A0A2S5TXX4|A0A2S5TXX4_9RHIZ S-adenosylmethionine:tRNA ribosyltransferase-isomerase; OS = Kaistia algarum OX=2083279 GN=queA PE=3 SV=1
MRVDLFDFELPEENIALRPARPRDAARLMVVRPGEAPEDRIVRDLPDLLRPGDALVFNDTRVIPAQLFGERVRDGVAARIGVTLHMRESGSRWRAFVRPAKKIAEGERILFGECADRACLLAGLAATVTEKGEAGEVVLDFDLSGPALDEAIASVGHIPLPPYIASKRPEDGEDKRDYQTIYAREDGAVAAPTAGLHFTPELFDRLDAMGVARHFVTLHVGAGTFLPVKADDTAEHKMHAERGEVSAAVADALNAVRARGGRVVAVGTTSLRLLESATGEDRIIRPFHGPTSIFITPGYRFRAVDLLMTNFHLPRSTLFMLVSAFSGLETMRAAYAHAIANGYRFYSYGDASLLHPKADE

SEQ ID NO: 67622 - protein, 360 aa, Kaistia soli
  REGION 1..360: note = tr|A0A1M5GJA3|A0A1M5GJA3_9RHIZ S-adenosylmethionine:tRNA ribosyltransferase-isomerase; OS = Kaistia soli DSM 19436 OX=1122133 GN=queA PE=3 SV=1
MRVDLFDFELPDERIALRPAQPRDAARMLVVRPGAALEDRIARELPDLLQPGDALVFNDTRVIPAQLFGERVRDGVAAGIGVTLHMREAGDRWRAFVRPAKKILAGDRILFGETADRACLIAGLAATVAEKGEAGEVVLAFDLAGPALDEAIARVGHIPLPPYIASKRGEDERDRTDYQTIYAREEGAVAAPTAGLHFTPELFERLDARGIARHFVTLHVGAGTFLPVKADDTSDHRMHAERGEVSAETANALNEVRARGGRVVAVGTTSLRLLESAAGEDRIIRPFNAPTSIFITPGYRFRAVDLLMTNFHLPRSTLFMLVSAFSGLETMRAAYEHAIATGYRFYSYGDASLLFPAEIA

SEQ ID NO: 67623 - protein, 356 aa, unidentified
  source 1..356: note = Kalamiella piersonii
  REGION 1..356: note = tr|A0A3A9INZ5|A0A3A9INZ5_9GAMM S-adenosylmethionine:tRNA ribosyltransferase-isomerase; OS = Kalamiella piersonii OX=2364647 GN=queA PE=3 SV=1
MRVADFAFELPESLIAHYPQAQRSGCRLLSLDGPSGQLTHGVFTDVLEKLNPGDLLVFNNTRVIPARVYGRKASGGKIEMLVERMLDEKRVLAHVRASKAPKPGAQLLLGDDESVKATMVARHDTLFEIAFEDDRAVLDILNSVGHMPLPPYIDRPDEEADRELYQTVYSARPGAVAAPTAGLHFDEPLLAALREKGVEMAFVTLHVGAGTFQPVRVDSIEEHVMHSEYAEVPQEVVDAVLACKARGNKVVAVGTTSVRSLESAAQASKEALIAPFFDDTQIFIYPGYEYQVIDALITNFHLPESTLIMLVSAFAGYQHTMTAYQAAVAEAYRFFSYGDAMFITKNPQAPHEKVGA

SEQ ID NO: 67624 - protein, 349 aa, Kandleria vitulina
  REGION 1..349: note = tr|A0A0R2HDK5|A0A0R2HDK5_9FIRM S-adenosylmethionine:tRNA ribosyltransferase-isomerase; OS = Kandleria vitulina DSM 20405 OX=1410657 GN=queA PE=3; SV = 1
METLDINLFDYELPEELIAQTPLQKRDTSHLMVLNKETGDITHKHFYDIIDYLKPGDVLVRNNTKVIPARLFGTKEETNAHVEVLLLKNTHDDVWECLCGNAKKIKVDTVISFGDGRLKAKCLEVRDEGIRILEMIYDGIFYEILDQLGIMPLPPYIKEKLNDPDRYQTVYAKVEGSAAAPTAGLHFTPELLEKVREKGVEILDVTLHVGLGTFRPVKVENVLEHHMHSEYYEISEDVANELNKAKKEGRRIIAVGTTSCRTLESNIKKYGQFTAAHENTSIFIYPGYKFEAIDCLITNFHLPKSTLVMLVSALASREKILHAYKVAVEKKYRFFSFGDSMFITNETEL

SEQ ID NO: 67625 - protein, 363 aa, Kandleria vitulina
  REGION 1..363: note = tr|A0A1H2QHB2|A0A1H2QHB2_9FIRM S-adenosylmethionine:tRNA ribosyltransferase-isomerase; OS = Kandleria vitulina OX=1630 GN=queA PE=3 SV=1
MIAMVEMYTKGLFNMETLDINLFDYELPEELIAQTPLQKRDTSHLMVLNKETGDITHKHFYDIIDYLKPGDVLVRNNTKVIPARLFGTKEETNAHVEVLLLKNTHDDVWECLCGNAKKIKVDTVISFGDGRLKAKCLEVREEGIRILEMIYDGIFYEILDQLGIMPLPPYIKEKLNDPDRYQTVYAKVEGSAAAPTAGLHFTPELLEKIREKGVEILDVTLHVGLGTFRPVKVENVLEHHMHSEYYEISEDVANELNKAKKEGRRIIAVGTTSCRTLESNIKKYGQFTAAHENTSIFIYPGYKFEAIDCLITNFHLPKSTLVMLVSALASREKILHAYKVAVEKKYRFFSFGDSMFITNETEL

SEQ ID NO: 67626 - protein, 350 aa, Kangiella geojedonensis
  REGION 1..350: note = tr|A0A0F6RCN7|A0A0F6RCN7_9GAMM S-adenosylmethionine:tRNA ribosyltransferase-isomerase; OS = Kangiella geojedonensis OX=914150 GN=queA PE=3 SV=1
MQLQDFHFDLPDELIARYPTEQRSASRLLRLNGESGEVAHSKFFQLVDFLEPNDLLVFNNTRVLAARLFGKKSSGGQVEILIERIESDTEALAHVRANRSPKPGAILVLEEGTELEVLSKDGALFELRLLSGDWHSVMQAVGHMPLPPYIDREDELSDKERYQTVYSKVEGAVAAPTAGLHFDDELLDKIANKGVDTAFVTLHVGAGTFSPVRVDNILEHKMHSEWYELSEEVAEKVKRTREKGGRVIAVGTTSVRCLESASTEGGIKAGSGETDIFIYPGYVFRSVDALITNFHLPESTLMMLVSAFASRKHILDAYNEAVKEQYRFFSYGDSMFITAPFTGQDPDINR

SEQ ID NO: 67627 - protein, 365 aa, Kangiella koreensis
  REGION 1..365: note = tr|C7RB44|C7RB44_KANKD S-adenosylmethionine:tRNA ribosyltransferase-isomerase OS=Kangiella koreensis (strain DSM 16069 / KCTC 12182 / SW-125) OX=523791 GN=queA; PE = 3SV=1
MRLEDFHFDLPDELIARYPTEQRSASRLLCLDGQSGAVEHKHFYELVDLLNPNDLLVFNDTRVIPARLFGQKVTGGKLEILIERLDSDVEAIAHVRSNRTPKPGSEFVLENGFKVLITGRKEALFALQLQEGDWQTVMTAVGHMPLPPYIDRADELSDKERYQTVYSKVDGAVAAPTAGLHFDDALLEKIGNKGIDSTFVTLHVGAGTFSPVRVENITEHKMHSEWFEVSQEVCDKVNAARAKGGRVIAVGTTSVRCLESASANGYIQPHMGETDIFIYPGYQFRSVDALITNFHLPESTLMMLVSAFAGKDHIMNAYNEAVKEAYRFFSYGDSMFIHQINTESRLVETSGTAGSDSLRETHDAI

SEQ ID NO: 67628 - protein, 370 aa, unidentified
  source 1..370: note = Kangiella profundi
  REGION 1..370: note = tr|A0A2K9AE36|A0A2K9AE36_9GAMM S-adenosylmethionine:tRNA ribosyltransferase-isomerase; OS = Kangiella profundi OX=1561924 GN=queA PE=3 SV=1
MRLEDFHFDLPDELIARYPTEKRSASRLLCLDGQNGAVEHKHFYQLVDLLSPNDLLVFNNTRVIPARLFGQKITGGKLEILIERLDSDVEALAHIRSNRTPKPGSEFVLENGFKVLITGRKEALFTLQLQEGDWQTAMTSVGHMPLPPYIDREDELSDKERYQTVYSKVDGAVAAPTAGLHFDDELLQKIADKGVSTAFVTLHVGAGTFSPVRVDNITEHKMHSEWFEVSQEVCDKVIETRQKGGRVIAVGTTSVRCLESASMAGFIAPHVGETDIFIYPGYQFRSVDALITNFHLPESTLMMLVSAFAGKDHILNAYAQAVKEQYRFFSYGDSMFIHQIHLESRLEESKRNESKKTVSSDSSRESTDAI

SEQ ID NO: 67629 - protein, 351 aa, unidentified
  source 1..351: note = Kangiella sediminilitoris
  REGION 1..351: note = tr|A0A1B3BB27|A0A1B3BB27_9GAMM S-adenosylmethionine:tRNA ribosyltransferase-isomerase; OS = Kangiella sediminilitoris OX=1144748 GN=queA PE=3 SV=1
MRLQDFFFNLPDELIARYPTEQRTASRLLCLDGEQGDIQHNKFFQLIDFLEPNDLLVFNNTRVLPARLFGRKASGGQVEILIERVESDREAIAHVRANRSPKPGATLVLEDGTELEVLNKDNALYQLKLLTNDWNSVMQAVGHMPLPPYIDREDELSDKERYQTVYSEVEGAVAAPTAGLHFDDELLKRITDKGVETAFVTLHVGAGTFSPVRVDNILEHKMHSEWYEVSQNVCDKVIKARENGGRVIAVGTTSVRCLESASSDNGIQPGSGETDIFIYPGYDFKSVDALITNFHLPESTLMMLVSAFASKQHIFNAYDEAVKEQYRFFSYGDSMFITRPFKGEHPEIKAG

SEQ ID NO: 67630 - protein, 367 aa, Kangiella sp.
  REGION 1..367: note = tr|A0A2G2KQD3|A0A2G2KQD3_9GAMM S-adenosylmethionine:tRNA ribosyltransferase-isomerase; OS = Kangiella sp. OX=1920245 GN=queA PE=3 SV=1
MLKQEFQFDLPEHLIAYTPCEKRTDSRLLVINPDKQSINHHHFYELTDFVQPNDCLIFNNTKVIPARLFGMRESGGKVEVLIERVIGLARESANKTQKQTCLAQVRASNSPKAGVKIKIADDFWLEVTGRQDSFYVLENKSEDDLMMLIEKYGDMPLPPYIQRKAEDIDKERYQTVYAKERGAVAAPTAGLHFDEALLKKIKDKGIQHDFVTLHVGAGTFLPLRVDNINDHKMHSEWFSVSESVVELVNRTKKNGGRVIAVGTTSVRCLESASKDGTINVAQGETDIFIYPGYQFQSVDGLITNFHLSESTLMMLVSAFAGKEFIKTAYQEAIQNEYRFFSYGDSMFMENCLSKTVYKKPNLMESRT

SEQ ID NO: 67631 - protein, 350 aa, Kangiella sp.
  REGION 1..350: note = tr|A0A3D8URD1|A0A3D8URD1_9GAMM S-adenosylmethionine:tRNA ribosyltransferase-isomerase; OS = Kangiella sp. HD9-110m-PIT-SAG07 OX=2283595 GN=queA; PE = 3 SV=1
MQLQDFHFDLPDELIARYPTEQRSASRLLQLNGTTGEVNHSNFFQLVDFLEPNDLLIFNNTRVLPARLFGKKSSGGQVEILIERVESDVEAIAHVRANRSPKPGSILVLEDGSELEVLSKDGALFELKLLSSDWHSVMQAVGHMPLPPYIDREDELSDKERYQTVYSKVEGAVAAPTAGLHFDDELLAKISEKGVDTAFVTLHVGAGTFSPVRVENILEHKMHSEWYELSDEVAEKVKQTRLQGGRVIAVGTTSVRCLESASTSGEIKAGSGETDIFIYPGYQFQSVDALITNFHLPESTLMMLVSAFASRKHILNAYNEAVKEQYRFFSYGDSMFITVPFMGQHPDINS

SEQ ID NO: 67632 - protein, 351 aa, Kangiella spongicola
  REGION 1..351: note = tr|A0A318D8H3|A0A318D8H3_9GAMM S-adenosylmethionine:tRNA ribosyltransferase-isomerase; OS = Kangiella spongicola OX=796379 GN=queA PE=3 SV=1
MQLKDFHFDLPDELIARYPTEQRSASRLLRLDGETGDIQHSHFYQLTDFVEPNDLLVFNNTRVLPARLFGKKSSGGQVEILIERVESEHDALAHVRANRSPKPGARLVLEEGTEVEVISKDGAMYQLKLLSSDWHSVMQAVGHMPLPPYIDREDELSDKERYQTVYSEVEGAVAAPTAGLHFDDELLAKLSDKGVDTAFVTLHVGAGTFSPVRVDNILEHKMHSEWYELSQEVVDKVKQTRAKGGRVIAVGTTSVRCLESAAINGELEAGSGETDIFIYPGYVFRAVDALITNFHLPESTLMMLVSAFASKKHIMQAYDEAVSEQYRFFSYGDSMFITRPFSGAHPEALNQ

SEQ ID NO: 67633 - protein, 341 aa, unidentified
  source 1..341: note = Keratinibaculum paraultunense
  REGION 1..341: note = tr|A0A4R3KZH7|A0A4R3KZH7_9CLOT S-adenosylmethionine:tRNA ribosyltransferase-isomerase; OS = Keratinibaculum paraultunense OX=1278232 GN=queA PE=3; SV = 1
MKTEDFYYDLPEELIAQHPIADREASRMLVLDKKAGKIEHRYFRDIIDYLNRGDCLVLNDTRVIPARLFGRREGKEEKIEFLLLRRLEGDQWETLVKPGKKVRPFNKIVFGDGLLVADVLDIEEDGTRIVEFSYDGIFEEILDKLGQMPLPPYIKEKLKDKERYQTVYSKHEGSAAAPTAGLHFTKRLLNDIKDKGVDIAFLTLHVGLGTFRPVKVENIEEHHMHAEYYNISKETAQKINIAKEKGRNVIAVGTTTVRTLETVATEDGIVVPGKGWTDIFIYPGYTFKVVDKLITNFHLPESTLLMLVSALAGRDNIFHAYNEAIKKRYRFYSFGDAMFIK

SEQ ID NO: 67634 - protein, 350 aa, Kerstersia gyiorum
  REGION 1..350: note = tr|A0A4Q7MX26|A0A4Q7MX26_9BURK S-adenosylmethionine:tRNA ribosyltransferase-isomerase; OS = Kerstersia gyiorum OX=206506 GN=queA PE=3 SV=1
MSTPLLLSDYDYTLPPELIAQTPAARRDASRLLRLDPQAQLHDMHFSQLPALLRPADLLVFNDTRVIKARLFGIKHSGGKIEVLVERILSGTEVLAHIRSSKSPKPGSGIRLADAFDAEVLGRDGALFHLRFPADALSLLDQHGSTPLPPYIEHSPDAEDDSRYQTVYAREPGAVAAPTAGLHFDEAMLDRLAAQGVARAFVTLHVGAGTFQPVRAERLEDHVMHAERYTVPAATLEAIAQARAAGGRVIAVGTTSVRALESAAAQLAGKAPPPGQAMTGDTRLFITPGYRFHYIDALITNFHLPQSTLLMLVSALAGVEPIKRAYAHAVAERYRFFSYGDAMFIESPAA

SEQ ID NO: 67635 - protein, 350 aa, Kerstersia gyiorum
  REGION 1..350: note = tr|A0A171KW48|A0A171KW48_9BURK S-adenosylmethionine:tRNA ribosyltransferase-isomerase; OS = Kerstersia gyiorum OX=206506 GN=queA PE=3 SV=1
MSTPLLLSDYDYTLPPELIAQTPAARRDASRLLRLDPQAQLHDMHFSQLPALLRPADLLVFNDTRVIKARLFGIKHSGGKIEVLVERILSGTEVLAHIRSSKSPKPGSGIRLADAFDAEVLGRDGALFHLRFPADALSLLDQHGSTPLPPYIEHSPDAEDDSRYQTVYAREPGAVAAPTAGLHFDEAMLDRLAAQGVARAFVTLHVGAGTFQPVRAERLEDHVMHAERYTVPAATLEAIAQARAAGGRVIAVGTTSVRALESAAAQLAGKAPPPGQAITGDTRLFITPGYRFHYIDALITNFHLPQSTLLMLVSALAGVEPIKRAYAHAVAERYRFFSYGDAMFIESPAA

SEQ ID NO: 67636 - protein, 339 aa, unidentified
  source 1..339: note = Ketobacter alkanivorans
  REGION 1..339: note = tr|A0A2K9LI54|A0A2K9LI54_9GAMM S-adenosylmethionine:tRNA ribosyltransferase-isomerase; OS = Ketobacter alkanivorans OX=1917421 GN=queA PE=3 SV=1
MKRTDFHYELPERLIARYPMPQRSGSRLLCMDRQAGTLQDRRFTDLVSWLKPGDLLVFNNTRVIPARVFGQKETGGRVEVLVERITGPDSCLAHVRASKSPKPGSRILVEGAGSLLMEGRQGDLFQLRSQQGELLDWLQKVGHMPLPPYIDRADESLDQERYQTVYASNPGAVAAPTAGLHFDEALLETLKRQGVATTFVTLHVGAGTFQPVRADDIRDHNMHSEWLQVDADTVAKVRQTKAEGGRVIAVGTTSVRCLETAARETGQIAPFTGETDIFIYPGYTFNVIDGLVTNFHLPESTLIMLVSALAGREPVLSAYQHAVEQEYRFFSYGDAMLIL

SEQ ID NO: 67637 - protein, 340 aa, unidentified
  source 1..340: note = Ketobacter sp.
  REGION 1..340: note = tr|A0A3L8C7C2|A0A3L8C7C2_9GAMM S-adenosylmethionine:tRNA ribosyltransferase-isomerase; OS = Ketobacter sp. OX=2083498 GN=queA PE=3 SV=1
MKRTDFHYDLPDQLIARYPMPERSGSRLLCLGRTTGTLTDQRFTDLAEWLRPGDLLVFNNTKVIPARVYGQKETGGKVEVLVERITGPDSCLAHVRASKSPKPGSRILVEGAGNLLMEGRQGDLFMLRSEQGNLLDWLQQVGHMPLPPYIDRADESLDQDRYQTVYAQNPGAVAAPTAGLHFDEPLLQQLQEKGVDTAYVTLHVGAGTFQPVRTDDVRDHVMHSEWLQVGEAAVEKIRETKANGGRVIAVGTTSVRSLETAARANGGEVAPFEGETDIFIYPGYSFAVIDGLITNFHLPESTLVMLVSAFAGRDPVLNAYRHAVAQEYRFFSYGDAMLII

SEQ ID NO: 67638 - protein, 348 aa, unidentified
  source 1..348: note = Ketobacter sp.
  REGION 1..348: note = tr|A0A3L8BH66|A0A3L8BH66_9GAMM S-adenosylmethionine:tRNA ribosyltransferase-isomerase; OS = Ketobacter sp. OX=2083498 GN=queA PE=3 SV=1
MKRADFHYELPDHLIARYPMAERSGSRLLCLDRSSGTLQDQRFTDLPQYLQAGDLLVFNNTRVIPARVFGKKETGGKVEVLVERITGPNQCLAHVRASKSPKPGSRILVEGQVDGLEQSVGSLVMEGRQGDLFRLRSEQGNLLDWLQQVGHMPLPPYIDRADESLDQDRYQTVYAQAPGAVAAPTAGLHFDEPLLRQLQEKGVDTAYVTLHVGAGTFQPVRADDIRDHVMHSEWLQVDQGTVDKIQATRARGGRVIAVGTTSVRSLETAAAANHGQIAAFAGETDIFIYPGYDFAVVDGLVTNFHLPESTLIMLVSAFAGREPVLKAYQHAVQQEYRFFSYGDAMLIL

SEQ ID NO: 67639 - protein, 347 aa, Ketogulonicigenium robustum
  REGION 1..347: note = tr|A0A1W6P0I5|A0A1W6P0I5_9RHOB S-adenosylmethionine:tRNA ribosyltransferase-isomerase; OS = Ketogulonicigenium robustum OX=92947 GN=queA PE=3 SV=1
MKLSDFDFTLPEELIALRPAVPRTAAKLLVARGDTIADMTVADLAAQFNPGDRLVLNDTKVIPARLSGHRHRGEASAHIEVTLLQPTADGCWMALIKPLRKVQEGEDIVFSPRLSATLVGRQGDQAKLQFNLTGDDFDAALAEAGQMPLPPYIAARRAADAQDRKDYQTLWADRPGAVAAPTASLHFDADVMAALAARGVTLTRVTLHVGAGTFLPVKVDDISQHKMHAEWGEVTPAAAAEIAQTKAAGGRVIPVGTTALRLLETAARDTGAISPWVGETDIFITPGFQFRVADGLVTNFHLPKSTLMMLVSGLMGADRIRAIYDHAIAAQYRFFSYGDASLLLPKG

SEQ ID NO: 67640 - protein, 255 aa, Ketogulonicigenium vulgare
  REGION 1..255: note = tr|E3EZL4|E3EZL4_KETVY S-adenosylmethionine:tRNA ribosyltransferase-isomerase OS=Ketogulonicigenium vulgare (strain Y25) OX=880591 GN=EIO_0412 PE=3 SV=1
MALIKPLRKLHEGEDIVFTSRLSATLIGRDGDQAKLRFNLTGDDFDAALAEAGQMPLPPYIAARRAADAQDLQDYQTIWADRPGAVAAPTASLHFDAAVMAALAARGVTLTRVTLHVGAGTFLPVKVDDIAQHKMHAEWGEVTATAAAEIAATKAAGGRVIPVGTTALRLLETAARDTGAIAPWVGETDIFITPGFNFRVADGLVTNFHLPKSTLMMLVSGLMGADRIRAIYDHAIAQRYRFFSYGDASLLLPKG

SEQ ID NO: 67641 - protein, 347 aa, Ketogulonicigenium vulgare
  REGION 1..347: note = tr|F9Y977|F9Y977_KETVW S-adenosylmethionine:tRNA ribosyltransferase-isomerase OS=Ketogulonicigenium vulgare (strain WSH-001) OX=759362 GN=queA PE=3 SV=1
MKLSDFDFTLPEDLIALRPAVPRTAAKLLVARGDTISDLTVAELAAQFNPGDRLVLNDTKVIPARLSGLRHRGEATARIEVTLLQPTADGAWMALIKPLRKLHEGEDIVFTSRLSATLIGRDGDQAKLRFNLTGDDFDAALAEAGQMPLPPYIAARRAADAQDLQDYQTIWADRPGAVAAPTASLHFDAAVMAALAARGVTLTRVTLHVGAGTFLPVKVDDIAQHKMHAEWGEVTATAAAEIAATKAAGGRVIPVGTTALRLLETAARDTGAIAPWVGETDIFITPGFNFRVADGLVTNFHLPKSTLMMLVSGLMGADRIRAIYDHAIAQRYRFFSYGDASLLLPKG

SEQ ID NO: 67642 - protein, 311 aa, Kibdelosporangium aridum
  REGION 1..311: note = tr|A0A1Y5XEV3|A0A1Y5XEV3_KIBAR S-adenosylmethionine:tRNA ribosyltransferase-isomerase; OS = Kibdelosporangium aridum OX=2030 GN=SAMN05661093_02062; PE = 3 SV=1
MMISAVEPPEAHGVPRDGVRMLVASPSGVKHAHFNDLAQFLRPGDLVVVNTSGTMPAAVDGELTVHFSTWLDDGSWVVELRPEGTEGHVGQRVSLPEGYLELVEPYVPGRLWRARVSVDVPSLLARFGRPIKYSYVPQQWPLADYQTVFARESGSAEMPSAGRPFSPELVTSLVSAGVLIAPITLHTGVSSIEEGKPPLPERFHVPALTARLVSMTRAAGGRVIAVGTTVTRALESAPHGGQGWTDLVLGPSRPATVVNGLITGWHAPGASHLQLLQAVAGRELVDAAYEAAAREGYLWHEFGDSCLLLPA

SEQ ID NO: 67643 - protein, 311 aa, Kibdelosporangium aridum
  REGION 1..311: note = tr|A0A428YXX7|A0A428YXX7_KIBAR S-adenosylmethionine:tRNA ribosyltransferase-isomerase; OS = Kibdelosporangium aridum OX=2030 GN=DMH04_39010 PE=3; SV = 1
MMISAVEPPEAHGVRRDEVRMLVASPSGVKHAHFNDLAQFLRPGDLVVVNNSGTMPAAVDGSLTVHFSTWLDDGSWVVELRPEGTEGHVGQRVSLPEGHLELIEPYEPGRLWRARVSVDVPSLLARFGRPIKYSYVPQQWPLADYQTVFARDSGSAEMPSAGRPFSPELVTSLVSAGVLFAPITLHTGVSSIEEGKPPLPERFHVPALTARLVSMTRAAGGRVIAVGTTVTRALESAPDGGEGWTDLVLGPSRPAKIVNGLITGWHAPGASHLQLLQAVAGRDLVDVAYEAAAREGYLWHEFGDSCLLLPA

SEQ ID NO: 67644 - protein, 350 aa, unidentified
  source 1..350: note = Kiloniella litopenaei
  REGION 1..350: note = tr|A0A0M2RFT0|A0A0M2RFT0_9PROT S-adenosylmethionine:tRNA ribosyltransferase-isomerase; OS = Kiloniella litopenaei OX=1549748 GN=queA PE=3 SV=1
MKTDLFDFELPRDVIAQRPENPRDMAKLLSVGNNLTDHRMIDLPDLIQAGDLLVFNDTKVIPARLKGKRGEAGVEVTLHKQEPPSAEGGARWWTFAKPAKKLKPDDIIRFANGFTAKVENKLDGGEVLLNFDLTPEKLYPHLEEHGKMPLPPYIQREVGSDKQDAEDYQTRFAKHRGAVAAPTASLHYTDRLMSALDAKGIEHITLTLHVGAGTFLPVKVDDLRDHKMHSEIGFLDQETADRINQVRKNGGRIIAVGTTALRLLESAAAQDGTLHPFDGETDIFITPGYKFKIVDLLLTNFHLPRSTLFMLVSAFAGLDRMRNAYKHAIDNGYRFYSYGDCSLLQREDHL

SEQ ID NO: 67645 - protein, 350 aa, unidentified
  source 1..350: note = Kiloniella spongiae
  REGION 1..350: note = tr|A0A0H2MU44|A0A0H2MU44_9PROT S-adenosylmethionine:tRNA ribosyltransferase-isomerase; OS = Kiloniella spongiae OX=1489064 GN=queA PE=3 SV=1
MKTDLFDFELPRNVIAQRPENPRDMAKLLSVGNNLTDHRMLDLPDLIQPGDLLVFNDTKVIPARLKGKRGEAGIEVTLHKQEPPSTDGGARWWTFAKPAKKLKPDDVVRFADGFTAKVENKLDGGEVLLCFDLTPEELYPHLEEHGKMPLPPYIQREKGSDKQDAEDYQTRFAKYRGAVAAPTASLHYTDRLMSALDAKGIEHITLTLHVGAGTFLPVKVDDLRDHKMHSEIGYLNQKTTDHINKIRENGGRIIAVGTTALRLLESAADQNGILHPFDGETDIFITPGYKFKIVDLLLTNFHLPRSTLFMLVSAFAGLDRMRNAYQYAIDNGYRFYSYGDCSLLQREDHL

SEQ ID NO: 67646 - protein, 355 aa, unidentified
  source 1..355: note = Kineothrix alysoides
  REGION 1..355: note = tr|A0A4R1R3N5|A0A4R1R3N5_9FIRM S-adenosylmethionine:tRNA ribosyltransferase-isomerase; OS = Kineothrix alysoides OX=1469948 GN=queA PE=3 SV=1
MEEFKKSDFYFELPEELIAQDPLEDRSGSRLLMLNKDTGEMMHRIFRDIIDYLEPGDCLVLNDTKVIPARLLGTKADTGAATEVLLLKRRENDIWEALVKPGKKARPGSVISFGDGILTGEVLDVVDEGNRLIRFRYEGIFEEVLDRLGEMPLPPYITHKLQDKNRYQTVYAKYEGSAAAPTAGLHFTKELLGKIEEKGVKIAYVTLHVGLGTFRPVKADNILEHHMHSEYYQVTKEAADTINDTKRGGKRVICIGTTSCRTVESAADENGVLHEGCGNTEIFIYPGYRFKILDGLITNFHLPESTLVMLVSALAGKEHVLAAYEEAIREKYRFFSFGDAMFITDVTVHSVLSNV

SEQ ID NO: 67647 - protein, 340 aa, Kingella denitrificans
  REGION 1..340: note = tr|F0EX75|F0EX75_9NEIS S-adenosylmethionine:tRNA ribosyltransferase-isomerase OS=Kingella denitrificans ATCC 33394 OX=888741 GN=queA PE=3 SV=1
MHISEFDFHLPEHLIAQNPPAVRGSSRLLVAQHNQPIEDRHFPDLPNYIATGDVLVFNNTKVMKARLFGQKATGGKIEALIERVLDEHTALAHIRSSKSPKAGTELIFEGSLHATMTERVGELFKLQFHHRHNVYTLLEEYGALPLPPYIVRPADDNDDARYQTVYAKYQGAVAAPTAGLHFTHEILSALQQKGVEFAEVTLHVGAGTFQPVRVDNIAEHKMHSEWFDVPEATVAKIQAAKARGNRVWSVGTTSLRAIESAARSGSLHAGQGDTDIFITPGYTFRVIDGLITNFHLPKSTLLMLVSAFAGSERIREIYRHAIEQEYRFFSYGDAMLLHRA

SEQ ID NO: 67648 - protein, 341 aa, Kingella kingae
  REGION 1..341: note = tr|F5S5V7|F5S5V7_9NEIS S-adenosylmethionine:tRNA ribosyltransferase-isomerase OS=Kingella kingae ATCC 23330; OX = 887327 GN=queA PE=3 SV=1
MHISDFDFDLPEHLIAQNPPAVRGSSRLLVALPNQPFADQHFADLLNYVRAGDIFVFNNTKVMKARLFGQKTSGGKIEALIERVLDTHTALAHIRSSKSPKAGAELIFTGDIHATMTERVGELFKLHFSGEQTVYELLEQHGVLPLPPYIVRSADDNDDNRYQTVYAKHQGAVAAPTAGLHFTDDLLSSLQQKGIEFAEVTLHVGAGTFQPVRVENIAEHKMHSEWFDVPADTVAKIAAAKARGNHIWSVGTTSLRAIESAARSGTLQAGQGDTDIFITPPYPFQVIDRLITNFHLPKSTLLMLVSAFTGSERIRQLYQHAIGKEYRFFSYGDAMILGREP

SEQ ID NO: 67649 - protein, 340 aa, unidentified
  source 1..340: note = Kingella negevensis
  REGION 1..340: note = tr|A0A238TF02|A0A238TF02_9NEIS S-adenosylmethionine:tRNA ribosyltransferase-isomerase; OS = Kingella negevensis OX=1522312 GN=queA PE=3 SV=1
MNISDFDFHLPEHLIAQNPPAVRGSSRLLVALPESPLQDKHFTDLPDYVAAGDLMIFNNTKVMKARLFGQKASGGKIEALIERVLDAHTALAHIRSSKSPKAGAELIFEGDIRATMVERKEELFKLHFSGSETVYELLEHNGHMPLPPYIVRDANDNDDSRYQTVYAKHQGAVAAPTAGLHFTDELLGSLKNKGVDFAEVTLHVGAGTFQPVRVDNIAEHKMHSEWYSVSEEAVAKIAKTKARGGKVWAVGTTSMRAIESAARLGSLKAGQGDTDIFITPGYQFQVIDRMVTNFHLPKSTLLMLVSAFSGSEHIREVYRHAIEQEYRFFSYGDAMILERI

SEQ ID NO: 67650 - protein, 340 aa, Kingella oralis
  REGION 1..340: note = tr|C4GEZ6|C4GEZ6_9NEIS S-adenosylmethionine:tRNA ribosyltransferase-isomerase OS=Kingella oralis ATCC 51147; OX = 629741 GN=queA PE=3 SV=1
MQLSDFDFTLPEHLIAQNPPATRGNSRLLVALPDAPFTDKQFADLPSYINAGDVLVFNNTKVMRARLFGQKASGGKIEALIERVLDAHTALAHIRSSKSPKAGAALIFDGDIHATMLERADELFKIQFAGEETVYELLERHGKLPLPPYIVRAADADDDERYQTVYAKFQGAVAAPTAGLHFTDALLGSLKAKGVEFAEVTLHVGAGTFQPVRVDNIAEHKMHSEWFDVPADTVAKIAAAKQRGSKVWSVGTTSLRAIESAARSGSLKAGQGDTDIFITPGFSFQVIDRLITNFHLPKSTLLMLVSAFSGCDKIRAVYRHAVEQEYRFFSYGDAMILGRE

SEQ ID NO: 67651 - protein, 342 aa, Kingella potus
  REGION 1..342: note = tr|A0A377R4A3|A0A377R4A3_9NEIS S-adenosylmethionine:tRNA ribosyltransferase-isomerase; OS = Kingella potus OX=265175 GN=queA PE=3 SV=1
MLLSDFDFHLPEHLIAQHPPAERGTSRLLAALPGEPLRDETFAFLPQLAQAGDLFVFNNTKVIKARLFGQKESGGRIEALIERVLDECTALAHIRASKSPKPGTMLLFDGGIRAEMAERAGALFVLRFEGGENVYRILERCGHLPLPPYIARAVGSDDEARYQTVYAKHQGAVAAPTAGLHFTDALLSELRAKGVRTAEITLHVGAGTFQPVRSENIAEHKMHSEWYEIPEDTAAAVADTKARGGRVWAVGTTSVRALESAARSTGRLQAGSGDTDIFLTPGCRFCVADRLVTNFHLPKSTLLMLVSAFAGTEEIRRIYRHAVERQYRFFSYGDAMVLGRKE

SEQ ID NO: 67652 - protein, 379 aa, Kinneretia asaccharophila
  REGION 1..379: note = tr|A0A4R6NCW9|A0A4R6NCW9_9BURK S-adenosylmethionine:tRNA ribosyltransferase-isomerase; OS = Kinneretia asaccharophila OX=582607 GN=queA PE=3 SV=1
MQACLERVRPALNTTMSDTALSSAAALQRDYSVADFDFELPPELIAQTPAAERSASRLLDGRSSPPVDRIFRELPQLLNPGDLLVFNNTKVIKARLYGQKASGGAVEALVERVLPAAAGGQSDEVWAHMRASKSPKPGARVSFADGAFEAEVLGRCGPDNGLFHLRLSGDAFELLERHGHVPLPPYIEHADSEDDVRRYQTVFAKEPGAVAAPTAALHFDEGVLAALAARGVATAHVTLHVGAGTFQPVRVDKLSEHKMHSEWFEVSPATVDAIAACKARGGQVVAVGTTTLRALESAALGGSLQAGARETDIFITPGFQFRVVDRLVTNFHLPKSTLMMLVSAFAGYEPIMALYRHAIAQGYRFFSYGDAMLLERRTG

SEQ ID NO: 67653 - protein, 363 aa, unidentified
  source 1..363: note = Kiritimatiella glycovorans
  REGION 1..363: note = tr|A0A0G3EG15|A0A0G3EG15_9BACT S-adenosylmethionine:tRNA ribosyltransferase-isomerase; OS = Kiritimatiella glycovorans OX=1307763 GN=queA PE=3 SV=1
MKSHDSTPDPGRLEAYDYDLPRERIAQHPSPVRHESRMMEVRRDRDEFRHRRVSDLPDLLEAGDLLVFNDTRVIPARIFGHKKTGGQVELLLLEEQPSGEWEALLKCSRRPAAGEDVECCGGELRAAVLEHGERGRVRLRLRHRRPLMEILEEYGLPPLPPYIDRSDASSEQVRQDRARYQTVYAAEPGAVAAPTAGLHFSPELLDRLEARGVQRAMVTLHVGLGTFRPVTESRIERHRMDEERYRIPAQTRAMIAAARNAQRRVIAVGSTVVRTLESEADRLDPGPEGSAGGDLEGRSGLFIYPPYPFRSIDAILTNFHLPRSTLLMMMAAFAGRERILSAYREAVREQYRFYSYGDCMLIL

SEQ ID NO: 67654 - protein, 341 aa, unidentified
  source 1..341: note = Kiritimatiellaceae bacterium
  REGION 1..341: note = tr|A0A2E1U2W0|A0A2E1U2W0_9BACT S-adenosylmethionine:tRNA ribosyltransferase-isomerase; OS = Kiritimatiellaceae bacterium OX=2026752 GN=queA PE=3; SV = 1
METAFFNYELPEHLIAQQPAEQRDNARMLVLHRQTGKIEHRTVREIGDYLTPKDCLVLNNTQVIPARLFGQKQTGGKIELLLLNEEKPHHWRVLLKSSRRPAPGSHLTLCNGEAQAEMITDGEKGEALLRIESAKPFIELLTKHGLPPLPPYIHRATPDEYATDRERYQTVYASQPGAAAAPTAGLHFTPELLTNLKQKGITTCELTLHVGLGTFRPVTAEIITDHTMHAERYEVSPQTAEKLRHAREQSGRIIAVGSTSVRTLESLPTLQPASGSTDIFIYPPHTFQHTDAILTNFHLPQSTLLMMMAAFTDRKTLLNAYHEAISHRYRFFSYGDCMLIL

SEQ ID NO: 67655 - protein, 341 aa, unidentified
  source 1..341: note = Kiritimatiellaceae bacterium
  REGION 1..341: note = tr|A0A2D7D8J1|A0A2D7D8J1_9BACT S-adenosylmethionine:tRNA ribosyltransferase-isomerase; OS = Kiritimatiellaceae bacterium OX=2026752 GN=queA PE=3; SV = 1
MKTELFDYHLPETLIAQHPAQQRDQSRMLVLHRASGMLEHRTIRDLPEYLAAPDCLVLNNTQVIPARLFGQKETGGKIELLLLHEEKPQHWRALLKASRRPAPGSHFTLCNGEANATLLQDGEKGEALLHIESNRPLLELLDQYGLPPLPPYIRRKSPEDYTTDRTRYQTIYASQPGAAAAPTAGLHFTPQLLDHLKQKGIHPCQLTLHVGLGTFRPVTAENITDHTMHAEQYHVTSEAAQQLQETRQNGGRILAVGSTSVRTLESLPSLQPASGATDIFIYPPYTFRHTDAILTNFHLPQSTLLMMMSAFSSREQLLNAYQEAVAHQYRFFSYGDCMLIL

SEQ ID NO: 67656 - protein, 353 aa, unidentified
  source 1..353: note = Kitasatospora albolonga
  REGION 1..353: note = tr|A0A1V0V375|A0A1V0V375_9ACTN S-adenosylmethionine:tRNA ribosyltransferase-isomerase; OS = Kitasatospora albolonga OX=68173 GN=B7C62_05850 PE=3; SV = 1
MPPELSARVPAEQRGAGRDDVRLLVTRGTAVSHHAFRELAGQLRAGDVLVVNTSATLAAAVNGRLGGERVVVHFSTRGDDGRWAVELRAPGASGATVPRPGGPAGGLVRLPGGRELVLEEPLGPVVGARLWWARVGRDVPELLRRYGRPIRYGYTERDQPLSAYQTVFAVQAPDGGGSAEMPSAARPFTAALVAELVSRGVQFAPLSLDTGVASAEAHEPPYPERFAVPATTAWLVNAARAAGGRVVAVGTTAVRALESAVDADGAVRPVAGWTDLVVTPRRGVRVVDGLLTGLHEPAASHLLMLEAVAGREALRRGYEAAVERRYLWHEFGDVHLILPDEERNTPDCSSNER

SEQ ID NO: 67657 - protein, 353 aa, Kitasatospora atroaurantiaca
  REGION 1..353: note = tr|A0A561EZQ0|A0A561EZQ0_9ACTN S-adenosylmethionine:tRNA ribosyltransferase-isomerase; OS = Kitasatospora atroaurantiaca OX=285545 GN=FB465_6261; PE = 3 SV=1
MTTALETGFDFTVPPELSAHAPAEARGLARDRIRMLVGRREGLITEHRSFAELPEVLRPGDLLVVNNSATLPAALPGRLPDGTAVALHLSSARPDPRGHHLVELRRPAAGASEYFPPDRSPARPGLHVTLPGGASAELTAPYTPRLWHARLSLPGELTAYLARHGRAIRYGYVDRDWPIEAYQTVFASEPGSSEMPSAARPFTAELVARLVAGGVLVAPITLHTGVASPEAHEAPYPERFRVPGTTARLAEHVRSQGGRVIAVGTTAVRALESAVGPDGRLRAAEGWTELVITPERGVRAVDGLLTGWHEPRASHLLMLQAVAGRPLLDRCYAEAVEGRYLWHEFGDVNLLLP

SEQ ID NO: 67658 - protein, 355 aa, unidentified
  source 1..355: note = Kitasatospora aureofaciens
  REGION 1..355: note = tr|A0A1E7MX78|A0A1E7MX78_KITAU S-adenosylmethionine:tRNA ribosyltransferase-isomerase; OS = Kitasatospora aureofaciens OX=1894 GN=B6264_23230 PE=3; SV = 1
MTTLTELDLHVTVPPELSARAPAEARGGARDGVRMLVGRRATGAVEHRRFTELPEALRPGDLLVVNNSGTLPAALPGRLPDGTPVALHLSSAQPDQRGSHLVELRRPVPGSAASYYPPQESPARPGLHVALPAGGAAELVQPFTDRLWYAELSLPATLLPYLRLHGRAIRYGYVDRDWPIEAYQTVFASVPGSSEMPSAARPFTPTVVARLAGRGVLVAPVTLHTGVASPEAHEAPYAERFRVPATTARLVGHVRAGGGRVIAVGTTVVRALESAVGPDGTLQEADGWTELVITPERGVRGVDGLLTGWHEPRASHLLMLAAVAGRPLLTACYREAVRQRYLWHEFGDVNLLLPD

SEQ ID NO: 67659 - protein, 371 aa, unidentified
  source 1..371: note = Kitasatospora aureofaciens
  REGION 1..371: note = tr|A0A0L8PQW9|A0A0L8PQW9_KITAU S-adenosylmethionine:tRNA ribosyltransferase-isomerase; OS = Kitasatospora aureofaciens OX=1894 GN=ADK78_08860 PE=3; SV = 1
MTAEVLRVPPELSAREPAEQRAPGQGRDAVRLLVSRGTAEPSHHAFKELPRLLSAGDVLVVNTSRTLPAALDGRLGDGRGRGEPVVVHFSTRADRQHPRPEAAAGDWTVELRTPDGCGSTRQRAGGPAGTVVRLPGGARLELRAPVERGGVRLWWARVSGAPVAELLRRYGRPIRYGYTDRDQPLDAYQTVFAVGSPDGGGSAEMPSAARPFTASLVARLVSRGVQIAPVTLHTGVASAEAYEPPYPERFAVPPSTAWQINAARAGGGRVVAVGTTAVRALETAADADGRIRAASGWTELVVTPERGVRAVDGLLTGLHEPQASHLLMLAAVGQVAAGADFGDALCRAYAEAVRRRYLWHEFGDLHLILPS

SEQ ID NO: 67660 - protein, 372 aa, Kitasatospora cheerisanensis
  REGION 1..372: note = tr|A0A066Z4G6|A0A066Z4G6_9ACTN S-adenosylmethionine:tRNA ribosyltransferase-isomerase; OS = Kitasatospora cheerisanensis KCTC 2395 OX=1348663; GN = KCH_12190 PE=3 SV=1
MENTHDPGDYEFDLPDTLVAQEPPEARGGRRTDARLAVLRRGTEQVDHRGFHEIAELFEPDDVLVLNNARVVPTLLHGEDQDGRVVAVSIHSPNEDGTWHCLVAPEAVCRPGARFVLGPGRQVTGRLLAEADPGVWRIELDPADGDTLYRLAEPIYPGYLKQAPADPEYYQNTFASRPGAVLFPSAGRHFTPAVLDELRARGVAVAEVTLLLAARSHHFVRQVFRQQVAAGGAGDVEAEDRVERATRTKGFDFPQAERYEVTAETAGTINERRARGGRIMVCGTSALRTLESVTGEDGRVPAATGFTRLHIVPGHRFRACDGFLTNLHRPKSSELLLTSAFTGRQPLLEVYRRELIPRKYRFHEFGDSMLIV

SEQ ID NO: 67661 - protein, 375 aa, Kitasatospora griseola
  REGION 1..375: note = tr|A0A0D0P589|A0A0D0P589_KITGR S-adenosylmethionine:tRNA ribosyltransferase-isomerase; OS = Kitasatospora griseola OX=2064 GN=TR51_04420 PE=3 SV=1
MEPAGTADDPDDYTFDLPDDLVAQEPPEARGGERCDARLAVLRRGTAQVEHRSFRDIDAYFGPEDVLVLNNARVVPTLLYGEDGEGRVVAVSIHSPRPDGGWYCLVAPAAVCRPGAEFRLGPERQVAGRLVAEVEPGVWEIRLTPGDGETLYGLAEPIYPGYLKQVPADPEYYQNVYGTRPGAVLFPSAGRHFTPAVLDRLQDMGVAVAEVTLLIAARSHHFVRELFRKRVAEGGAGDVAAEDRVDRAARTEGFDFPRAERYEVAAPVAEAINERRARGGRVVVCGTSALRTLETVTGPDGVVSEGSGSTQLRITPGHRFRACDAFITNLHRPRSSELLLTSAFTGREPLLDVYRRELVPGAYRFHEFGDSMLIV

SEQ ID NO: 67662 - protein, 375 aa, Kitasatospora sp.
  REGION 1..375: note = tr|A0A2M9L9D9|A0A2M9L9D9_9ACTN S-adenosylmethionine:tRNA ribosyltransferase-isomerase; OS = Kitasatospora sp. CB02891 OX=2020329 GN=CG736_07245; PE = 3 SV=1
MEPAGTVDDPDDYTFDLPDDLVAQEPPEARGGERCDARLAVLRRGTAQVEHRSFRDIDAYFGPEDVLVLNNARVVPTLLHGEDAEGRVVAVSIHSPRPDGGWYCLVAPAAVCRPGAEFRLGPERQVAGRLVAEVEPGVWEIRLTPGDGETLYRLAEPIYPGYLKQVPADPEYYQNVYGTRPGAVLFPSAGRHFTPAVLDRLQDTGVAVAEVTLLIAARSHHFVRELFRKRVAEGGAGDVAAEDRVDRAARTEGFDFPRAERYEVAAPVAEAINERRARGGRVVVCGTSALRTLETVTGPDGVVSEGSGFTQLRITPGHRFRACDAFITNLHRPRSSELLLTSAFTGREPLLDVYRRELVPGAYRFHEFGDSMLIV

SEQ ID NO: 67663 - protein, 354 aa, Kitasatospora sp.
  REGION 1..354: note = tr|A0A1Q5F661|A0A1Q5F661_9ACTN S-adenosylmethionine:tRNA ribosyltransferase-isomerase; OS = Kitasatospora sp. CB01950 OX=1703930 GN=AMK19_06190; PE = 3 SV=1
MKTREFEFKQTAEDMPTDPVELRGKRRGNERMVVLDRSAGTIEHTAFPSILGHLRAGDLLVLNDSYILSNTLAFRYGDETMDVTVYGHEPDGANIVKIDAARPPEPGTTLTSVDDDRLSCTVVEPQPDRLWKVSFEPAELLMPTLDRHGRRLDETIRLDPKSWKSKPEAYRSVYARKPGSLEIPSAGLHFSRELLDRISEKGVELAYLTLHVGATEVLAVRHISAEDVENHKVRSEYFEVGAETAAQINRALAEGRRIVAVGTTVMRTLESLMIDREPGSPVQARAGWTDLYIYPGFRFKIVDALVTNLHRPRSSHIVLTAAFAGKDLVMKSYGEILDRGGYEFDMFGDCMFIV

SEQ ID NO: 67664 - protein, 364 aa, Kitasatospora viridis
  REGION 1..364: note = tr|A0A561UND1|A0A561UND1_9ACTN S-adenosylmethionine:tRNA ribosyltransferase-isomerase; OS = Kitasatospora viridis OX=281105 GN=FHX73_114724 PE=3; SV = 1
MVEHAEYTVPPEQVAKEPVEARGAQRSDSRLVVVRRADGAVRHRRFHEIDEELRPGDVLVLNNSRVLPSVLRGLDGAGRPVVVQVYSPMADGSWHAQVVATEPDRRAGEEFAFDGGRMTGRLLHSEEPGVWRMLLSPPEPEALEKVATLFYPHYLGSAPRPEHYQNVYASRPGGIMLPSAGRHFTLALLRRLAERGVAVAELTLDIGVKWGVVRLAGWLRETAGVTEPVLPADTARTAADERGNFPGCEHYEVPIETADLINARRRAGGRVVVCGTTVMRTLETVTDEDGRVWPGDGWTRLIISPEHRFRSCDAFLTNLHMPRSSELQLTSSLVGGARLPEVYRTEIVPNGYRFYEFGDSMLIV

SEQ ID NO: 67665 - protein, 354 aa, unidentified
  source 1..354: note = Klebsiella aerogenes
  REGION 1..354: note = tr|A0A0F0U878|A0A0F0U878_KLEAE S-adenosylmethionine:tRNA ribosyltransferase-isomerase; OS = Klebsiella aerogenes OX=548 GN=queA PE=3 SV=1
MRVTDFSFELPESLIAHYPQPERSSCRLLSLDGPTGALTHGTFTDLLDKLNPGDLLVFNNTRVIPARLFGRKASGGKIEVLVERMLDDKRILAHIRASKAPKPGAELLLGDDESINATMLARHGALFEVEFNDERPVLDILNSIGHMPLPPYIDRPDEDADRELYQTVYGTKPGAVAAPTAGLHFDDPLLEKLRAKGIEMAFVTLHVGAGTFQPVRVDSIEEHIMHSEYAEVPQDVVDAVLAAKARGNRVIAVGTTSVRSLESAAQAAKNGLIEPFFADTQIFIYPGYQYKVIDALVTNFHLPESTLIMLVSAFAGYQHTMNAYKAAVEQKYRFFSYGDAMFITYNPQAISERP

SEQ ID NO: 67666 - protein, 354 aa, unidentified
  source 1..354: note = Klebsiella aerogenes
  REGION 1..354: note = tr|A0A447KSI0|A0A447KSI0_KLEAE S-adenosylmethionine:tRNA ribosyltransferase-isomerase; OS = Klebsiella aerogenes OX=548 GN=queA PE=3 SV=1
MRVTDFSFELPESLIAHYPQPERSSCRLLSLDGPTGALTHGTFTDLLDKLNPGDLLVFNNTRVIPARLFGRKASGGKIEVLVERMLDDKRILAHIRASKAPKPGAELLLGDDESINATMLARHGALFEVEFNDERPVLDILNSIGHMPLPPYIDRPDEHADRELYQTVYGTKPGAVAAPTAGLHFDDPLLEKLRAKGIEMAFVTLHVGAGTFQPVRVDSIEEHIMHSEYAEVPQDVVDAVLAAKARGNRVIAVGTTSVRSLESAAQAAKNGLIEPFFADTQIFIYPGYQYKVIDALVTNFHLPESTLIMLVSAFAGYQHTMNAYKAAVEQKYRFFSYGDAMFITYNPQAISERP

SEQ ID NO: 67667 - protein, 356 aa, unidentified
  source 1..356: note = Klebsiella grimontii
  REGION 1..356: note = tr|A0A5D1WN05|A0A5D1WN05_9ENTR S-adenosylmethionine:tRNA ribosyltransferase-isomerase; OS = Klebsiella grimontii OX=2058152 GN=queA PE=3 SV=1
MRVADFSFELPESLIAHYPMPERSSCRLLSLDGPTGALTHGTFTDLLDKLNPGDLLVFNNTRVIPARLFGRKASGGKIEVLVERMLDDKRILAHIRASKAPKPGAELLLGDDESIKATMVARHDALFEVAFDDARSVLDILNAIGHMPLPPYIERPDEEADRELYQTVYSEKPGAVAAPTAGLHFDEPLLAKLREKGIEMAFVTLHVGAGTFQPVRVDSIEDHIMHSEYAEVPQEVVDAVLAAKARGSRVIAVGTTSVRSLESAAQAAKNDLIEPFFGDTQIFIYPGYQYKVIDALVTNFHLPESTLIMLVSAFAGYQHTMNAYKAAVEQKYRFFSYGDAMFITYNPQAIFERVGE

SEQ ID NO: 67668 - protein, 356 aa, unidentified
  source 1..356: note = Klebsiella grimontii
  REGION 1..356: note = tr|A0A285AZI6|A0A285AZI6_9ENTR S-adenosylmethionine:tRNA ribosyltransferase-isomerase; OS = Klebsiella grimontii OX=2058152 GN=queA PE=3 SV=1
MRVADFSFELPESLIAHYPMPERSSCRLLSLDGPTGALTHGTFTDLLDKLNPGDLLVFNNTRVIPARLFGRKASGGKIEVLVERMLDDKRILAHIRASKAPKPGAELLLGDDESIKATMVARHDALFEVAFDDARSVLDILNAIGHMPLPPYIERPDEEADRELYQTVYSEKPGAVAAPTAGLHFDEPLLAKLREKGVEMAFVTLHVGAGTFQPVRVDSIEDHIMHSEYAEVPQEVVDAVLAAKARGSRVIAVGTTSVRSLESAAQAAKNDLIEPFFGDTQIFIYPGYQYKVIDALVTNFHLPESTLIMLVSAFAGYQHTMNAYKAAVEQKYRFFSYGDAMFITYNPQAIFERVGE

SEQ ID NO: 67669 - protein, 354 aa, unidentified
  source 1..354: note = Klebsiella michiganensis
  REGION 1..354: note = tr|A0A1Q8YZ68|A0A1Q8YZ68_9ENTR S-adenosylmethionine:tRNA ribosyltransferase-isomerase; OS = Klebsiella michiganensis OX=1134687 GN=queA PE=3 SV=1
MRVADFSFELPESLIAHYPMPERSSCRLLSLDGPTGALTHGTFTDLLDKLNPGDLLVFNNTRVIPARLFGRKASGGKIEVLVERMLDDKRILAHIRASKAPKPGAALLLGDDESIKATMVARHDALFEVEFDDARSVLDILNAIGHMPLPPYIDRPDEDADRELYQTVYSEKPGAVAAPTAGLHFDEPMLAKLREKGVEMAFVTLHVGAGTFQPVRVDSIEEHIMHSEYAEVPQEVVDAVLAAKARGSRVIAVGTTSVRSLESAAQAAKNDLIEPFFGDTQIFIYPGYQYKVIDALVTNFHLPESTLIMLVSAFAGYQHTMNAYKAAVEQKYRFFSYGDAMFITYNPQAIFERP

SEQ ID NO: 67670 - protein, 356 aa, unidentified
  source 1..356: note = Klebsiella michiganensis
  REGION 1..356: note = tr|A0A2J4R4S6|A0A2J4R4S6_9ENTR S-adenosylmethionine:tRNA ribosyltransferase-isomerase; OS = Klebsiella michiganensis OX=1134687 GN=queA PE=3 SV=1
MRVADFSFELPESLIAHYPMPERSSCRLLSLDGPTGALTHGTFTDLLDKLNPGDLLVFNNTRVIPARLFGRKASGGKIEVLVERMLDDKRILAHIRASKAPKPGAELLLGDDESIKATMVARHDALFEVAFDDARSVLDILNAIGHMPLPPYIERPDEEADRELYQTVYSEKPGAVAAPTAGLHFDEPLLAKLREKGVEMAFVTLHVGAGTFQPVRVDSIEEHIMHSEYAEVPQEVVDSVLAAKARGSRVIAVGTTSVRSLESAAQAAKNDLIEPFFGDTQIFIYPGYQYKVIDALVTNFHLPESTLIMLVSAFAGYQHTMNAYKAAVEQKYRFFSYGDAMFITYNPQAIFERVGE

SEQ ID NO: 67671 - protein, 354 aa, Klebsiella oxytoca
  REGION 1..354: note = tr|A0A168KR12|A0A168KR12_KLEOX S-adenosylmethionine:tRNA ribosyltransferase-isomerase; OS = Klebsiella oxytoca OX=571 GN=queA PE=3 SV=1
MRVADFSFELPESLIAHYPMPERSSCRLLSLDGPTGALTHGTFTDLLDKLNPGDLLVFNNTRVIPARLFGRKASGGKIEVLVERMLDDKRILAHIRASKAPKPGAELLLGDDESIKATMVARHDALFEVEFDDARSVLDILNAIGHMPLPPYIDRPDEDADRELYQTVYSEKPGAVAAPTAGLHFDEPLLAKLREKGVEMAFVTLHVGAGTFQPVRVDSIEDHIMHSEYAEVPQEVVDAVLAAKARGNRVIAVGTTSVRSLESAAQAAKNDLIEPFFNDTQIFIYPGYQYKVIDALVTNFHLPESTLIMLVSAFAGYQHTMNAYKAAVEQKYRFFSYGDAMFITYNPQAIFERP

SEQ ID NO: 67672 - protein, 354 aa, Klebsiella oxytoca; identical to SEQ ID NO: 67669
  REGION 1..354: note = tr|A0A0G3SES4|A0A0G3SES4_KLEOX S-adenosylmethionine:tRNA ribosyltransferase-isomerase; OS = Klebsiella oxytoca OX=571 GN=queA PE=3 SV=1

SEQ ID NO: 67673 - protein, 354 aa, Klebsiella pneumoniae
  REGION 1..354: note = tr|C8T4R2|C8T4R2_KLEPR S-adenosylmethionine:tRNA ribosyltransferase-isomerase OS=Klebsiella pneumoniae subsp. rhinoscleromatis ATCC 13884 OX=667127 GN=queA PE=3; SV = 1
MRVTDFAFELPESLIAHYPMPERSSCRLLSLDGPTGALTHGTFTDILDKLNPGDLLVFNNTRVIPARLFGRKASGGKIEVLVERMLDDKRILAHIRASKAPKPGAELLLGDDESIKATMLARHGALFEVEFNDERPVLEILNGIGHMPLPPYIDRPDEDADRELYQTVYGTRPGAVAAPTAGLHFDEPLLDKLRAKGVEMAFVTLHVGAGTFQPVRVDSIEEHTMHSEYAEVPQEVVDAVLAAKARGNRVIAVGTTSVRSLESAAQAAKDALIAPFFDDTQIFIYPGYQYQVIDVLVTNFHLPESTLIMLVSAFAGYQHTMNAYKVAVEQKYRFFSYGDAMFITYNPQAISERP

SEQ ID NO: 67674 - protein, 354 aa, Klebsiella pneumoniae
  REGION 1..354: note = sp|B5Y0Y7|QUEA_KLEP3 S-adenosylmethionine:tRNA ribosyltransferase-isomerase OS=Klebsiella pneumoniae (strain 342) OX=507522 GN=queA PE=3 SV=1
MRVTDFAFELPESLIAHYPMPERSSCRLLSLDGPTGALTHGTFTDILDKLNPGDLLVFNNTRVIPARLFGRKASGGKIEVLVERMLDDKRILAHIRASKAPKPGAELLLGDDESIKATMLARHGALFEVEFNDERPVLEILNGIGHMPLPPYIDRPDEDADRELYQTVYGTRPGAVAAPTAGLHFDEPLLDKLRAKGVEMAFVTLHVGAGTFQPVRVDSIEEHTMHSEYAEVPQEVVDAVLAAKARGNRVIAVGTTSVRSLESAAQAAKDALIAPFFDDTQIFIYPGYQYQVIDALVTNFHLPESTLIMLVSAFAGYQHTMNAYKVAVEQKYRFFSYGDAMFITYNPQAISERP

SEQ ID NO: 67675 - protein, 354 aa, unidentified
  source 1..354: note = Klebsiella quasipneumoniae
  REGION 1..354: note = tr|A0A5A4S7S5|A0A5A4S7S5_9ENTR S-adenosylmethionine:tRNA ribosyltransferase-isomerase; OS = Klebsiella quasipneumoniae OX=1463165 GN=queA PE=3 SV=1
MRVTDFAFELPESLIAHYPMPERSSCRLLSLDGPTGALTHGTFTDILDKLNPGDLLVFNNTRVIPARLFGRKASGGKIEVLVERMLDHKRILAHIRASKAPKPGAELLLGDDESIQATMLARHGAMFEVEFNDERPVLEILNGIGHMPLPPYIDRPDEDADRELYQTVYGTRPGAVAAPTAGLHFDEPLLDKLRAKGVEMAFVTLHVGAGTFQPVRVDSIEEHTMHSEYAEVPQEVVDAVLAAKARGNRVIAVGTTSVRSLESAAQAAKDALIAPFFDDTQIFIYPGYQYQVIDALVTNFHLPESTLIMLVSAFAGYQHTMNAYKVAVEQKYRFFSYGDAMFITYNPQAISERP

SEQ ID NO: 67676 - protein, 354 aa, unidentified
  source 1..354: note = Klebsiella quasipneumoniae
  REGION 1..354: note = tr|A0A5C6IM67|A0A5C6IM67_9ENTR S-adenosylmethionine:tRNA ribosyltransferase-isomerase; OS = Klebsiella quasipneumoniae subsp. similipneumoniae; OX = 1463164 GN=queA PE=3 S V=1
MRVTDFAFELPESLIAHYPMPERSSCRLLSLDGPTGALTHGTFTDILDKLNPGDLLVFNNTRVIPARLFGRKASGGKIEVLVERMLDDKRILAHIRASKAPKPGAELLLGDDESIQATMLARHGALFEVEFNDERPVLEILNGIGHMPLPPYIDRPDEDADRELYQTVYGTRPGAVAAPTAGLHFDEPLLDKLRAKGVEMAFVTLHVGAGTFQPVRVDSIEEHTMHSEYAEVPQEVVDAVLAAKARGNRVIAVGTTSVRSLESAAQAAKDALIAPFFDDTQIFIYPGYQYQVIDALVTNFHLPESTLIMLVSAFAGYQHTMNAYKVAVEQKYRFFSYGDAMFITYNPQAISERP

SEQ ID NO: 67677 - protein, 354 aa, unidentified; identical to SEQ ID NO: 67674
  source 1..354: note = Klebsiella quasivariicola
  REGION 1..354: note = tr|A0A223UFD8|A0A223UFD8_9ENTR S-adenosylmethionine:tRNA ribosyltransferase-isomerase; OS = Klebsiella quasivariicola OX=2026240 GN=queA PE=3 SV=1

SEQ ID NO: 67678 - protein, 354 aa, Klebsiella sp.; identical to SEQ ID NO: 67674
  REGION 1..354: note = tr|A0A3G5D8A2|A0A3G5D8A2_9ENTR S-adenosylmethionine:tRNA ribosyltransferase-isomerase; OS = Klebsiella sp. P1CD1 OX=2267618 GN=queA PE=3 SV=1

SEQ ID NO: 67679 - protein, 356 aa, Klebsiella sp.
  REGION 1..356: note = tr|A0A4S5DR68|A0A4S5DR68_9ENTR S-adenosylmethionine:tRNA ribosyltransferase-isomerase; OS = Klebsiella sp. Z2 OX=2561928 GN=queA PE=3 SV=1
MRVADFSFELPESLIAHYPMPERSSCRLLSLDGPTGALTHGTFTDLLDKLNPGDLLVFNNTRVIPARLFGRKASGGKIEVLVERMLDDKRILAHIRASKAPKPGAELLLGDDESIKATMTARHDALFEVEFNDERTVLDILNAIGHMPLPPYIERPDEEADRELYQTVYSQKPGAVAAPTAGLHFDEPLLEKLRAKGVEMAFVTLHVGAGTFQPVRVDSIEDHIMHSEYAEVPQEVVDAVLAAKARGSRVVAVGTTSVRSLESAAQAAKSELIEPFFGDTQIFIYPGYQYKVIDALVTNFHLPESTLIMLVSAFAGYQHTMNAYKSAVEQKYRFFSYGDAMFITYNPQALNERVGE

SEQ ID NO: 67680 - protein, 226 aa, Klebsiella variicola
  REGION 1..226: note = tr|A0A2N4YUZ6|A0A2N4YUZ6_KLEVA S-adenosylmethionine:tRNA ribosyltransferase-isomerase (Fragment) OS=Klebsiella variicola OX=244366 GN=queA PE=3; SV = 1
MRVTDFAFELPESLIAHYPMPERSSCRLLSLDGPTGALTHGTFTDILDKLNPGDLLVFNNTRVIPARLFGRKASGGKIEVLVERMLDDKRILAHIRASKAPKPGAELLLGDDESIKATMLARHGALFEVEFNDERPVLEILNGIGHMPLPPYIDRPDEDADRELYQTVYGTRPGAVAAPTAGLHFDEPLLDKLRAKGVEMAFVTLHVGAGTFQPVRVDSIEEHTMH

SEQ ID NO: 67681 - protein, 354 aa, Klebsiella variicola; identical to SEQ ID NO: 67674
  REGION 1..354: note = tr|A0A087FTA1|A0A087FTA1_KLEVA S-adenosylmethionine:tRNA ribosyltransferase-isomerase; OS = Klebsiella variicola OX=244366 GN=queA PE=3 SV=1

SEQ ID NO: 67682 - protein, 356 aa, Kluyvera ascorbata
  REGION 1..356: note = tr|A0A2T2Y0G2|A0A2T2Y0G2_9ENTR S-adenosylmethionine:tRNA ribosyltransferase-isomerase; OS = Kluyvera ascorbata OX=51288 GN=queA PE=3 SV=1
MRVTDFSFELPESLIAHYPQAERSSCRLLSLDGPTGALTHGTFTDLLDKLNPGDLLVFNNTRVIPARLFGRKASGGKIEVLVERMLDDKRILAHIRASKAPKPGAELLLGDDESIKATMVARHDALFEVEFDDARSVLDILNAIGHMPLPPYIDRPDEDADRELYQTVYSEKPGAVAAPTAGLHFDEPLLARLREKGIEMAFVTLHVGAGTFQPVRVDSIEDHIMHSEYAEVPQDVVDAVLAAKARGNRVVAVGTTSVRSLESAAQAAKDELIAPFFGDTQIFIFPGYQYQVIDALVTNFHLPESTLIMLVSAFAGYKNTMNAYHEAVKAEYRFFSYGDAMFITYNPQAISERVGD

SEQ ID NO: 67683 - protein, 356 aa, Kluyvera ascorbata
  REGION 1..356: note = tr|A0A378GNA1|A0A378GNA1_9ENTR S-adenosylmethionine:tRNA ribosyltransferase-isomerase; OS = Kluyvera ascorbata OX=51288 GN=queA PE=3 SV=1
MRVADFSFELPESLIAHYPQAERSSCRLLSLDGPTGALTHGTFTDLLDKLNPGDLLVFNNTRVIPARLFGRKASGGKIEVLVERMLDDKRILAHIRASKAPKPGAELLLGDDESIKATMVARHDALFEVEFDDERSVLDILNAIGHMPLPPYIDRPDEDADRELYQTVYSEKPGAVAAPTAGLHFDEPLLAKLREKGVEMAFVTLHVGAGTFQPVRVDSIEDHIMHSEYAEVPQEVVDAVLAAKARGNRVIAVGTTSVRSLESAAQAAKDELIAPFFGDTQIFIFPGYQYQVIDALVTNFHLPESTLIMLVSAFAGYQHTMNAYKAAVEQKYRFFSYGDAMFITYNPQAISERVGE

SEQ ID NO: 67684 - protein, 356 aa, Kluyvera cryocrescens
  REGION 1..356: note = tr|A0A2X3DUY1|A0A2X3DUY1_KLUCR S-adenosylmethionine:tRNA ribosyltransferase-isomerase; OS = Kluyvera cryocrescens OX=580 GN=queA PE=3 SV=1
MRVTDFSFELPESLIAHYPQAERSSCRLLSLDGPTGALTHGTFTDLLDKLNPGDLLVFNNTRVIPARLFGRKASGGKIEVLVERMLDDKRILAHIRASKAPKPGAELLLGDDESIKATMVARHDALFEVEFDDERSVLDILNAIGHMPLPPYIDRPDEDADRELYQTVYSEKPGAVAAPTAGLHFDEPLLAKLREKGIEMAFVTLHVGAGTFQPVRVDSIEDHIMHSEYAEVPQDVVDAVLAAKARGNRVIAVGTTSVRSLESAAQAAKDELIAPFFGDTQIFIFPGYQYQVIDALVTNFHLPESTLIMLVSAFAGYKNTMNAYHEAVKAEYRFFSYGDAMFITYNPQAISERVGE

SEQ ID NO: 67685 - protein, 356 aa, Kluyvera georgiana
  REGION 1..356: note = tr|A0A248KKT2|A0A248KKT2_9ENTR S-adenosylmethionine:tRNA ribosyltransferase-isomerase; OS = Kluyvera georgiana OX=73098 GN=queA PE=3 SV=1
MRVADFSFELPESLIAHYPQAERSSCRLLSLDGPTGALTHGTFTDLLDKLNPGDLLVFNNTRVIPARLFGRKASGGKIEVLVERMLDDKRILAHIRASKAPKPGAELLLGDDESIKATMVARHDALFEVEFDDERSVLDILNAIGHMPLPPYIDRPDEDADRELYQTVYSEKPGAVAAPTAGLHFDEPLLAKLREKGIEMAFVTLHVGAGTFQPVRVDSIEDHIMHSEYAEVPQEVVDAVLAAKARGNRVIAVGTTSVRSLESAAQAAKDELIAPFFGDTQIFIFPGYQYQVIDALVTNFHLPESTLIMLVSAFAGYQHTMNAYKAAVEQKYRFFSYGDAMFITYNPQAISERVGE

SEQ ID NO: 67686 - protein, 356 aa, Kluyvera georgiana
  REGION 1..356: note = tr|A0A1B7JHY6|A0A1B7JHY6_9ENTR S-adenosylmethionine:tRNA ribosyltransferase-isomerase; OS = Kluyvera georgiana ATCC 51603 OX=1354264 GN=queA PE=3; SV = 1
MRVADFSFELPESLIAHYPQAERSSCRLLSLDGPTGALTHGTFTDLLDKLNPGDLLVFNNTRVIPARLFGRKASGGKIEVLVERMLDDKRILAHIRASKAPKPGAELLLGDDESIKATMVARHDALFEVEFDDERSVLDILNAIGHMPLPPYIDRPDEDADRELYQTVYSEKPGAVAAPTAGLHFDEPLLAKLREKGIEMAFVTLHVGAGTFQPVRVDSIEDHIMHSEYAEVPQEVVDAVLAAKARGNRVVAVGTTSVRSLESAAQAAKDELIAPFFGDTQIFIFPGYQYQVIDALVTNFHLPESTLIMLVSAFAGYQHTMNAYKAAVEQKYRFFSYGDAMFITYNPQAISERVGE

SEQ ID NO: 67687 - protein, 119 aa, Kluyvera intermedia
  REGION 1..119: note = tr|A0A3S4IE27|A0A3S4IE27_KLUIN S-adenosylmethionine:tRNA ribosyltransferase-isomerase; OS = Kluyvera intermedia OX=61648 GN=queA_1 PE=3 SV=1
MRCWRPKARGNRVIAVGTTSVRSLESAAQAAKDELIAPFFGDTQIFIFPGYQYQVIDALVTNFHLPESTLIMLVSAFAGYKNTMNAYHEAVKAEYRFFSYGDAMFITYNPQAISERVGE

SEQ ID NO: 67688 - protein, 356 aa, Kluyvera intermedia
  REGION 1..356: note = tr|A0A1X0X5E3|A0A1X0X5E3_KLUIN S-adenosylmethionine:tRNA ribosyltransferase-isomerase; OS = Kluyvera intermedia OX=61648 GN=queA PE=3 SV=1
MRVADFSFELPESLIAHYPQPERSSCRLLSLDGPTGALAHGTFTDLLDKLNPGDLLVFNNTRVIPARLFGRKASGGKIEVLVERMLDDKRILAHIRASKAPKPGAELLLGDDESIHATMVARHDALFEVEFNDERPVLDILNAIGHMPLPPYIDRPDEEADRELYQTVYSQKPGAVAAPTAGLHFDEPLLARLREKGIEMAFVTLHVGAGTFQPVRVDSIEDHIMHSEYAEVPQEVVDAVLAAKARGNRVIAVGTTSVRSLESAAQAAKEALIEPFFGDTQIFIFPGYQYQVIDALVTNFHLPESTLIMLVSAFAGYKHTMHAYQEAVAHKYRFFSYGDAMFITYNPQAINERPGE

SEQ ID NO: 67689 - protein, 356 aa, Kluyvera sp.
  REGION 1..356: note = tr|A0A2T3XBM7|A0A2T3XBM7_9ENTR S-adenosylmethionine:tRNA ribosyltransferase-isomerase; OS = Kluyvera sp. Nf5 OX=2116543 GN=queA PE=3 SV=1
MRVADFSFELPESLIAHYPQPERSSCRLLSLDGPTGALAHGTFTDLLDKLNPGDLLVFNNTRVIPARLFGRKASGGKIEVLVERMLDDKRILAHIRASKAPKPGAELLLGDDESIHATMVARHDALFEVEFNDERPVLDILNAIGHMPLPPYIDRPDEDADRELYQTVYSQKPGAVAAPTAGLHFDEPLLARLREKGIEMAFVTLHVGAGTFQPVRVDSIEDHIMHSEYAEVPQEVVDAVLAAKARGNRVIAVGTTSVRSLESAAQAAKNALIEPFFGDTQIFIFPGYQYQVIDALVTNFHLPESTLIMLVSAFAGYKHTMHAYQEAVAHKYRFFSYGDAMFITYNPQAINERPGE

SEQ ID NO: 67690 - protein, 355 aa, Knoellia sinensis
  REGION 1..355: note = tr|A0A0A0JDR1|A0A0A0JDR1_9MICO S-adenosylmethionine:tRNA ribosyltransferase-isomerase; OS = Knoellia sinensis KCTC 19936 OX=1385520 GN=N802_12355; PE = 3 SV=1
MPVLTSAPTTRFRAPDDTTAPAPAEARGVARDGVRLLVANGTDLVHAHFRDLPDHLEPGDLVVINNSATVAGQIDGHRRGHGAVVVHAATPLNDGTWVIELRTAPDASSPILDADVGERIQVGRVTLTLLGPYPRPDSSPTGVGDRLWRARADGDLSDALGRHGRAIAYGYLDRRYPLSDYQSVFSTVPGSAEMPSAGRPFTDSVITRLVAGGVGVAPITLHTGVSSQEAGEAPQAERFAVPEATARLVNATRATGARVIAVGTTVTRALESAVTPSGRVEAAHGWTERVISPEEPARVVDGLITGWHDPHASHLLLVESIAGADLTQAAYDAAVDHGYLWHEFGDSALLLPSKR

SEQ ID NO: 67691 - protein, 352 aa, unidentified
  source 1..352: note = Komagataeibacter cocois
  REGION 1..352: note = tr|A0A365YZR7|A0A365YZR7_9PROT S-adenosylmethionine:tRNA ribosyltransferase-isomerase; OS = Komagataeibacter cocois OX=1747507 GN=queA PE=3 SV=1
MTDLVSDFDFDLPPDLIADHPARPRDSARMLEVLAHGAFIDRHVRDLPGCLRAGDILVANDTAVIPAQLSAMRGAARIGITLDRILPDGTWHALARNARRLRPGDTLTFAPSPVTAEVVVCEEAGGVVLRFDVEGEAFDQFLHDTGHLALPPYIARPDGPTEEDRRDYSTIFAQHRGAVAAPTAGLHFTPALLSGLEKAGVLRQTLTLHVGAGTFLPMRSEQISEHRMHAERGTISPHAAQRINDARAAGGRVVAVGTTSLRLLESATGEDGIVRPFHGETSIFIRPGYRFRAVDMLLTNFHLPRSTLFMLVSAFSGRARMRAAYEHAMATGYRFYSYGDACLLHRNDGGAA

SEQ ID NO: 67692 - protein, 352 aa, unidentified
  source 1..352: note = Komagataeibacter europaeus
  REGION 1..352: note = tr|A0A0M0EGA7|A0A0M0EGA7_KOMEU S-adenosylmethionine:tRNA ribosyltransferase-isomerase; OS = Komagataeibacter europaeus OX=33995 GN=queA PE=3 SV=1
MTDLVSDFDFTLPPQNIADHPARPRDSARLLDVPVDGPFRDRHVRDLPGRLRAGDILVANDTAVIPAQLSAMRGDAKIGITLDRILPDGTWHVLARNARRLHPGDTLTFGASHVTARVIARGEGGDVTLRFSADGAAFDQFLHDVGHLALPPYIARPDGPTDADRRDYSTIFAQHRGAVAAPTAGLHFTPGLLAGLDAAGVIRQTLTLHVGAGTFLPMRSDQISAHRMHAERGTISPHAAARINAARAAGGRIVAVGTTSLRLLESATDENGIVHPFHGETSIFIRPGYRFRAVDMLLTNFHLPRSTLFMLVCAFGGYHRMKAAYAHAIASGYRFYSYGDACLLHRTEGDLP

SEQ ID NO: 67693 - protein, 352 aa, unidentified
  source 1..352: note = Komagataeibacter europaeus
  REGION 1..352: note = tr|A0A0D6Q231|A0A0D6Q231_KOMEU S-adenosylmethionine:tRNA ribosyltransferase-isomerase; OS = Komagataeibacter europaeus NBRC 3261 OX=1234669 GN=queA; PE = 3 SV=1
MTDLVSDFDFTLPPQNIADHPARPRDSARLLDVPVDGPFRDRHVRDLPGRLRAGDILVANDTAVIPAQLSAMRGDAKIGITLDRILPDGTWHVLARNARRLHPGDTLTFGASHVTARVIARGEGGDVTLRFSADGAAFDQFLHDVGHLALPPYIARPDGPTDADRRDYSTIFAQHRGAVAAPTAGLHFTPALLAGLDAAGVIRQTLTLHVGAGTFLPMRSDQISAHRMHAERGTISPHAAARINAARAAGGRIVAVGTTSLRLLESATDENGIVHPFHGETSIFIRPGYRFRAVDMLLTNFHLPRSTLFMLVCAFGGYHRMKAAYAHAIASGYRFYSYGDACLLHRTEGDLP

SEQ ID NO: 67694 - protein, 352 aa, unidentified
  source 1..352: note = Komagataeibacter hansenii
  REGION 1..352: note = tr|A0A318PXY5|A0A318PXY5_KOMHA S-adenosylmethionine:tRNA ribosyltransferase-isomerase; OS = Komagataeibacter hansenii OX=436 GN=queA PE=3 SV=1
MTDLVSDFDFDLPVALIADHPARPRDSARMLEVPPQGAFCDRHVRDLPGCLRAGDILVANDTAVIPAQLAAMRGAARIGITLDRILPDGTWHALARNSRRLKPGDILTFAPSAVTAEVVVCEDAGGVVMRFDVEGEAFDQFLHDTGHLALPPYIARPDGPTEEDRKDYSTIFAQHRGAVAAPTAGLHFTPALLSGLEAAGVLRQTLTLHVGAGTFLPMRSEQISEHRMHAERGTITAHAAHRINAARAAGGRVIAVGTTSLRLLESATDEDGVVHPFHGETAIFIRPGYRFRAVDMLLTNFHLPRSTLFMLVSAFAGQARMRAAYEHAMAAGYRFYSYGDACLLHRNDGGAA

SEQ ID NO: 67695 - protein, 352 aa, unidentified; identical to SEQ ID NO: 67694
  source 1..352: note = Komagataeibacter hansenii
  REGION 1..352: note = tr|D5QBB7|D5QBB7_KOMHA S-adenosylmethionine:tRNA ribosyltransferase-isomerase OS=Komagataeibacter hansenii ATCC 23769 OX=714995 GN=queA PE=3 SV=1

SEQ ID NO: 67696 - protein, 352 aa, unidentified
  source 1..352: note = Komagataeibacter intermedius
  REGION 1..352: note = tr|A0A0N1FDJ2|A0A0N1FDJ2_9PROT S-adenosylmethionine:tRNA ribosyltransferase-isomerase; OS = Komagataeibacter intermedius AF2 OX=1458464 GN=queA; PE = 3 SV=1
MTDLVSDFDFTLPPENIADHPARPRDSARLLDVPVDGPFRDRHVRDLPGCLRAGDILVANDTAVIPAQLSAMRGDAKIGITLDRILPDGTWHVLARNARRLRPGDTLTFGASPVTAQVVSRGEGGDVTLRFSAEGAAFDQFLHDVGHLALPPYIARPEGPTDEDRKDYSTIFAQHRGAVAAPTAGLHFTPGLLAGLDAAGVIRQTLTLHVGAGTFLPMRSEQISAHRMHAERGTISPHAAARINAARAAGGRIVAVGTTSLRLLESATDENGIVHPFHGETAIFIRPGYRFRAVDMLLTNFHLPRSTLFMLVCAFGGYHRMKAAYAHAIASGYRFYSYGDACLLHRTEGDLP

SEQ ID NO: 67697 - protein, 352 aa, unidentified
  source 1..352: note = Komagataeibacter maltaceti
  REGION 1..352: note = tr|A0A2S3W2I3|A0A2S3W2I3_9PROT S-adenosylmethionine:tRNA ribosyltransferase-isomerase; OS = Komagataeibacter maltaceti OX=1203393 GN=queA PE=3 SV=1
MTDLVSDFDFDLPATLIADHPARPRDSARMLEVPVDGPFLDRHVRDLPGCLRAGDILVANDTAVIPAQLSAMRGAARIGITLDRILPDGTWHALARNSRRLKVGDTLTFAPSHVTAEVMVCEDAGGVVLRFDAQGEAFDQFLHDTGHLALPPYIARPDGPTEQDRKDYSTIFAQHRGAVAAPTAGLHFTPALLSALEAAGVLRQTLTLHVGAGTFLPMRSEQISEHRMHAERGTITPHAAQRINAARAAGGRVVAVGTTSLRLLESATDPDGVVHPFHGETSIFIRPGYRFRAVDMLLTNFHLPRSTLFMLVSAFAGQARMRAAYGHAMAAGYRFYSYGDACLLHRNDGGAA

SEQ ID NO: 67698 - protein, 352 aa, unidentified
  source 1..352: note = Komagataeibacter medellinensis
  REGION 1..352: note = tr|G2I0K4|G2I0K4_KOMMN S-adenosylmethionine:tRNA ribosyltransferase-isomerase OS=Komagataeibacter medellinensis (strain NBRC 3288 / BCRC 11682 / LMG 1693 / Kondo 51)OX=634177 GN=queA PE=3 SV=1
MTDLVSDFDFTLPPDRIADHPARPRDSARLLDVPVNGPVMDRHVRDLPGCLRAGDILVANDTAVIPAQLSAMRGVAKVGITLDRILPDGTWHVLARNARRLHPGDTLTFGASPVTAEVIARGDAGDVTLRFSVEGPAFDQFLHDAGQLALPPYIARPEGPTEQDRKDYATIFAQHRGAVAAPTAGLHFTPGLLAGLERAGVLRQTLTLHVGAGTFLPMRSEQISAHHMHAERGTITAHAAQRINAARAAGGRIVAVGTTSLRLLESATDEHGIVHPFHGETAIFIKPGYRFRAVDMLLTNFHLPRSTLFMLVCAFGGYHRMQAAYAHAMAQGYRFYSYGDACLLHRSEGDLP

SEQ ID NO: 67699 - protein, 352 aa, unidentified
  source 1..352: note = Komagataeibacter nataicola
  REGION 1..352: note = tr|A0A1U9RKR7|A0A1U9RKR7_9PROT S-adenosylmethionine:tRNA ribosyltransferase-isomerase; OS = Komagataeibacter nataicola OX=265960 GN=queA PE=3 SV=1
MTDLVSDFDFTLPPTSIADHPARPRDSARLLDVPEAGPFIDRHVRDLPGCLRAGDILVANDTAVIPAQLAAMRGEAKIGITLDRILPDGSWHVLARNARRLRPGDTLTFGRSPVTAQVISRGDAGDVTLRFSAEGAAFDQFLHDAGKLALPPYIARPDGPTEEDRRDYSTIFAQHRGAVAAPTAGLHFTPDLLAALDRAGVIRQTLTLHVGAGTFLPMRSDQISAHRMHAERGTISPHAAQRINAARAAGGRIIAVGTTSLRLLESATDENGIVHPFHGETAIFIRPGYRFRAVDMLLTNFHLPRSTLFMLVCAFGGYHRMQAAYAHAIASGYRFYSYGDACLLHRTEGDLP

SEQ ID NO: 67700 - protein, 352 aa, unidentified
  source 1..352: note = Komagataeibacter oboediens
  REGION 1..352: note = tr|A0A318QY65|A0A318QY65_9PROT S-adenosylmethionine:tRNA ribosyltransferase-isomerase; OS = Komagataeibacter oboediens OX=65958 GN=queA PE=3 SV=1
MTDLVSDFDFTLPPGNIADHPARPRDSARLLDVPVDGPFRDRHVRDLPGCLRAGDILVANDTAVIPAQLSAMRGDAKIGITLDRILPDGTWHVLARNARRLRPGDTLTFGASPVTAQVVSRGEGGDVTLRFSAEGAAFDQFLYDVGHLALPPYIARPEGPTDEDRKDYSTIFAQHRGAVAAPTAGLHFTPGLLAGLDAAGVIRQTLTLHVGAGTFLPMRSEQISAHRMHAERGTISPHAAARINAARAAGGRIVAVGTTSLRLLESATDENGIVHPFHGETAIFIRPGYRFRAVDMLLTNFHLPRSTLFMLVCAFGGYHRMKAAYAHAIASGYRFYSYGDACLLHRTEGDLP

SEQ ID NO: 67701 - protein, 352 aa, unidentified
  source 1..352: note = Komagataeibacter pomaceti
  REGION 1..352: note = tr|A0A318QGK0|A0A318QGK0_9PROT S-adenosylmethionine:tRNA ribosyltransferase-isomerase; OS = Komagataeibacter pomaceti OX=2021998 GN=queA PE=3 SV=1
MTDLVSDFDFDLPPDLIADHPARPRDSARMLEVLAHGAFIDRHVRDLPGCLRAGDILVANDTAVIPAQLSAMRGAARIGITLDRILPDGTWHALARNARRLRPGDTLTFAPSAVTAEVVVCEEAGGVVLRFDVEGEAFDQFLHDTGHLALPPYIARPDGPTEEDRRDYSTIFAQHRGAVAAPTAGLHFTPALLSGLENAGVLRQTLTLHVGAGTFLPMRSEQISEHRMHAERGTISPHAAQRINDARAAGGRVVAVGTTSLRLLESATGEDGIVRPFHGETSIFIRPGYRFRAVDMLLTNFHLPRSTLFMLVSAFSGRARMRAAYEHAMATGYRFYSYGDACLLHRNDGGAA

SEQ ID NO: 67702 - protein, 388 aa, unidentified
  source 1..388: note = Komagataeibacter rhaeticus
  REGION 1..388: note = tr|A0A181C6X7|A0A181C6X7_9PROT S-adenosylmethionine:tRNA ribosyltransferase-isomerase; OS = Komagataeibacter rhaeticus OX=215221 GN=queA PE=3 SV=1
MSFWLPPPLLSNIGLHAAPAHSSDWQEPWGFRKGSRMTDLVSDFDFTLPPDRIADHPARPRDSARLLDVPVAGPIMDRHVRDLPGCLRAGDILVANDTAVIPAQLSATRGAARIGITLDRILPDGSWHVLARNARRLHPGDRLAFGASPVTADVLACGDAGDVTLRFSVEGAAFDQFLHDTGHLALPPYIARPEGPTEQDRKDYATIFAQHRGAVAAPTAGLHFTPDLLAALDHAGVLRQTLTLHVGAGTFLPMRSEQISAHRMHAERGTITPHAARRINAARAAGGRIIAVGTTSLRLLESATDEDGVVHPFHGETAIFIKPGYRFRAVDMLLTNFHLPRSTLFMLVCAFGGYHRMQAAYAHAIAKGYRFYSYGDACLLHRSEGDLP

SEQ ID NO: 67703 - protein, 352 aa, unidentified
  source 1..352: note = Komagataeibacter rhaeticus
  REGION 1..352: note = tr|A0A070A4T2|A0A070A4T2_9PROT S-adenosylmethionine:tRNA ribosyltransferase-isomerase; OS = Komagataeibacter rhaeticus AF1 OX=1432055 GN=queA PE=3; SV = 1
MTDLVSDFDFTLPPDRIADHPARPRDSARLLDVPVAGPIMDRHVRDLPGCLRAGDILVANDTAVIPAQLSATRGAARIGITLDRILPDGSWHVLARNARRLHPGDRLAFGASPVTADVLACGDAGDVTLRFSVEGAAFDQFLHDTGHLALPPYIARPEGPTEQDRKDYATIFAQHRGAVAAPTAGLHFTPDLLAALDHAGVLRQTLTLHVGAGTFLPMRSEQISAHRMHAERGTITPHAARRINAARAAGGRIIAVGTTSLRLLESATDEDGVVHPFHGETAIFIKPGYRFRAVDMLLTNFHLPRSTLFMLVCAFGGYHRMQAAYAHAIAKGYRFYSYGDACLLHRSEGDLP

SEQ ID NO: 67704 - protein, 352 aa, unidentified
  source 1..352: note = Komagataeibacter saccharivorans
  REGION 1..352: note = tr|A0A347W9W4|A0A347W9W4_9PROT S-adenosylmethionine:tRNA ribosyltransferase-isomerase; OS = Komagataeibacter saccharivorans OX=265959 GN=queA PE=3; SV = 1
MTDLVSDFDFTLPPERIADHPARPRDSARLLDVPVEGPIMDRHMRDLPGCLRPGDILVANDTAVIPAQLSAMRGAAKIGITLDRILPDGTWHVLARNARRLHPGDTLTFGESPVTAQVVSRGDAGDVTLRFSAEGEAFDQFLHDAGRLALPPYIARPEGPTEEDRRDYATIFAQHRGAVAAPTAGLHFTPGLLAALDAAGVLRQTLTLHVGAGTFLPMRSEQISEHRMHAERGTISPHAAERINAARAAGGRIIAVGTTSLRLLESATDENGIVHPFHGETAIFIRPGYRFRAVDMLLTNFHLPRSTLFMLVCAFGGYRRMHAAYEHAIASGYRFYSYGDACLLHRAEGDLP

SEQ ID NO: 67705 - protein, 352 aa, unidentified
  source 1..352: note = Komagataeibacter sp.
  REGION 1..352: note = tr|A0A371YW93|A0A371YW93_9PROT S-adenosylmethionine:tRNA ribosyltransferase-isomerase; OS = Komagataeibacter sp. AV 382 OX=2301223 GN=queA PE=3 SV=1
MTDLVSDFDFTLPPERIADHPARPRDSARLLDVPAEGPFMDRHVRDLPGCLRAGDILVANDTAVIPAQFTAMRGAAKIGITLDRILPDGTWHALARNARRLRVGDTLTFAHTPVTAEVTSRGDAGDVTLRFSAGGAAFDQFLHDAGRLALPPYIARPDGPTEQDRKDYSTIFAQHRGAVAAPTAGLHFTPDLLAALDHAGVIRQTLTLHVGAGTFLPMRSEQISAHQMHAERGTISPHAAERINAARAAGGRVVAVGTTSLRLLESATDEEGRVHPFHGETAIFIRPGYRFRAVDMLLTNFHLPRSTLFMLVCAFGGYHRMKAAYAHAIASGYRFYSYGDACLLHRAEGDLP

SEQ ID NO: 67706 - protein, 352 aa, unidentified
  source 1..352: note = Komagataeibacter sp.
  REGION 1..352: note = tr|A0A4P5P2I7|A0A4P5P2I7_9PROT S-adenosylmethionine:tRNA ribosyltransferase-isomerase; OS = Komagataeibacter sp. MSKU9 OX=1932662 GN=queA PE=3 SV=1
MTDLVSDFDFTLPPENIADHPARPRDSARLLDVPVDGPFRDRHVRDLPGCLRAGDILVANDTAVIPAQLSAMRGDAKIGVTLDRILPDGTWHVLARNARRLRPGDTLTFGASHVTAQVIARGDAGDVTLRFSAEGEAFDQFLHDVGHLALPPYIARPDGPTDEDRRDYSTIFAQHRGAVAAPTAGLHFTPGLLAGLDAAGVIRQTLTLHVGAGTFLPMRSNQISAHRMHAERGTISPHAAARINAARAAGGRIVAVGTTSLRLLESATDESGIVHPFHGETAIFIRPGYRFRAVDMLLTNFHLPRSTLFMLVCAFGGYHRMKAAYAHAIASGYRFYSYGDACLLHRTEGDLP

SEQ ID NO: 67707 - protein, 352 aa, unidentified
  source 1..352: note = Komagataeibacter sucrofermentans
  REGION 1..352: note = tr|A0A318QHE0|A0A318QHE0_9PROT S-adenosylmethionine:tRNA ribosyltransferase-isomerase; OS = Komagataeibacter sucrofermentans OX=1053551 GN=queA; PE = 3 SV=1
MTDLVSDFDFTLPPTSIADHPARPRDSARLLDVPQAGPFIDRHVRDLPGCLRAGDILVANDTAVIPAQLAAMRGEAKIGITLDRILPDGSWHVLARNARRLRPGDTLTFGRSTVTAEVISRGDAGDVTLRFSAEGAAFDQFLHDAGKLALPPYIARPDGPTEEDRKDYSTIFAQHRGAVAAPTAGLHFTPDLLAALDKAGVIRQTLTLHVGAGTFLPMRSDQISAHRMHAERGTISPHAAQRINAARAAGGRIVAVGTTSLRLLESATDENGIVHPFHGETAIFIKPGYRFRAVDMLLTNFHLPRSTLFMLVCAFGGYHRMQAAYAHAIASGYRFYSYGDACLLHRTEGDVP

SEQ ID NO: 67708 - protein, 352 aa, unidentified
  source 1..352: note = Komagataeibacter swingsii
  REGION 1..352: note = tr|A0A2V4R1Y5|A0A2V4R1Y5_9PROT S-adenosylmethionine:tRNA ribosyltransferase-isomerase; OS = Komagataeibacter swingsii OX=215220 GN=queA PE=3 SV=1
MTDLVSDFDFTLPPQNIADHPARPRDSARLLDVPVDGPFLDRHVRDLPGCLRAGDILVANDTAVIPAQLQAMRGDAKIGITLDRILPDGTWHALARNARRLRPGDVLAFGASPVTAQVIARGEGGDVTLRFSAEGAAFDQFLHDVGHLALPPYIARPDGPTDEDRKDYSTIFAQHRGAVAAPTAGLHFTPGLLAGLDAAGVIRQTLTLHVGAGTFLPMRSDQISAHRMHAERGTISPHAAARINAARAAGGRIVAVGTTSLRLLESATDEDGIVHPFHGETSIFIRPGYRFRAVDMLLTNFHLPRSTLFMLVCAFGGYHRMKAAYAHAIASGYRFYSYGDACLLRRTEGDLP

SEQ ID NO: 67709 - protein, 352 aa, unidentified
  source 1..352: note = Komagataeibacter xylinus
  REGION 1..352: note = tr|A0A2D3HIW2|A0A2D3HIW2_KOMXY S-adenosylmethionine:tRNA ribosyltransferase-isomerase; OS = Komagataeibacter xylinus OX=28448 GN=queA PE=3 SV=1
MTDLVSDFDFTLPPDRIADHPARPRDSARLLDVPVAGPIMDRHVRDLPGCLRAGDILVANDTAVIPAQLSATRGAARIGITLDRILPDGSWHVLARNARRLHPGDTLAFGASPVTADVLACGDAGDVTLRFSVEGAAFDQFLHDTGHLALPPYIARPEGPTEQDRKDYATIFAQHRGAVAAPTAGLHFTPDLLAALDHAGVLRQTLTLHVGAGTFLPMRSEQISAHRMHAERGTITPHAARRINAARAAGGRIIAVGTTSLRLLESATDEDGVVHPFHGETAIFIKPGYRFRAVDMLLTNFHLPRSTLFMLVCAFGGYRRMQAAYAHAIAKGYRFYSYGDACLLHRSEGDLP

SEQ ID NO: 67710 - protein, 352 aa, unidentified; identical to SEQ ID NO: 67694
  source 1..352: note = Komagataeibacter xylinus
  REGION 1..352: note = tr|A0A143WF37|A0A143WF37_KOMXY S-adenosylmethionine:tRNA ribosyltransferase-isomerase; OS = Komagataeibacter xylinus OX=28448 GN=queA PE=3 SV=1

SEQ ID NO: 67711 - protein, 351 aa, Kordia algicida
  REGION 1..351: note = tr|A9DJA6|A9DJA6_9FLAO S-adenosylmethionine:tRNA ribosyltransferase-isomerase OS=Kordia algicida OT-1; OX = 391587 GN=queA PE=3 SV=1
MAKKLSHFNFDLPEDLLAEYPSEHRDEARLMVLNREKQTIEHKKFKDLVDYFDEGDVMVLNNTKVFPARLFGNKEKTGARIEVFLLRELNEDQRLWDVLVDPARKIRIGNKLYFGEDESLVAEVIDNTTSRGRTLRFLYDGSYEEFRTKLGELGQTPLPKYIKRDVEPEDEERYQTIYAKEEGAVAAPTAGLHFSKHLLKRLEIKGIDFAEVTLHVGLGTFNPVEVEDLSKHKMDSEELKIEAPAVATVNNAKTRKQRVCAVGTTVMRALESSVSSDLTLNEYEGWTNKFIFPPYEFSIANCMITNFHTPKSTLLMMVSAFAGHEFILKAYEEAIKEGYQFYSYGDAMLIL

SEQ ID NO: 67712 - protein, 351 aa, Kordia periserrulae
  REGION 1..351: note = tr|A0A2T6C5R6|A0A2T6C5R6_9FLAO S-adenosylmethionine:tRNA ribosyltransferase-isomerase; OS = Kordia periserrulae OX=701523 GN=queA PE=3 SV=1
MAKKLSHFNFNLPSELLAEYPSEHRDEARLMVLNREKQTIEHRKFKDLVDYFDEGDVMVLNNTKVFPARLFGNKEKTGARIEVFLLRELNEEQRLWDVLVDPARKIRIGNKLYFGDDESLVAEVIDNTTSRGRTLRFLYDGSYQEFRAKLSELGQTPLPKYIKREVEPEDEERYQTIYAKEEGAVAAPTAGLHFSKHLLKRLEIKGIDFSEITLHVGLGTFNPVEVEDLSKHKMDSEELKIGPKAVEIVNNAKQNKRKVCAVGTTVMRALESSVSSERTLNEYEGWTNKFIFPPYDFSIANCMITNFHTPKSTLLMMVSAFAGHDFILKAYNEAIKEGYQFYSYGDAMLIL

SEQ ID NO: 67713 - protein, 351 aa, Kordia sp.
  REGION 1..351: note = tr|A0A501I209|A0A501I209_9FLAO S-adenosylmethionine:tRNA ribosyltransferase-isomerase; OS = Kordia sp. TARA_039_SRF OX=2530203 GN=queA PE=3 SV=1
MAKKLSHFNFDLPSELLAEYPSEHRDEARLMVLNREKQTIEHRKFKDLVEYFDEGDVMVLNNTKVFPARLFGNKEKTGARIEVFLLRELNEEQRLWDVLVDPARKIRIGNKLYFGEDESLVAEVIDNTTSRGRTLRFLYDGSYQEFRQKLGELGQTPLPKYIKRDVEPEDEERYQTIYAKEEGAVAAPTAGLHFSKHLLKRLEIKGIDFSEITLHVGLGTFNPVEVEDLSKHKMDSEELKIEAPAVETVNNAKKNKKRVCAVGTTVMRALESSVSSERTLNEYEGWTNKFIFPPYEFSIANCMITNFHTPKSTLLMMVSAFAGHEFILKAYDEAIKEGYQFYSYGDAMLIL

SEQ ID NO: 67714 - protein, 349 aa, Kordia sp.
  REGION 1..349: note = tr|A0A2G2K9Z5|A0A2G2K9Z5_9FLAO S-adenosylmethionine:tRNA ribosyltransferase-isomerase; OS = Kordia sp. OX=1965332 GN=queA PE=3 SV=1
MKLSQFEFELPEGLLSEHPAEHRDESRLMVLNRKEQTIEHKQFKDLIDYFDEDDVMVLNNTKVFPARLFGNKEKTGARIEVFLLRELSKEQRLWDVLVDPARKIRIGNKLYFGDDESLVAEVIDNTTSRGRTLRFLYDGGYDEFREKLNSLGVTPLPKYIKRDVEPEDKERYQTIYAKHEGAVAAPTAGLHFSRHLLKRLEIKGINFAEVTLHIGLGTFNPVEVEDLSKHKMDSEELLIDEKTIEIINGAKTRKRRVCAVGTTVMRALESAVSSDRTLNTFDGWTNKYIHPPHEFSIANCMITNFHTPKSTLLMMVAAFADYDFVMKAYEEAIKEKYNFYSYGDAMLII

SEQ ID NO: 67715 - protein, 346 aa, unidentified
  source 1..346: note = Kordiimonadales bacterium
  REGION 1..346: note = tr|A0A5A7NGH4|A0A5A7NGH4_9PROT S-adenosylmethionine:tRNA ribosyltransferase-isomerase; OS = Kordiimonadales bacterium JCM 17843 OX=1236965 GN=queA; PE = 3 SV=1
MDISLFDFELPRDRIALRPVSPRDQARLLRVDGGGGLDDRHVSDLPDLLRPGDLLVSNDTRVIPARLFGHRGEAKIEITLHKRLDAARWVAFARPAKKCRPGDLLEFDGLSAQVEQRDGAEVTVRFLADDVETALQQHGVMPLPPYIAAQRPADARDLDDYQTIFSEKKGAVAAPTAGLHFTDRLLAGLKARGVGQTTLTLHVGAGTFLPVKVDNTEDHRMHAEWGEITPEVARQLNEVRDRGGRIVAVGTTSLRLLESAADEQGRIQPFRGDTDIFITPGYKFRAVDVLMTNFHLPRSTLFMLVSAFCGLDRMQAAYAHAIANDYRFYSYGDACLLFPPSLTEAP

SEQ ID NO: 67716 - protein, 346 aa, unidentified
  source 1..346: note = Kordiimonadales bacterium
  REGION 1..346: note = tr|A0A5A7MNU7|A0A5A7MNU7_9PROT S-adenosylmethionine:tRNA ribosyltransferase-isomerase; OS = Kordiimonadales bacterium JCM 17844 OX=1236966 GN=queA; PE = 3 SV=1
MDISLFDFELPRDRIALRPVSPRDQARLLRVDGGGGLDDRHVSDLPDMLRPGDLLVSNDTRVIPARLFGHRGEAKIEITLHKRLDAARWVAFARPAKKCRPGDLLEFDGLSAQVEQRDGAEVTLRFLADDVETALQQHGVMPLPPYIAAQRPADARDLEDYQTIFSEKKGAVAAPTAGLHFTDRLLAGLKARGVAHTTLTLHVGAGTFLPVKVDNTEDHRMHAEWGEITPEVARQLNEVRDRGGRIVAVGTTSLRLLESAADEQGRIQPFRGDTDIFITPGYKFRAVDVLMTNFHLPKSTLFMLVSAFCGLDRMQAAYAHAIANDYRFYSYGDACLLFPPSLTEAP

SEQ ID NO: 67717 - protein, 344 aa, Kordiimonas lacus
  REGION 1..344: note = tr|A0A1G6WPY2|A0A1G6WPY2_9PROT S-adenosylmethionine:tRNA ribosyltransferase-isomerase; OS = Kordiimonas lacus OX=637679 GN=queA PE=3 SV=1
MDVDVFDFDLPKERIALRPVEPRDAARMLLVNNGTLVDAGVRDLIDQLTEKDVLVTNDTRVIPGRLTGKRGEAKVEVTLHKREDATTWRVFAKNAKKCRLGDTLDFTGLQAEVVHVGEDGERTLKFNVDPAAMTAALETHGVMPLPPYIASQRGVDERDKSDYQTVFAREDGAVAAPTAGLHFTPEMLAALDAKGIKRHTVTLHVGAGTFLPVKAERTEDHKMHSEWGEITPEVAAALNDARANGGRIVAVGTTSLRLLESAATDDGVIHPFSNDTDIFITPGYHFKGVDLLMTNFHLPKSTLFMLVSAFAGLETMKAAYQHAIAAEYRFYSYGDSSLLYPEKR

SEQ ID NO: 67718 - protein, 345 aa, Kordiimonas sp.
  REGION 1..345: note = tr|A0A2E1CXW5|A0A2E1CXW5_9PROT S-adenosylmethionine:tRNA ribosyltransferase-isomerase; OS = Kordiimonas sp. OX=1970157 GN=queA PE=3 SV=1
MKVDQFDFDLPKDLIALRPVAQRDRARLLIVQDQQLEDRIVTDLTSYLKPGDVLVFNNTRVIPARLTGRRGNAKVEITLHMCVSDDCWKAFARPAKKLRIGDTIVFADTLSAQVTGKGDAGEVTVTFDKKGHDLRDALEDVGVMPLPPYIAGQRPVDAQDLKDYQTVYGKKDGAVAAPTAGLHFTDQLLAATKNMGIKHVELTLHVGAGTFLPVKVEDTEDHKMHAEWGEISEEAAKILNEARREGGRIISVGTTSLRLLESAVDANGIIQPFTDTTSIFITPGYDFKAVDILMTNFHLPRSTLFMLVSAFAGFENMKAAYQHAIAEKYRFYSYGDSSLLFRHNS

SEQ ID NO: 67719 - protein, 366 aa, unidentified
  source 1..366: note = Koribacter versatilis
  REGION 1..366: note = tr|Q1II19|Q1II19_KORVE S-adenosylmethionine:tRNA ribosyltransferase-isomerase OS=Koribacter versatilis (strain Ellin345) OX=204669 GN=queA PE=3 SV=1
MPVLVSDFDYLLPPELIAQHPLADRSATRMMHVRRYGGPEIDNLQFRSFPDLLSPDDLVVFNNTRVLPARLFGRRSGSRAQTLSPQNPASREFLTGRVEVLLTRQIQADPPVWQALVRPGRKLGVGEKIFFGEDAEHPELTAEILERGEFGERTLRFTGDFWGTVNRIGHIPLPPYIDRPDTAEDREQYQTIFARELGSVAAPTAGLHFTREILDRIAARGIETAELTLHVGLGTFQPLRHENVEENHLHLERYSISADAAEKLNRARREGRRIVAVGTTIVRTLEFAAQQSKEFGEQSGDANIFIYPGYEFRVVGGMLTNFHLPKSSLLMLVSAFAGTSRALRAYNHAVAERYRFFSYGDCMFIE

SEQ ID NO: 67720 - protein, 356 aa, unidentified
  source 1..356: note = Kosakonia arachidis
  REGION 1..356: note = tr|A0A1I6XT98|A0A1I6XT98_9ENTR S-adenosylmethionine:tRNA ribosyltransferase-isomerase; OS = Kosakonia arachidis OX=551989 GN=queA PE=3 SV=1
MRVADFSFELPESLIAHYPQTERSSCRLLSLDGPTGALTHGTFTDLLDKLNPGDLLVFNNTRVIPARLFGRKASGGKIEVLVERMLDDKRILAHIRASKAPKPGAELLLGDADDVQATMVARHDALFEVEFHDQRPVLDILNAIGHMPLPPYIDRPDEDADRELYQTVYSQKPGAVAAPTAGLHFDEPLLERLRNKGIEMAFVTLHVGAGTFQPVRVDSIEDHIMHSEYAEVPQEVVDAVLAAKARGNRVVAVGTTSVRSLESAAQATNDALIAPFFGDTQIFIYPGYQYQVIDALVTNFHLPESTLIMLVSAFAGYQHTMNAYRAAVAQEYRFFSYGDAMFITYNPQAITERVGE

SEQ ID NO: 67721 - protein, 354 aa, unidentified
  source 1..354: note = Kosakonia cowanii
  REGION 1..354: note = tr|A0A410KGL7|A0A410KGL7_9ENTR S-adenosylmethionine:tRNA ribosyltransferase-isomerase; OS = Kosakonia cowanii OX=208223 GN=queA PE=3 SV=1
MRVTDFSFELPESLIAHYPQPERSSCRLLSLDGPTGALTHGTFTDLLDKLNPGDLLVFNNTRVIPARLFGRKASGGKIEVLVERMLDDKRILAHIRASKAPKPGAELLLGDAEDIQATMVARHDALFEVEFHDERPVLDILNAIGHMPLPPYIDRPDEDADRELYQTVYSQKPGAVAAPTAGLHFDEPLLERLRKKGIEMAFVTLHVGAGTFQPVRVDSIEDHIMHSEYAEVPQEVVDAVLAAKARGNRVVAVGTTSVRSLESAAQAAKADLIEPFFGDTQIFIYPGYQYKVIDALVTNFHLPESTLIMLVSAFAGYQHTMNAYRAAVAEKYRFFSYGDAMFITYNPQAILERP

SEQ ID NO: 67722 - protein, 354 aa, unidentified
  source 1..354: note = Kosakonia oryzae
  REGION 1..354: note = tr|A0A1T5FV64|A0A1T5FV64_9ENTR S-adenosylmethionine:tRNA ribosyltransferase-isomerase; OS = Kosakonia oryzae OX=497725 GN=queA PE=3 SV=1
MRVADFSFELPESLIAHYPQPERSSCRLLSLDGPTGALTHGTFTDLLDKLNPGDLLVFNNTRVIPARLFGRKASGGKIEVLVERMLDDKRILAHIRASKAPKPGAELLLGDAEDVRATMVARHDALFEVEFHDERPVLDILNAIGHMPLPPYIDRPDEDADRELYQTVYSQKPGAVAAPTAGLHFDEPLLERLRNKGIEMAFVTLHVGAGTFQPVRVDSIEDHIMHSEYAEVPQEVVDAVLAAKARGNRVVAVGTTSVRSLESAAQAANDALIAPFFGDTQIFIYPGYQYQVIDALVTNFHLPESTLIMLVSAFAGYQHTMNAYRAAVAQEYRFFSYGDAMFITYNPQAITERP

SEQ ID NO: 67723 - protein, 354 aa, unidentified
  source 1..354: note = Kosakonia oryzendophytica
  REGION 1..354: note = tr|A0A1C4AQF6|A0A1C4AQF6_9ENTR S-adenosylmethionine:tRNA ribosyltransferase-isomerase; OS = Kosakonia oryzendophytica OX=1005665 GN=queA PE=3 SV=1
MRVADFSFELPESLIAHYPQPERSSCRLLSLDGPTGALTHGTFTDLLDKLNPGDLLVFNNTRVIPARLFGRKASGGKIEVLVERMLDDKRILAHIRASKAPKPGTELLLGDGEDIPATMVARHDALFEVAFHDERPVLDILNAIGHMPLPPYIDRPDEDADRELYQTVYSQKPGAVAAPTAGLHFDEPLLARLREKGIEMAFVTLHVGAGTFQPVRVDSIEDHIMHSEYAEVPQEVVDAVLAAKSRGNRVVAVGTTSVRSLESAAQAAKDALIAPFFGDTQIFIYPGYQYQVIDALVTNFHLPESTLIMLVSAFAGYQHTMNAYRAAVAEKYRFFSYGDAMFITYNPQALLERP

SEQ ID NO: 67724 - protein, 354 aa, unidentified
  source 1..354: note = Kosakonia oryziphila
  REGION 1..354: note = tr|A0A1C4DCZ6|A0A1C4DCZ6_9ENTR S-adenosylmethionine:tRNA ribosyltransferase-isomerase; OS = Kosakonia oryziphila OX=1005667 GN=queA PE=3 SV=1
MRVADFSFELPESLIAHYPQTERSSCRLLSLDGPTGALTHGTFTDLLDKLNPGDLLVFNNTRVIPARLFGRKASGGKIEVLVERMLDDKRILAHIRASKAPKPGAELLLGDAEDVQATMVARHDTLFEVEFHGERPVLDILNAIGHMPLPPYIDRPDEDADRELYQTVYSQKPGAVAAPTAGLHFDEPLLERLRNKGIEMAFVTLHVGAGTFQPVRVDSIEDHIMHSEYAEVPQEVVDAVLAAKARGNRVVAVGTTSVRSLESAAQAANDALIAPFFGDTQIFIYPGYQYQVIDALVTNFHLPESTLIMLVSAFAGYQHTMNAYHAAVAQEYRFFSYGDAMFITYNPQAITERP

SEQ ID NO: 67725 - protein, 354 aa, unidentified; identical to SEQ ID NO: 67722
  source 1..354: note = Kosakonia radicincitans
  REGION 1..354: note = tr|A0A1V0LI16|A0A1V0LI16_9ENTR S-adenosylmethionine:tRNA ribosyltransferase-isomerase; OS = Kosakonia radicincitans DSM 16656 OX=1177180 GN=queA; PE = 3 SV=1

SEQ ID NO: 67726 - protein, 354 aa, unidentified; identical to SEQ ID NO: 67722
  source 1..354: note = Kosakonia radicincitans
  REGION 1..354: note = tr|A0A5C1PAY5|A0A5C1PAY5_9ENTR S-adenosylmethionine:tRNA ribosyltransferase-isomerase; OS = Kosakonia radicincitans OX=283686 GN=queA PE=3 SV=1

SEQ ID NO: 67727 - protein, 354 aa, unidentified
  source 1..354: note = Kosakonia sp.
  REGION 1..354: note = tr|A0A3G9BQ10|A0A3G9BQ10_9ENTR S-adenosylmethionine:tRNA ribosyltransferase-isomerase; OS = Kosakonia sp. CCTCC M2018092 OX=2492396 GN=queA PE=3; SV = 1
MRVTDFSFELPESLIAHYPQPERSSCRLLSLDGPTGALTHGTFTDLLDKLNPGDLLVFNNTRVIPARLFGRKASGGKIEVLVERMLDDKRILAHIRASKAPKPGAELLLGDAEDIQATMVARHDALFEVEFHDERPVLDILNAIGHMPLPPYIDRPDEDADRELYQTVYSQKPGAVAAPTAGLHFDEPLLERLRNKGIEMAFVTLHVGAGTFQPVRVDSIEDHIMHSEYAEVPQEVVDAVLAAKARGNRVVAVGTTSVRSLESAAQAAKADLIEPFFGDTQIFIYPGYQYKVIDALVTNFHLPESTLIMLVSAFAGYQHTMNAYRAAVAEKYRFFSYGDAMFITYNPQAILERP

SEQ ID NO: 67728 - protein, 356 aa, unidentified
  source 1..356: note = Kosakonia sp.
  REGION 1..356: note = tr|A0A4R0HAI5|A0A4R0HAI5_9ENTR S-adenosylmethionine:tRNA ribosyltransferase-isomerase; OS = Kosakonia sp. WCHEs120001 OX=2529380 GN=queA PE=3 SV=1
MRVADFSFELPESLIAHYPQPERSSCRLLSLDGPTGALTHGTFTDLLDKLNPGDLLVFNNTRVIPARLFGRKASGGKIEVLVERMLDDKRILAHIRASKAPKPGTELLLGDAEDIQATMMARHDALFEVAFHDERPVLDILNAIGHMPLPPYIDRPDEEADRELYQTVYSQKPGAVAAPTAGLHFDEPLLERLRNKGIEMAFVTLHVGAGTFQPVRVDSIEDHIMHSEYAEVPQEVVDAVLAAKARGNRVVAVGTTSVRSLESAAQAAKKDLIEPFFGDTQIFIYPGYQYRVIDALVTNFHLPESTLIMLVSAFAGYKHTMNAYHAAVAEKYRFFSYGDAMFITYNPQAIFERVGE

SEQ ID NO: 67729 - protein, 337 aa, Kosmotoga arenicorallina
  REGION 1..337: note = tr|A0A176K0R7|A0A176K0R7_9BACT S-adenosylmethionine:tRNA ribosyltransferase-isomerase; OS = Kosmotoga arenicorallina S304 OX=1453497 GN=queA PE=3; SV = 1
MKTADFDFELPEELIAQEPILPRDHCRLLVIRRNSEEFEHKRFFEIKDFLRNNDLLVLNDSRVIPARLFGKKSTGAKVEVLLIEKLNDGIWKAIVKPGSKIKKGSTLIFNELSCKVIDHLPDSTRILEFCEPDAEERIRKIGKMPIPPYIRKYPENPELYQTVYSKIEGSVAAPTAGLHFTKELLTGLQDKGVNIAYITLHVGIGTFRPVKAEKIEEHKMHEEFFTISRETAKKIEETRAKGGRIIAVGTTVVRTLESVARSDGRVLPESGYTDIFIYPPYKFKAIDGLITNFHLPRSTLLMLVSAFAGKEKILKAYKEAVKEKYRFFSFGDACLIL

SEQ ID NO: 67730 - protein, 340 aa, Kosmotoga olearia
  REGION 1..340: note = tr|C5CD27|C5CD27_KOSOT S-adenosylmethionine:tRNA ribosyltransferase-isomerase OS=Kosmotoga olearia (strain ATCC BAA-1733 / DSM 21960 / TBF 19.5.1) OX=521045; GN = queAPE=3 SV=1
MNMKVSDFDYELPKELIAQEPVQPRDHSRLMVIRRDRENFEHTHFYRIIDYLEPGDLLVMNDSKVIPARLLGKKSTGAKVEIVLIEKVGSKQWKAIVRPGSKIKRGNVLLFEDLQCEVVEHCDDSTRILEFTGSNPWEKIRRIGKLPIPPYISKYPDDPNLYQTVYAKKDGSVAAPTAGLHFTDSLLKKLKEKGIKMAFVTLHVGLGTFRPVKVENVEDHVMHSEYYTLPEETVELIKETKRNGNRVIAVGTTVVRTLEAVAQKHDGKLVAESGRTDIFIYPPYEFKVIDGLITNFHLPKSTLLMLVAAFTGREKILKAYNEAIKLRYRFFSFGDACFIY

SEQ ID NO: 67731 - protein, 338 aa, unidentified
  source 1..338: note = Kosmotoga pacifica
  REGION 1..338: note = tr|A0A0G2ZH06|A0A0G2ZH06_9BACT S-adenosylmethionine:tRNA ribosyltransferase-isomerase; OS = Kosmotoga pacifica OX=1330330 GN=queA PE=3 SV=1
MKITDFDYELPEELIAQEPILPRDHCRLLVIRRDSENLEHRRFYDIKEYLEPGDLLVLNDSKVIPARLYGHKSTGAKIEVLLIEKIHSGIWKAIVKPGSKIKKGSQLLFEKLSCQVIEHLPDSTRILKFNEPDAEEIIKEIGRLPIPPYISKYPNDPELYQTVYAKTEGSVAAPTAGLHFTQQLLGELKDMGVNIAYITLHVGLGTFRPVKVENIEEHKMHSEFYTISEETVEKIGKTRKNGNRIIAVGTTVVRTLESVVAENKGRLIAKSGYTDIFIYPPFEFKIVDGIVTNFHLPRSTLLMLVSAFAGREKILKAYEKAVEKRYRFFSFGDACLIL

SEQ ID NO: 67732 - protein, 337 aa, Kosmotoga sp.
  REGION 1..337: note = tr|A0A5D0SFZ5|A0A5D0SFZ5_9BACT S-adenosylmethionine:tRNA ribosyltransferase-isomerase; OS = Kosmotoga sp. OX=1955248 GN=queA PE=3 SV=1
MKVSAFDYNLPDDLISQKPAIPRDSCRLMIIDKKNKKFIHDVFRNIGNYLKSGDLLVLNDSRVIPARLIGKKTTGASVEAVLLKKINNGEWKAIVRPGNKIKKGNTLLFSNIRCMVTKHYKDGTRLLSFLGNYSDEEIFKAGLLPVPPYIKEYPERPEYYQTIYAKKNGSIAAPTAGLHFTKRVLTELERKGVSTAYLTLHVGLGTFRPVKTHRVEDHKMHSEYYCIDEVCAQLVNKTLNNNGRIIAVGTTAVRALESSYRKHGRVLPDCDETDIFIYPPFDFYVISGLITNFHLPKSTLLMLVSAFAGKETTLKAYKEAIYMRYRFFSFGDACLYI

SEQ ID NO: 67733 - protein, 339 aa, Kosmotoga sp.
  REGION 1..339: note = tr|A0A5D0SD09|A0A5D0SD09_9BACT S-adenosylmethionine:tRNA ribosyltransferase-isomerase; OS = Kosmotoga sp. OX=1955248 GN=queA PE=3 SV=1
MKTSEFDFNLPDRLIAHKSAEKREKSRLLIYHNKSDKIEHKKFEEILNYFDEGDVLVLNNSRVIPARLFARKPTGAEIELLLLNEKENNKWEALARPRKRLKTNKKIIIEDIEVEVAEKTEWGGVIVKFPSGLNVYRFLEKNGYVPIPPYIKNEDQKYLKKRYQTVFAEKKGSIAAPTSGLHFSKDLLEKIKLKGVKIAYLTLHVGLGTFEPVKVKKVENFDIHSEYYELEKETVEKINNARGKIVCCGTTVTRTLEYVHTKFGKLKPSKGWCDLFIYPGYDFKVIDNLITNFHLPKSSLIMLVAALTGKEKILSIYKKAICREYRFYSFGDAMFIMDD

SEQ ID NO: 67734 - protein, 301 aa, unidentified
  source 1..301: note = Kouleothrix aurantiaca
  REGION 1..301: note = tr|A0A0P9CWS1|A0A0P9CWS1_9CHLR S-adenosylmethionine:tRNA ribosyltransferase-isomerase (Fragment) OS=Kouleothrix aurantiaca OX=186479; GN = SE17_25895 PE=3 SV=1
FLQAGDVLVINTSGTLNAALAATRADGTSLELHLSTHLPADLWVVELRQPTERASAPFRGGIAGETLQLPGGASAQLLAPYSLDRTIPIEAPRLWIAALRLGSCLNCYLEEYGFPIRYGYVRDAWPSSFYQTVYATEMGSAEMPSAGRAFTPELITRRVADGVQSAPLILQTGVASLEDHEPPYEEFVRGPPTTAQQLNAARAAGRRVIAVGTTAVRALETVSTDAGQVAPGEGWTRLVITPARGIHAVDGLLTGLHEPRATHLAMLEALAGRSHLQLTYAAALRERYLWHEFGDLHLILP

SEQ ID NO: 67735 - protein, 346 aa, Kozakia baliensis
  REGION 1..346: note = tr|A0A1D8UUZ1|A0A1D8UUZ1_9PROT S-adenosylmethionine:tRNA ribosyltransferase-isomerase; OS = Kozakia baliensis OX=153496 GN=queA PE=3 SV=1
MQISDFDFDLPRENIALEPARPRDSARLLHVTPGAPLAEAQVRDLPRLLRPGDLLIANDTAVIRAQLAAQRGEAKIGLTLDRILPGGDWHALARNARKLKPQDILTFGDDPVTATIIENEGDGAIRLRFSVESEEFDAFLKRVGALALPPYIDRPFGPTAQDDVDYRTIFSRQKGAVAAPTAGLHFTPELLAALDEAGIQRRTLTLHVGAGTFLPVRGDDIASHKMHAEWGEIDEETATIINQTRARGGRVVAVGTTSLRLLESAADESGFVRPWRGETAIFIKPGYQFRVVDVLMTNFHLPRSTLFMLVCALAGTETMRAAYAYAIAHHFRFYSYGDACLLERAR

SEQ ID NO: 67736 - protein, 343 aa, unidentified
  source 1..343: note = Kribbella albertanoniae
  REGION 1..343: note = tr|A0A4R4Q3F0|A0A4R4Q3F0_9ACTN S-adenosylmethionine:tRNA ribosyltransferase-isomerase; OS = Kribbella albertanoniae OX=1266829 GN=E1261_15335 PE=3; SV = 1
MTVHPHTRFVLPDSLNATEPPEARGLSRDQVKLLVAEGSTVTHTRFDRIGDHLRPGDLLLVNTSGTLPAAVDGTWITNSCMAPVVVHFSTALDDGNWVVELRNGGEPTFGGTAGDQVELPRGILTLLAPHQPGANRLWRAKPPVTDMISYLQRHGRPITYSYVNKRWPIASYQTVFARDPGSAEMPSAARPFSFELVSRLAAQGVLIAPITLHCGVSSLESHEPPLPERYDVPEHTARLVNWVKGNGGRIVAVGTTAVRAIESAVAADGSVVAAHGWTDLVLGPDHPAAVVDGLVTGMHAPEASHLLLLEAVAGGGTVQQAYDAALHERYLWHEFGDSCLVLK

SEQ ID NO: 67737 - protein, 344 aa, Kribbella amoyensis
  REGION 1..344: note = tr|A0A561BP86|A0A561BP86_9ACTN S-adenosylmethionine:tRNA ribosyltransferase-isomerase; OS = Kribbella amoyensis OX=996641 GN=FB561_1708 PE=3 SV=1
MRVRPHTRFTLPDELNAVEPPEAHGLARDQVKLLVAEGSTVTHTRFDRIGDHLRPGDLLLVNTSATLAAAVDGQWITGSGVAPVAVHFSTALDDGTWVVELRSGGSPMFDAAAGDRVELPEGVLTLLAPYQPGLTRLWTAQPPVPDVVGYLRRHGRPITYQYVDRQWPLALYQTVFANQPGSAEMPSAGRPFSFELVSHLPAAGVLIAPILLHCGVSSPESHEPPLPERYDVPAHTARLVNWVKGNGGRVIAVGTTAVRAIETAARPDGSVVAAQGWTDLVLGPDRPAAIVDGLVTGMHAPEASHLLLLESVVGGDVVQRAYDAALERRYLWHEFGDVSLLLRN

SEQ ID NO: 67738 - protein, 343 aa, Kribbella antibiotica
  REGION 1..343: note = tr|A0A4R4ZK27|A0A4R4ZK27_9ACTN S-adenosylmethionine:tRNA ribosyltransferase-isomerase; OS = Kribbella antibiotica OX=190195 GN=E1263_16710 PE=3 SV=1
MTVHPHTRFVLPDSLNATEPPEARGLARDQVKLLVAEGSTITHTRFDRIGNHLRPGDLLLVNTSGTLAAAVDGTWITGAGVARVVVHFSTALDDGNWVVELRNGGAPMLGGTAGDQVELPRGILTLLAPYQSESNRLWRAKPPVTDMVGYLQRHGRPITYSYVNKQWPLASYQTVFARDPGSAEMPSAARPFSFELVSRLAAQGVLIAPITLHCGVSSLESHEPPLPERYDVPEHTAGLVNWVKGNGGRIVAVGTTAVRAIESAVAADGSVVAARGWTDLVLGPDHPAAVVDGLITGMHAPEASHLLLLESVAGGGTVQQAYDAALHERYLWHEFGDSCLILR

SEQ ID NO: 67739 - protein, 344 aa, Kribbella flavida
  REGION 1..344: note = tr|D2PQH2|D2PQH2_KRIFD S-adenosylmethionine:tRNA ribosyltransferase-isomerase OS=Kribbella flavida (strain DSM 17836 / JCM 10339 / NBRC 14399) OX=479435; GN = Kfla_0029PE=3 SV=1
MRLRPHTRFTLPDELNAVEPPEARGLSRDQVKLLVAEGSTVTHTRFDRLGEHLRAGDLLLVNTSGTLAAAVEGSWISSSGVTPVVVHFSTELDDGTWVVELRSNGLPMLAGSTGDQVELPEGVLKLLAPYQAGSTRLWRAQPPVAEVVDYLRRHGRPITYQYVDQQWPLALYQTVFANQPGSAEMPSAGRPFSFELVSQLAAAGVLIAPILLHCGVSSLESHEPPLAERYAVPEHTARLVNWVKSTGGRVIAVGTTAVRAIETAALPSGSVVASSGWTDLVLSPERPTAVVDGLITGMHAPEASHLLLLESVVGGEAVQHAYDAALDRGYLWHEFGDTCLLLRG

SEQ ID NO: 67740 - protein, 335 aa, Kribbella jejuensis
  REGION 1..335: note = tr|A0A542EUL0|A0A542EUL0_9ACTN S-adenosylmethionine:tRNA ribosyltransferase-isomerase; OS = Kribbella jejuensis OX=236068 GN=FB475_3176 PE=3 SV=1
MRVHPQTRFELPEQLNAGEPPEARGVSRDHVKLLVAEGSTVTHTRFDRLGDHLRAGDLLLVNTSGTLAAAVDGTPYTVHFSTPLDDGTWVVELRDRNAPLFDGTPGLQVELPEGVLTLLAPYEASPNRLWIAQPPVVDVLSYLQRHGRPITYNYVGKRWPLASYQTVFAREPGSAEMPSAARPFSFELVSHLASQGVLIAPILLHCGVSSLESHEPPQPERYDVPAHTARLVNWVKANGGRVIAVGTTAVRAIETAASPDGTVSPSHGWTDLVLGLTREPRVVDGLITGWHAPEASHLLLLESVAGPDQVQNAYTEALDHGYLWHEFGDSCLLLR

SEQ ID NO: 67741 - protein, 343 aa, unidentified
  source 1..343: note = Kribbella pittospori
  REGION 1..343: note = tr|A0A4R0K9U5|A0A4R0K9U5_9ACTN S-adenosylmethionine:tRNA ribosyltransferase-isomerase; OS = Kribbella pittospori OX=722689 GN=E0H73_33510 PE=3 SV=1
MTVHPQTHFVLPDSLNASEPPEARGLSRHQVKLLVAEGSTITHTRFDRIGEHLRPGDLLLVNTSGTLPAAVDGSWITGAGVAPVVVHFSTALDDGTWVVELRSNRAPMLGGTAGDQVEMPEGVLTLLAPYQSESNRLWRAKPPVADVLGYLTRHGRPISYSYVGKRWPLASYQTVFAREPGSAEMPSAARPFSFELVSHLAAQGVLIAPILLHCGVSSLESHEPPLPERYDVPEHTARLVNWVRANGGRVIAVGTTAVRAIESAVTQEGTVSPSNGWTDLVLGPDHPSRVVDGLITGMHAPEASHLLLLESVAGPDAVQRAYTAALNEHYLWHEFGDVCLLLR

SEQ ID NO: 67742 - protein, 334 aa, unidentified
  source 1..334: note = Kribbella sindirgiensis
  REGION 1..334: note = tr|A0A4R0JBX7|A0A4R0JBX7_9ACTN S-adenosylmethionine:tRNA ribosyltransferase-isomerase; OS = Kribbella sindirgiensis OX=1124744 GN=E0H50_03470 PE=3; SV = 1
MMVHPHTRFDLPEALNAGEPPEARGVSRDHVKLLVAEGSTVTHTRFDRIGDHLRPGDLLLVNTSTTLPAAVDSASYTVHFSTPLDDGTWVVELRDGGAPMFHGTAGVRVELPGGALTLLAPYQSSNRLWIAQPPVADVLGYLQQYGRPITYNYVGKRWPLASYQTVFARDPGSAEMPSAARPFSFELVSHLASQGVLIAPILLHCGVSSLESHEPPQPERYDVPAHTARLVNWVKANGGRVIAVGTTAVRAIESATTPDGTVAPAHGWTDLILGPDRPPYVVDGLITGWHAPEASHLLLLESVAGPAQVQRAYDAAVEHRYLWHEFGDSCLILR

SEQ ID NO: 67743 - protein, 334 aa, unidentified
  source 1..334: note = Kribbella soli
  REGION 1..334: note = tr|A0A4Q7XDD7|A0A4Q7XDD7_9ACTN S-adenosylmethionine:tRNA ribosyltransferase-isomerase; OS = Kribbella soli OX=1124743 GN=EV645_2872 PE=3 SV=1
MKVHPHTRFVLPDALNAGEPPEARGLRRDQVKLLVAEGSTVTHTRFDRIGEHLRPGDLLLVNTSGTLPAAVDGASVTVHFSTALDDGTWVVELRDGGSPRFDGKAGQQVELPEGVLTLLAPYQSESNRLWIARPPVPDVLGYLQRHGRPITYDYVGKRWPLAAYQTVFAREPGSAEMPSAARPFSFELVSRLASQGVLIAPILLHCGVSSLESHEPPQPERYDVPAHTARLVNWVKANGGRVIAVGTTAVRAIESAADASVNPSQGWTDLVLSPDRPPQVVDGLITGWHAPEASHLLLLESVVGTELVQRAYDAAVQQNYLWHEFGDSALLLRG

SEQ ID NO: 67744 - protein, 333 aa, unidentified
  source 1..333: note = Kribbella soli
  REGION 1..333: note = tr|A0A4R0HM03|A0A4R0HM03_9ACTN S-adenosylmethionine:tRNA ribosyltransferase-isomerase; OS = Kribbella soli OX=1124743 GN=E0H45_11320 PE=3 SV=1
MVHPHTRFDLPEALNAGEPPEARGLSRDHVKLLVAEGSTVTHTRFDRIGEHLRPGDLLLVNTSTTLPAAVDSSSYTVHFSTPLDDGTWVVELRNSGAPMFDGTAGDRVELPEGALTLLAPYQGSRRLWIAKPPVADVLGYLQRHGRPITYNYVDKRWPLASYQTVFARDPGSAEMPSAARPFSFELVSHLASQGVLIAPILLHCGVSSLESHEPPQPERYDVPAHTARLVNWVKANGGRVIAVGTTAVRAIESATTPDGTVTPAHSWTDLILGPERPPHVVDGLITGWHAPEASHLLLLESVAGPDQVQRAYDAAVQGRYLWHEFGDSCLMLR

SEQ ID NO: 67745 - protein, 334 aa, Kribbella sp.
  REGION 1..334: note = tr|A0A4R0J412|A0A4R0J412_9ACTN S-adenosylmethionine:tRNA ribosyltransferase-isomerase; OS = Kribbella sp. YM55 OX=1572660 GN=E0H92_01745 PE=3 SV=1
MTVHPHTRFDLPEALNAGEPPEARGVSRDHVKLLVAEGSTVTHTRFDRIGDHLRPGDLLLVNTSTTLPAAVDSASYTVHFSTPLDDGTWVVELRDGGAPMFHGTAGDRVELPGGALTLLAPYQGSNRLWIAQPPVVDVLGYLQQYGRPITYNYVGKRWPLASYQTVFARDPGSAEMPSAARPFSFELVSHLASQGVLIAPILLHCGVSSLESHEPPQPERYDVPAHTARLVNWVKANGGRVIAVGTTAVRAIESATTHDGTVAPAHGWTDLILGPERPPYVVDGLITGWHAPEASHLLLLESVAGPDQVQRAYDAAVEHRYLWHEFGDSCLILR

SEQ ID NO: 67746 - protein, 344 aa, Kribbella sp.
  REGION 1..344: note = tr|A0A4R6KSV7|A0A4R6KSV7_9ACTN S-adenosylmethionine:tRNA ribosyltransferase-isomerase; OS = Kribbella sp. VKM Ac-2527 OX=2512215 GN=EV643_101706; PE = 3 SV=1
MRVHPQTRFTLPDELNAAQPPEARGLVRDQVKLLVAAGSAITHTRFDRIGEHLRPGDLLLVNTSATLAAAVDGSWITGSGVAPVVVHFSTELDDGTWVVELRSGGTPMLGAADGDQVELPEGVLTLLSPYQLGLTRLWIAQPPVPDVVEYLRRHGRPISYKYVSREWPLAFYQTVFANQPGSAEMPSAGRPFSFELVSHLAAAGVLIAPILLHCGVSSLESHEPPLPERYAVPEHTARLVNWVKANGGRVIAVGTTAVRAIETAALPDGSVVAAEGWTDLVLGPDRSAVVVDGLVTGMHAPDASHLLLLESVVGADIVQHAYNAALEQHYLWHEFGDTSLLLRS

SEQ ID NO: 67747 - protein, 349 aa, Kriegella aquimaris
  REGION 1..349: note = tr|A0A1G9PRA4|A0A1G9PRA4_9FLAO S-adenosylmethionine:tRNA ribosyltransferase-isomerase; OS = Kriegella aquimaris OX=192904 GN=queA PE=3 SV=1
MKLSHFSFELPDNLLAEYPAENRDESKLMVVHRDTGKIEHKMFKDLINYFDEGDVMVLNNTKVFPARLYGNKEKTGARIEVFLLRELNEEQRLWDVLVDPARKIRIGNKLYFGDDETLVAEVIDNTTSRGRTLRFLYDGSYTDFRRKLRDLGQTPLPKYIKRGVEPEDEERYQTIYAKHEGAVAAPTAGLHFSKHLLKRLEIKGIDFAEVTLHVGLGTFNPVEVEDLSKHKMDSEELIIDERATEIVNNAKTNKKKVCAVGTTAMRGLESAVSSGHTLNTFDGWTNKFVFPPYEFSIANCMVTNFHLPKSTLLMMVSAFMGHDLMKKAYKEAILEGYRFYSYGDAMLII

SEQ ID NO: 67748 - protein, 343 aa, Kroppenstedtia eburnea
  REGION 1..343: note = tr|A0A1N7M6U4|A0A1N7M6U4_9BACL S-adenosylmethionine:tRNA ribosyltransferase-isomerase; OS = Kroppenstedtia eburnea OX=714067 GN=queA PE=3 SV=1
MDVSQFDFELPEELIAQEPAPKRSGSRLMVVNRENQTVEHRRFPDLLEYLHPGDVLVLNDTRVRPARLVGVKEGTGARIELLLLNPLGGDRWEALVKPAKRVKEGTVVRFGDGKLQAVAQEMTEAAGGRVFQLQYQEQDLEILLERLGEMPLPPYIHRRLDEPERYQTVYSRAVGSAAAPTAGLHFTEDLLNRAKEKGVKIVTITLHVGLGTFRPVTAESVEEHQMHAEFYEVSEEAAEQIRVAKAKGNRVVAVGTTSVRTLETVARDHGEIRAARGWTDIFIYPGFPFRVTDALLTNFHLPKSTLLMLVSAFSSRELMLQAYRTAVREKYRFFSFGDAMLIL

SEQ ID NO: 67749 - protein, 362 aa, Ktedonobacter racemifer
  REGION 1..362: note = tr|D6U0Z3|D6U0Z3_9CHLR S-adenosylmethionine:tRNA ribosyltransferase-isomerase OS=Ktedonobacter racemifer DSM 44963 OX=485913 GN=Krac_3296 PE=3 SV=1
MTSLPIQTALDASLDFVLPAELEATRPPEARGLARDEVRLMVSYRANDHILHDRFREIEHFLEPGDLLVVNTSGTMNAALSATRADGTPLEVHLSTHLPANLWIVEVRLKQGERTFPFSEMQAGERVPLPGGASLHLLTPYSAGEGRLQPARQRLWIATIELASPLQEYLASYGFPIRYNYVPEAWPLEYYQTVYATEYGSAEMPSAGRAFTPELIARLVARGIQIVPLLLHTGVSSLEEHEPPYEEYYRVPVETAKSINTAHANHKRVVAVGTTVVRALETVTDVDGVTHPGEGWTRLVITPQRGLRAVNALLTGLHEPRASHLLMLEALAGREHLRKTYAAALQEQYLWHEFGDLHLLLP

SEQ ID NO: 67750 - protein, 379 aa, Ktedonobacter racemifer
  REGION 1..379: note = tr|D6THZ9|D6THZ9_9CHLR S-adenosylmethionine:tRNA ribosyltransferase-isomerase OS=Ktedonobacter racemifer DSM 44963 OX=485913 GN=queA PE=3 SV=1
MDSNTVEQRTQQSLPDLKISDFDYHLPNELIAQTPIEPRDSSRLLVVKRQDETLAHQHFRDIEEYLQPGDLLIANQSRVIPARLLGKRAESGGAVEVLLLAERSDLGQDTWEALVRPGRRLREGARIFFGAETEEQARLIGEILERTEAGGRVVRFHVPGRSQERQNDPYALLDVRQVIDEIGKMPLPPYIHETLDDPERYQTVYARIRGSAAAPTAGLHFTPQLLERLRARGVRTGFVTLHVGLDTFRPVESEDVREHKMHSEEIELDETTAALINETRARGGRVVAVGTTSVRVLESVASLHEGRIVPYKGHTRLFITPGYRYQAVDALITNFHLPRSTLLLLVSAFMTKPLMERAYQEAITERYRFFSFGDAMLIL

SEQ ID NO: 67751 - protein, 356 aa, Ktedonobacter sp.
  REGION 1..356: note = tr|A0A1Q6YU43|A0A1Q6YU43_9CHLR S-adenosylmethionine:tRNA ribosyltransferase-isomerase; OS = Ktedonobacter sp. 13_2_20CM_53_11 OX=1805233; GN = AUH05_08465 PE=3 SV=1
MSSTIPDNTVLDFDLPPELEASEPPEARGLARDEVRLMVSYRSRNRVVHTQFRQIGEFLNPGDLLVINTSGTMNAALNATRSDGMPLELHLSTHLPADLWVVEARTLNGKATKPFYNIKAGERLQLPGGAEATLHMPYLHSQGDGPHRLWIATLNLPRPLPAYLEQHGFPIRYSYVKEGWPLAYYQNVYSTEKGSAEMPSAGRAFTPELITQLVARGVQVAPLLLHTGVASLESHEPPYEEFYRVPLETARLVNAARANRKRVIAVGTTVVRSLETVTDEEGTAHPGEGWTKLVITPQRGLRAVNAMITGLHEPCATHLSMLEALAGLEHLKITYREALQERYLWHEFGDVHLILP

SEQ ID NO: 67752 - protein, 287 aa, Ktedonobacter sp.
  REGION 1..287: note = tr|A0A1Q7WLH1|A0A1Q7WLH1_9CHLR S-adenosylmethionine:tRNA ribosyltransferase-isomerase (Fragment) OS=Ktedonobacter sp. 13_1_20CM_3_54_15; OX = 1805224 GN=AUG45_12395 PE= 3 SV=1
LLGRRAETGGAVEVLLLAERIDIGPDCWETLVRPGRRLREGSRLEFSHEGLPNLALNAEVLQHTEAGGRVIRFSPAAEQSLTVGQLIERLGHMPLPPYIHKTLTDPERYQTVYARISGSAAAPTAGLHFTPGLLEHLRKQGVRVGFVTLHVGLDTFRPVEVEDVSDHKMHSEEIELDAPTAELIEETRKAGGRVVAVGTTSMRVLESVAGFYDGRVCPYRGSTRLFITPGYRFRVVDAMITNFHLPRSTLLLLVSAFAGKALIEKAYQEAIHEHYRFFSFGDAMLIL

SEQ ID NO: 67753 - protein, 368 aa, unidentified
  source 1..368: note = Ktedonobacterales bacterium
  REGION 1..368: note = tr|A0A4P6JY84|A0A4P6JY84_9CHLR S-adenosylmethionine:tRNA ribosyltransferase-isomerase; OS = Ktedonobacterales bacterium SCAWS-G2 OX=2509675 GN=queA; PE = 3 SV=1
MDKQSLKISDFDYNLPTELIAQTPLEPRDASRLLVVQRTSGTMEHRHFRDIGDYLRPGDLLVANQSRVIPARLLGKRAETGGAVEVLLLAERPDLGQDCWEALVRPGRRLREGAMILFNDERDAPRLQGEVMERTEAGGRVLRFSTYGNSEPTNAADPYSLLNVRQLIDELGRMPLPPYIHEKLNDPERYQTVYARIRGSAAAPTAGLHFTPQLLEQLRQQGVRVGFVTLHVGLDTFRPVECEDVSEHKMHSEEIDLDAPTAELIRETRAAGGRVVAVGTTTMRVLESVAGFHNGQIEPFHGHTSLFITPGFHFQAVDALITNFHLPRSTLLLLVSAFMGKGLMEKAYQEAIEQRYRFFSFGDAMLLL

SEQ ID NO: 67754 - protein, 370 aa, unidentified
  source 1..370: note = Ktedonobacterales bacterium
  REGION 1..370: note = tr|A0A4P6JRY1|A0A4P6JRY1_9CHLR S-adenosylmethionine:tRNA ribosyltransferase-isomerase; OS = Ktedonobacterales bacterium SCAWS-G2 OX=2509675; GN = EPA93_20545 PE=3 SV=1
MSKNIPQPPVHNVDDKSSVEASRMHFSLPAELEAGEPPEARGLERDEVRLMVSYVSNNQVAHTRFRQIEDFLNAGDVLVINTSGTLNAALPVQSKDGTRFGLHLSTHLPNNTWVIELRSYTDALKKTTRPYYGAKPGETYQLPAGGKLTIHKAYRSDQAVPRLWIASLDLPAPLHAYLNEYGFPIRYGYVREGWPISYYQTVYATEMGSAEMPSAGRAFTHQLITRLVAKGILIVPLLLHTGVASAEYNEPVYEEYYRVPQSTAYIINAAHEANRRVIAVGTTVVRALETVTDTNGITSAGEGWTDIFITPQRGIHAVNGLITGLHEPLSTHLAMLEAIAGRAHLEITYQQALQEGYLWHEFGDLHLILP

SEQ ID NO: 67755 - protein, 367 aa, unidentified
  source 1..367: note = Kuenenia stuttgartiensis
  REGION 1..367: note = tr|Q1Q6B9|Q1Q6B9_KUEST S-adenosylmethionine:tRNA ribosyltransferase-isomerase OS=Kuenenia stuttgartiensis; OX = 174633 GN=queA PE=3 SV=1
MPLIFCFSLLNTGMPDVSVISHKLSDYDFDLPKELIAQKPTEKRDNARLLVLYRRSGRIEHRRFSEIAGYLRPEDLLVLNNTKVIPSRIAGKKPQGAYVDLLFIEELEDNHWKALLKSNGLLKKGEKIYLDNAAVSACLLVKHEDNSWILRIENGANIRELIHRTGEMPLPPYIKRPKKNNTLSTLDAERYQTVFAQKEGAIAAPTAGLHFSEDVLGKIRNSGTDIAFVTLHVRLGTFLPIKTEEIKNHRMHKEYYEYTKELLPKITITKNRGGRIIATGSTSCRTLETIALNNNIHQFSGYTDLFIYPPYPFQYVDALITNFHLPKTTLFLLVSAFAGREQIFNAYEIAKKEGYRFYSYGDCMLII

SEQ ID NO: 67756 - protein, 354 aa, unidentified
  source 1..354: note = Kuenenia stuttgartiensis
  REGION 1..354: note = tr|A0A2C9CJ82|A0A2C9CJ82_KUEST S-adenosylmethionine:tRNA ribosyltransferase-isomerase; OS = Kuenenia stuttgartiensis OX=174633 GN=queA PE=3 SV=1
MPDVSVISHKLSDYDFDLPKELIAQKPTEKRDNARLLVLYRRSGRIEHRRFSEIAGYLRPEDLLVLNNTKVIPSRIAGKKPQGAYVDLLFIEELEGNHWKALLKSNGLLKKGEKIYLDNAAVSACLLVKHEDNSWILRIENGANIRELIHRTGEMPLPPYIKRPKKNNTLSTLDAERYQTVFAQKEGAIAAPTAGLHFSEDVLGKIRNSGTDIAFVTLHVGLGTFLPIKTEEIKNHRMHKEYYEYTKELLPKITITKNRGGRIIATGSTSCRTLETIALNNNIHQFSGYTDLFIYPPYPFQYVDALITNFHLPKTTLFLLVSAFAGREQIFNAYEIAKKEGYRFYSYGDCMLII

SEQ ID NO: 67757 - protein, 349 aa, Kurthia sibirica
  REGION 1..349: note = tr|A0A2U3AIF5|A0A2U3AIF5_9BACL S-adenosylmethionine:tRNA ribosyltransferase-isomerase; OS = Kurthia sibirica OX=202750 GN=queA PE=3 SV=1
MKLEDFDYELPEELIAQIPLEDRTSSRLMVLDRETGEVSHNHFRDILGEFKAGDCLILNNTRVLPARLIGEKKATGGHAEVLLLKQTTTDEWETLVKPAKRVKVGTELTFGDGLLKAVCTGVLDHGGRIFKFDYEGIFIEILEQLGTMPLPPYIHEKLEDQERYQTVYSKELGSAAAPTAGLHFTEELLDAIRAKGVKVAFLTLHVGIGTFRPVNVENIEEHDMHAEFYHLSEETAQIIRDTQASGGNVISVGTTSTRTLETIAERHNGKIVADSGWTSIFIYPGFEYKAIDGMVTNFHLPKSTLVMMISALASRDMILNAYKIAVQEKYRFFSFGDAMFIRPKAQKGN

SEQ ID NO: 67758 - protein, 348 aa, Kurthia sp.
  REGION 1..348: note = tr|A0A433RRW9|A0A433RRW9_9BACL S-adenosylmethionine:tRNA ribosyltransferase-isomerase; OS = Kurthia sp. 3B1D OX=1562256 GN=queA PE=3 SV=1
MKLEDFDYYLPEELIAQVPLENRAASRLMVLNKETGEVEHHHFPHIVDELEKGDCLILNDTRVLPARLIGEKKDTGAHIEVLLIKQTENDEWETLVKPAKRIKEGTVVSFGNGLLTATCTSEMDHGGRKFKFDYEGIFIEILEKLGTMPLPPYIHEKLDDQERYQTVYSKELGSAAAPTAGLHFTEEILDAIRAKGVEVAFVTLHVGIGTFRPVSVDNIEEHDMHAEFYNLPEDTAKIINDTKANGGRVITVGTTSTRTLETVAQNNNGEIVAESGWSKIFIYPGFEYKAIDGMVTNFHLPKSSLVMMISALSSRENVLNAYKIAVENKYRFFSFGDAMFIRPQKKGN

SEQ ID NO: 67759 - protein, 348 aa, Kurthia sp.
  REGION 1..348: note = tr|A0A0X9VCL0|A0A0X9VCL0_9BACL S-adenosylmethionine:tRNA ribosyltransferase-isomerase; OS = Kurthia sp. 11kri321 OX=1750719 GN=queA PE=3 SV=1
MKLEDFDYVLPEELIAQVPLENRAASRLMVLDKETGEVEHHHFPHIVEELEAGDCLILNDTRVLPARLIGEKKETGAHIEVLLIKQTADDEWETLVKPAKRIKVGTVVTFGDGLLTAECTGELEHGGRLFKFNYEGIFIEILEKLGTMPLPPYIHEKLDNQERYQTVYSKELGSAAAPTAGLHFTDEILDAIRAKGVQVAFVTLHVGIGTFRPVSVETIEEHDMHAEFYNLPAETAQIINDTKANGGRVIAVGTTSTRTLETVAQNNNGQIIAESGWSKIFIYPGFEYKAIDGMVTNFHLPKSSLVMMISALAGRENVLNAYKIAVENKYRFFSFGDAMFIRPQKKGN

SEQ ID NO: 67760 - protein, 348 aa, Kurthia zopfii
  REGION 1..348: note = tr|A0A2U3AHF6|A0A2U3AHF6_9BACL S-adenosylmethionine:tRNA ribosyltransferase-isomerase; OS = Kurthia zopfii OX=1650 GN=queA PE=3 SV=1
MKLEDFDYELPEELIAQVPLENRSASRLMVLDKETGEVEHHHFPHIVNELEAGDCLILNDTRVLPARLIGLKEETGAHIEVLLIKQTSGDEWETLVKPAKRIKKGTIVTFGEGLLKAVCTAELDHGGRQFKFEYEGIFIEILEKLGTMPLPPYIHEKLDNQERYQTVYSRELGSAAAPTAGLHFTEEILEAIRAKGVQVAFVTLHVGIGTFRPVSVDTIEEHDMHAEFYNLPESTAKIINETKANGGRVIAVGTTSTRTLETVAQNNDGQIIAESGWSKIFIYPGFEYKAIDGMVTNFHLPKSSLVMMISALASRENILNAYKTAVENKYRFFSFGDAMFIRPKKKGN

SEQ ID NO: 67761 - protein, 348 aa, Kurthia zopfii
  REGION 1..348: note = tr|A0A3S4V4I9|A0A3S4V4I9_9BACL S-adenosylmethionine:tRNA ribosyltransferase-isomerase; OS = Kurthia zopfii OX=1650 GN=queA PE=3 SV=1
MKLEDFDYELPEELIAQVPLENRSASRLMVLDKETGEVEHHHFPHIVNELEAGDCLILNDTRVLPARLIGLKEETGAHIEVLLIKQTSGDEWETLVKPAKRIKKGTIVTFGEGLLKAVCTAELDHGGRQFKFEYEGIFIEILEKLGTMPLPPYIHEKLDNQERYQTVYSRELGSAAAPTAGLHFTEEILEAIRAKGVQVAFVTLHVGIGTFRPVSVDTIEEHDMHAEFYNLPESTAKIINETKANGGRVIAVGTTSTRTLETVAQNNDGQVIAESGWSKIFIYPGFEYKAIDGMVTNFHLPKSSLVMMISALASRENILNAYKTAVENKYRFFSFGDAMFIRPKKKGN

SEQ ID NO: 67762 - protein, 346 aa, Kushneria avicenniae
  REGION 1..346: note = tr|A0A1I1LAG6|A0A1I1LAG6_9GAMM S-adenosylmethionine:tRNA ribosyltransferase-isomerase; OS = Kushneria avicenniae OX=402385 GN=queA PE=3 SV=1
MQRADFHFDLPSELIARYPSDQRSDCRLLCVDGNSGHLEHTRFPALLDHLDPGDLVVFNDTRVIPARLFGQKESGGRVEMLLERPLDAHRGLAHLRASKAPKIGTRIVFEGEIHAVVEDRRDALFELRFEGDTPLVALLEAHGHMPLPPYIEREDEHTDRERYQTVYARHDGAVAAPTAGLHFDEAMLDAMAARGIEKAFVTLHVGAGTFQPVRVDNILEHHMHSEWIEVSEATAEQVRVAQDRGNRVIAVGTTSVRCLESACRHSSSGRIETFSGDTDIFIYPGYQWQCVDALVTNFHLPESTLLMLVASFAGHDHVMQAYQAAVDERYAFFSYGDAMYLTRQRG

SEQ ID NO: 67763 - protein, 346 aa, Kushneria indalinina
  REGION 1..346: note = tr|A0A3D9DRV4|A0A3D9DRV4_9GAMM S-adenosylmethionine:tRNA ribosyltransferase-isomerase; OS = Kushneria indalinina DSM 14324 OX=1122140 GN=queA PE=3; SV = 1
MQRADFHFDLPDELIARYPSDQRSDCRLLCVDGDSGHLEHTRFPALLEHLAPGDLVVFNDTRVIPARLFGQKESGGRVEMLLERPLDAHRGLAHLRASKAPRIGTRIEFEGDIHAVVEGRRDALFELHFEGDTPLVALLEAHGHMPLPPYIEREDEHTDRERYQTVYARHDGAVAAPTAGLHFDEALLEAMENRGIEKAFVTLHVGAGTFQPVRVDNILEHHMHSEWIEVSDATAQQVRAAQDRGNRVIAVGTTSVRCLESACQHSTSGRIEAFSGDTDIFIYPGYQWQCVDSLVTNFHLPESTLLMLVASFAGHDHVMQAYQAAVDERYAFFSYGDAMYLTRQRG

SEQ ID NO: 67764 - protein, 346 aa, unidentified
  source 1..346: note = Kushneria konosiri
  REGION 1..346: note = tr|A0A2Z2HCF5|A0A2Z2HCF5_9GAMM S-adenosylmethionine:tRNA ribosyltransferase-isomerase; OS = Kushneria konosiri OX=698828 GN=queA PE=3 SV=1
MQRADFHFDLPNELIARYPSDQRSDCRLLCVDGDSGHLEHTRFPKLLEHLTPGDLVVFNDTRVIPARLFGHKESGGRVEMLLERPLDTHRGLAHLRASKAPKIGTRIVFEGDIHAVVEGRRDALFELKFEGDTPLVALLEAHGHMPLPPYIEREDEHTDRERYQTVYARRDGAVAAPTAGLHFDEALLEAMEQRGIEKAFVTLHVGAGTFQPVRVDNILEHHMHSEWIEVSEATAEQVRAAQDRGNRVIAVGTTSVRCLESACQHSGSDRIEAFSGDTDIFIYPGYQWQCVDALITNFHLPESTLLMLVASFAGYDHVMQAYRAAVDERYAFFSYGDAMYLTRQRD

SEQ ID NO: 67765 - protein, 346 aa, Kushneria marisflavi
  REGION 1..346: note = tr|A0A240ULT2|A0A240ULT2_9GAMM S-adenosylmethionine:tRNA ribosyltransferase-isomerase; OS = Kushneria marisflavi OX=157779 GN=queA PE=3 SV=1
MQRADFHFDLPNELIARYPSDQRSDCRLLCVDGDSGHLEHTRFPQLLDHLAPGDLVVFNDTRVIPARLFGQKESGGRVEMLLERPLDAYRGLAHLRASKAPKIGTRLIFEGDVHAVVEGRRDALFELRFEGDTPLVALLEAHGHMPLPPYIEREDEHTDRERYQTVYARHDGAVAAPTAGLHFDDAMLEAMEARGIEKAFVTLHVGAGTFQPVRVDNILEHHMHSEWIEVSATTAEQVRAAQDRGNRVIAVGTTSVRCLESACQHSSHGRIEAFSGDTDIFIYPGYQWQCVDSLITNFHLPESTLLMLVSSFAGYDHVMQAYQAAVDERYAFFSYGDAMYLTRQRG

SEQ ID NO: 67766 - protein, 346 aa, unidentified
  source 1..346: note = Kushneria phyllosphaerae
  REGION 1..346: note = tr|A0A2R8CR86|A0A2R8CR86_9GAMM S-adenosylmethionine:tRNA ribosyltransferase-isomerase; OS = Kushneria phyllosphaerae OX=2100822 GN=queA PE=3 SV=1
MQRADFHFDLPNELIARYPSDQRSDCRLLCVDGDSGHLEHTRFPELLEHLAPGDLVVFNDTRVIPARLFGHKDSGGRVEMLLERPLDAHRGLAHLRASKAPKIGTRIVFEGEVHAVVEGRRDALFELKFEGETPLVALLEAHGHMPLPPYIEREDEHTDRERYQTVYARHDGAVAAPTAGLHFDEPMLEAMEQRGIEKAFVTLHVGAGTFQPVRVDNILEHHMHSEWIEVSEATAEQVRAAQDRGNRVIAVGTTSVRCLESACRHSSNDRIEAFSGDTDIFIYPGYQWQCVDALITNFHLPESTLLMLVASFAGYDHVMQAYQAAVDERYAFFSYGDAMYLTRQRD

SEQ ID NO: 67767 - protein, 346 aa, Kushneria sinocarnis
  REGION 1..346: note = tr|A0A420WZW6|A0A420WZW6_9GAMM S-adenosylmethionine:tRNA ribosyltransferase-isomerase; OS = Kushneria sinocarnis OX=595502 GN=queA PE=3 SV=1
MQRTDFHFDLPDELIARYPSEQRRDCRLLCVDGAAGTIEHQQFPDLLDHLDPGDLVVFNDTRVIPARLFGHKASGGRVEMLLERPLDAHRGLAHLRASRAPKPGTELIFEGDIRAVVEERRDTLFELRFLGDTPLVELLDTHGHMPLPPYIEREDELADRERYQTVYARREGAVAAPTAGLHFDEPLMAEMRERGIEHAFVTLHVGAGTFQPVRVDNIQEHHMHSEWVEVTPEVCDQVRVARARGNRVVAVGTTSVRCLESACQQSPDGDIAPLTGDTDIFIYPGYRWRCVDALVTNFHLPESTLLMLVTAFAGLEPVMRAYREAVEQRYRFFSYGDAMFLTRRPA

SEQ ID NO: 67768 - protein, 349 aa, Kushneria sp.
  REGION 1..349: note = tr|A0A1S1NTY0|A0A1S1NTY0_9GAMM S-adenosylmethionine:tRNA ribosyltransferase-isomerase; OS = Kushneria sp. YCWA18 OX=657387 GN=queA PE=3 SV=1
MQRTDFHFDLPDELIARYPSEQRRDCRLLCVDGVKGSIEHQRFPDLLDRLSPGDLVVFNDTRVIPARLFGRKASGGQVEMLLERPLDAHRGLAHLRASRAPKPGTELIFEGDIHAVIEGRRDALFELRFLGDTPLIELLDAHGHMPLPPYIEREDELADRERYQTVYARREGAVAAPTAGLHFDEALMTEMGERGIEHAFVTLHVGAGTFQPVRVDNIHDHHMHSEWIEVTPEVCDQVRAARARGNRVIAVGTTSVRCLESACQQSPDGEIAPLTGDTDIFIYPGYQWLCVDALVTNFHLPESTLLMLVTAFAGFEPVMRAYREAVEQRYRFFSYGDAMFLTRASSDAT

SEQ ID NO: 67769 - protein, 334 aa, Kutzneria albida
  REGION 1..334: note = tr|W5W6Y9|W5W6Y9_9PSEU S-adenosylmethionine:tRNA ribosyltransferase-isomerase OS=Kutzneria albida DSM 43870; OX = 1449976 GN=KALB_2928 PE=3 SV=1
MTSTVEFTLPAELEAHEPPEARGLDRDGVRLLVSRCGSGEQSHHRFTELPDLLAPGDVLVVNNSGTMPAAVPVAGTEAAVHFSTEQSDGTWLVEVRRSIGRTGQRLPLVGGGSVRLLEPYSQGRLWVSDVDTAGLPTVSAYLMRHGQPIRYDYVPRPWALPYYQTVFATHPGSAEMPSAARPFTDHLVTRLVSAGVLVVPITLHTGVASAEAHERPYPERYQVGASTARVVNAAKESGNWVIGVGTTAVRALESAVGSCGLVHPARGWTDLVITPERGVRVVDGLLTGFHEPRASHLDLLAAVAGRESLAAGYAEAVRERYLWHEFGDVNLLLP

SEQ ID NO: 67770 - protein, 335 aa, unidentified
  source 1..335: note = Kutzneria buriramensis
  REGION 1..335: note = tr|A0A3E0H3M1|A0A3E0H3M1_9PSEU S-adenosylmethionine:tRNA ribosyltransferase-isomerase; OS = Kutzneria buriramensis OX=1045776 GN=BCF44_115132 PE=3; SV = 1
MTATVEFTLPTELEAHEPPEARGLARDGVRLMVGRRASGEISHHRFDELPTLLTPGDVLVVNTSATLPAAVPVVNADLRLHVSTQQPDGSWLVELRTADGPYGNAVAGQRYELPGDASVTLLEPYSRGRLWTALFDVASVPQYLLNHGVPIRYGYVPRAWSLPYYQTVFATHPGSAEMPSAGRPFTDRIVTRLVSAGIQFAPILLHTGVASPEAHERPYPERFSVSATTARVVNQARAAGNRIIGIGTTAVRALESAVEGDRVVPAKGWTELVITPERGVRVIDGLLTGFHEPMASHLDMLAAIADEPLLLACYTEAVRAGYLWHEFGDVNLLLP

SEQ ID NO: 67771 - protein, 333 aa, Kutzneria sp.
  REGION 1..333: note = tr|W7SSQ0|W7SSQ0_9PSEU S-adenosylmethionine:tRNA ribosyltransferase-isomerase (Fragment) OS=Kutzneria sp. 744 OX=345341 GN=KUTG_08164 PE=3 SV=1
DRNRGVHAAGGAGGARAAGGPRTVPRRRSAAGRPTRHGRGQPPSVQRAAEPVDTGRCAGRQHLGDAAGRGAGVERGAAAARVDQAAGRQLAHRTAHGRRSVPRGYGRGTLHTARRRHGDAAGGVLAGSLVDGHVRCSFRAKVSAGSRRPIRYSYVPRQWPLPFYQTVFAEHPGSAEMPSAARPFTDRIVTRLVSAGIQFAPILLHTGVASPEAHERPYPERFSVSATTARLVNQAREAGNRIIGIGTTAVRALESAVEDGRVVPAQGWTDLVITPERGVRVVDGLLTGFHEPMASHLDMLAAIADERLLMACYAEAVQAGYLWHEFGDVNLLF

SEQ ID NO: 67772 - protein, 346 aa, unidentified
  source 1..346: note = Kyrpidia spormannii
  REGION 1..346: note = tr|A0A2K8NAF5|A0A2K8NAF5_9BACL S-adenosylmethionine:tRNA ribosyltransferase-isomerase; OS = Kyrpidia spormannii OX=2055160 GN=queA PE=3 SV=1
MRVEDFDYDLPPDRIAQVPSADRTASRLLVLYRDSGRMEHRHFRDLVDYAVPGDALILNDTRVIPARLLGVKAGGGGRVECLLLRRDDPEQDPDLWRVLVKPGRRVHPGHRLVFGDGALEAEVLDTTEERGRLVRFLYAGDWEDLLKRLGEMPLPPYIKERTADSGRYQTVYARVPGSVAAPTAGLHFTEELLEQLRDRSMEVGTITLHVGLGTFRPVQVARVEEHHMHAEYFRIPSETAELVSRVRERGGRIWAVGTTVCRALESAALQGWGPREGWTDLFIYPGFSFHVVDRLITNFHLPKSTLLMLVSALAGREQILRAYQEAIEKGYRFFSFGDAMLITTES

SEQ ID NO: 67773 - protein, 346 aa, unidentified
  source 1..346: note = Kyrpidia tusciae
  REGION 1..346: note = tr|D5WWM4|D5WWM4_KYRT2 S-adenosylmethionine:tRNA ribosyltransferase-isomerase OS=Kyrpidia tusciae (strain DSM 2912 / NBRC 15312 / T2) OX=562970 GN=queA PE=3 SV=1
MRVEDFDYDLPPDRIAQVPSADRTASRLLVLYRDSGRMEHRHFRDLVDYAVPGDALILNDTRVIPARLLGVKAGGGGQVECLLLRRDDPEQDPDLWRVLVKPGRRVHPGHRLVFGDGALEAEVLDTTEEGGRLVRFRYTGDWEDLLKRLGEMPLPPYIKERRADSGRYQTVYARVPGSVAAPTAGLHFTEELLEQLRDRGMEVGTITLHVGLGTFRPVQVARVEEHHMHAEYFRIPSETAELVSRVRERGGRIWAVGTTVCRALESAALRGWGPREGWTDLFIYPGFSFRVVDRLITNFHLPKSTLLMLVSALAGREQILGAYQEAIEKGYRFFSFGDAMLITTES

SEQ ID NO: 67774 - protein, 338 aa, unidentified
  source 1..338: note = Labedaea rhizosphaerae
  REGION 1..338: note = tr|A0A4V3CZ10|A0A4V3CZ10_9PSEU S-adenosylmethionine:tRNA ribosyltransferase-isomerase; OS = Labedaea rhizosphaerae OX=598644 GN=EV186_104170 PE=3; SV = 1
MTLTFTLPGELSAAEPPEARGLTRDGVRLLVAGPQGLTHTTFAALPDHLRPGDLVVINTSPTLAAAVEARRADGRHVAVHFAGHRPDGSWVVEIRPARQATGPVQDIVVGERFTVSGLTLIAREPVDARLWTVTVDGDVLELLASHGKPISYAYVHGSWPIADYQTVFAQDDRGSGSAEMPSAGRPFSTRTITDLVAKGVAVAPIVLHTGVSSAEKGEPPQAEPYRVPAPTARLVELTRANGGRVVAVGTTVTRALETVADPDGTVHAGEGWTELVLGPDRPARVVTGLVTGWHAPGASHLSLLEAVAGQELVAKAYAEAVARRYLWHEFGDSCLLLP

SEQ ID NO: 67775 - protein, 411 aa, unidentified
  source 1..411: note = Labilibaculum antarcticum
  REGION 1..411: note = tr|A0A1Y1CE81|A0A1Y1CE81_9BACT S-adenosylmethionine:tRNA ribosyltransferase-isomerase; OS = Labilibaculum antarcticum OX=1717717 GN=queA PE=3 SV=1
MDCNINTNSLDAKQIQIADFTYDLPDHRIAKHPLENRDLSKLLIYKKGEISESVFENLPSEIADGTTMVFNNTKVIQARLIFHKETGARIEIFCLEPLKPADYNLAFQACGSSTWKCIVGNARKWKFGVLKMPFYLDEEEYCLTAEQQEVLDGAQEILFTWNHPSLSFSDVLEQTGKIPIPPYLNRDTEATDLVRYQTVYSKYEGSVAAPTAGLHFTEDVFSRLKAKNINREELTLHVGAGTFKPVKSELIGDHEMHTEHIQVTRESLESISKTTGQIVAVGTTSVRSLESLYWMGVKILTQQENPHLLKQWEAYQLPINYSVKESYQAICSHMEKNDLTLFNAATQIIIAPGYDFKVISGLVTNFHQPQSTLLLLISALVGDNWKKIYRYALENNFRFLSYGDSSLLMKE

SEQ ID NO: 67776 - protein, 349 aa, unidentified
  source 1..349: note = Labilibaculum antarcticum
  REGION 1..349: note = tr|A0A1Y1CI10|A0A1Y1CI10_9BACT S-adenosylmethionine:tRNA ribosyltransferase-isomerase; OS = Labilibaculum antarcticum OX=1717717 GN=queA PE=3 SV=1
MKLSKFKYKLPSELIALHPAYNRDESRLLVLHKDTGKIEHKIFKDLIDYFDNEDVMVFNNTKVFPARLYGNKEKTGAEIEVFLLRELNREQRLWDVLVDPARKIRIGNKLYFGDDDLLVAEVIDNTTSRGRTLRFLFDGSYEDFKKTLYGLGETPLPKFIERPVEPEDAERYQTIFAKHEGAVAAPTAGMHFSRELMKRLEIKGIDFAEVTLHVGLGNFRSVDVEDLTKHKMDSEQIEINELAVEQVNSGKKKKKQICAVGTTVVRTLETSVSTLGTLKPFEGWTNKFIFPPFEFSVPTSMVTNFHLPLSTLLMMACAFGGYDRVMAAYQEAIKEKYRFGTYGDAMLII

SEQ ID NO: 67777 - protein, 411 aa, unidentified
  source 1..411: note = Labilibaculum filiforme
  REGION 1..411: note = tr|A0A2N3I287|A0A2N3I287_9BACT S-adenosylmethionine:tRNA ribosyltransferase-isomerase; OS = Labilibaculum filiforme OX=1940526 GN=queA PE=3 SV=1
MDCNINTNSLDAKQIQISDFTYDLPDHRIAKHPLQNRDLSKLLIYKKGKISESLFENLPSEIMEGSSMVFNNTKVIQARLIFHKETGARIEIFCLEPLRPADYALAFQACDSSSWKCIVGNARKWKSGILKMPFYVEEKEYFLTAEKQEVLEGAQEILFSWNHPSLSFSEVLEQTGKIPIPPYLNRDTEAVDLVRYQTVYSKLEGSVAAPTAGLHFTEAVFARLKAKNIQREELTLHVGAGTFKPVKSEKIGDHEMHTEHIQVTRESIQNMMQISGQIVAVGTTSVRSLESLYWMGVKILSQKENPHLLKQWEAYQLSSKPTRQEAYQAIDKYMEARDLNLFNAATQIIIAPGYDFKVISGLVTNFHQPQSTLLLLISALVGDNWKKIYEYALNNDFRFLSYGDSSLLMKE

SEQ ID NO: 67778 - protein, 351 aa, unidentified
  source 1..351: note = Labilibaculum filiforme
  REGION 1..351: note = tr|A0A2N3HZE5|A0A2N3HZE5_9BACT S-adenosylmethionine:tRNA ribosyltransferase-isomerase; OS = Labilibaculum filiforme OX=1940526 GN=queA PE=3 SV=1
MKLSKFKYKLPSELIALHPAYNRDESRLLVLHKDTGKIEHKIFKDLIEYFDNEDVMVFNNTKVFPARLSGNKEKTGAEIEVFLLRELNREQRLWDVLVDPARKIRIGNKLYFGDDDLLVAEVIDNTTSRGRTLRFLFDGPYEEFKEALYSLGKTPLPRSIIDQRKVEPEDAERYQTIFAKHEGAVAAPTAGMHFSRELMKRLEIKGIDFAEVTLHVGLGNFRTVDVEDLTKHKMDSEQIEINDLAVKKVNRGKKKKKNICAVGTTVVRTLETSVSTQGTLKPFEGWTNKFIFPPYEFSVPNSMVTNFHLPLSTLLMMVCAFGGYDQVMAAYQEAIKEKYRFGTYGDAMLII

SEQ ID NO: 67779 - protein, 411 aa, unidentified
  source 1..411: note = Labilibaculum manganireducens
  REGION 1..411: note = tr|A0A2N3IEQ8|A0A2N3IEQ8_9BACT S-adenosylmethionine:tRNA ribosyltransferase-isomerase; OS = Labilibaculum manganireducens OX=1940525 GN=queA PE=3; SV = 1
MDCNININSLDARQIQISDFTYDLPDQRIAKHPLANRDLSKLLIYKNGLISESVFENLPSEIASGTTMVFNNTKVIQARLIFHKETGARIEIFCLEPLKPADYNLAFQACGSSSWKCIVGNARKWKSGVLKMPFYVEDKEYFLKAEKQEALEGAQEIFFSWNHPDLSFSEVLEQTGKIPIPPYLNRDTEATDLLRYQTVYSKYEGSVAAPTAGLHFTEDVFSHLEAKKINREELTLHVGAGTFKPVKSEQIGDHEMHTEHIQVTLESIQNIIKLSGQIIAVGTTSVRSLESLYWMGVKILTQKENPHLLGQWEAYQLPANYSRQESYQAICSYMQEKGLTLFNVATQIIIAPGYEFKVISGLVTNFHQPQSTLLLLISALVGDKWKEIYQYALDNDFRFLSYGDSSLLMRG

SEQ ID NO: 67780 - protein, 349 aa, unidentified
  source 1..349: note = Labilibaculum manganireducens
  REGION 1..349: note = tr|A0A2N3I8L7|A0A2N3I8L7_9BACT S-adenosylmethionine:tRNA ribosyltransferase-isomerase; OS = Labilibaculum manganireducens OX=1940525 GN=queA PE=3; SV = 1
MKLSKFKYKLPTELIALHPAYNRDESRLLVLHKDTGKIEHKIFKDLIDYFDNEDVMVFNNTKVFPARLYGNKEKTGAEIEVFLLRELNREQRLWDVLVDPARKIRIGNKLYFGDDDLLVAEVIDNTTSRGRTLRFLYDGPYEDFKKALYGLGETPLPKFIDRAVEPEDAERYQTIFAKHEGAVAAPTAGMHFSRELMKRLEIKGVDFAEVTLHVGLGNFRTVDVEDLTKHKMDSEQIEINDLAVKKVNSGKKKKKNICAVGTTVVRTLETSVSTQGTLKPFEGWTNKFIFPPYDFSVPNSMVTNFHLPLSTLLMMVCAFGGYDKVMAAYQEAIKEKYRFGTYGDAMLII

SEQ ID NO: 67781 - protein, 376 aa, unidentified
  source 1..376: note = Labilithrix luteola
  REGION 1..376: note = tr|A0A0K1QCJ5|A0A0K1QCJ5_9DELT S-adenosylmethionine:tRNA ribosyltransferase-isomerase; OS = Labilithrix luteola OX=1391654 GN=queA PE=3 SV=1
MRVAEFDFELPAELIAQAPPAHREEARLLVVPPPPASMRTAALDASVSALAEYVPPGTLVVVNDTKVLRARILGIKEGTGGRAEVFLVRKMWDGVENGIHQQRWRAMGRASKALRPGTRIVRDALVVEFEGKADDGLFEVRLFTRDGSSLEEARMSAGQVPLPPYIKRDVRSEDEERYQTVFAKVEGAVAAPTAGLHLTPELLERLRERGCEIESCTLHVGLGTFQPVTVDDLDDHPMHSEYFEVSRSLSTAIARARQRGAKVMAIGTTVVRALESAQDPERPGHVRPCAEETRILIQPGYRFAVVDRLMTNFHLPKSTLLALVCAFGGTDRVLEAYRRAVAQRYRFFSYGDAMVLDRVLDRVLDRVPDRAELPTP

SEQ ID NO: 67782 - protein, 376 aa, unidentified
  source 1..376: note = Labilithrix luteola
  REGION 1..376: note = tr|A0A0K1PZS5|A0A0K1PZS5_9DELT S-adenosylmethionine:tRNA ribosyltransferase-isomerase; OS = Labilithrix luteola OX=1391654 GN=AKJ09_05318 PE=3 SV=1
MSPATSPRPVAAMRLLVVDGSTGTLGVADARTFPELLAPGDLVVVNDAATLPASFAARTAAGEPVELRLAGRAAEGSEPRFVAALLGAGDYRTRTEVRPLPPLIASGARLFVGDELVAHVTGHSSISERLVELHFSVAEGSEADVWAAIYRAGRPVQYAHVPEPLALWDVQNVYAFEPWAVEMPSAGRLFRAETFGALKARGIAIARVTHAAGLSSTGDPKIDEALPLPERWRVPEETVRLVEATHARGGRVLAVGTSVVRALESASAGTTLTAGEGITHLKLGPGARRTVVDGVVTGVHEADTTHYALLGAFASAKVLENALVLAEHEDLLGHEFGDACLVWGSPVAAATRKALDRPAPVSRREVTQEGRGWSLA

SEQ ID NO: 67783 - protein, 357 aa, Labrenzia aggregata
  REGION 1..357: note = tr|A0A0M6XWQ6|A0A0M6XWQ6_9RHOB S-adenosylmethionine:tRNA ribosyltransferase-isomerase; OS = Labrenzia aggregata OX=187304 GN=queA PE=3 SV=1
MRVDQFDFVLPNERIALRPARPRDSARMLVVKPGAEPELSDKGVRELPLLLEPGDALVFNDTKVIPAQLEGTRLRGDITAGIGATLHMRTGPDRWKAFVRPAKKLQVGDTVLFEGFGTRLTAEVTEKGDSGEVLLTFDRSGPDLDIAIASVGHIPLPPYIAQKRGEDDQDRKDYQTIFAEKDGAVAAPTAGLHFTPELLKALSERGIEQHRVTLHVGAGTFLPVKAEDTADHKMHAEWGEISEETAAALLAVKARGNKVVSVGTTSLRILESSAQASGAIAAFAGETSIFITPGYRFKAIDALMTNFHLPRSTLFMLVSALSGLDTMRRAYAHAISQEYRFYSYGDASLLFPQEGAV

SEQ ID NO: 67784 - protein, 357 aa, Labrenzia aggregata
  REGION 1..357: note = tr|A0NQU9|A0NQU9_LABAI S-adenosylmethionine:tRNA ribosyltransferase-isomerase OS=Labrenzia aggregata (strain ATCC 25650 / DSM 13394 / JCM 20685 / NBRC 16684 / NCIMB2208 / IAM 12614) OX=384765 GN=queA PE=3 SV=1
MRVDQFDFDLPNERIALRPARPRDSARMLVVRPGEQPLLSDAGVRDLPQLLEPGDALVFNDTRVIPAQLEGTRLRGDISAGIGATLHMRTGPDRWKAFVRPAKKLQLGDTVLFEGFGTRLTAEVTEKGYSGEVLLTFDRSGPDLDVAIASVGHIPLPPYIAQKRGEDDQDRKDYQTIFAEKDGAVAAPTAGLHFTPELLQALSYRGIEQHRVTLHVGAGTFLPVKAEDTADHKMHAEWGEVSEETAAALLAVKVRGNKVVSVGTTSLRILESSAQKTGVITAFAGETSIFITPGYRFKAIDALMTNFHLPRSTLFMLVSALSGLDTMRHAYAHAISQEYRFYSYGDASLLFPQEGAV

SEQ ID NO: 67785 - protein, 357 aa, Labrenzia alba
  REGION 1..357: note = tr|A0A0M7B2P9|A0A0M7B2P9_9RHOB S-adenosylmethionine:tRNA ribosyltransferase-isomerase; OS = Labrenzia alba OX=311410 GN=queA PE=3 SV=1
MRVEEFDFDLPNERIALRPARPRDSARMLVVNPAEYPVLKDMGIRDLPGLLEPGDALVFNDTKVIPAQLEGQRFRGGVSAGISVTLHMRTAQDQWRAFARPAKKLIAGDVLVFENSVCSMRARVAEKSDGGEVLLVFEASGSELDVAIATVGHVPLPPYIAQKRGEDVQDRQDYQTIFAEKDGAVAAPTAGLHFTQELLEALEDRGIERHLVTLHVGAGTFLPVKADDTRDHKMHAEWGNVSAATAKALLAVRARGNKVVSVGTTSLRILESSAQAGGSIAPFAGETSIFITPGYKFRAIDALMTNFHLPKSTLFMLVSAFSGLETMRGAYAHAIEEQYRFYSYGDGSLLFPAKVTQ

SEQ ID NO: 67786 - protein, 357 aa, Labrenzia alba
  REGION 1..357: note = tr|A0A0M6YUX3|A0A0M6YUX3_9RHOB S-adenosylmethionine:tRNA ribosyltransferase-isomerase; OS = Labrenzia alba OX=311410 GN=queA PE=3 SV=1
MRVEQFDFDLPNERIALRPARPRDAARMLVVRPQEEPTLNDMGVRDLPVLLEPGDALVFNDTKVIPAQLEGIRARGDVVAKIGATLHLRSGPDQWRAFVRPAKKLQVDDTVVFENETTALKARVAEKSEGGEVLLVFDRSGAELDAAIALVGHIPLPPYIAQKRGEDEQDRSDYQTIFADRDGAVAAPTAGLHFTPDLLDALKDRGIEQHKVTLHVGAGTFLPVKADDTEDHAMHAEWGEVSAETAAALRAVKARGNKVVGVGTTSLRILESSAQATGKISPFAGETTIFITPGYRFKAIDALMTNFHLPRSTLFMLVSAFAGLETMRAAYTHAVAGKYRFYSYGDASLLFPQENAV

SEQ ID NO: 67787 - protein, 360 aa, Labrenzia alexandrii
  REGION 1..360: note = tr|A0A0M7AMA6|A0A0M7AMA6_9RHOB S-adenosylmethionine:tRNA ribosyltransferase-isomerase; OS = Labrenzia alexandrii OX=388408 GN=queA PE=3 SV=1
MRVDQFDFELPNERIALRPARPRDAARMLVVRPGETPELSDKGVRDLPALLEPGDALVFNDTKVIPAQLEGKRVRGDIEAGISVTLHLRSAADRWKAFVRPAKKLQVDDLVVFEGNGARLTATVKEKSDGGEVLLAFDCSGPDLDVAIAQVGHIPLPPYIAQKRGEDEQDRQDYQTIFAEKDGAVAAPTAGLHFTPELLASIEDRGIEMHRVTLHVGAGTFLPVKADDTDDHKMHAEWGEVSEETAAALQAVKARGNKVVSIGTTSLRILESAAQETGTIVPFTDETSIFITPGYQFKAIDALMTNFHLPRSTLFMLVSALSGLETMRAAYQHAIDTEYRFYSYGDASLLFPDASQDASS

SEQ ID NO: 67788 - protein, 360 aa, Labrenzia alexandrii
  REGION 1..360: note = tr|A0A5E8H1U7|A0A5E8H1U7_LABAD S-adenosylmethionine:tRNA ribosyltransferase-isomerase; OS = Labrenzia alexandrii (strain DSM 17067 / NCIMB 14079 / DFL-11) OX=244592 GN= queA PE=3 SV=1
MRVDQFDFELSNERIALRPARPRDAARMLVVRPGEIPELSDMGVRDLPALLEPGDALVFNDTKVIPAQLEGKRVRGDIEAGISVTLHLRSAADGWKAFVRPAKKLQVEDLVVFEGNGARLTATVKEKSDGGEVLLAFDCSGPDLDVAIAQVGHIPLPPYIAQKRGEDEQDRQDYQTIFAEKDGAVAAPTAGLHFTPELLAAIKDRGIEMHRVTLHVGAGTFLPVKADDTDDHKMHAEWGEVSEETAAALQAVKARGNKVVSIGTTSLRILESAAQETGTIVPFADETSIFITPGYKFKAIDALMTNFHLPRSTLFMLVSALSGLETMRAAYQHAIDTEYRFYSYGDASLLFPDASQDASL

SEQ ID NO: 67789 - protein, 357 aa, Labrenzia marina
  REGION 1..357: note = tr|A0A2S3UP41|A0A2S3UP41_9RHOB S-adenosylmethionine:tRNA ribosyltransferase-isomerase; OS = Labrenzia marina OX=281252 GN=queA PE=3 SV=1
MRVDQFDFDLPNERIALRPARPRDAARMLVVRPGSPEVLSDRGVRDLPSLLNPGDALVFNDTRVIPAQLEGKRLRGDVAAGISVTLHLRTDPSRWWAFVRPAKKLQADDTLIFETGDVILTARVVEKAEGGEVLLEFDRAGPELDAVIAVVGHIPLPPYIAHKRAEDEQDRRDYQTIYAERDGAVAAPTAGLHFTPQLLKALDDRGIEQHRVTLHVGAGTFLPVKADDTQDHKMHAEWGEVSEATALALAAVKARGNRVVSVGTTSLRILESAAQVTGSIAPFAGETSIFITPGYRFRVIDALMTNFHLPRSTLFMLVSAFSGLETMHTAYAHAIAEEYRFYSYGDASLLFPQDGAL

SEQ ID NO: 67790 - protein, 357 aa, Labrenzia sp.
  REGION 1..357: note = tr|A0A222F341|A0A222F341_9RHOB S-adenosylmethionine:tRNA ribosyltransferase-isomerase; OS = Labrenzia sp. VG12 OX=2021862 GN=queA PE=3 SV=1
MRVDQFDFDLPNERIALRPARPRDAARMLVVRPQADPPLVDGGVRDLPDVLEPGDALVFNDTRVIPAQLEGTRLRGEISAGIGATLHMRTGPDRWKAFVRPAKKLQVGDDVLFEGFGTRLTAEVSEKADGGEVLLVFDRSGPALDEAIAAVGHIPLPPYIAQKRGEDEQDRQDYQTMFAEKDGAVAAPTAGLHFTSGLLQALEDRGIEHHRVTLHVGAGTFLPVKADKTEDHKMHAEWGEVSPETAEALAAVKARGNKVVSVGTTSLRILESAAVKTGRIAPFKGETSIFITPGYRFKVIDALMTNFHLPRSTLFMLVSALSGLETMRAAYAHAIDQEYRFYSYGDASLLFPDKDAV

SEQ ID NO: 67791 - protein, 357 aa, Labrenzia sp.
  REGION 1..357: note = tr|A0A163VAM0|A0A163VAM0_9RHOB S-adenosylmethionine:tRNA ribosyltransferase-isomerase; OS = Labrenzia sp. OB1 OX=1561204 GN=queA PE=3 SV=1
MRVEQFDFDLPNERIALRPARPRDAARMLVVRPGSQELLTDGGVRDLPALLNPGDALVFNDTRVIPAQLEGKRLRGEVVAGISVTLHLRTDPGSWRAFVRPAKKLQTEDTLVFENEDTVLTARVAEKADGGEVLLAFDRAGLELDAAIAVVGHIPLPPYIAHKRAEDMQDRQDYQTIYAEKDGAVAAPTAGLHFTPQLLKALEERGIEQHRVTLHVGAGTFLPVKADDTQDHKMHAEWGEVSETTALALAAVKKRGNRVVSIGTTSLRILESAAQETGSIAAFSGETSIFITPGYRFRVIDALMTNFHLPRSTLFMLVSAFCGLENMRAAYAHAIAEEYRFYSYGDASLLFPHDSAL

SEQ ID NO: 67792 - protein, 365 aa, unidentified
  source 1..365: note = Labrenzia suaedae
  REGION 1..365: note = tr|A0A1M7KFG0|A0A1M7KFG0_9RHOB S-adenosylmethionine:tRNA ribosyltransferase-isomerase; OS = Labrenzia suaedae OX=735517 GN=queA PE=3 SV=1
MRVDLFDFELPNERIALRPARPRDAARLLVVRPDGSPELTDSIVSALPDWLEPGDALVFNDTKVIPAQLEGTRTRGEATAKISATLHLRAGDDRWWAFVRPAKKLVIGDRVRFGGEGSTCLSGTLDATVAEKGDAGEVLLMFDVAGPALDEAIATVGHIPLPPYIAAQRPEDEQDRADYQTMFAEREGAVAAPTAGLHFTPKLMQNLEARGVETYGVTLHVGAGTFLPVKSDDTDGHKMHAEWGEISASTVAALKAVKARGNKVVAVGTTSLRILESASQGEEGLAPFCGETRIFITPGYRFRTIDALMTNFHLPRSTLFMLVSAFAGLETMHRAYAHAIQTEYRFYSYGDSSLLFPRLTREQQD

SEQ ID NO: 67793 - protein, 379 aa, Labrys neptuniae
  REGION 1..379: note = tr|A0A5C1WMG9|A0A5C1WMG9_9RHIZ S-adenosylmethionine:tRNA ribosyltransferase-isomerase; OS = Labrys neptuniae OX=376174 GN=FZC33_32585 PE=3 SV=1
MIAADNLEPGSARLLTVSDTGKIRHLPRSALSLLFSPGDLVVANDAATLPASLAGIHADSSRPIEVRLAAWIAVGDPCRFIAVVFGTGDHRVRTEERPAPPQLLAGDKLKLGPLTATVERLHGYPRLVSLRFSGAPEQILAGMARHGRPIQYAHVPEPLALWDTWTAVAAEPLAFEPPSAGFVLDWRTIAAWRRRGVGFASLTHAAGISSTGDAVMDLRLPFDEPYRIPAATAAAIARTKATGGRVIAIGTSVVRALEHAASAPGGFRAGDGLAQGRIGPRSRLRLVDTILSGVHQPGESHFELLRAFAGDLVLDRVSLMLEAWNYRAHEFGDSVLIERQAPGREDYTERPAGITATSIWAGGGPYSMRAAFMKQTMVA

SEQ ID NO: 67794 - protein, 352 aa, Labrys okinawensis
  REGION 1..352: note = tr|A0A2S9QC30|A0A2S9QC30_9RHIZ S-adenosylmethionine:tRNA ribosyltransferase-isomerase; OS = Labrys okinawensis OX=346911 GN=queA PE=3 SV=1
MRVSDFDFHLPPENIALRPAEPRDRARLLEVDPAGNTLADRIVSDLPTLLRPGDMLVFNDTKVIPARLDGLRRRPGGAGAAIEAMLHQRLGPAQWKAFARPGKRLAVGDTIEFGENLSADVEEKGEGGEVTLRFSLKGAALDIAIAMVGHIPLPPYIASKRADDARDREDYQTIYAKADGAVAAPTAGLHFTPDLFARLDAAGIARHFVTLHVGAGTFLPVKGEDLSEHRMHAEFGIVTAETAQALNAGRARGGRIIAVGTTSLRLLESAAAPDGTLEPFADETSIFITPGYRFRTADALMTNFHLPRSTLMMLVSAFAGYDTMKAAYAHAIADGYRFYSYGDASLLWRAPC

SEQ ID NO: 67795 - protein, 368 aa, Labrys okinawensis
  REGION 1..368: note = tr|A0A2S9QBB3|A0A2S9QBB3_9RHIZ S-adenosylmethionine:tRNA ribosyltransferase-isomerase; OS = Labrys okinawensis OX=346911 GN=C5L14_14910 PE=3 SV=1
MIAADNPEPGAARLLAVSSTGKIRHLPRSALSLLFSPGDLLVANDAATLPASLAGLHAGSDRPIEVRLAAWVSAGDPSRFVAVVFGAGDHRLRTEDRPAPPQLLAGDKLELGPLTAEIERLHGYPRLVSLRFSGPTDQILAGLARHGRPIQYAHVPAPLALWDMWTVIAAEPLAFEAPSAGFALDWRMIAAWRRRGVGFASLTHAAGISSTGDAMMDLSLPFDEPYRIPAATAAAIARTKAAGGRVIAIGTSVVRALEHAASAAGGLRAGDGVAQGRIGPATRLCLVDAILSGVHQPGESHFELLRAFADDLTLDRVCLMLEAWNYRAHEFGDSVLIERRTAKPKEQGTDRQARITPSSLWAGAAPTP

SEQ ID NO: 67796 - protein, 344 aa, Laceyella sacchari
  REGION 1..344: note = tr|A0A4V2WAY6|A0A4V2WAY6_LACSH S-adenosylmethionine:tRNA ribosyltransferase-isomerase; OS = Laceyella sacchari OX=37482 GN=queA PE=3 SV=1
MDVAQYHFELPQELIAQTPIKDRTGSRLMVVDRKRQTWEHTRFPHLLDYLEAGDVLVLNDSRVRPARLIGVKEETGAKIELLLLKPLGEDRWEALVKPAKRVKEGTVVSFGGGRLRAVAEASTEVAGGRVFRLEYEVDDVESLFQELGQMPLPPYIHEQLDDPERYQTVFSRVIGSAAAPTAGLHFTPELLEQAQQKGVKLAFVTLHVGLGTFRPVTVERVEDHHMHAEYYELSQETADLINEAKRQGKRVIAVGTTSVRTLETVASRHGGEVRADSGWTDIFIYPGYVYQVVDGLVTNFHLPQSTLLMLVSAFATRELIMKAYEEAVKERYRFFSFGDAMLII

SEQ ID NO: 67797 - protein, 344 aa, Laceyella sacchari
  REGION 1..344: note = tr|A0A2I7SX07|A0A2I7SX07_LACSH S-adenosylmethionine:tRNA ribosyltransferase-isomerase; OS = Laceyella sacchari OX=37482 GN=queA PE=3 SV=1
MDVAQYHFELPQELIAQTPIKDRTGSRLMVVDRKRQTWEHTRFPHLLDYLEAGDVLVLNDSRVRPARLIGVKEETGAKIELLLLKPLGEDRWEALVKPAKRVKEGTVVCFGGGRLRAVAEASTEVAGGRVFRLEYEVDDVESLFQELGQMPLPPYIHEQLDDPERYQTVFSRVIGSAAAPTAGLHFTPELLEQAKQKGVKLAFVTLHVGLGTFRPVTVERVEDHHMHAEYYELNQETAALINEAKRQGKRVIAVGTTSVRTLETVASRHGGEVRADSGWTDIFIYPGYVYQVVDGLVTNFHLPQSTLLMLVSAFATRELIMKAYEEAVKQRYRFFSFGDAMLII

SEQ ID NO: 67798 - protein, 344 aa, Laceyella sediminis
  REGION 1..344: note = tr|A0A2T0YKK8|A0A2T0YKK8_9BACL S-adenosylmethionine:tRNA ribosyltransferase-isomerase; OS = Laceyella sediminis OX=573074 GN=queA PE=3 SV=1
MDVAQYHFELPQELIAQTPIKDRTGSRLMVVDRKRQTWEHTRFPHLLDYLEAGDVLVLNDSRVRPARLIGVKEETGAKIELLLLKPLGEDRWEALVKPAKRVKEGTVVCFGGGRLRAVAEASTEVAGGRVFRLEYEVDDVESLFQELGQMPLPPYIHEQLDDPERYQTVFSRVIGSAAAPTAGLHFTPELLEQAKQKGVKLAFVTLHVGLGTFRPVTVERVEDHHMHAEYYELSQETAALINEAKRQGKRVIAVGTTSVRTLETVASRHGGEVRADSGWTDIFIYPGYVYQVVDGLVTNFHLPQSTLLMLVSAFATRELIMKAYEEAVKQRYRFFSFGDAMLII

SEQ ID NO: 67799 - protein, 341 aa, unidentified
  source 1..341: note = Lachnoanaerobaculum orale
  REGION 1..341: note = tr|A0A3P3PZH2|A0A3P3PZH2_9FIRM S-adenosylmethionine:tRNA ribosyltransferase-isomerase; OS = Lachnoanaerobaculum orale OX=979627 GN=queA PE=3 SV=1
MDVKDFWYDLPEELIAQDPLEDRASSRLLVLDKNTGEITHKHFYDIIDYLDEGDCLVLNETKVIPARLMGVKKDTGAAIEILLLKRKSKTAWECLVKPGKKCKVGAVIEFGDGLLIGTISDIVEEGNRIIEFEFDGIFEEILDKLGTMPLPPYITHTLKDKNRYQTVYAKNEGSAAAPTAGLHFTKELLKRIEEKGIRLAKVTLHVGLGTFRPVKVSDVNDHHMHSEFFQISKEAADIINSTKANGKRVICVGTTSTRTVESAADENGHLEEKSGWTEIFIYPGYKFKVLDALITNFHLPESTLVMLVSALAGRENILHAYEEAVKEKYRFFSFGDAMFIK

SEQ ID NO: 67800 - protein, 345 aa, unidentified
  source 1..345: note = Lachnoanaerobaculum saburreum
  REGION 1..345: note = tr|E6LKE6|E6LKE6_9FIRM S-adenosylmethionine:tRNA ribosyltransferase-isomerase OS=Lachnoanaerobaculum saburreum DSM 3986 OX=887325 GN=queA PE=3 SV=1
MATKMDVKDFRYDLPQELIAQDPLEDRSSSRLLVLDKDTGEITHKHFYDIIDYLDEGDCLVLNETKVIPARLMGVKKDTGAVVEILLLKRKSKTVWECLVKPGKKCRVGAVIEFGEGLLTGTVSDIVEEGNRIIEFEFDGIFEEILDKLGTMPLPPYITHTLKDRNRYQTVYAKNDGSAAAPTAGLHFTKELLKDIEDKGVKLAKVTLHVGLGTFRPVKVSDVRQHHMHSEFFQVSKEAADIINSTRANGKRVICVGTTSTRTVESASDDKGYLKETSGWTDIFIYPGYKFKVLDALITNFHLPESTLVMLVSALAGREKVLHAYEEAVKEKYRFFSFGDAMFIK

SEQ ID NO: 67801 - protein, 341 aa, unidentified
  source 1..341: note = Lachnoanaerobaculum saburreum
  REGION 1..341: note = tr|A0A133ZRS3|A0A133ZRS3_9FIRM S-adenosylmethionine:tRNA ribosyltransferase-isomerase; OS = Lachnoanaerobaculum saburreum OX=467210 GN=queA PE=3; SV = 1
MDVKDFWYDLPEELIAQDPLEDRASSRLLVIDKNTGEITHKHFYDIIDYLDEGDCLVLNETKVIPARLMGVKKDTGAAIEILLLKRKSKTAWECLVKPGKKCKVGAVIEFGDGLLIGTIRDIVEEGNRIIEFEFDGIFEEILDKLGTMPLPPYITHALKDKNRYQTVYAKNEGSAAAPTAGLHFTKELLKRIEEKGIRLAKVTLHVGLGTFRPVKVSDVNDHHMHSEFFQISKEAADIINSTKAKGKRVICVGTTSTRTVESAADENGHLEEKSGWTEIFIYPGYKFKVLDALITNFHLPESTLVMLVSALAGRENILHAYEEAVKEKYRFFSFGDAMFIM

SEQ ID NO: 67802 - protein, 341 aa, unidentified
  source 1..341: note = Lachnoanaerobaculum sp.
  REGION 1..341: note = tr|A0A3P3QY99|A0A3P3QY99_9FIRM S-adenosylmethionine:tRNA ribosyltransferase-isomerase; OS = Lachnoanaerobaculum sp. KCOM 2030 OX=2490855 GN=queA; PE = 3 SV=1
MDVKDFWYDLPQELIAQDPLEDRASSRLLVLDKVSGDISHKHFFDIIDYLNEGDCLVLNETKVIPARLMGVKKDTGAAIEILLLKRTSKTAWECLVKPGKKCKVGAKIDFGDGLLLGTIVDIVEEGNRIIEFEFEGIFEEILDKLGTMPLPPYITHVLKDKNRYQTVYAKNEGSAAAPTAGLHFTKELLEKIEKKGIRLAKVTLHVGLGTFRPVKVTDVNEHHMHSEFFQISKEAADIINSTRKNGKRVICVGTTSTRTIESAADENGHLEEKSGWTDIFIYPGYKFKVLDALITNFHLPESTLVMLVSALAGRENILHAYEEAVKEKYRFFSFGDAMFIN

SEQ ID NO: 67803 - protein, 341 aa, unidentified
  source 1..341: note = Lachnoanaerobaculum sp.
  REGION 1..341: note = tr|W2VP28|W2VP28_9FIRM S-adenosylmethionine:tRNA ribosyltransferase-isomerase OS=Lachnoanaerobaculum sp. MSX33 OX=936596 GN=queA PE=3 SV=1
MDVRDFWYDLPQELIAQDPLEDRASSRLLVLDKVSGDISHKHFFDIIDYLNEGDCLVLNETKVIPARLMGVKKDTGAAIEILLLKRKSKTAWECLVKPGKKCKVGAKIDFGDGVLSGTIVDIVEEGNRIIEFEFEGIFEEILDKLGTMPLPPYITHVLKDKNRYQTVYAKNEGSAAAPTAGLHFTKELLEKIEKKGIRLAKVTLHVGLGTFRPVKVTDVNEHHMHSEFFQISKEAADIINSTRENGKRVICVGTTSTRTIESAADENGHLEEKSGWTDIFIYPGYKFKVLDALITNFHLPESTLVMLVSALAGRENILHAYEEAVKEKYRFFSFGDAMFIN

SEQ ID NO: 67804 - protein, 341 aa, unidentified
  source 1..341: note = Lachnoanaerobaculum umeaense
  REGION 1..341: note = tr|A0A385PWM9|A0A385PWM9_9FIRM S-adenosylmethionine:tRNA ribosyltransferase-isomerase; OS = Lachnoanaerobaculum umeaense OX=617123 GN=queA PE=3 SV=1
MDVKDFWYDLPQELIAQDPLEDRASSRLLILDKEAGNISHKHFYDIIEYMDEGDCLVLNETKVIPARLMGVKKDTGAAIEILLLKRKTKTAWECLVKPGKKCKIGARIDFGDGVLCGTITDIVEEGNRIIDFEFEGIFEEILDKLGTMPLPPYITHALQDKNRYQTVYAKNEGSAAAPTAGLHFTKELLERIEKKGVKLAKVTLHVGLGTFRPVKVTDVNEHHMHSEFFQISKEAADIINSTKTNGKRVICVGTTSTRTIESAADENGHLEERSGWTDIFIYPGYKFKVLDALITNFHLPESTLVMLVSALAGRENILHAYEEAVNEKYRFFSFGDAMFIN

SEQ ID NO: 67805 - protein, 350 aa, Lachnobacterium bovis
  REGION 1..350: note = tr|A0A1H9PR34|A0A1H9PR34_9FIRM S-adenosylmethionine:tRNA ribosyltransferase-isomerase; OS = Lachnobacterium bovis OX=140626 GN=queA PE=3 SV=1
MDVKDFYYDLPQELIAQDPLEDRSSSRLLLLDKATGDIKHKHFRDIKHFLKPGDCLVINNTKVIPARLYGVKEDTQAKIEILLLKRKENDIWETLVKPGKKAKVGTRIIFGEGILVGEVVDIIEEGNRLIKFYYEGIFEEILDQLGQMPLPPYITHQLEDKNRYQTVYAKYDGSAAAPTAGLHFTPELLQQVKDMGVEIAEVTLHVGLGTFRPVKVENVLDHHMHSEFYMVSKEAADKINKAKANGNRVIAVGTTSTRTLESASDENGVLKETSGWTEIFIYPGYKFKVIDALITNFHLPESTLVMLVSALAGREHVLSAYEKAIEERYRFFSFGDAMFITDDIIGDEKQ

SEQ ID NO: 67806 - protein, 349 aa, Lachnobacterium bovis
  REGION 1..349: note = tr|A0A1H3FJD6|A0A1H3FJD6_9FIRM S-adenosylmethionine:tRNA ribosyltransferase-isomerase; OS = Lachnobacterium bovis DSM 14045 OX=1122142 GN=queA PE=3; SV = 1
MDVKDFYYDLPQELIAQDPLEDRSSSRLLLLDKKSGDIKHKHFRDITHFLRPGDCLVINNTKVLPARLYGVKEDTQAKIEILLLKRKENDIWETLVKPGKKAKIGTRIIFGEGILVGEVVDIIEEGNRLIKFYYEGIFEEILDQLGQMPLPPYITHQLADKNRYQTVYAKYDGSAAAPTAGLHFTPELLQQVRDMGVDIAEVTLHVGLGTFRPVKVENVLDHHMHSEFYMVSKEAADKINKAKETGNRVIAVGTTSTRTLEAAADENGMLKETSGWTEIFIYPGYKFKVIDALITNFHLPESTLVMLVSALAGREHVLNAYEKAIEERYRFFSFGDAMFITDDIIGDEE

SEQ ID NO: 67807 - protein, 364 aa, unidentified
  source 1..364: note = Lachnoclostridium phytofermentans
  REGION 1..364: note = sp|A9KK69|QUEA_LACP7 S-adenosylmethionine:tRNA ribosyltransferase-isomerase OS=Lachnoclostridium phytofermentans (strain ATCC 700394 / DSM 18823 / ISDg); OX = 357809 GN =queA PE=3 SV=1
MKKQDFYFDLPEELIAQDPLEDRSGSRLLVLDKNTGKVTHHIFKEIVKYLKKGDCLVLNNTKVIPARLMGERIIEKTPLAPGHSYGKEGTPIELLLLKRKPDDVWETLVRPGKKAKVGTKISFGDGKLIGEIIDVVEEGNRLVKFTYQGIFEEILDELGQMPLPPYITHELADKNRYQTVYAKHEGSAAAPTAGLHFTNELLKQIEDMGVVIANVTLHVGLGTFRPVKEDDILDHHMHSEVYQVEESEAKKINDAKRAGGRIICVGTTSCRTIESAANEDGFVQAKSGATEIFIYPGYKFKVLNCLITNFHLPESTLLMLVSALASREHIIAAYEEAVKERYRFFSFGDAMFITDNIIETKDTF

SEQ ID NO: 67808 - protein, 359 aa, unidentified
  source 1..359: note = Lachnoclostridium phytofermentans
  REGION 1..359: note = tr|A0A3D2XA32|A0A3D2XA32_9FIRM S-adenosylmethionine:tRNA ribosyltransferase-isomerase; OS = Lachnoclostridium phytofermentans OX=66219 GN=queA PE=3; SV = 1
MKKQDFYFDLPEELIAQDPLEDRSSSRLLVLDKNSGKVTHHIFKEIVKYLKKGDCLVLNNTKVIPARLMGERIIEKVPLAPGHSYGKEGTPIELLLLKRRPDDIWETLVRPGKKAKVGTKISFGDGKLIGEIIDVVEEGNRLVKFTYQGIFEEILDELGQMPLPPYITHELADKNRYQTVYAKHEGSAAAPTAGLHFTKELLKQIEDMGVIIANVTLHVGLGTFRPVKEDEILDHHMHSEVYQVEESEAKKINDAKRAGGRIICVGTTSCRTIESAADENGFVQAKSGATEIFIYPGYKFKVLNCLITNFHLPESTLVMLVSALAGREHIIAAYEEAVKERYRFFSFGDAMFITDDIME

SEQ ID NO: 67809 - protein, 341 aa, unidentified
  source 1..341: note = Lachnoclostridium sp.
  REGION 1..341: note = tr|A0A1Y4IC36|A0A1Y4IC36_9FIRM S-adenosylmethionine:tRNA ribosyltransferase-isomerase; OS = Lachnoclostridium sp. An196 OX=1965583 GN=queA PE=3 SV=1
MNLHDFYYDLPQELIAQDPLEDRSSSRLLVLHRETGEREHRIFRDIVEYLKPGDCLVINDTKVIPARLMGVKEGTGAGIEVLLLKRKEGNVWETLVKPGKKARPGARILFGDGLLKGEVIDVVEDGNRLIRFEYEGIFEEILDQLGQMPLPPYITHQLKDKNRYQTVYAKHDGSAAAPTAGLHFTPELLRQIEEMGVSIAHVTLHVGLGTFRPVKVENIQEHHMHSEFYVVEEDQAELINRTKKEGGRVIAVGTTSCRTLESATGEDGILKAGGGWTDIFIYPGYQFRMIDALITNFHLPESTLMMLVSAFAGRELIMETYAEAVKERYRFFSFGDAMFIV

SEQ ID NO: 67810 - protein, 341 aa, unidentified
  source 1..341: note = Lachnoclostridium sp.
  REGION 1..341: note = tr|A0A2T3FPI0|A0A2T3FPI0_9FIRM S-adenosylmethionine:tRNA ribosyltransferase-isomerase; OS = Lachnoclostridium sp. SNUG30099 OX=2126738 GN=queA PE=3; SV = 1
MKLSEFDFELPEELIAQHPVEKRDTSRLMVVNRENGNIEHRHFYDILDYLKPGDVLVRNNTKVIPARLFGIKEETNGHVEVLLLKELKKDTWECLCGNARIVKMNTVITFGEGLLKAKCIEIKDEGIRVFEMMYDGIFYEILDQLGTMPLPPYIKEKLEDKNRYQTVYAKIEGSAAAPTAGLHFTEEINHKIKDKGIEILDVCLHVGLGTFRPVKEENVLDHHMHSEFYMISEEVADKLNKAKANGQRIIAVGTTSTRTLEANMKKYGKFTATSENTDIFIYPGYKFEAIDCLITNFHLPKSTLLMLISAFASKELIFKAYKEAVKEKYRFFSFGDSMMIL

SEQ ID NO: 67811 - protein, 349 aa, Lachnospira multipara
  REGION 1..349: note = tr|A0A1H5SDI9|A0A1H5SDI9_9FIRM S-adenosylmethionine:tRNA ribosyltransferase-isomerase; OS = Lachnospira multipara OX=28051 GN=queA PE=3 SV=1
MMDLHDFDYDLPEELIAQDPLSDRSSSRLMVLNKNTGKLEHKIFRDIIDYLNPGDCLVLNDTKVIPARLYGEKEGTGAGIEVLLLKRKEDLKDTWEVLVKPGKKAKVGARISFGDGKLVAEVKDIVDDGNRIIQFEYDGIFEEILDDLGQMPLPPYITHKLEDKDRYQTVYATHKGSAAAPTAGLHFTNELLKAIEEKGVKIARVTLHVGLGTFRPVKVENILDHHMHSEFYMVSQEAADIINETKKNGGRVISVGTTSTRTIESVANEDGTVPAKTGWTDIFIYPGYKFKTIDCLITNFHLPESTLVMLVSALAGRENVLNAYKIAVEEKYRFFSFGDAMFITDNEIQ

SEQ ID NO: 67812 - protein, 343 aa, Lachnospira pectinoschiza
  REGION 1..343: note = tr|A0A174YGZ8|A0A174YGZ8_9FIRM S-adenosylmethionine:tRNA ribosyltransferase-isomerase; OS = Lachnospira pectinoschiza OX=28052 GN=queA PE=3 SV=1
MDLHDFYYDLPEELIAQDPLSDRSSSRLMVLDKNTGAIEHKIFRDITEYLKPGDCLVINDTKVIPARLIGEKEGTGAAIEVLLLKRLEDRQDTWEVLVKPGKKCKVGARIVFGGGKLTGEIIDIVEEGNRLIQFSYDGIFEEILDELGQMPLPPYITHKLEDKNRYQTVYAKHEGSAAAPTAGLHFTKELLKQIEDMGVKIARVTLHVGLGTFRPVKVENILDHHMHSEFYQVDKEAADIINNTKANGGRVIAVGTTSTRTLESVADENGHIPVKSGWTEIFIYPGYKFKAIDCLITNFHLPESTLVMLVSALAGRENVLNAYEVAVKERYRFFSFGDAMFIK

SEQ ID NO: 67813 - protein, 349 aa, Lachnospira pectinoschiza
  REGION 1..349: note = tr|A0A1G9U7Q4|A0A1G9U7Q4_9FIRM S-adenosylmethionine:tRNA ribosyltransferase-isomerase; OS = Lachnospira pectinoschiza OX=28052 GN=queA PE=3 SV=1
MMDLHDFDYDLPEELIAQDPLSDRSSSRLMVLNKNTGKLEHKIFRDIIDYLNPGDCLVLNDTKVIPARLYGEKEGTGAGIEVLLLKRKEDLKDTWEVLVKPGKKAKVGARISFGDGKLVAEVKDIVDDGNRIIQFEYEGIFEEILDDLGQMPLPPYITHKLEDKDRYQTVYATHKGSAAAPTAGLHFTNELLKAIEEKGVKIARVTLHVGLGTFRPVKVENILDHHMHSEFYMVSQEAADIINETKKNGGRVISVGTTSTRTIESVANEDGTVPAKTGWTDIFIYPGYKFKTIDCLITNFHLPESTLVMLVSALAGRENVLNAYKIAVEEKYRFFSFGDAMFITDNEIQ

SEQ ID NO: 67814 - protein, 341 aa, unidentified
  source 1..341: note = Lachnospiraceae bacterium
  REGION 1..341: note = tr|F7JVA4|F7JVA4_9FIRM S-adenosylmethionine:tRNA ribosyltransferase-isomerase OS=Lachnospiraceae bacterium 2_1_58FAA OX=658082 GN=queA PE=3 SV=1
MKTSDFYYDLPEELIAQDPLEDRSGSRLLFLDKETGKTEHHIFRDVIDYLNPGDCLVINDTKVIPARLIGEKEGTGAKIEVLLLKRGENDVWETLVKPGKKAKPGTRISFGDGLLVGEVVDVVEEGNRLIHFEYKGIFEEILDQLGQMPLPPYITHQLEDRSRYNTVYAAHEGSAAAPTAGLHFTPELLKEIQEKGVDIARVTLHVGLGTFRPVKVEDVTEHHMHSEFYMVDAEAAEKINKAKEHGGRVICVGTTSCRTIESAADENGRLKPCSGWTEIFIYPGYQFKILDGLITNFHLPESTLIMLVSALAGKEHVMAAYEEAVKERYRFFSFGDAMIIL

SEQ ID NO: 67815 - protein, 341 aa, unidentified
  source 1..341: note = Lachnospiraceae bacterium
  REGION 1..341: note = tr|A0A350VCM3|A0A350VCM3_9FIRM S-adenosylmethionine:tRNA ribosyltransferase-isomerase; OS = Lachnospiraceae bacterium OX=1898203 GN=queA PE=3 SV=1
MKTSDFYYDLPQELIAQDPLEDRAGSRLLVLDKKTGKTEHHMFRDIAGYLEPGDCLVINDTKVIPARLIGVKEDTGAKIEVLLLKRKENNVWETLVKSGKKARPGTRISFGDGLLMGEVMDVVDEGNRLIHFKYEGIFEEILDQLGQMPLPPYITHQLKDKDRYNTVYATHEGSAAAPTAGLHFTPELLQKIQDKGVDIARVTLHVGLGTFRPVKVKEVKEHHMHSEFYIIDEEAAEKINRAKETGKRVICVGTTSCRTIEAAADENGYLKACSGWTEIFIYPGYRFKVLDGLITNFHLPESTLIMLVSALADREHVLAAYEEAVKEKYRFFSFGDAMLIV

SEQ ID NO: 67816 - protein, 341 aa, unidentified
  source 1..341: note = Lachnospiraceae oral
  REGION 1..341: note = tr|F3B2Y0|F3B2Y0_9FIRM S-adenosylmethionine:tRNA ribosyltransferase-isomerase OS=Lachnospiraceae oral taxon 107 str. F0167 OX=575593 GN=queA PE=3 SV=1
MDVKEFWYDLPQELIAQDPLEDRASSRLLVLDKKNGEISHKHFYDIIDYLNEGDCLVLNETKVIPARLMGVKNDTGAAIEILLLKRKTKTSWECLVKPGKKCKVGAKIDFGEGLLTGTIMDIVEEGNRIIEFEFEGIFEEILDKLGTMPLPPYITHALKDRNRYQTVYAKNEGSAAAPTAGLHFTKELLEKIEKKGIRLAKVTLHVGLGTFRPVKVNDINEHHMHSEFFNISSEAADIINSTKKNGKRVVCVGTTSTRTIESAADENGYLEEKSGWTDIFIYPGYKFKVLDALITNFHLPESTLVMLVSALAGRENILHAYEEAVKEKYRFFSFGDAMLIK

SEQ ID NO: 67817 - protein, 341 aa, unidentified
  source 1..341: note = Lachnotalea glycerini
  REGION 1..341: note = tr|A0A255I919|A0A255I919_9FIRM S-adenosylmethionine:tRNA ribosyltransferase-isomerase; OS = Lachnotalea glycerini OX=1763509 GN=queA PE=3 SV=1
MKLEDFNFDLPQELIAQDPIEDRSSSRLLVLDKKTGEIQHHIFKEIINYLEEGDCLVINDTKVIPARLIGSRVGTEAKIEVLLLKRKKEDIWETLVKPGKKAKVGTRISFGGGLLIGEVIEIVEEGNRLVKFEYNGIFEEILDQLGQMPLPPYITHELKDKNRYQTVYAKHEGSAAAPTAGLHFTNELLERIQEKGVNIARVTLHVGLGTFRPVKVENILEHHMHSEFFCIEEEEAFKINNAKKNGKRVISVGTTSCRTLESAADDSGMVRAASGWTEIFIYPGYQFKVIDGLITNFHLPESTLLMLVSALAGKENILNAYETAIKERYRFFSFGDAMFIR

SEQ ID NO: 67818 - protein, 341 aa, unidentified
  source 1..341: note = Lachnotalea sp.
  REGION 1..341: note = tr|A0A416EHU1|A0A416EHU1_9FIRM S-adenosylmethionine:tRNA ribosyltransferase-isomerase; OS = Lachnotalea sp. AF33-28 OX=2292046 GN=queA PE=3 SV=1
MDVKDFDYDLPEKLIAQDPLEDRSSSRLMVLDKKSGEIKHTVFKHIIDRLCPGDCLVINNTKVIPARLMGTKRDTGAAIEVLLLKRKENNIWETLVKPGKKAKPGTEIVFGDGLLSGTVLEVVEEGNRLIQFRFEGIFEEILDQLGQMPLPPYITHQLQDKNRYQTVYAKHEGSAAAPTAGLHFTQELLEQIHNKGVDIAEVTLHVGLGTFRPVKVENVQDHHMHSEFYCIDEDAAEKVNRAKRSGRRVIAVGTTSCRTLESAGAQDGSIRACSGWTEIFIYPGYQFKVVDALITNFHLPQSTLIMLVSALAGREHVLAAYEEAVRQKYRFFSFGDAMFIE

SEQ ID NO: 67819 - protein, 409 aa, Lacibacter cauensis
  REGION 1..409: note = tr|A0A562SEY1|A0A562SEY1_9BACT S-adenosylmethionine:tRNA ribosyltransferase-isomerase; OS = Lacibacter cauensis OX=510947 GN=IQ13_3649 PE=3 SV=1
MHPSQLQISDFTYDLPDERIARYPLTERDLSKLLIYKEGTIISDVYRHLPQHLPADALLVFNNTKVIEARILFQKDTGSKIEIFCLEPAAGVELTQAMMSQGNVRWTCLVGGAGKWKQQFLEKPLQTPKGAVLLKAEKMNVQQGCFEIEFSWDNTYFTFAELLHYAGVLPLPPYLQRQTEAADYDRYQTVYARQEGSVAAPTAGLHFTPQLLLQLQEKGIKHSFVTLHVGAGTFQPVKSTTMQDHHMHREWIEVDADAIEELLQQLPRPVIPVGTTSLRTIESLYWMGVKVLLNPNATIHQLEVQQWDAYDLPLQNASAKDALQALLDWMQQQKLQKIICHTQVLIAPGYTARVAGAILTNFHQPSSTLLLLVAALIGEDWRKVYRYALANDYRFLSYGDGSLLWVNKT

SEQ ID NO: 67820 - protein, 349 aa, Lacibacter cauensis
  REGION 1..349: note = tr|A0A562SHK9|A0A562SHK9_9BACT S-adenosylmethionine:tRNA ribosyltransferase-isomerase; OS = Lacibacter cauensis OX=510947 GN=queA PE=3 SV=1
MKLSQFTFDLPLNLIAQTPTKKREDSRLMVVHRKTGQIENRTFRDIMEYFDDKDAFVVNNTKVFPARMYGRKEKTGAKIEVFLLRELNKQNRLWDVIVDPARKIRVGNKLYFGDTEDLVAEVIDNTTSRGRTIRFLFDGTDEEFRTVLYNMGETPLPKYIKRKPDEEDRERYQTVFAKHEGAVAAPTAGMHFSQELIKRLEIQGVRFAEVTLHTGLGTFRPIEVEDLSKHKMDAEYYKIDEFACKIVNKAKEGKHRICSIGTTTMRALETSFTAQQLLKPSEGWTNIFIHPPYNFNIADSLVTNFHLPKTSLLIMTCAFAGYELTMEAYKKAIKDKYRFFSYGDAMLVI

SEQ ID NO: 67821 - protein, 417 aa, Lacibacter sp.
  REGION 1..417: note = tr|A0A4Q1CNG1|A0A4Q1CNG1_9BACT S-adenosylmethionine:tRNA ribosyltransferase-isomerase; OS = Lacibacter sp. TTM-7 OX=2508719 GN=ESA94_06325 PE=3 SV=1
MHPSQLQISDYTYELPDERIARYPLTERDLSKLLIYKEGAIESDVYRHLPQHLPATALLVFNNTKVIDARILFQKDTGSKIEIFCLEPAAGVELTQAMMSLEKVRWTCLVGGAGKWKQQFLEKELHTPKGNVLFRAEKINQQGGNFEIEFSWNNSWFTFAELLHFAGILPLPPYLQRQSEAADYDRYQTVYARYEGSVAAPTAGLHFTPKLLLKLQEKGIKHSFVTLHVGAGTFQPVKAATMQDHPMHREWIEVNAATIKELLEQLPKLVITVGTTSLRTIESLYWMGVKALLNSNATLEELEVQQWDAYDLPLQNASAKDALQALLGWLQQQNLEQIICHTQILIAPGYTVRIASAIITNFHQPNSTLLLLVAALIGDDWRKVYDYALKNDFRFLSYGDGSLLWTSESPSSLACNS

SEQ ID NO: 67822 - protein, 349 aa, Lacibacter sp.
  REGION 1..349: note = tr|A0A4Q1CMJ8|A0A4Q1CMJ8_9BACT S-adenosylmethionine:tRNA ribosyltransferase-isomerase; OS = Lacibacter sp. TTM-7 OX=2508719 GN=queA PE=3 SV=1
MKLSQFTFDLPLNLIAQNPTKKREDSRLMVVHRKTGQIENRTFRDIMEYFDDKDAFVVNNTKVFPARMYGRKEKTGAKIEVFLLRELNKQNRLWDVIVDPARKIRVGNKLYFGDTEDLVAEVIDNTTSRGRTIRFLFDGTDEEFRTVLYNMGETPLPKYIKRKPDEEDRERYQTVFAKHEGAVAAPTAGMHFSQELIKRLEIQGVRFAEVTLHTGLGTFRPIEVEDLSKHKMDAEYYKIDEFACKIVNKAKEGKHRICSIGTTTMRALETSFTAQQLLKPSEGWTNIFIHPPYNFNIADSLVTNFHLPKTSLLIMTCAFAGYELTMEAYKKAIKDKYRFFSYGDAMLVI

SEQ ID NO: 67823 - protein, 346 aa, unidentified
  source 1..346: note = Lacimicrobium alkaliphilum
  REGION 1..346: note = tr|A0A0U2ZM12|A0A0U2ZM12_9ALTE S-adenosylmethionine:tRNA ribosyltransferase-isomerase; OS = Lacimicrobium alkaliphilum OX=1526571 GN=queA PE=3 SV=1
MKVSDFHFDLPDELIARYPAQQRSASRLLHLNGASGAVQHLQFTDIVDLLEPGDLLVFNDTRVIPARLLGNKQTGGQVEVLVERILDEHRVLAHVRASKAPKPDSLLLLEGELEAKMVRRHDALFELCFNHEKPVLALLEQYGHMPLPPYIDRPDEQVDKERYQTVYNNKPGAVAAPTAGLHFDQPILDQLKQKGVNTAFVTLHVGAGTFQPVRVENITEHQMHSEYAEVSQQVVDAVLATKAAGKRVVAVGTTSVRSLESAAQASLKQKQTLQPFFSDTDIFIYPGYEFAVVDAMLTNFHLPESTLIMLVSAFAGKQNIMHAYGQAIENRYRFFSYGDAMFIERA

SEQ ID NO: 67824 - protein, 349 aa, Lacinutrix sp.
  REGION 1..349: note = tr|A0A4U0EYA2|A0A4U0EYA2_9FLAO S-adenosylmethionine:tRNA ribosyltransferase-isomerase; OS = Lacinutrix sp. CAU 1491 OX=2565367 GN=queA PE=3 SV=1
MKLSHFNFDLPEELLAEYPSEHRDEARLMVLNRKDQTIEHKLFKDLIDYFEEDDVMILNNTKVFPARLFGNKEKTGARIEVFLLRELNPEQRLWDVLVDPARKIRIGNKLYFGEDETLVAEVIDNTTSRGRTLRFLYDGSYGEFRRKLTELGQTPLPKYIKREVEPEDEDRYQTIYAKNEGAVAAPTAGLHFSKHLLKRLEIKGVNFAEVTLHVGLGTFNPVEVEDLSKHKMDSEEISINKIATDTINSALKEKRRICAVGTTVMRAVESSVSSSGTLNEFTGWTNKFIFPPYDFSIANCMVTNFHTPKSTLLMMVSAFAGHDFVKRAYDEAIKEGYKFYSYGDAMLII

SEQ ID NO: 67825 - protein, 349 aa, Lacinutrix sp.
  REGION 1..349: note = tr|A0A1J5KI97|A0A1J5KI97_9FLAO S-adenosylmethionine:tRNA ribosyltransferase-isomerase; OS = Lacinutrix sp. MedPE-SW OX=1860087 GN=queA PE=3 SV=1
MKLSHFNFDLPEELLAEYPSENRDESRLMVLNRKEQTIEHKQFKDLIDYFDEEDVMILNNTKVFPARLFGNKEKTGARIEVFLLRELNEEQRLWDVLVDPARKIRIGNKLYFGDDESLVAEVIDNTTSRGRTLRFLYDGSYKEFRNKLKELGETPLPKYIKRDVEPEDEDRYQTIFAKNEGAVAAPTAGMHFSKHLLKRLEIKGIDFAEVTLHVGLGTFNPVEVEDLSKHKMDSEEVTIGPKTVERINRALKDKKRICAVGTTAMRAVESAVSSSNTLNEIDGWTNKFIFPPYDFSIANCMITNFHTPKSTLLMMASAFAGHDFIKRAYEEAVKEKYKFYSYGDAMLII

SEQ ID NO: 67826 - protein, 351 aa, unidentified
  source 1..351: note = Lacinutrix venerupis
  REGION 1..351: note = tr|A0A420ZK07|A0A420ZK07_9FLAO S-adenosylmethionine:tRNA ribosyltransferase-isomerase; OS = Lacinutrix venerupis OX=1486034 GN=queA PE=3 SV=1
MKMKLSHFDFELPEELLAEYPAENRDESRLMVLNRKDQTIEHRQFKDIIDYFDEDDVMILNNTKVFPARLFGNKEKTGARIEVFLLRELNEEQRLWDVLVDPARKIRIGNKLYFGDDESLVAEVIDNTTSRGRTLRFLYDGSYAEFRKKLTSLGETPLPKYIKRDVEPEDEERYQTIFAKNEGAVAAPTAGMHFSKHLLKRLEIKGVDFAEVTLHVGLGTFNSVEVEDLSKHKMDSEEVTIGPETVETINKALKNRRRICAVGTTAMRAVESAVSSNQTLNEIDGWTNKFIFPPYDFSIANAMITNFHTPKSTLMMMTSAFAGHDFVKRAYEEAVKEKYKFYSYGDAMLII

SEQ ID NO: 67827 - protein, 344 aa, Lactobacillus acidifarinae
  REGION 1..344: note = tr|A0A0R1LDQ3|A0A0R1LDQ3_9LACO S-adenosylmethionine:tRNA ribosyltransferase-isomerase; OS = Lactobacillus acidifarinae DSM 19394 OX=1423715 GN=queA; PE = 3 SV=1
MAETLEDFDYELPHELIAQTPIKQRDTSRLLVLDHRTGELTDRHFYDILDELHPGDAVVLNNSRVMPARLYGVKPATGGHVEVLLLHNVEGDVWETLMKPAKRLRVGTTVSFGDGQLTATITAERADGVRLIDFHYDGIFMEILERLGETPLPPYIKAKLADPDRYQTIYAKENGSAAAPTAGLHWTQDLLDQVVAKGVKLVYVTLHVGLGTFRPVEAANIEDHKMHSEFYQLDAQAAQTLNDVRAHGGRIVATGTTSIRTLETIGTKFHGRLQADAGWTDIFIKPGYHWQVVDAFITNFHLPKSTLVMLVAAFTGRDQILNAYQHAIDQRYRFFSFGDAMFIK

SEQ ID NO: 67828 - protein, 347 aa, Lactobacillus acidipiscis
  REGION 1..347: note = tr|A0A0R2KBP4|A0A0R2KBP4_9LACO S-adenosylmethionine:tRNA ribosyltransferase-isomerase; OS = Lactobacillus acidipiscis OX=89059 GN=queA PE=3 SV=1
MSEEHLTTEDFDYDLPQELIAQTPLKKRDESRMLVLDHVSGKYQDDHFYNVIDQLNPGDALVMNDSRVMPARLYGDKPATGGHLEVLLLNNTDGDNWETLVKPAKRAKVGTEISFGNGKLTATVTKELDHGGRMIEFHYDGIFMEILESLGETPLPPYIKEKLDDPEMYQTVYSKEIGSAAAPTAGLHFTKELLQKIEDKGVKLVYLTLHVGLGTFRPVTEENIEDHKMHSEFYSLSEGSAQTLNEVRQNGGKIVATGTTTIRTLETIGTKFNGEIKADSGWTDIFLKPGYEWKVVQAFITNFHLPKSTLVMLVASFTGRENILNAYKHAVEEKYRFFSFGDCMFIY

SEQ ID NO: 67829 - protein, 347 aa, Lactobacillus acidipiscis
  REGION 1..347: note = tr|A0A1W7QKE6|A0A1W7QKE6_9LACO S-adenosylmethionine:tRNA ribosyltransferase-isomerase; OS = Lactobacillus acidipiscis OX=89059 GN=queA PE=3 SV=1
MSEEHLTTEDFDYDLPQELIAQTPLKKRDESRMLVLDHVSGKYQDDHFYNVIDQLNPGDALVMNDSRVMPARLYGDKPATGGHLEVLLLNNTDGDNWETLVKPAKRAKVGTEISFGNGKLTATVTKELDHGGRMIEFHYDGIFMEILESLGETPLPPYIKEKLDDPEMYQTVYSKEIGSAAAPTAGLHFTKELLQKIEDEGVKLVYLTLHVGLGTFRPVTEENIEDHKMHSEFYSLSEGSAQTLNEVRQNGGKIVATGTTTIRTLETIGTKFNGEIKADSGWTDIFLKPGYEWKVVQAFITNFHLPKSTLVMLVASFTGRENILNAYKHAVEEKYRFFSFGDCMFIY

SEQ ID NO: 67830 - protein, 348 aa, Lactobacillus agilis
  REGION 1..348: note = tr|A0A2I2A9A2|A0A2I2A9A2_9LACO S-adenosylmethionine:tRNA ribosyltransferase-isomerase; OS = Lactobacillus agilis OX=1601 GN=queA PE=3 SV=1
MTKQAHLTTEDFDYDLPQELIAQTPLEKRDHSRMLVLDSKTGEMKDDVFYNVIDQLNPGDALVMNDSRVMPARIYGVKPDTGGHVEVLLLNNTKGDEWETLVKPAKRAKVGTKLSFGDGKLMATVTKELEHGGRLIEFEYDGIFLEILDQLGEMPLPPYIKEKLDDPEMYQTVYSREVGSAAAPTAGLHFTKELLAKIEAKGVKLVYLTLHVGLGTFRPVSVSNVEDHKMHSEFYRLTEEAAQTLNEVRANGGRIVAVGTTSIRTLETIGSKFNGEIKADSGWTDIFIWPGYEWKVVQAFITNFHLPKSTLVMLVAAFTGRDTILNAYKHAVAEKYRFFSFGDAMFIK

SEQ ID NO: 67831 - protein, 348 aa, Lactobacillus agilis
  REGION 1..348: note = tr|A0A0R2AKS7|A0A0R2AKS7_9LACO S-adenosylmethionine:tRNA ribosyltransferase-isomerase; OS = Lactobacillus agilis DSM 20509 OX=1423718 GN=queA PE=3; SV = 1
MTKQAHLTTEDFDYDLPQELIAQTPLEKRDHSRMLVLDSKTGEMKDDVFYNVIDQLNPGDALVMNDSRVMPARIYGVKPDTGGHVEVLLLNNTKGDEWETLVKPAKRAKVGTKLSFGDGKLMATVTKELEHGGRLIEFEYDGIFLEILDQLGEMPLPPYIKEKLDDPEMYQTVYSREVGSAAAPTAGLHFTKELLTKIEAKGVKLVYLTLHVGLGTFRPVSVSNVEDHKMHSEFYRLTEEAAQTLNEVRANGGRIVAVGTTSIRTLETIGSKFNGEIKADSGWTDIFIWPGYDWKVVQAFITNFHLPKSTLVMLVAAFTGRDTILNAYKHAVAEKYRFFSFGDAMFIK

SEQ ID NO: 67832 - protein, 346 aa, Lactobacillus algidus
  REGION 1..346: note = tr|A0A0R1HLV7|A0A0R1HLV7_9LACO S-adenosylmethionine:tRNA ribosyltransferase-isomerase; OS = Lactobacillus algidus DSM 15638 OX=1423719 GN=queA PE=3; SV = 1
MTKQLSTEDFDYELPQALIAQTPLEERDASRMLVLDHETGDIQDDYFYNVIDQLDAGDALVMNDSRVMPARIHGIRPDTGGHIEVLLLNNTDGDNWETLVKPAKKMKIGSVISFGDGRLTATITKELEHGGRMIRFDYDGIFMEILNELGEMPLPPYIKETLEDQEMYQTVYSKEVGSAAAPTAGLHFTTQLLEKIEEKGVHLVYLTLHVGLGTFRPVSETNIEDHKMHSEFYRLTAGSAKMLNEVRQSGGKIIATGTTSIRTLETIGSKFNGDIQADSGWTEIFIKPGYEFKVVEGFITNFHLPKSTLVMLVAAFTGRENILNAYKHAVDAKYRFFSFGDAMYIK

SEQ ID NO: 67833 - protein, 346 aa, Lactobacillus algidus
  REGION 1..346: note = tr|A0A5C6M833|A0A5C6M833_9LACO S-adenosylmethionine:tRNA ribosyltransferase-isomerase; OS = Lactobacillus algidus OX=105612 GN=queA PE=3 SV=1
MTKQLSTEDFDYELPQALIAQTPLEERDASRMLVLDHETGDIQDDYFYNVIDQLNAGDALVMNDSRVMPARIHGIRPDTGGHIEVLLLNNTDGDNWETLVKPAKKMKIGSVISFGDGRLTATITKELEHGGRMIRFDYDGIFMEILNELGEMPLPPYIKETLEDQEMYQTVYSKEVGSAAAPTAGLHFTTQLLEKIEAKGVHLVYLTLHVGLGTFRPVSETNIEDHKMHSEFYRLTADSAKMLNEVRQSGGKIIATGTTSIRTLETIGSKFNGDIQADSGWTEIFIKPGYEFKVVEGFITNFHLPKSTLVMLVAAFTGRENILNAYKHAVDAKYRFFSFGDAMYIK

SEQ ID NO: 67834 - protein, 344 aa, Lactobacillus alimentarius
  REGION 1..344: note = tr|A0A2N9YJM7|A0A2N9YJM7_9LACO S-adenosylmethionine:tRNA ribosyltransferase-isomerase; OS = Lactobacillus alimentarius DSM 20249 OX=1423720 GN=queA; PE = 3 SV=1
MTLTTEDFDYNLPEELIAQTPIKNRDQSRLLVLDHETGQYQDKHFYDILDYLNPGDALVMNNSRVLPARLYGTKEDTDGHEEVLLLNNIEGDKWEVLMKPARRAKVGTKVKFGDGQLEAEVLEDLEHGGKIIEFHYQGIFMEILEQLGEMPLPPYIKEKLDDPNRYQTVYAKENGSAAAPTAGLHWTKDLLKKVEDKGVKLVYLTLHVGLGTFRPVTESDISKHVMHSEFYRLDEESAKTLNEVRQNGGKIVATGTTSIRTLETIGTKFNGEIKADSGWTDIFIKPGYEWKVVNAFITNFHLPKSTLVMLVAAFTGRENILNAYQHAVEEKYRFFSFGDAMFIK

SEQ ID NO: 67835 - protein, 344 aa, unidentified
  source 1..344: note = Lactobacillus allii
  REGION 1..344: note = tr|A0A1P8PZL4|A0A1P8PZL4_9LACO S-adenosylmethionine:tRNA ribosyltransferase-isomerase; OS = Lactobacillus allii OX=1847728 GN=queA PE=3 SV=1
MTLTTEDFDYDLPEELIAQTPIKNRDHSRLLVLDHKTGSYEDKHFYDILDYLNPGDALVMNNSRVLPARLYGTKKDTDGHEEVLLLNNIEGDKWEVLMKPARRAKVGTTVDFGDGKLSATVLEELEHGGKIIEFHYDGIFLEILEQLGETPLPPYIKEKLDDPDRYQTVYAKENGSAAAPTAGLHWTKELLQKVQDKGVKLVYLTLHVGLGTFRPVTESDISKHIMHSEFYRLDEESAQTLNDVREHGGKIVATGTTSIRTLETIGTKFDGEIKADSGWTDIFIKPGYEWKVVDEFITNFHLPKSTLVMLVAAFTGRENILNAYQHAIDEKYRFFSFGDAMFIK

SEQ ID NO: 67836 - protein, 343 aa, Lactobacillus amylophilus
  REGION 1..343: note = tr|A0A4Y4JTM5|A0A4Y4JTM5_9LACO S-adenosylmethionine:tRNA ribosyltransferase-isomerase; OS = Lactobacillus amylophilus OX=1603 GN=queA PE=3 SV=1
MLTTEDFDYDLPEELIAQTPIEQRDTSRLLVLDHQTGELLDQHFYNIIDQLHAGDALVMNDSRVMPARLHGLKEGTGAHIELLLLKNIVGDKWEVLAKPAKKVPVGSVIDFGDGALKATVTKELDFGGREITFSYEGIFLEVLEALGEMPLPPYIKEKLDDPERYQTVYAKEMGSAAAPTAGLHWTKDLLAKVQAKGVKLVYLTLHVGLGTFRPVSEENILDHEMHSEFYSLSEDAARTLNEVKQNGGRIVATGTTSIRTLETIATRNDGKIVAESGWTDIFIYPGYEWKVVDAFITNFHLPKSTLVMLVASFTGRETILNAYKHAVQEKYRFFSFGDAMFIK

SEQ ID NO: 67837 - protein, 343 aa, Lactobacillus amylophilus; identical to SEQ ID NO: 67836
  REGION 1..343: note = tr|A0A0R1YIT1|A0A0R1YIT1_9LACO S-adenosylmethionine:tRNA ribosyltransferase-isomerase; OS = Lactobacillus amylophilus DSM 20533 = JCM 1125; OX = 1423721 GN=queA PE=3 SV=1

SEQ ID NO: 67838 - protein, 343 aa, Lactobacillus amylotrophicus; identical to SEQ ID NO: 67836
  REGION 1..343: note = tr|A0A0R1GUW7|A0A0R1GUW7_9LACO S-adenosylmethionine:tRNA ribosyltransferase-isomerase; OS = Lactobacillus amylotrophicus DSM 20534 OX=1423722; GN = queA PE=3 SV=1

SEQ ID NO: 67839 - protein, 347 aa, Lactobacillus animalis
  REGION 1..347: note = tr|A0A062X9L2|A0A062X9L2_9LACO S-adenosylmethionine:tRNA ribosyltransferase-isomerase; OS = Lactobacillus animalis OX=1605 GN=queA PE=3 SV=1
MTEEHLTTEDFDYDLPEELIAQTPLEHRDQSRMLVLDSKTGEYQDDYFYNVIDRLNPGDALVMNDSRVLPARIYGVKPDTGGHLEVLLLNNIKGDQWETLVKPAKRAKVGTKISFGNGELTAVVKEELEHGGRIVEFEYDGIFLEVLESLGEMPLPPYIKEKLDDPEMYQTVYSKEVGSAAAPTAGLHFTEELLAKIEAKGVKLVYLTLHVGLGTFRPVSVDNIEEHKMHSEFYRLSEEAAETLNEVRKNGGRIVATGTTSIRTLETIGSKFNGEIKADSGWTDIFIKPGYEWKVVNAFITNFHLPKSTLVMLVSAFTGRENILNAYRHAVEEKYRFFSFGDAMFIY

SEQ ID NO: 67840 - protein, 347 aa, Lactobacillus animalis
  REGION 1..347: note = tr|A0A4S3QE93|A0A4S3QE93_9LACO S-adenosylmethionine:tRNA ribosyltransferase-isomerase; OS = Lactobacillus animalis OX=1605 GN=queA PE=3 SV=1
MTEEHLTTEDFDYDLPEELIAQTPLEHRDQSRMLVLDSKTGEYQDDYFYNVIDRLNPGDALVMNDSRVLPARIYGVKPDTGGHLEVLLLNNIKGDQWETLVKPAKRAKVGTKISFGNGELTAVVKEELEHGGRIVEFEYDGIFLEVLESLGEMPLPPYIKEKLDDPEMYQTVYSKEVGSAAAPTAGLHFTEELLAKIEAKGVKLVYLTLHVGLGTFRPVSVDNIEEHKMHSEFYRLSEEAAETLNEVRKNGGRIVATGTTSIRTLETIGSKFNGEIKADSGWTDIFIKPGYEWKVVNAFITNFHLPKSTLVMLVSAFTGRENILNAYCHAVEEKYRFFSFGDAMFIY

SEQ ID NO: 67841 - protein, 350 aa, Lactobacillus apodemi
  REGION 1..350: note = tr|A0A0R1TSE5|A0A0R1TSE5_9LACO S-adenosylmethionine:tRNA ribosyltransferase-isomerase; OS = Lactobacillus apodemi DSM 16634 = JCM 16172 OX=1423724; GN = queA PE=3 SV=1
MIFLTEEHLTTEDFDYDLPEELIAQTPLEERDQSRMLALNAKTGEYEDDYFYNVIDRLNPGDALVMNDSRVMPARIYGVKPDTGGHLEVLLLNNIEGDRWETLVKPAKRAKVGTKITFGNGELTAVVKEELEHGGRIIEFAYDGIFLEVLESLGEMPLPPYIKEKLDDPEMYQTVYSKEVGSAAAPTAGLHFTEELLQKIEEKGVKLVYLTLHVGLGTFRPVSVDNIEDHKMHSEFYRLSPEAAATLNEVKQNGGRIVATGTTSIRTLETIGSKFDGEIKADSGWTDIFIKPGYQWKVVDAFITNFHLPKSTLVMLVSAFTGRENILNAYKHAVAEKYRFFSFGDAMFIY

SEQ ID NO: 67842 - protein, 350 aa, Lactobacillus aquaticus
  REGION 1..350: note = tr|A0A0R2D5Z9|A0A0R2D5Z9_9LACO S-adenosylmethionine:tRNA ribosyltransferase-isomerase; OS = Lactobacillus aquaticus DSM 21051 OX=1423725 GN=queA; PE = 3 SV=1
MTILSEEHLTTEDFDYDLPQELIAQTPLEERDHSRMLILDSKTGAYKDDVFYNVIDQLNAGDALVMNDSRVMPARIYGIKPETGGHIEVLLLNNTQGDEWETLVKPAKRAKVGTRIVFGDGKLSAVITKELEHGGRMIKFEYEGIFMEILDELGEMPLPPYIKEKLDDPEMYQTVYSREVGSAAAPTAGLHFTKELLHKIEAKGVHLVYLTLHVGLGTFRPVSVENIEDHKMHSEFYRLSEDSAKILNDVRANGGKIIATGTTSIRTLETIGTKFNGEIRADSGWTDIFIKPGYDWKVVQAFITNFHLPKSTLVMLVSSFTGRKNILNAYKHAVKEKYRFFSFGDAMFIK

SEQ ID NO: 67843 - protein, 348 aa, Lactobacillus aviarius
  REGION 1..348: note = tr|A0A510WR26|A0A510WR26_9LACO S-adenosylmethionine:tRNA ribosyltransferase-isomerase; OS = Lactobacillus aviarius subsp. aviarius OX=147810; GN = queA PE=3 SV=1
MTDKPLKTEDFDYDLPHELIAQTPLKERDEARMLVLNAKTGEYKDDYFYDIIDYLNPGDAVVMNDSRVMPARIYGVKPDTGGHLEVLLLNNTEGDNWETLVKPARRAKVGTKIVFGNGELTATVTKELEHGGRMIKFEYDGIFMEILDKLGEMPLPPYIKEKLDDPEMYQTVYSREIGSAAAPTAGFHWTKELLKKVEEKGVKLVYLTLHVGLGTFRPVNEENIDDHKMHSEFYSMSQEAADTLNEVRKNGGRIVATGTTSIRTLETIGTKFNGELKADSGWTDIFIKPGYKWQVVDAFITNFHLPKSTLVMLVAAFTGRENILNAYKHAVQEKYRFFSFGDAMFIHK

SEQ ID NO: 67844 - protein, 348 aa, Lactobacillus aviarius
  REGION 1..348: note = tr|A0A179CI93|A0A179CI93_9LACO S-adenosylmethionine:tRNA ribosyltransferase-isomerase; OS = Lactobacillus aviarius OX=1606 GN=queA PE=3 SV=1
MTDKPLKTEDFDYDLPHELIAQTPLKERDEARMLVLNAKTGEYKDDYFYDIIDYLNPGDAVVMNDSRVMPARIYGVKPDTGGHLEVLLLNNTEGDNWETLVKPARRAKVGTKIVFGNGELTATVTKELEHGGRMIKFEYDGIFMEILDKLGEMPLPPYIKEKLDDPEMYQTVYSKEIGSAAAPTAGFHWTKELLKKVEEKGVKLVYLTLHVGLGTFRPVNEENIDDHKMHSEFYSMSQEAADTLNEVRKNGGRIVATGTTSIRTLETIGTKFNGELKADSGWTDIFIKPGYKWQVVDAFITNFHLPKSTLVMLVAAFTGRENILNAYKHAVQEKYRFFSFGDAMFIHK

SEQ ID NO: 67845 - protein, 344 aa, unidentified
  source 1..344: note = Lactobacillus backii
  REGION 1..344: note = tr|A0A192H2V5|A0A192H2V5_9LACO S-adenosylmethionine:tRNA ribosyltransferase-isomerase; OS = Lactobacillus backii OX=375175 GN=queA PE=3 SV=1
MGLTLEDFDYNLPHELIAQTPLKERDASRLLVLDHKTGEMADKHFYDILDELHAGDAVVMNDTRVMPARLYGVKPDTGGHMEVLLLNNTDGDNWETLMKPAKRAKVGTEIVFGDGQLKATVTKELEHGGRMIEFHYAGIFMEILEQLGETPLPPYIKEKLDDPEMYQTVYAKENGSAAAPTAGLHWTKDLLKQVQDKGVKLIYLTLHVGLGTFRPVDEENIDDHKMHSEFYRLTPKAAAELNEVRQNGGRIVATGTTSIRTLETIGTKFNGAIKADSGWTDIFIKPGYKWQVVDAFITNFHLPKSTLVMLVAAFTGRDTILNAYAHAIEERYRFFSFGDAMFIK

SEQ ID NO: 67846 - protein, 344 aa, Lactobacillus bifermentans
  REGION 1..344: note = tr|A0A0R1H0Y8|A0A0R1H0Y8_9LACO S-adenosylmethionine:tRNA ribosyltransferase-isomerase; OS = Lactobacillus bifermentans DSM 20003 OX=1423726 GN=queA; PE = 3 SV=1
MGLSTEDFDYDLPQELIAQTPLKERDASRMLVLDHKTGAYSDQHFYDVLEQLNPGDAVVMNDTRVMPARLYGIKAETGAHLEVLLLNNTEGDHWETLMKPAKRAKVGTEITFGDGQLKAVVTEELEHGGRMIEFHYDGIFMEILEQLGETPLPPYIKAKLDDPEMYQTVYAKENGSAAAPTAGLHWTKELLQKVQDKGVKLVYLTLHVGLGTFRPVDVDDIDNHKMHSEFYRLTPEAAAQLNEVRANGGRIIATGTTSIRTLETIGTKFDGEIKPDSGWTDIFIKPGYQWQVVDAFITNFHLPKSTLVMLVAAFTGRDNILNAYQHAIDERYRFFSFGDAMFIK

SEQ ID NO: 67847 - protein, 344 aa, unidentified
  source 1..344: note = Lactobacillus bombi
  REGION 1..344: note = tr|A0A347SQ91|A0A347SQ91_9LACO S-adenosylmethionine:tRNA ribosyltransferase-isomerase; OS = Lactobacillus bombi OX=1303590 GN=queA PE=3 SV=1
MMLTLDDFDYDLPQELIAQTPLKKRDQSRLLVLDHQSGAYQDRHFYDVLDYLNPGDALVMNDTKVLPARLYGVKEDTQAHLEVLLLNNTEGDDWEVLMKPARRAPIGTKVDFGNGKLTATVTQELDHGGRMIHFDYEGIFMEILEELGEMPLPPYIKTKLDDPNRYQTVYAREEGSAAAPTAGLHWTKDLLQKVQDKGIKLVYLTLHVGLGTFRPVSEQNIDEHKMHSEFYRLTAESAQILNEVRQNGGKIVATGTTSIRTLETIGTKFDGEIKADSGWTDIFIKPGYQWKVVDEFITNFHLPKSTLVMLVASFTGRENILNAYQHAVAEKYRFFSFGDAMFIK

SEQ ID NO: 67848 - protein, 344 aa, unidentified
  source 1..344: note = Lactobacillus bombi
  REGION 1..344: note = tr|A0A3R7CJV1|A0A3R7CJV1_9LACO S-adenosylmethionine:tRNA ribosyltransferase-isomerase; OS = Lactobacillus bombi OX=1303590 GN=queA PE=3 SV=1
MMLTLDDFDYDLPQELIAQTPLKKRDQSRLLILDHQSGAYQDRHFYDVLDYLNPGDALVMNDTKVLPARLYGVKEDTQAHLEVLLLNNTEGDDWEVLMKPARRAPIGTKVDFGNGKLTATVTQELDHGGRMIHFDYEGIFMEILEELGEMPLPPYIKTKLDDPNRYQTVYAREEGSAAAPTAGLHWTKDLLQKVQDKGIKLVYLTLHVGLGTFRPVSEQNIDEHKMHSEFYRLTTESAQILNEVRQNGGKIVATGTTSIRTLETIGTKFDGEIKADSGWTDIFIKPGYQWKVVDEFITNFHLPKSTLVMLVASFTGREIILNAYQHAVAEKYRFFSFGDAMFIK

SEQ ID NO: 67849 - protein, 348 aa, unidentified
  source 1..348: note = Lactobacillus brantae
  REGION 1..348: note = tr|A0A0R2AWA7|A0A0R2AWA7_9LACO S-adenosylmethionine:tRNA ribosyltransferase-isomerase; OS = Lactobacillus brantae DSM 23927 OX=1423727 GN=queA PE=3; SV = 1
MEGIIVLTTEDFDYNLPEELIAQTPLKERDASRLLTLNHTTGAMEDKHFYDIIDYLNPGDAVVMNDTRVMPARLYGVKADTGAHMEVLLLTNIEGDKWETLMKPARKAPVGTKVTFGDGLLVATVLEELDHGGRIVEFSYSGIFMEVLEQLGETPLPPYIKEKLDDPEMYQTVYAREVGSAAAPTAGLHWTKELLDKAQAKGVKLVYLTLHVGLGTFRPVSEDNIEDHKMHSEFYRLTEEAAAELTAVKANGGRIIATGTTSIRTLETIGTKFNGEIKADSGWTDIFIKPGYKWQVVDAFITNFHLPKSTLVMLVAAFTGRENILNAYQHAIDERYRFFSFGDAMYIY

SEQ ID NO: 67850 - protein, 344 aa, Lactobacillus brevis
  REGION 1..344: note = sp|Q03R37|QUEA_LACBA S-adenosylmethionine:tRNA ribosyltransferase-isomerase OS=Lactobacillus brevis (strain ATCC 367 / JCM 1170) OX=387344 GN=queA PE=3 SV=1
MAYTLDDFDYDLPHELIAQTPIKQRDTSRLLVLDHQANTLEDKHFYDILDELHAGDAVVMNNSRVMPARLYGIKPETGGHVEVLLLHNVEGDVWETLMKPAKRLRVGTTVTFGDGQLTATVTEEREDGIRLIEFHYDGIFMEILEQLGETPLPPYIKEKLDDPDRYQTVYAKENGSAAAPTAGLHWTQELLDQVAAKGVKLVYITLHVGLGTFRPVEEANIEDHKMHSEFYRLDEAAAATLNEVRANGGRIIATGTTSIRTLETIGTKFKGEIKPDSGWTDIFIKPGYQWQVVNAFITNFHLPKSTLVMLVAAFTGRDQILNAYHHAIEEKYRFFSFGDAMFIK

SEQ ID NO: 67851 - protein, 344 aa, Lactobacillus brevis
  REGION 1..344: note = tr|U2QXS6|U2QXS6_LACBR S-adenosylmethionine:tRNA ribosyltransferase-isomerase OS=Lactobacillus brevis ATCC 14869 = DSM 20054 OX=649758 GN=queA PE=3 SV=1
MAYTLDDFDYDLPHELIAQTPIKQRDTSRLLVLDHQANTLEDKHFYDILDELHAGDAVVMNNSRVMPARLYGIKPETGGHVEVLLLHNVEGDVWETLMKPAKRLRVGTTVTFGDGQLTATVTEEREDGIRLIEFHYDGIFMEILEQLGETPLPPYIKEKLDDPDRYQTVYAKENGSAAAPTAGLHWTQELLDQVAAKGVKLVYITLHVGLGTFRPVEEANIEDHKMHSEFYRLDEAAASTLNEVRANGGRIIATGTTSIRTLETIGTKFKGEIKPDSGWTDIFIKPGYQWQVVNAFITNFHLPKSTLVMLVAAFTGRDQILNAYHHAIEEKYRFFSFGDAMFIK

SEQ ID NO: 67852 - protein, 346 aa, Lactobacillus buchneri
  REGION 1..346: note = tr|A0A4R5NN76|A0A4R5NN76_LACBU S-adenosylmethionine:tRNA ribosyltransferase-isomerase; OS = Lactobacillus buchneri DSM 20057 OX=1423728 GN=queA; PE = 3 SV=1
MKTNYTLEDFDYDLPHELIAQTPIKDRDESRLLVLDKESGEMQDRHFYNIIDYLNPGDALVMNDSKVMPARIYGVKADTGGHMEVLLLHNIEGDRWETLMKPAKKAKVGTVINFGDGQLKAVVTKELDHGGREIEFQYDGIFIEILERLGETPLPPYIKEKLDDPDRYQTVYAKEMGSAAAPTAGLHWTKDLLKKVEDKGVHLVYLTLHVGLGTFRPVDEENIEDHKMHSEFYRLSDQAAATLNAVRDNSGKIVATGTTSIRTLETVGTKFDGQIRPDSGWTDIFIKPGYQWRVVDSFITNFHLPKSTLVMLVASFTGRENILNAYQHAIDEKYRFFSFGDAMYIH

SEQ ID NO: 67853 - protein, 346 aa, Lactobacillus buchneri; identical to SEQ ID NO: 67852
  REGION 1..346: note = tr|A0A4V5LJ99|A0A4V5LJ99_LACBU S-adenosylmethionine:tRNA ribosyltransferase-isomerase; OS = Lactobacillus buchneri OX=1581 GN=queA PE=3 SV=1

SEQ ID NO: 67854 - protein, 350 aa, Lactobacillus cacaonum
  REGION 1..350: note = tr|A0A0R2CPD8|A0A0R2CPD8_9LACO S-adenosylmethionine:tRNA ribosyltransferase-isomerase; OS = Lactobacillus cacaonum DSM 21116 OX=1423729 GN=queA; PE = 3 SV=1
MAVLSEKHLTTEDFDYNLPEELIAQTPLKERDHSRMLILDSKTGDYQDDIFYNVIDQLNPGDALVMNDSRVMPARIYGTKTDTEGHLEVLLLNNTDGDNWETLVKPAKRAKVGTKINFGDGKLSAIVTKELDHGGRMIKFEYDGIFMEILEKLGEMPLPPYIKEKLDDPEMYQTVYSREIGSAAAPTAGLHFTKELLQKIEEKGVHLVYLTLHVGLGTFRPVSVDNIEDHKMHSEFYRLNEEAAKVLNDVKKNGGKIVATGTTSIRTLETIGSKFNGEIKPDSGWTDIFIKPGYEWKVVQAFITNFHLPKSTLVMLVSAFTGRENILNAYKHAVDEKYRFFSFGDAMFIK

SEQ ID NO: 67855 - protein, 344 aa, Lactobacillus camelliae
  REGION 1..344: note = tr|A0A0R2F6H5|A0A0R2F6H5_9LACO S-adenosylmethionine:tRNA ribosyltransferase-isomerase; OS = Lactobacillus camelliae DSM 22697 = JCM 13995; OX = 1423730 GN=queA PE=3 SV=1
MLTTEDFDYDLPHELIAQTPLKKRDASRLLVLNAETGAYEDKHFYDILDYLNPGDAVVMNDTKVMPARLYGVKKETGAHMEVLLLHNTEGDQWETLMKPAKKAPVGTVIDFGDGLLQATVKEELDHGGRIIEFHYDGIFMEILDKLGETPLPPYIKAKLDDPDMYQTVYAKEMGSAAAPTAGLHWTPELLQKVQDKGIKLVYLTLHVGLGTFRPVSEDNIEDHKMHSEFYRFSQEAADTLNEVKQNGGRIIATGTTSIRTLETIGTKFHGAIKPSSGWTDIFIKPGYQWQLVDAFITNFHLPKSTLVMLVAAFTGRENILNAYQHAIQEKYRFFSFGDAMYIHK

SEQ ID NO: 67856 - protein, 350 aa, Lactobacillus capillatus
  REGION 1..350: note = tr|A0A0R1MDD4|A0A0R1MDD4_9LACO S-adenosylmethionine:tRNA ribosyltransferase-isomerase; OS = Lactobacillus capillatus DSM 19910 OX=1423731 GN=queA; PE = 3 SV=1
MKVLAEEHLTTEDFDYDLPQNLIAQTPLKERDHSRMLILDSKTGAYKDDIFYNVIDQLNAGDALVMNDSRVMPARIYGVKPETGGHIEVLLLNNTQGDNWETLVKPAKRAKVGTRIVFGDGKLSAVITKELEHGGRMIRFEYDGIFMEILDQLGEMPLPPYIKEKLDDPEMYQTVYSREVGSAAAPTAGLHFTKELLQRIADKGVRLVYLTLHVGLGTFRPVSVENIEDHKMHSEFYRLSEESAKVLNDVRANGGKIVATGTTSIRTLETIGTKFNGEIRADSGWTDIFIKPGYEWKVVQAFITNFHLPKSTLVMLVSAFTGRTNILNAYKHAVEEKYRFFSFGDAMFIK

SEQ ID NO: 67857 - protein, 357 aa, Lactobacillus casei
  REGION 1..357: note = tr|K6R432|K6R432_LACCA S-adenosylmethionine:tRNA ribosyltransferase-isomerase OS=Lactobacillus casei 21/1; OX = 1051651 GN=queA PE=3 SV=1
MVQENKRYHKVEDKHYQLSDFDYDLPHELIAQTPLKERDASRLLVLNSETGEMQDKHFYDILDYFKPGDALVMNDTRVMPARLYGVKPETGAHMEVLLLNNTSGDDWETLMKPARKAPVGTVIDFGDGLLKATVTKELEHGGRMIHFDYDGIFMEILDKLGETPLPPYIKEKLEDPEMYQTVYSKELGSAAAPTAGLHWTKDLLKKVQEKGVKLVYLTLHVGLGTFRPVVEENIEAHKMHSEFYRLTPEAAATLNDVRDNGGRIIATGTTSIRTLEAIGTKFDGAIKADSGWTDIFIKPGYQWKVVDAFITNFHLPKSTLVMLVAAFTGRDTILNAYKHAIDEKYRFFSFGDAMFIY

SEQ ID NO: 67858 - protein, 357 aa, Lactobacillus casei; identical to SEQ ID NO: 67857
  REGION 1..357: note = tr|A0A510WJ70|A0A510WJ70_LACCA S-adenosylmethionine:tRNA ribosyltransferase-isomerase; OS = Lactobacillus casei OX=1582 GN=queA PE=3 SV=1

SEQ ID NO: 67859 - protein, 347 aa, Lactobacillus ceti
  REGION 1..347: note = tr|A0A0R2KSE7|A0A0R2KSE7_9LACO S-adenosylmethionine:tRNA ribosyltransferase-isomerase; OS = Lactobacillus ceti DSM 22408 OX=1122146 GN=queA PE=3; SV = 1
MTEKHLTTEDFDYELPERLIAQTPLEERDASRMLILDSKTGEYQDDYFYNVIDQLNPGDALVMNNSRVLPARIYGVKPDTGGHLEVLLLNNIQGDKWETLVKPAKRAKVGTKISFGDGQLTAVVTEELEHGGRIIEFQYDGIFMEILEGLGEMPLPPYIKEKLDNPEMYQTVYSKEIGSAAAPTAGLHFTEELLEKIEQKGVKLVYLTLHVGLGTFRPVSVDNLEDHKMHSEFYALSEQAAQTLNEVRQNGGRIIATGTTSIRTLETIGSKFNGEIKADSGWTEIFIKPGYQWQVVQGFITNFHLPKSTLVMLVSAFTGRENILNAYRHAVEENYRFFSFGDAMFIK

SEQ ID NO: 67860 - protein, 361 aa, unidentified
  source 1..361: note = Lactobacillus chiayiensis
  REGION 1..361: note = tr|A0A4Q1TZ63|A0A4Q1TZ63_9LACO S-adenosylmethionine:tRNA ribosyltransferase-isomerase; OS = Lactobacillus chiayiensis OX=2100821 GN=queA PE=3 SV=1
MEANKVQDKKRYRQVENKNYQLSDFDYDLPHELIAQTPLKERDASRLLVLNADTGAMQDRHFYDILDYFKPGDALVMNDTRVMPARLYGVKPETGAHMEVLLLNNTSGDDWETLMKPARKAPVGTVIDFGDGLLKATVTKELEHGGRMIHFDYDGIFMEILDKLGETPLPPYIKEKLDDPEMYQTVYSKELGSAAAPTAGLHWTKELLKKVQDKGVKLVYLTLHVGLGTFRPVVEENIEAHKMHSEFYRLTPEAAATLNEVRDSGGRIIATGTTSIRTLEAIGTKFDGEIKPDSGWTDIFIKPGYQWKVVDAFITNFHLPKSTLVMLVAAFTGRDTILNAYKHAIKEEYRFFSFGDAMFIY

SEQ ID NO: 67861 - protein, 344 aa, Lactobacillus collinoides
  REGION 1..344: note = tr|A0A0R2BDW3|A0A0R2BDW3_LACCL S-adenosylmethionine:tRNA ribosyltransferase-isomerase; OS = Lactobacillus collinoides DSM 20515 = JCM 1123; OX = 1423733 GN=queA PE=3 SV=1
MTLTTDDFDYDLPHELIAQTPIEKRDASRLLVMDHTTGALEDKHFYDIIDQLHAGDAVVMNDSRVMPARIYGVKPETGGHVEVLLLHNTKGDEWETLMKPAKRIKVGTTVTFGDGQLTATVTKELEHGGRMIEFHYDGIFMEVLEKLGETPLPPYIKEKLDDLERYQTVYARESGSAAAPTAGLHWTKALLQKVQDKGVKLVYLTLHVGLGTFRPVDEKNIDDHKMHSEFYRLSEESAKTLNEVRANGGRIVATGTTSIRTLETIGSKFNGEIKADSGWTDIFIFPGYQWKVVDAFITNFHLPKSTLVMLVAAFTGRDNILNAYQHAIEEKYRFFSFGDAMFIK

SEQ ID NO: 67862 - protein, 343 aa, Lactobacillus composti
  REGION 1..343: note = tr|X0PEB1|X0PEB1_9LACO S-adenosylmethionine:tRNA ribosyltransferase-isomerase OS=Lactobacillus composti DSM 18527 = JCM 14202 OX=1423734 GN=queA PE=3 SV=1
MLTTEDFDYELPHELIAQTPLKERDASRMLVLDHKTGKLEDKHFYDILAELNPGDAVVMNDTRVMPARLYGQKPDTGGHMEVLLLHNTEGDNWETLMKPARHAKVGTVIEFGNGLLKATVTKELEHGGRMVEFHYDGIFMEILDQLGETPLPPYIKAKLDDPEMYQTVYAKESGSAAAPTAGLHWTKELLQKVQDKGVKLVYLTLHVGLGTFRPVSEDNIEDHKMHSEFYRLSEAAAATLNDVRAHGGRIIATGTTSIRTLETIGTKFDGAIQADSGWTDIFIKPGYKWRVVDAFITNFHLPKSTLVMLVAAFTGREMILNAYQHAIDERYRFFSFGDAMFIK

SEQ ID NO: 67863 - protein, 343 aa, Lactobacillus concavus
  REGION 1..343: note = tr|A0A0R1WHU5|A0A0R1WHU5_9LACO S-adenosylmethionine:tRNA ribosyltransferase-isomerase; OS = Lactobacillus concavus DSM 17758 OX=1423735 GN=queA; PE = 3 SV=1
MLTTEDFDYDLPQELIAQTPIEKRDSSRLLVLDHQTGEMQDKHFYDIIDELHAGDAVVMNNSRVMPARLYGVKADTGGHEEVLLLRNTVGDEWETLMKPARHAHVGTKVVFGDGELTATVTRILEHGGRMIKFDYDGIFLEILERLGETPLPPYIKEKLDDPERYQTVYSKELGSAAAPTAGLHWTKELLEKVEAKGVKLVYLTLHVGLGTFRPVSEDNIEDHKMHSEFYQFSQEAADTLNGVHRNGGRIVATGTTSIRTMETVATKFDGELQADSGWTDIFIKPGYQWKAVDAFITNFHLPKSTLVMLVASFTGRETILNAYEHAIKERYRFFSFGDAMFIK

SEQ ID NO: 67864 - protein, 342 aa, Lactobacillus coryniformis
  REGION 1..342: note = tr|J3JBQ4|J3JBQ4_9LACO S-adenosylmethionine:tRNA ribosyltransferase-isomerase OS=Lactobacillus coryniformis subsp. coryniformis CECT 5711 OX=1185325 GN=queA PE=3 SV= 1
MSLSDFDYDLPHELIAQTPLKERDASRMLILDHKTGALQDKHFYDILDELHAGDAVVMNNTRVMPARLYGVKPDTGGHEEVLLLNNTEDDKWETLMKPARRAKVGTEVVFGDGQLKATVTEELEHGGRMIEFHYDGIFMEILEQLGETPLPPYIKEKLDDPEMYQTVYAKENGSAAAPTAGLHWTKELLAKAEAKGVKLIYLTLHVGLGTFRPVDEDDIDDHKMHSEFYRLTPEAADELNEVRKNGGRIIATGTTSIRTLETIGTKFNGEIKPDSGWTDIFIKPGYQWQVVDAFITNFHLPKSTLVMLVAAFTGRDNILNAYQHAIDERYRFFSFGDAMFIK

SEQ ID NO: 67865 - protein, 344 aa, Lactobacillus coryniformis
  REGION 1..344: note = tr|A0A2D1KQ15|A0A2D1KQ15_9LACO S-adenosylmethionine:tRNA ribosyltransferase-isomerase; OS = Lactobacillus coryniformis subsp. torquens DSM 20004 = KCTC 3535 OX=1423822GN=queA PE=3 SV=1
MGLSLSDFDYDLPHELIAQIPLKERDASRMLILDHKTGALQDKHFYDILDELHAGDAVVMNNTRVMPARLYGVKPDTGGHEEVLLLNNTEDDKWETLMKPARRAKVGTEVVFGDGQLKATVTEELEHGGRMIEFHYDGIFMEILEQLGETPLPPYIKEKLDDPEMYQTVYAKENGSAAAPTAGLHWTKELLAKAEAKGVKLIYLTLHVGLGTFRPVDEDDIDDHKMHSEFYRLTPEAADELNEVRKNGGRIIATGTTSIRTLETIGTKFNGEIKPDSGWTDIFIKPGYQWQVVDAFITNFHLPKSTLVMLVAAFTGRDNILNAYQHAIDERYRFFSFGDAMFIK

SEQ ID NO: 67866 - protein, 345 aa, Lactobacillus crustorum
  REGION 1..345: note = tr|A0A512GTN8|A0A512GTN8_9LACO S-adenosylmethionine:tRNA ribosyltransferase-isomerase; OS = Lactobacillus crustorum OX=392416 GN=queA PE=3 SV=1
MSLSTEDFDYDLPEELIAQTPIKNRDQSRLLVLDHETGEYQDKHFYDILDYLNPGDALVMNNSRVLPARLYGTKEDTDGHEEVLLLNNIEGDKWEVLMKPARRAKVGTKVQFGEDGQLEAEVLEDLEHGGKIIEFHYQGIFMEILEQLGEMPLPPYIKEKLDDPDRYQTVYAKENGSAAAPTAGLHWTKELLKKVEAKGVKLVYITLHVGLGTFRPVTETDVDKHVMHSEFYRLDEASAKTLNEVRQNGGKIVATGTTSIRTLETIGTKFNGEIKADSGWTDIFIKPGYEWKVVDEFITNFHLPKSTLVMLVSAFTGRENILNAYRHAVEEKYRFFSFGDAMFIK

SEQ ID NO: 67867 - protein, 345 aa, Lactobacillus crustorum
  REGION 1..345: note = tr|A0A1L7ICE4|A0A1L7ICE4_9LACO S-adenosylmethionine:tRNA ribosyltransferase-isomerase; OS = Lactobacillus crustorum OX=392416 GN=queA PE=3 SV=1
MSLSTEDFDYDLPEELIAQTPIKNRDQSRLLVLDHETGEYQDKHFYDILDYLNPGDALVMNNSRVLPARLYGTKEDTDGHEEVLLLNNIEGDKWEVLMKPARRAKVGTKVQFGEDGQLEAEVLEDLEHGGKIIEFHYQGIFMEILEQLGEMPLPPYIKEKLDDPDRYQTVYAKENGSAAAPTAGLHWSKELLKKVEAKGVKLVYITLHVGLGTFRPVTETDVDKHVMHSEFYRLDEASAKTLNEVRQNGGKIVATGTTSIRTLETIGTKFNGEIKADSGWTDIFIKPGYEWKVVDEFITNFHLPKSTLVMLVSAFTGRENILNAYRHAVEEKYRFFSFGDAMFIK

SEQ ID NO: 67868 - protein, 346 aa, unidentified
  source 1..346: note = Lactobacillus curieae
  REGION 1..346: note = tr|A0A401FMX6|A0A401FMX6_9LACO S-adenosylmethionine:tRNA ribosyltransferase-isomerase; OS = Lactobacillus curieae OX=1138822 GN=queA PE=3 SV=1
MNDQYTLEDFNYDLPQELIAQTPIKDRDTSRLLVLDRQNGETKDRHFYDILDYLNPGDALVMNDSKVMPARIYGEKADTGGHVEVLLLHNIEGDHWETLMKPARKFKVGSTVTFGDGKLTAVVTKELDHGGREIEFQYDGIFIEILNKLGETPLPPYIKEKLDDPDRYQTVYAKEMGSAAAPTAGLHWTKDLLRKAEAKGVKLVYLTLHVGLGTFRPVDEDNIEDHKMHSEFYRLSDEAAATLNDVRASGGKIIATGTTSIRTLETVGSKFDGEIRADSGWTDIFIKPGYEWKVVDSFITNFHLPKSTLVMLVASFTGRDNILNAYHHAIEEKYRFFSFGDAMYIH

SEQ ID NO: 67869 - protein, 346 aa, unidentified
  source 1..346: note = Lactobacillus curieae
  REGION 1..346: note = tr|A0A1S6QKT4|A0A1S6QKT4_9LACO S-adenosylmethionine:tRNA ribosyltransferase-isomerase; OS = Lactobacillus curieae OX=1138822 GN=queA PE=3 SV=1
METHYTLDDFDYDLPHELIAQTPIKNRDTSRLLVLNHESGETQDRHFYDILDYLNPGDALVMNDSKVMPARIYGEKESTGGHLEVLLLHNIEGDKWETLMKPAKKAKVGSVITFGDGKLKAVVTKELEHGGREIEFKYDGIFIEILEELGETPLPPYIKEKLDDPDRYQTVYAKEMGSAAAPTAGLHWTKELLQKVADKGVKLVYLTLHVGLGTFRPVDEENIEDHKMHSEFYRLSEEAARTLNKVRDSGGKIVATGTTSIRTLETVGSKFNGEIHPDSGWTDIFIKPGYEWKVVDSFITNFHLPKSTLVMLVAAFTGRDNILNAYEHAIDEKYRFFSFGDAMYIY

SEQ ID NO: 67870 - protein, 343 aa, Lactobacillus curvatus
  REGION 1..343: note = tr|A0A0B2XNF5|A0A0B2XNF5_LACCU S-adenosylmethionine:tRNA ribosyltransferase-isomerase; OS = Lactobacillus curvatus OX=28038 GN=queA PE=3 SV=1
MVSTEDFDYNLPEELIAQTPMIERAASRLLVMDHKTGALEDKVFYDIIDELNPGDAVVMNNTRVLPARLYGVKPDTGGHEEVLLLNNTHDDEWEVLMKPARRAKVGTEVVFGDGQLKAVVTKELEHGGRMIEFKYDGIFMQILEALGEMPLPPYIKEKLDDPEMYQTVYAKEPGSAAAPTAGFHWTEELLQKVQDKGIKLVYLTLHVGLGTFRPVSEDNVEDHKMHSEFYRLTEEAAATLNEVKQNGGRIVATGTTSIRTLETIATKFDGELKADSGWTSIFIKPGYQWKAVDAFITNFHLPKSTLVMLVASFTGRENILNAYQHAVDERYRFFSFGDAMFVK

SEQ ID NO: 67871 - protein, 343 aa, Lactobacillus dextrinicus
  REGION 1..343: note = tr|A0A0R2BGZ3|A0A0R2BGZ3_9LACO S-adenosylmethionine:tRNA ribosyltransferase-isomerase; OS = Lactobacillus dextrinicus DSM 20335 OX=1423738 GN=queA; PE = 3 SV=1
MLTTEDFDYDLPQELIAQTPIAKRDNSRMLVLDHQTGAMEDKHFYDIIDQLNPGDAVVMNNSRVMPARIYGVKADTGGHEEVLLLRNTEGDEWETLMKPARHAHVGTKVVFGNGELTATVTKELEHGGRMIKFDYDGIFLEILEKLGEMPLPPYIKEKLDDPERYQTVYSKELGSAAAPTAGLHWTKKLLQKVQDKGVKLVYLTLHVGLGTFRPVTEDNIEDHKMHSEFYQFSQEAADTLNEVRKNGGRIIATGTTSIRTLETVATKFNGELKEDSGWTDIFIKPGYEWKAVNAFITNFHLPKSTLVMLVASFTGRDNILNAYQHAIDEKYRFFSFGDAMFIK

SEQ ID NO: 67872 - protein, 343 aa, Lactobacillus dextrinicus; identical to SEQ ID NO: 67871
  REGION 1..343: note = tr|A0A5J6USZ3|A0A5J6USZ3_9LACO tRNA preQ1(34) S-adenosylmethionine ribosyltransferase-isomerase QueA; OS = Lactobacillus dextrinicus OX=51664 GN=queA PE=4 SV=1

SEQ ID NO: 67873 - protein, 346 aa, Lactobacillus diolivorans
  REGION 1..346: note = tr|A0A0R1SIF1|A0A0R1SIF1_9LACO S-adenosylmethionine:tRNA ribosyltransferase-isomerase; OS = Lactobacillus diolivorans DSM 14421 OX=1423739 GN=queA; PE = 3 SV=1
MKTNYTLEDFDYDLPHELIAQTPIKDRDESRLLVLDRKSGDMQDRRFYNIIDYLNPGDALVMNDSKVMPARIYGVKADTGANLEVLLLHNIEGDRWETLMKPAKRAKVGTVIDFGEGQLKAVVTKELDHGGREIEFKYKGIFIEILERLGETPLPPYIKEKLDDPDRYQTVYAKEMGSAAAPTAGLHWTKELLQKVADKGVHLVYLTLHVGLGTFRPVDEENIEDHKMHSEFYRLSQDAAQTLNQVRDSGGKIVATGTTSIRTLETVGTKFDGAIHADSGWTDIFIKPGYDWKIVDSFITNFHLPKSTLVMLVASFTGRENILNAYQHAIEEKYRFFSFGDAMYIH

SEQ ID NO: 67874 - protein, 344 aa, Lactobacillus fabifermentans
  REGION 1..344: note = tr|W6T6N8|W6T6N8_9LACO S-adenosylmethionine:tRNA ribosyltransferase-isomerase OS=Lactobacillus fabifermentans T30PCM01 OX=1400520 GN=queA PE=3 SV=1
MSLTLEDFDYDLPHELIAQTPIKQRDTSRLLELDRQTGEMQDKHFYDIIDQLNPGDAVVMNNSRVMPARLYGVKPETGGHCEVLLLHNTEGDQWETLMKPAKRLKVGTVVSFGDGKLTATVTEEKEDGIRMIEFHYDGIFMEILEALGETPLPPYIKEKLDDPDRYQTVYAKENGSAAAPTAGLHWTKDLLQKVQDKGVKLVYLTLHVGLGTFRPVEEDNIEDHKMHSEFYRLDEDAAKTLNEVRANGGRIIATGTTSIRTLETIGTKFDGEIKPDSGWTDIFIKPGYQWKVVDAFITNFHLPKSTLVMLVAAFTGRDMILNAYQHAIDEKYRFFSFGDAMFIH

SEQ ID NO: 67875 - protein, 344 aa, Lactobacillus fabifermentans; identical to SEQ ID NO: 67874
  REGION 1..344: note = tr|A0A0R2NR63|A0A0R2NR63_9LACO S-adenosylmethionine:tRNA ribosyltransferase-isomerase; OS = Lactobacillus fabifermentans DSM 21115 OX=1413187; GN = queA PE=3 SV=1

SEQ ID NO: 67876 - protein, 344 aa, Lactobacillus farciminis
  REGION 1..344: note = tr|A0A4V3A322|A0A4V3A322_9LACO S-adenosylmethionine:tRNA ribosyltransferase-isomerase; OS = Lactobacillus farciminis OX=1612 GN=queA PE=3 SV=1
MSLSTEDFDYDLPEELIAQTPIKDRDHSRLLVLDHETGEYQDKHFYDILDYLNPGDALVMNNSRVLPARLYGTKEDTDGHEEVLLLNNIEGDKWEVLMKPARRAKVGTKVQFGDGQLEAEVLENLEHGGKIIEFHYQGIFMEILEQLGEMPLPPYIKEKLDDPDRYQTVYAKENGSAAAPTAGLHWTKDLLKQVEAKGVKLVYVTLHVGLGTFRPVTESDVDKHVMHSEFYRLDEDSAKTLNEVKKNGGKIVATGTTSIRTLETIGTKFNGEIKADSGWTDIFIKPGYEWKVVDEFITNFHLPKSTLVMLVAAFTGRENILNAYRHAVEEKYRFFSFGDAMFIK

SEQ ID NO: 67877 - protein, 344 aa, Lactobacillus farciminis
  REGION 1..344: note = tr|A0A0H4LCZ2|A0A0H4LCZ2_9LACO S-adenosylmethionine:tRNA ribosyltransferase-isomerase; OS = Lactobacillus farciminis OX=1612 GN=queA PE=3 SV=1
MSLSTEDFDYDLPEELIAQTPIKDRDHSRLLVLDHKTGEYQDKHFYDILDYLNPGDALVMNNSRVLPARLYGTKEDTDGHEEVLLLNNIEGDKWEVLMKPARRAKVGTKVQFGDGQLEAEVLEDLEHGGKIIEFHYQGIFMEILEQLGEMPLPPYIKEKLDDPDRYQTVYAKENGSAAAPTAGLHWTKDLLKKVEEKGVKLVYVTLHVGLGTFRPVTETDVDKHVMHSEFYRLDEDSAKTLNEVRKNGGKIVATGTTSIRTLETIGTKFNGEIKADSGWTDIFIKPGYEWKVVDEFITNFHLPKSTLVMLVAAFTGRENILNAYRHAVEEKYRFFSFGDAMFIK

SEQ ID NO: 67878 - protein, 352 aa, Lactobacillus farraginis
  REGION 1..352: note = tr|X0P909|X0P909_9LACO S-adenosylmethionine:tRNA ribosyltransferase-isomerase OS=Lactobacillus farraginis DSM 18382 = JCM 14108 OX=1423743 GN=queA PE=3 SV=1
MKGTGTLKTNYTLEDFDYDLPHELIAQTPIKDRDESRLLVLDKKTGEMQDRRFYNIIDYLNPGDALVMNDSKVMPARIYGVKKETGAHIEVLLLHNIEGDRWETLMKPAKRAKVGTVIDFGEGQLQAVVTKELDHGGREIEFKYDGIFIEILERLGETPLPPYIKEKLDDPNRYQTVYAKEMGSAAAPTAGLHWTKALLQKVADKGVHLVYLTLHVGLGTFRPVEEDNIEEHKMHSEFYRLSQEAAQTLNDVRKNGGKIVATGTTSIRTLETVGTKFNGEIHPDSGWTDIFIKPGYHWQVVDSFITNFHLPKSTLVMLVASFTGRENILNAYQHAIQEKYRFFSFGDAMYIH

SEQ ID NO: 67879 - protein, 343 aa, Lactobacillus floricola
  REGION 1..343: note = tr|A0A0R2DVF6|A0A0R2DVF6_9LACO S-adenosylmethionine:tRNA ribosyltransferase-isomerase; OS = Lactobacillus floricola DSM 23037 = JCM 16512; OX = 1423744 GN=queA PE=3 SV=1
MQSIDEFDYELPEELIAQTPLDQRDHSRLLTLNHQTGELNDRHFYDLIDELQAGDVLVMNNSRVLPARLYGQKAKTHGHVELLLLAQEQGDNWEVLIKPARKIHVGDELEFGDGQLTAVVNKRREEGKFQIEFSYEGIFLEVLEQLGQMPLPPYIKEHLEDNDRYQTVYAKENGSAAAPTAGLHFTPDLLARIEQKGIQLAYVTLHVGLGTFRPVVFSDIDEHKMHREFYQLDDDNARLIGQAKVEGRRVIAVGTTTIRTLETIASRFDGEVKADSGWTDIFIKPGYEFKAVDAFVTNFHLPKSTLVMLVASFTGRDNILNAYHHAVIERYRFFSFGDAMFIY

SEQ ID NO: 67880 - protein, 345 aa, unidentified; identical to SEQ ID NO: 67866
  source 1..345: note = Lactobacillus formosensis
  REGION 1..345: note = tr|A0A2P4R9G7|A0A2P4R9G7_9LACO S-adenosylmethionine:tRNA ribosyltransferase-isomerase; OS = Lactobacillus formosensis OX=1617889 GN=queA PE=3 SV=1

SEQ ID NO: 67881 - protein, 343 aa, Lactobacillus fuchuensis
  REGION 1..343: note = tr|A0A0R1RPX7|A0A0R1RPX7_9LACO S-adenosylmethionine:tRNA ribosyltransferase-isomerase; OS = Lactobacillus fuchuensis DSM 14340 = JCM 11249; OX = 1423747 GN=queA PE=3 SV=1
MVSTEDFDYVLPEELIAQTPMTERAASRMLVMDSKTGALEDKVFYDVIDELNPGDAVVMNNTRVLPARLYGVKPDTGGHEEVLLLNNTHDDEWEVLMKPAKRAKVGTEVVFGDGQLKAVVTKELEHGGRMIEFQYDGIFMQILEELGEMPLPPYIKEKLDDPEMYQTVYAKEPGSAAAPTAGFHWTEELLQKVQDKGIKLVYLTLHVGLGTFRPVSEDNVEDHKMHSEFYRLTEEAAATLNEVHQNGGRVIATGTTSIRTLETIATKFNGELKADSGWTEIFIKPGYQWKVVDGFITNFHLPKSTLVMLVASFTGREHILNAYKHAVDEKYRFFSFGDAMFIK

SEQ ID NO: 67882 - protein, 343 aa, Lactobacillus fuchuensis; identical to SEQ ID NO: 67881
  REGION 1..343: note = tr|A0A2N9DTR0|A0A2N9DTR0_9LACO S-adenosylmethionine:tRNA ribosyltransferase-isomerase; OS = Lactobacillus fuchuensis OX=164393 GN=queA PE=3 SV=1

SEQ ID NO: 67883 - protein, 344 aa, Lactobacillus futsaii
  REGION 1..344: note = tr|A0A5B7T3W8|A0A5B7T3W8_9LACO S-adenosylmethionine:tRNA ribosyltransferase-isomerase; OS = Lactobacillus futsaii OX=938155 GN=queA PE=3 SV=1
MSLSTEDFDYDLPEELIAQTPIKDRDHSRLLVLDHETGEYQDKHFYDILDYLNPGDALVMNNSRVLPARLYGTKEDTDGHEEVLLLNNIEGDKWEVLMKPARRAKVGTKVQFGDGQLEAEVLEDLEHGGKIIEFRYQGIFMEILEQLGEMPLPPYIKEKLDDPDRYQTVYAKENGSAAAPTAGLHWTKDLLKQVEAKGVKLVYVTLHVGLGTFRPVTESDVDKHVMHSEFYRLDEDSAKTLNEVKKNGGKIVATGTTSIRTLETIGTKFNGEIKADSGWTDIFIKPGYEWKVVDEFITNFHLPKSTLVMLVAAFTGRENILNAYRHAVEEKYRFFSFGDAMFIK

SEQ ID NO: 67884 - protein, 350 aa, Lactobacillus ghanensis
  REGION 1..350: note = tr|A0A0R1VKZ6|A0A0R1VKZ6_9LACO S-adenosylmethionine:tRNA ribosyltransferase-isomerase; OS = Lactobacillus ghanensis DSM 18630 OX=1423750 GN=queA; PE = 3 SV=1
MKILSEEHLTTEDFDYDLPQELIAQTPLKERDHSRMLILDSKTGEYQDDVFYHVIDQLNPGDALVMNDSRVMPARLYGVKPDTGGHLEVLLLNNTEGDDWETLIKPARRAKVGTKIVFGDGKLSAVVTKELEHGGRMIHFEYQGIFMEILDRLGEMPLPPYIKQKLDDPEMYQTVYSREIGSAAAPTAGLHFTKELLQKIADKGVHLVYLTLHVGLGTFRPVSVTNIKEHHMHSEFYRLSEDAAQVLNDVRQNGGKIVATGTTSIRTLETIGTKFNGEIRADSGWTDIFIYPGYQWKVVQAFITNFHLPKSTLVMLVASFTGRDNILNAYRHAVKEKYRFFSFGDAMFIK

SEQ ID NO: 67885 - protein, 344 aa, unidentified
  source 1..344: note = Lactobacillus ginsenosidimutans
  REGION 1..344: note = tr|A0A0H4QG70|A0A0H4QG70_9LACO S-adenosylmethionine:tRNA ribosyltransferase-isomerase; OS = Lactobacillus ginsenosidimutans OX=1007676 GN=queA PE=3; SV = 1
MTLTTEDFDYNLPEELIAQTPIKDRDHSRLLVLDHESGKYEDKHFYDILDYLNPGDALVMNNSRVLPARLYGTKEGSEGHEEVLLLNNTEGDKWEVLMKPAKRAHPGTVVTFGDGQLKATVLEDLEHGGKIIEFHYDGIFLEILEALGEMPLPPYIKEKLDDPDRYQTVYAKENGSAAAPTAGLHWTKDLLEKVQEKGVKLVYLTLHVGLGTFRPVTESDISKHVMHSEFYRLDEDSAKTLNEVRKNGGKIVATGTTSIRTLETIGTKFNGEIKPDSGWTDIFIKPGYQWKVVDEFITNFHLPKSTLVMLVAAFTGRENILNAYQHAIDEKYRFFSFGDAMFIK

SEQ ID NO: 67886 - protein, 343 aa, Lactobacillus graminis
  REGION 1..343: note = tr|A0A0R1X3D9|A0A0R1X3D9_9LACO S-adenosylmethionine:tRNA ribosyltransferase-isomerase; OS = Lactobacillus graminis DSM 20719 OX=1423752 GN=queA; PE = 3 SV=1
MVSTEDFDYNLPEELIAQTPMIERAASRLLVMDHKTGALEDQVFYDIIDELNPGDAVVMNNTRVLPARLYGVKPDTGGHEEVLLLNNTHDDEWEVLMKPARRAKVGTEVVFGDGQLKAVVTKELEHGGRMIEFKYDGIFMQILETLGEMPLPPYIKEKLDDPEMYQTVYAKEPGSAAAPTAGFHWTEELLQKVQDKGVKLVYLTLHVGLGTFRPVSEDNVEDHKMHSEFYRLTEDAAATLNEVRQNGGRIIATGTTSIRTLETIATKFNGEIKADSGWTDIFIKPGYEWKVVDAFITNFHLPKSTLVMLVASFTGRENILHAYQHAVDERYRFFSFGDAMFVK

SEQ ID NO: 67887 - protein, 343 aa, Lactobacillus graminis; identical to SEQ ID NO: 67886
  REGION 1..343: note = tr|A0A5J6Z270|A0A5J6Z270_9LACO tRNA preQ1(34) S-adenosylmethionine ribosyltransferase-isomerase QueA; OS = Lactobacillus graminis OX=60519 GN=queA PE=4 SV=1

SEQ ID NO: 67888 - protein, 357 aa, Lactobacillus harbinensis
  REGION 1..357: note = tr|A0A0R1XD50|A0A0R1XD50_9LACO S-adenosylmethionine:tRNA ribosyltransferase-isomerase; OS = Lactobacillus harbinensis DSM 16991 OX=1122147 GN=queA; PE = 3 SV=1
MLTTEDFDYDLPQELIAQTPLPERDASRMLVLDTATGETTDKHFYDILDYVHPGDAVVMNDTRVMPARLYGIKPETGGHVEVLLLNNTRGDDWEVLMKPAKRIHVGTQIDFGDGLLKATVTEERDEGVRMIRFQYDGIFMEILDKLGETPLPPYIKAKLDDPEMYQTVYAKEIGSAAAPTAGLHWTKELLQKVQDKGVKLVYLTLHIGLGTFRPVLEENVEDHKMHSEFYRLTPEAAQALNDVRANGGRIIATGTTVIRTLESIGTKFNGAIKADSGWTDIFIKPGYQWKIVDAFITNFHLPKSTLVMLVASFTGRHMILNAYQHAVAEKYRFFSFGDAMFIYNSQNPHPQPLKEND

SEQ ID NO: 67889 - protein, 357 aa, Lactobacillus harbinensis; identical to SEQ ID NO: 67888
  REGION 1..357: note = tr|A0A510TTY5|A0A510TTY5_9LACO S-adenosylmethionine:tRNA ribosyltransferase-isomerase; OS = Lactobacillus harbinensis OX=304207 GN=queA PE=3 SV=1

SEQ ID NO: 67890 - protein, 347 aa, Lactobacillus hayakitensis
  REGION 1..347: note = tr|A0A0R1WMV3|A0A0R1WMV3_9LACO S-adenosylmethionine:tRNA ribosyltransferase-isomerase; OS = Lactobacillus hayakitensis DSM 18933 = JCM 14209; OX = 1423755 GN=queA PE=3 SV= 1
MSEEHLTTEDFNYNLPEELIAQTPLEKRDQSRMLVLDSKTGEYCDDYFYNVIDELNPGDALVMNDSRVMPARIYGVKPETGGHVEMLLLNNIKGDQWETLVKPAKRAKVGTKISFGDGALIATVTEELEHGGRIIEFEYDGIFMEILDKLGEMPLPPYIKEKLEDKEMYQTVYSREIGSAAAPTAGLHFTKELLQKIEDKGVKLVYLTLHVGLGTFRPVSEDKIENHKMHSEFYRLSQESADILNEVRKNGGKIVATGTTSIRTLETIGSKFNGEIKADSGWTDIFIKPGYEWKVVQAFITNFHLPKSTLVMLVAAFTGRENILNAYKHAVEEKYRFFSFGDAMFIK

SEQ ID NO: 67891 - protein, 345 aa, unidentified
  source 1..345: note = Lactobacillus heilongjiangensis
  REGION 1..345: note = tr|A0A0K2LB03|A0A0K2LB03_9LACO S-adenosylmethionine:tRNA ribosyltransferase-isomerase; OS = Lactobacillus heilongjiangensis OX=1074467 GN=queA PE=3; SV = 1
MSLSTEDFDYDLPEELIAQTPIKDRDQSRLLVLDHETGEYQDKHFYDILDYLNPGDALVMNNSRVLPARLYGSKEDTDGHEEVLLLNNIEGDKWEVLMKPAKRAKVGTKVQFGEDGQLEAEVLEDLEHGGKIIEFHYQGIFMEILEKLGEMPLPPYIKEKLDDPDRYQTVYAKENGSAAAPTAGLHWTKELLQKVEDKGVKLVYVTLHVGLGTFRPVTETDVDKHVMHSEFYRLDEDSAKTLNDVKKNGGKIVATGTTSIRTLETIGTKFNGEIKADSGWTDIFIKPGYQWKVVDEFITNFHLPKSTLVMLVAAFTGRENILNAYQHAVEEKYRFFSFGDAMFIK

SEQ ID NO: 67892 - protein, 352 aa, Lactobacillus hilgardii
  REGION 1..352: note = tr|C0XLD2|C0XLD2_LACHI S-adenosylmethionine:tRNA ribosyltransferase-isomerase OS=Lactobacillus hilgardii DSM 20176 = ATCC 8290 OX=1423757 GN=queA PE=3 SV=1
MKGIGTLKTTYTLEDFDYKLPHELIAQTPIKDRDESRLLVLNKETGDMQDRRFYNIIDYLNPGDALVMNDSKVMPARIYGVKKDTGAHIEVLLLHNIEGDRWETLMKPAKRAKVGTVIGFGEGQLQAVVTKELDHGGREIEFKYEGIFIEILERLGETPLPPYIKEKLDDPNRYQTVYAKEMGSAAAPTAGLHWTKELLQKVADKGVHLVYLTLHVGLGTFRPVEEDNIEDHKMHSEFYRLSEEASKTLNDVRKNGGKIVATGTTSIRTLETVGTKFNGEIRPDSGWTDIFIKPGYQWQVVDSFITNFHLPKSTLVMLVASFTGRENILNAYQHAISEKYRFFSFGDAMYIH

SEQ ID NO: 67893 - protein, 345 aa, unidentified
  source 1..345: note = Lactobacillus hokkaidonensis
  REGION 1..345: note = tr|A0A0A1GZZ8|A0A0A1GZZ8_9LACO S-adenosylmethionine:tRNA ribosyltransferase-isomerase; OS = Lactobacillus hokkaidonensis JCM 18461 OX=1291742; GN = queA PE=3 SV=1
MSELTVDDFDYELPHELIAQTPIKERDESRLLILDHETGEMQDKHFYDILDQLNPGDAVVMNNSRVMPARIYGVKPETGGHVEVLLLHNTEGDVWETLVKPAKKFKVGVQITFGNGELTATITKELEHGGRMIEFHYDGIFMEVLEKLGEMPLPPYIKEKLDDPDRYQTVYAKENGSAAAPTAGLHWTKELLQKVQDKGVKLVYLTLHVGLGTFRPVDEKRIEDHVMHSEFYQLDEQSAQTLNEVRQHGGRIIATGTTSIRTLETIGSKFNGVLRADSGWTDIFIKPGYEWKVVDAFITNFHLPKSTLVMLVAAFTGRDKILNAYQHAIEEKYRFFSFGDAMFIK

SEQ ID NO: 67894 - protein, 350 aa, Lactobacillus hordei
  REGION 1..350: note = tr|A0A0R1MPZ0|A0A0R1MPZ0_9LACO S-adenosylmethionine:tRNA ribosyltransferase-isomerase; OS = Lactobacillus hordei DSM 19519 OX=1423759 GN=queA PE=3; SV = 1
MAILSEKHLTTEDFDYDLPQELIAQTPLKERDHSRMLILDSKSGEYRDDVFYNVIDQLNPGDALVMNDSRVMPARIYGTKLDTDGHLEVLLLNNTEGDNWETLVKPAKRAKVGTRINFGDGQLSAVVTEELEHGGRMIRFEYDGIFMEILDKLGEMPLPPYIKEKLDDPEMYQTVYSKEIGSAAAPTAGLHFTKELLQKIEDKGVHLVYLTLHVGLGTFRPVSVDNIEDHKMHSEFYRLNEEAAKVLNDVRKNGGKIVATGTTSIRTLETIGSKFDGEIKPDSGWTDIFIKPGYEWKVVQAFITNFHLPKSTLVMLVSAFTGRENILNAYKHAVDEKYRFFSFGDAMFIK

SEQ ID NO: 67895 - protein, 347 aa, Lactobacillus hordei
  REGION 1..347: note = tr|A0A3Q8CAK2|A0A3Q8CAK2_9LACO S-adenosylmethionine:tRNA ribosyltransferase-isomerase; OS = Lactobacillus hordei OX=468911 GN=queA PE=3 SV=1
MSEKHLTTEDFDYDLPQELIAQTPLKERDHSRMLILDSKSGEYRDDVFYNVIDQLNPGDALVMNDSRVMPARIYGTKPDTDGHLEVLLLNNTEGDNWETLVKPAKRAKVGTRINFGDGQLSAVVTEELEHGGRMIRFEYDGIFMEILDKLGEMPLPPYIKEKLDDPEMYQTVYSKEIGSAAAPTAGLHFTKELLQKIEDKGVHLVYLTLHVGLGTFRPVSVDNIEDHKMHSEFYRLNEEAAKVLNDVRKNGGKIVATGTTSIRTLETIGSKFDGEIKPDSGWTDIFIKPGYEWKVVQAFITNFHLPKSTLVMLVSAFTGRENILNAYKHAVDEKYRFFSFGDAMFIK

SEQ ID NO: 67896 - protein, 344 aa, Lactobacillus kimchicus
  REGION 1..344: note = tr|A0A0R1HKZ2|A0A0R1HKZ2_9LACO S-adenosylmethionine:tRNA ribosyltransferase-isomerase; OS = Lactobacillus kimchicus JCM 15530 OX=1302272 GN=queA; PE = 3 SV=1
MTLTTEDFDYNLPHELIAQTPIETRDASRLLVLDHKTGAMQDKHFYDIIDELHAGDAVVMNDSRVMPARIYGTKDDTGGHVEVLLLHNTQGDVWETLMKPAKRIRVGTQVTFGDGALTATVIEDLEHGGKMIEFHYDGIFMEILEKLGEMPLPPYIKEKLDDPERYQTVYARQAGSAAAPTAGLHWTKELLERVQAKDVKLVYLTLHVGLGTFRPVDEDKIEDHKMHSEFYQLTEAAAQTLNEVRQSGGRIIATGTTSIRTLETIGSKFDGAIQADSGWTDIFIKPGYQWRVVDAFITNFHLPKSTLVMLVAAFTGRDTILNAYEHAIQERYRFFSFGDAMFIK

SEQ ID NO: 67897 - protein, 344 aa, unidentified
  source 1..344: note = Lactobacillus kimchiensis
  REGION 1..344: note = tr|A0A0R2L8Z8|A0A0R2L8Z8_9LACO S-adenosylmethionine:tRNA ribosyltransferase-isomerase; OS = Lactobacillus kimchiensis OX=993692 GN=queA PE=3 SV=1
MSLSTEDFDYDLPEELIAQTPIKNRDQSRLLVLDHETGEYTDKHFYDILDYLNPGDALVMNNSRVLPARLYGAKKDSNGHEEVLLLNNIEGDKWEVLMKPAKRAKVGTKVEFGDGQLEAEVIEDLEHGGKIIEFHYQGIFMEILEQLGEMPLPPYIKEKLDDPDRYQTVYAKENGSAAAPTAGLHWTKELLQKVEDKGVKLVYITLHVGLGTFRPVTETDVDKHVMHSEFYRLDEDSAKTLNEVKKNGGKIVATGTTSIRTLETIGTKFNGEIKADSGWTDIFIKPGYEWKVVDEFITNFHLPKSTLVMLVAAFTGRENILNAYHHAVEDKYRFFSFGDAMFIK

SEQ ID NO: 67898 - protein, 346 aa, Lactobacillus kisonensis
  REGION 1..346: note = tr|H1LJN8|H1LJN8_9LACO S-adenosylmethionine:tRNA ribosyltransferase-isomerase OS=Lactobacillus kisonensis F0435 OX=797516 GN=queA PE=3 SV=1
MIKNYTLEDFDYDLPHELIAQTPIKDRDESRLLVLNKETGKMQDRRFYNIIDYLNPGDALVMNDSKVMPARIYGVKEDTGANMEVLLLHNIEGDRWETLMKPAKRAKVGTVIDFGEGQLKAVVTKELDHGGREIEFKYQGIFIEILEHLGETPLPPYIKEKLDDPDRYQTVYAKEMGSAAAPTAGLHWTKELLQKVADKGIHLVYLTLHVGLGTFRPVDEENIEDHKMHSEFYRLSDEAADTLNDVRKNGGKIVATGTTSIRTLETVGTKFNGEIQADSGWTDIFIKPGYEWKVVDSFITNFHLPKSTLVMLVASFTGRENILNAYEHAIQEKYRFFSFGDAMYIH

SEQ ID NO: 67899 - protein, 346 aa, Lactobacillus kisonensis; identical to SEQ ID NO: 67898
  REGION 1..346: note = tr|A0A0R1NN21|A0A0R1NN21_9LACO S-adenosylmethionine:tRNA ribosyltransferase-isomerase; OS = Lactobacillus kisonensis DSM 19906 = JCM 15041; OX = 1423766 GN=queA PE=3 SV=1

SEQ ID NO: 67900 - protein, 344 aa, Lactobacillus malefermentans
  REGION 1..344: note = tr|A0A4R5NIF1|A0A4R5NIF1_9LACO S-adenosylmethionine:tRNA ribosyltransferase-isomerase; OS = Lactobacillus malefermentans OX=176292 GN=queA PE=3 SV=1
MTLTTEDFDYDLPHELIAQTPIEKRDASRLLVLDHKTGEMEDKHFYDIIDQLNSGDAVVMNDSRVMPARIYGEKPETGGHVELLLLHNTQGDEWETLAKPAKRATVGTTIVFGDGKLTATVTKDLEHGGKMIEFHYAGIFMEILESLGEMPLPPYIKEKLDDPERYQTVYAKQVGSAAAPTAGLHWTKELLQKVQDKGIKLVYLTLHVGLGTFRPVDEDNIEDHKMHSEFYQLSEESARTLREVKANGGRIVATGTTSIRTLETIGTKFKGEIKADSGWTEIFIKPGYQWQIVDAFITNFHLPKSTLVMLVAAFTGRENILNAYEHAIKEHYRFFSFGDAMFIK

SEQ ID NO: 67901 - protein, 350 aa, Lactobacillus mali
  REGION 1..350: note = tr|A0A0R2E876|A0A0R2E876_9LACO S-adenosylmethionine:tRNA ribosyltransferase-isomerase; OS = Lactobacillus mali KCTC 3596 = DSM 20444 OX=1046596; GN = queA PE=3 SV=1
MAILSEKHLTTEDFDYDLPQELIAQTPLKQRDHSRMLILDSKSGEYKDDIFYNVIDQLNPGDALVMNDSRVMPARIYGTKPDTEGHLEVLLLNNTEGDNWETLVKPARRAKVGTRINFGDGQLSAVVTEELEHGGRMIRFEYEGIFMEILDKLGEMPLPPYIKEKLDDPEMYQTVYSREVGSAAAPTAGLHFTKELLQKIEDKGIHLVYLTLHVGLGTFRPVSVDNIEDHKMHSEFYRLDADAAKVLNDVRKNGGKIVATGTTSIRTLETIGSKFNGEIKPDSGWTDIFIRPGYEWKVVQAFITNFHLPKSTLVMLVSAFTGRENILNAYKHAVEEKYRFFSFGDAMFIK

SEQ ID NO: 67902 - protein, 350 aa, Lactobacillus mali
  REGION 1..350: note = tr|A0A0R2FTH1|A0A0R2FTH1_9LACO S-adenosylmethionine:tRNA ribosyltransferase-isomerase; OS = Lactobacillus mali OX=1618 GN=queA PE=3 SV=1
MAILSEKHLTTEDFDYDLPQELIAQTPLKQRDHSRMLILDSKSGEYKDDIFYNVIDQLNPGDALVMNDSRVMPARIYGTKPDTEGHLEVLLLNNTEGDNWETLVKPARRAKVGTRINFGDGQLSAVVTEELEHGGRMIRFEYEGIFMEILDKLGEMPLPPYIKEKLDDPEMYQTVYSREVGSAAAPTAGLHFTKELLQKIEDKGVHLVYLTLHVGLGTFRPVSVDNIEDHKMHSEFYRLDADAAKVLNDVRKNGGKIVATGTTSIRTLETIGSKFNGEIKPDSGWTDIFIRPGYEWKVVQAFITNFHLPKSTLVMLVSAFTGRENILNAYKHAVEEKYRFFSFGDAMFIK

SEQ ID NO: 67903 - protein, 344 aa, Lactobacillus manihotivorans
  REGION 1..344: note = tr|A0A0R1Q4Y4|A0A0R1Q4Y4_9LACO S-adenosylmethionine:tRNA ribosyltransferase-isomerase; OS = Lactobacillus manihotivorans DSM 13343 = JCM 12514; OX = 1423769 GN=queA PE=3 S V=1
MLTTEDFDYDLPHELIAQTPLKERDASRMLVLNAETGATEDRHFYDILDYIEPGDAIVMNDTRVMPARLYGVKPQTGAHMEVLLLHNTEGDKWETLMKPARKAPVGTEIEFGDGLLKATVTEELEHGGRIIEFHYDGIFMEILDKLGETPLPPYIKEKLDDPEMYQTVYAKEVGSAAAPTAGLHWTEELLQKAQDKGAKLVYLTLHVGLGTFRPVSVSNIEDHKMHSEFYRFSQEAADTLNEVRKNGGKIIATGTTSIRTLETIGTKFNGEIKPSSGWTDIFIKPGYQWRVVDAFITNFHLPKSTLVMLVSSFTGRENILNAYAHAVQERYRFFSFGDAMYIHK

SEQ ID NO: 67904 - protein, 343 aa, unidentified
  source 1..343: note = Lactobacillus mellifer
  REGION 1..343: note = tr|A0A0F4LV31|A0A0F4LV31_9LACO S-adenosylmethionine:tRNA ribosyltransferase-isomerase; OS = Lactobacillus mellifer OX=1218492 GN=queA PE=3 SV=1
MLTLDDFDYDLPAELIAQTPLKKRDQSRLLVLDHQTGAYQDRHFYNILDYLHSGDALVMNDTKVLPARLYGVKKNTQAHLEVLLLHNTTGDNWEVLMKPARRAPVGTVIDFGEGQLQCTVTQEMEHGGRMVRFDYQGIFMEILERLGEMPLPPYIKAKLDDPDRYQTVYAKEEGSAAAPTAGLHWTQDLLAQVQAKGVHLVYLTLHVGLGTFRPVSENNIEKHKMHSEFYRLTPQAAQELNDVRAQGGKIVATGTTSIRTLETIGTKFAGAIKPDSGWTDIFIKPGYQWKVVDEFITNFHLPKSTLVMLVASFTGRKNILQAYQHAIQEKYRFFSFGDAMFIK

SEQ ID NO: 67905 - protein, 343 aa, unidentified
  source 1..343: note = Lactobacillus mellis
  REGION 1..343: note = tr|A0A0F4KS65|A0A0F4KS65_9LACO S-adenosylmethionine:tRNA ribosyltransferase-isomerase; OS = Lactobacillus mellis OX=1218508 GN=queA PE=3 SV=1
MLTLDDFDYDLPQELIAQTPLKKRDQSRLMVLDHQSGEYQDRHFFDIVDYLHPGDALVMNDTKVMPARLYGIKIPTKAHLEVLLLNNTAGDDWEVLMKPARRAPVGTKVSFGDGKLQATVTKELDHGGRMIHFDYDGIFMEILEELGETPLPPYIKQKLDDPNRYQTVYAREEGSAAAPTAGLHWTKELLQKVQNQGVQLVYLTLHVGLGTFRPVSEQNIDEHKMHSEFYRLTPEAAQVLNEVRQKGGKIVATGTTSIRTLETIGTKFQGEIRPDSGWTDIFIKPGYQWKIVDEFITNFHLPKSTLVMLVASFTGRENILRAYQHAVDEKYRFFSFGDAMFIK

SEQ ID NO: 67906 - protein, 344 aa, Lactobacillus mindensis
  REGION 1..344: note = tr|A0A0R1QGR7|A0A0R1QGR7_9LACO S-adenosylmethionine:tRNA ribosyltransferase-isomerase; OS = Lactobacillus mindensis DSM 14500 OX=1423770 GN=queA; PE = 3 SV=1
MSLSTEDFDYDLPEELIAQTPIKNRDQSRLLVLDSKTGEYQDKHFYDILDYLNPGDALVMNNSRVLPARLYGTKEDTDGHEEVLLLNNIEGDKWEVLMKPAKRAKVGTKVEFGDGQLEAEVLEDLEHGGKIIEFHYQGIFMEILEQLGEMPLPPYIKEKLDDPDRYQTVYAKENGSAAAPTAGLHWTKELLKKVEDKGVKLVYVTLHVGLGTFRPVTETDVDKHVMHSEFYRLDEESAKTLNDVKKNGGKIVATGTTSIRTLETIGTKFDGEIKADSGWTDIFIKPGYQWKVVDEFITNFHLPKSTLVMLVAAFTGRENILNAYHHAVEEKYRFFSFGDAMFIK

SEQ ID NO: 67907 - protein, 344 aa, unidentified
  source 1..344: note = Lactobacillus mixtipabuli
  REGION 1..344: note = tr|A0A1Z5IBJ6|A0A1Z5IBJ6_9LACO S-adenosylmethionine:tRNA ribosyltransferase-isomerase; OS = Lactobacillus mixtipabuli OX=1435342 GN=queA PE=3 SV=1
MTLTTEDFDYDLPHELIAQTPIEKRDASRLLVLDHQTGALADKHFYDILDYLNPGDAVVMNNSRVMPARIYGIKPETGGHVETLLLHNTKGDEWETLMKPAKKMKVGSTLSFGDGLLTATVTEELEHGGRMIEFHYDGIFMEILNQLGEMPLPPYIKEKLDDPERYQTVYAKTPGSAAAPTAGLHWTKDLLQKVQDKGAKLVYLTLHVGLGTFRPVDEKNIEDHKMHSEFYQLSEESAKTLNDVRANGGRIIATGTTSIRTLETIGTKFNGEIKADSGWTDIFIKPGYQWQVVDAFITNFHLPKSTLVMLVAAFTGRKNILNAYQHAIDERYRFFSFGDAMFIK

SEQ ID NO: 67908 - protein, 347 aa, Lactobacillus murinus
  REGION 1..347: note = tr|A0A4S2E9W3|A0A4S2E9W3_9LACO S-adenosylmethionine:tRNA ribosyltransferase-isomerase; OS = Lactobacillus murinus OX=1622 GN=queA PE=3 SV=1
MTEEHLTTEDFDYELPEELIAQTPLEHRDQSRMLVLDSKTGKYQDDYFYNVIDRLEPGDALVMNDSRVLPARIYGVKPDTGGHLEVLLLNNIKGDQWETLIKPAKRAKVGTKISFGNGELTAVVKEELEHGGRIVEFEYDGIFLEVLESLGEMPLPPYIKEKLDDPEMYQTVYSKEVGSAAAPTAGLHFTEELLAKIEAKGVKLVYLTLHVGLGTFRPVSVDNIEEHKMHSEFYRLSEEAAKTLNEVRQNGGRIVATGTTSIRTLETIGSKFNGEIKDDSGWTDIFIKPGYEWKVVNAFITNFHLPKSTLVMLVSAFTGRENILNAYRHAVEEKYRFFSFGDAMFIY

SEQ ID NO: 67909 - protein, 347 aa, Lactobacillus murinus
  REGION 1..347: note = tr|A0A4S2EQ47|A0A4S2EQ47_9LACO S-adenosylmethionine:tRNA ribosyltransferase-isomerase; OS = Lactobacillus murinus OX=1622 GN=queA PE=3 SV=1
MTEEHLTTEDFDYELPEELIAQTPLEHRDQSRMLVLDSKTGKYQDDYFYNVIDRLEPGDALVMNDSRVLPARIYGVKPDTGGHLEVLLLNNIKGDQWETLIKPAKRAKVGTKISFGNGELTAVVKEELEHGGRIVEFEYDGIFLEVLESLGEMPLPPYIKEKLDDPEMYQTVYSKEVGSAAAPTAGLHFTEELLAKIEAKGVKLVYLTLHVGLGTFRPVSVDNIEEHKMHSEFYRLSEEAAKTLNEVRQNGGRIVATGTTSIRTLETIGSKFNGEIKADSGWTDIFIKPGYEWKVVNAFITNFHLPKSTLVMLVSAFTGRENILNAYRHAVEEKYRFFSFGDAMFIY

SEQ ID NO: 67910 - protein, 347 aa, Lactobacillus nagelii
  REGION 1..347: note = tr|A0A3S6QU00|A0A3S6QU00_9LACO S-adenosylmethionine:tRNA ribosyltransferase-isomerase; OS = Lactobacillus nagelii OX=82688 GN=queA PE=3 SV=1
MSEEHLTTEDFDYDLPQELIAQTPLKERDHSRMLILNSKTGEYQDDVFYHVIDQLNPGDALVMNDSRVMPARLYGVKPDTGGHLEVLLLNNTEGDNWETLIKPARRAKVGTRIIFGDGKLSAVVTEELEHGGRMIRFEYQGIFMEILDQLGEMPLPPYIKQKLDDPEMYQTVYSREIGSAAAPTAGLHFTKELLQKIAAKGVHLVYLTLHVGLGTFRPVSVSNIKEHHMHSEFYRLSEDAAQTLNDVRKNGGKIVATGTTSIRTLETIGTKFNGEIRADSGWTDIFIYPGYEWKVVQAFITNFHLPKSTLVMLVASFTGRDNILNAYRHAVKEHYRFFSFGDAMFIK

SEQ ID NO: 67911 - protein, 350 aa, Lactobacillus nagelii
  REGION 1..350: note = tr|A0A0R1Q7Z5|A0A0R1Q7Z5_9LACO S-adenosylmethionine:tRNA ribosyltransferase-isomerase; OS = Lactobacillus nagelii DSM 13675 OX=1122150 GN=queA PE=3; SV = 1
MKILSEEHLTTEDFDYDLPQELIAQTPLKERDHSRMLILNSKTGEYQDDVFYHVIDQLNPGDALVMNDSRVMPARLYGVKPDTGGHLEVLLLNNTEGDNWETLIKPARRAKVGTRIIFGDGKLSAVVTEELEHGGRMIRFEYQGIFMEILDQLGEMPLPPYIKQKLDDPEMYQTVYSREIGSAAAPTAGLHFTKELLQKIAAKGVHLVYLTLHVGLGTFRPVSVSNIKEHHMHSEFYRLSEDAAQTLNDVRKNGGKIVATGTTSIRTLETIGTKFNGEIRADSGWTDIFIYPGYEWKVVQAFITNFHLPKSTLVMLVASFTGRDNILNAYRHAVKEHYRFFSFGDAMFIK

SEQ ID NO: 67912 - protein, 361 aa, Lactobacillus nantensis
  REGION 1..361: note = tr|A0A0R1WER6|A0A0R1WER6_9LACO S-adenosylmethionine:tRNA ribosyltransferase-isomerase; OS = Lactobacillus nantensis DSM 16982 OX=1423774 GN=queA; PE = 3 SV=1
MYLKNFVKPVIKGDFYMSLSTEDFDYDLPEELIAQTPIKDRDQSRLLVLDHETGEYQDKHFYDILDYLNPGDALVMNNSRVLPARLYGTKEDTDGHEEVLLLNNIEGDKWEVLMKPAKRAKVGTKVQFGEDGQLEAEVLEDLEHGGKIIEFHYQGIFMEILEQLGEMPLPPYIKEKLDDPDRYQTVYAKENGSAAAPTAGLHWTKDLLKKVEDKGVKLVYVTLHVGLGTFRPVTETDVDKHVMHSEFYRLDEESAKTLNDVKKNGGKIVATGTTSIRTLETIGTKFNGEIKADSGWTDIFIKPGYEWKVVDEFITNFHLPKSTLVMLVAAFTGRENILNAYHHAVEEKYRFFSFGDAMFIK

SEQ ID NO: 67913 - protein, 344 aa, Lactobacillus nasuensis
  REGION 1..344: note = tr|A0A0R1JRQ5|A0A0R1JRQ5_9LACO S-adenosylmethionine:tRNA ribosyltransferase-isomerase; OS = Lactobacillus nasuensis JCM 17158 OX=1291734 GN=queA; PE = 3 SV=1
MLTTEDFDYDLPHELIAQTPLKERDASRMLVLNATTGDMADKHFYDILDYLNPGDAVVMNDTRVMPARLYGVKPDTGAHMEVLLLHNTEGDQWETLMKPARKAPVGAEIDFGDGLLKATVIKELDHGGRIIEFHYDGIFMEILDQLGETPLPPYINAKLDDSEMYQTVYAKEVGSAAAPTAGLHWTEDLLAKAKAKGVHLVYLTLHVGLGTFRPVSVDNIEDHKMHSEFYRFSQEAADELNDVRNHGGRIIATGTTSIRTLETIGTKFDGEIKADSGWTDIFIKPGYQWRLVDAFITNFHLPKSTLVMLVASFTGRERILNAYQHAIQERYRFFSFGDAMFIHK

SEQ ID NO: 67914 - protein, 344 aa, Lactobacillus nodensis
  REGION 1..344: note = tr|A0A0R1K855|A0A0R1K855_9LACO S-adenosylmethionine:tRNA ribosyltransferase-isomerase; OS = Lactobacillus nodensis DSM 19682 = JCM 14932 = NBRC 107160 OX=1423775 GN=que A PE=3 SV=1
MTLTTEDFDYNLPEELIAQTPIKDRDHSRLLVLDHETGEYQDKHFYDILDYLNPGDALVMNNSRVLPARLYGTKEDTDGHEEVLLLNNIEGDKWEVLMKPARRAKVGTKVQFGDGQLEATVMEELEHGGKIIEFHYDGIFLEILEKLGEMPLPPYIKEKLDDPDRYQTVYAKENGSAAAPTAGLHWTKDLLEKVQEKGIKLVYLTLHVGLGTFRPVTESDISKHIMHSEFYRLDEESAKTLNEVRKNGGKIVATGTTSIRTLETIGTKFNGEIKADSGWTDIFIKPGYEWKVVDEFITNFHLPKSTLVMLVAAFTGRENILNAYEHAIDEKYRFFSFGDAMFIK

SEQ ID NO: 67915 - protein, 345 aa, unidentified
  source 1..345: note = Lactobacillus nuruki
  REGION 1..345: note = tr|A0A2N7ASI4|A0A2N7ASI4_9LACO S-adenosylmethionine:tRNA ribosyltransferase-isomerase; OS = Lactobacillus nuruki OX=1993540 GN=queA PE=3 SV=1
MSLSTEDFDYDLPEELIAQTPIKNRDQSRLLVLDSKTGEYQDKHFYDILDYLNPGDALVMNNSRVLPARLYGTKEDTDGHEEVLLLNNIEGDKWEVLMKPARRATVGTKVRFGEDGQLEAEVLENLEHGGKIIEFHYQGIFMEILEKLGEMPLPPYIKEKLDDPDRYQTVYAKENGSAAAPTAGLHWTKELLKKVEDKGVKLVYVTLHVGLGTFRPVTESDVDKHVMHSEFYRLDEESAKTLNDVKKNGGKIVATGTTSIRTLETIGTKFNGEIKADSGWTDIFIKPGYEWKVVDEFITNFHLPKSTLVMLVAAFTGRENILNAYHHAVEEKYRFFSFGDAMFIK

SEQ ID NO: 67916 - protein, 344 aa, Lactobacillus odoratitofui
  REGION 1..344: note = tr|A0A0R1LW95|A0A0R1LW95_9LACO S-adenosylmethionine:tRNA ribosyltransferase-isomerase; OS = Lactobacillus odoratitofui DSM 19909 = JCM 15043; OX = 1423776 GN=queA PE=3 SV= 1
MTLTTEDFDYDLPHELIAQTPIEKRDASRLLVLDHKTGELSDQHFYDIIDQLNPGDAVVMNNSRVMPARIYGVKPETGGHVEVLLLHNTKGDEWETLMKPAKRIKVGTTVSFGDGLLTATVTEELEHGGRMIEFHYDGIFMEILEKLGETPLPPYIKEKLDDPERYQTVYAKENGSAAAPTAGLHWTKELLQQVQDKGVKLVYLTLHVGLGTFRPVDEKNIEDHKMHSEFYQLSEESAKTLNEVRANGGRIVATGTTSIRTLETIGTKFHGEIKADSGWTDIFIKPGYQWQVVDAFITNFHLPKSTLVMLVAAFTGRDMILNAYQHAIDEKYRFFSFGDAMFIK

SEQ ID NO: 67917 - protein, 347 aa, Lactobacillus oeni
  REGION 1..347: note = tr|A0A0R1MA11|A0A0R1MA11_9LACO S-adenosylmethionine:tRNA ribosyltransferase-isomerase; OS = Lactobacillus oeni DSM 19972 OX=1423777 GN=queA PE=3; SV = 1
MSEEHLTTEDFDYELPEELIAQTPLKKRDHSRMLVLDSQTGEYKDDIFYNVIDQLNPGDALVMNDSRVMPARIYGTKPETGGHLEVLLLNNTEGDNWETLVKPARRAKVGTRVVFGDGQLSAVITKELEHGGRMIRFEYTGIFMEILDKLGEMPLPPYIKEKLDDPEMYQTVYSREIGSAAAPTAGLHFTKELLQKIAAKGVHLVYLTLHVGLGTFRPVSEKNIEDHKMHSEFYRLSKDAAQTLNEVRKNGGKIVATGTTTIRTLETIGTKFNGEIHEDSGWTDIFIKPGYEWKVVQAFITNFHLPKSTLVMLVASFTGRKTILNAYRHAVIDKYRFFSFGDAMFIK

SEQ ID NO: 67918 - protein, 345 aa, Lactobacillus oligofermentans
  REGION 1..345: note = tr|A0A0R1RP10|A0A0R1RP10_9LACO S-adenosylmethionine:tRNA ribosyltransferase-isomerase; OS = Lactobacillus oligofermentans DSM 15707 = LMG 22743; OX = 1423778 GN=queA PE=3SV=1
MSDLTLDDFDYDLPHELIAQTPIEQRDTSRLLVLDSKTGEMQDQHFYDVLDQLNPGDAVVMNNSRVLPARIHGVKLDTGAHVEVLLLNNTEGDTWETLVKPGKKIKVGTVLTFGNGELTATVTEELEHGGRMIEFHYEGIFLEVLEKLGEMPLPPYIKEKLDDPDRYQTVYAKENGSAAAPTAGLHWTKDLLQKVEDKGIKLVYLTLHVGLGTFRPVDEERIEDHVMHSEFYRLDAESAKTLNEVKANGGRIIATGTTSIRTLETIGSKFNGVLQADSGWTDIFIMPGYKWTVVDAFITNFHLPKSTLVMLVAAFTGRDNILNAYQHAIQEKYRFFSFGDAMFVK

SEQ ID NO: 67919 - protein, 344 aa, unidentified
  source 1..344: note = Lactobacillus oryzae
  REGION 1..344: note = tr|A0A081BJ23|A0A081BJ23_9LACO S-adenosylmethionine:tRNA ribosyltransferase-isomerase; OS = Lactobacillus oryzae JCM 18671 OX=1291743 GN=queA PE=3; SV = 1
MTLTTEDFDYDLPHELIAQTPIEQRDASRLLVLDHETGEMQDKHFYDILDELNAGDAVVMNDSRVMPARIYGTKPETGGHIELLLLHNTEGDKWETLAKPAKKAPVGTTITFGDGQLTATVTEDLDHGGKMIEFHYDGIFMEILEALGEMPLPPYIKEKLDDPERYQTVYAKQVGSAAAPTAGLHWTKDLLKKAQDKGVKLVYLTLHVGLGTFRPVDEDNIEDHKMHSEFYQLTEEAAQTLREVRANGGRIIATGTTSIRTLETIGTKFNGEIKADSGWTDIFIKPGYQWQVVDAFITNFHLPKSTLVMLVAAFTGRETILNAYEHAIEERYRFFSFGDAMFIK

SEQ ID NO: 67920 - protein, 346 aa, Lactobacillus otakiensis
  REGION 1..346: note = tr|S4PNM1|S4PNM1_9LACO S-adenosylmethionine:tRNA ribosyltransferase-isomerase OS=Lactobacillus otakiensis DSM 19908 = JCM 15040 OX=1423780 GN=queA PE=3 SV=1
MKTNYTLEDFDYNLPHELIAQTPIKDRDESRLLVLDKDTGDMQDRHFYNIIDYLNPGDALVMNDSKVMPARIYGVKEDTGGHMEVLLLHNIEGDRWETLMKPAKKAKVGTVINFGEGQLKAVVTKELEHGGREIEFKYDGIFIEILERLGETPLPPYIKEKLDDPNRYQTVYAKEMGSAAAPTAGLHWTKELLQKVEDKGVHLVYLTLHVGLGTFRPVDEENIEDHKMHSEFYRLSEESAETLNAVRKNGGKIVATGTTSIRTLETVGTKFNGEIHPDSGWTDIFIKPGYQWKVVDSFITNFHLPKSTLVMLVASFTGRDNILNAYQHAIDEKYRFFSFGDAMYIH

SEQ ID NO: 67921 - protein, 352 aa, Lactobacillus parabuchneri
  REGION 1..352: note = tr|A0A0R1YYA9|A0A0R1YYA9_9LACO S-adenosylmethionine:tRNA ribosyltransferase-isomerase; OS = Lactobacillus parabuchneri DSM 5707 = NBRC 107865; OX = 1423784 GN=queA PE=3 SV =1
MKGIKILKTNYTLEDFDYNLPHELIAQTPIKDRDESRLLVLNKETGEMQDRHFYNIIDYLNPGDALVMNDSKVMPARIYGVKEDTGGNMEVLLLHNIEGDRWETLMKPAKRAKVGTVIDFGEGQLKAVVTKELEHGGREIEFKYDGIFIEILERLGETPLPPYIKEKLDDPNRYQTVYAKEMGSAAAPTAGLHWTKELLQKVADKGVHLVYLTLHVGLGTFRPVDEENIEDHKMHSEFYRLTDEAAQTLNDVRQNGGKIVATGTTSIRTLETVGTKFNGEIRPDSGWTDIFIKPGYEWKVVDSFITNFHLPKSTLVMLVASFTGRDNILNAYQHAIEEKYRFFSFGDAMYIH

SEQ ID NO: 67922 - protein, 352 aa, Lactobacillus parabuchneri; identical to SEQ ID NO: 67921
  REGION 1..352: note = tr|A0A1X1FC57|A0A1X1FC57_9LACO S-adenosylmethionine:tRNA ribosyltransferase-isomerase; OS = Lactobacillus parabuchneri OX=152331 GN=queA PE=3 SV=1

SEQ ID NO: 67923 - protein, 361 aa, Lactobacillus paracasei
  REGION 1..361: note = tr|A0A243PV95|A0A243PV95_LACPA S-adenosylmethionine:tRNA ribosyltransferase-isomerase; OS = Lactobacillus paracasei OX=1597 GN=queA PE=3 SV=1
MEANMVQENKRYHKVEDKHYQLSDFDYDLPHELIAQTPLKERDASRLLVLNSETGEMQDKHFYDILDYFKPGDALVMNDTRVMPARLYGVKPETGAHMEVLLLNNTSGDDWETLMKPARKAPVGTVIDFGDGLLKATVTKELEHGGRMIHFDYDGIFMEILDKLGETPLPPYIKEKLEDPEMYQTVYSKELGSAAAPTAGLHWTKDLLKKVQEKGVKLVYLTLHVGLGTFRPVVEENIEAHKMHSEFYRLTPEAAATLNDVRDNGGRIIATGTTSIRTLEAIGTKFDGAIKADSGWTDIFIKPGYQWKVVDAFITNFHLPKSTLVMLVAAFTGRDTILNAYKHAIDEKYRFFSFGDAMFIY

SEQ ID NO: 67924 - protein, 357 aa, Lactobacillus paracasei
  REGION 1..357: note = tr|K6S0B3|K6S0B3_LACPA S-adenosylmethionine:tRNA ribosyltransferase-isomerase OS=Lactobacillus paracasei; OX = 1597 GN=queA PE=3 SV=1
MVQENKRYHKVEDKHYQLSDFDYDLPHELIAQTPLKERDASRLLVLNSETGEMQDKHFYDILDYFKPGDALVMNDTRVMPARLYGVKPETGAHMEVLLLNNTSGDDWETLMKPARKAPVGTVIDFGDGLLKARVTKELEHGGRMIHFDYDGIFMEILDKLGETPLPPYIKEKLEDPEMYQTVYSKELGSAAAPTAGLHWTKDLLKKVQEKGVKLVYLTLHVGLGTFRPVVEENIEAHKMHSEFYRLTPEAAATLNDVRDNGGRIIATGTTSIRTLEAIGTKFDGAIKADSGWTDIFIKPGYQWKVVDAFITNFHLPKSTLVMLVAAFTGRDTILNAYKHAIDEKYRFFSFGDAMFIY

SEQ ID NO: 67925 - protein, 344 aa, Lactobacillus paracollinoides
  REGION 1..344: note = tr|A0A0R1TC82|A0A0R1TC82_9LACO S-adenosylmethionine:tRNA ribosyltransferase-isomerase; OS = Lactobacillus paracollinoides DSM 15502 = JCM 11969; OX = 1423785 GN=queA PE=3SV=1
MTLTTDDFDYDLPHELIAQTPIEKRDASRLLVMDHATGALEDKHFYDIIDELHAGDAVVMNDSRVMPARIYGIKPDTGGHVEVLLLHNTNGDEWETLMKPAKRIKVGTTVTFGDGQLTATVTKELEHGGRMIEFHYDGIFMEILEKLGETPLPPYIKEKLDDPERYQTVYARESGSAAAPTAGLHWTKELLQKVQDKGIKLVYLTLHVGLGTFRPVDEKNIDDHKMHSEFYRLSEESAKTLNEVRANGGRIVATGTTSIRTLETIGTKFNGEIKADSGWTDIFIFPGYQWKVVDAFITNFHLPKSTLVMLVAAFTGRDNILNAYQHAIEEKYRFFSFGDAMFIK

SEQ ID NO: 67926 - protein, 344 aa, Lactobacillus paracollinoides
  REGION 1..344: note = tr|A0A1B2J1S7|A0A1B2J1S7_9LACO S-adenosylmethionine:tRNA ribosyltransferase-isomerase; OS = Lactobacillus paracollinoides OX=240427 GN=queA PE=3; SV = 1
MTLTTDDFDYDLPHELIAQTPIEKRDASRLLVMDHATGALEDKHFYDIIDELHAGDAVVMNDSRVMPARIYGIKPDTGGHVEVLLLHNTNGDEWETLMKPAKRIKVGTTVTFGDGQLTATVTKELEHGGRMIEFHYDGIFMEILEKLGETPLPPYIKEKLDDPERYQTVYARESGSAAAPTAGLHWTKELLQKVQDKGIKLVYLTLHVGLGTFRPVDEKNIDDHKMHSEFYRLSEESAKTLNEVRANGGRIVATGTTSIRTLETIGTKFNGEIKADSGWTDIFIFPGYQWKVVDAFITNFHLPKSTLVMLVAAFTGRDNILNAYQHVIEEKYRFFSFGDAMFIK

SEQ ID NO: 67927 - protein, 352 aa, Lactobacillus parafarraginis
  REGION 1..352: note = tr|G9ZT45|G9ZT45_9LACO S-adenosylmethionine:tRNA ribosyltransferase-isomerase OS=Lactobacillus parafarraginis F0439 OX=797515 GN=queA PE=3 SV=1
MKGNLTLKTNYTLEDFDYDLPHELIAQTPIKDRDESRLLVLDKETGEMQDRHFYNIIDYLNPGDALVMNDSKVMPARIYGVKEDTGGHLEVLLLHNIEGDRWETLMKPAKHAKVGTRIDFGDGQLKAVVTKELDHGGREIEFQYQGIFIEILEKLGETPLPPYIKEKLDDPNRYQTVYAKEMGSAAAPTAGLHWTKELLQKVADKGVHLVYLTLHVGLGTFRPVEEDNIDDHKMHSEFYRLSDDAAATLNAVRKNGGKIVATGTTSIRTLETVGSKFNGEIHPDSGWTDIFIKPGYQWKVVDSFITNFHLPKSTLVMLVASFTGRDNILNAYQHAIDEKYRFFSFGDAMYIH

SEQ ID NO: 67928 - protein, 352 aa, Lactobacillus parafarraginis
  REGION 1..352: note = tr|A0A0R1YSX0|A0A0R1YSX0_9LACO S-adenosylmethionine:tRNA ribosyltransferase-isomerase; OS = Lactobacillus parafarraginis DSM 18390 = JCM 14109; OX = 1423786 GN=queA PE=3 S V=1
MKGNLTLKTNYTLEDFDYDLPHELIAQTPIKDRDESRLLVLDKETGEMQDRHFYNIIDYLNPGDALVMNDSKVMPARIYGVKEDTGGHLEVLLLHNIEGDRWETLMKPAKHAKVGTRIDFGDGQLKAVVTKELDHGGREIEFQYEGIFIEILEKLGETPLPPYIKEKLDDPNRYQTVYAKEMGSAAAPTAGLHWTKELLQKVADKGVHLVYLTLHVGLGTFRPVEEDNIDDHKMHSEFYRLSDDAAATLNAVRKNGGKIVATGTTSIRTLETVGSKFNGEIHPDSGWTDIFIKPGYQWKVVDSFITNFHLPKSTLVMLVASFTGRDNILNAYQHAIDEKYRFFSFGDAMYIH

SEQ ID NO: 67929 - protein, 242 aa, Lactobacillus parakefiri
  REGION 1..242: note = tr|A0A4R5NZJ1|A0A4R5NZJ1_9LACO S-adenosylmethionine:tRNA ribosyltransferase-isomerase; OS = Lactobacillus parakefiri OX=152332 GN=C5L28_000451 PE=3; SV = 1
MKTNYTLEDFDYDLPHELIAQTPIKDRDESRLLVLDKKTGEMQDRHFYNIIDYLNPGDALVMNDSKVMPARIYGVKEDTGGHMEVLLLHNIEGDRWETLMKPAKKAKVGTVINFGDGQLKAVVTKELDHGGREIEFKYDGIFIEILERLGETPLPPYIKEKLDDPNRYQTVYAREMGSAAAPTAGLHWTKDLLKKVEDKGVHLVYLTLHVGLGTFRPVDEENIEDHKMHSEFYVCQMKQPTR

SEQ ID NO: 67930 - protein, 346 aa, Lactobacillus parakefiri
  REGION 1..346: note = tr|A0A269YM88|A0A269YM88_9LACO S-adenosylmethionine:tRNA ribosyltransferase-isomerase; OS = Lactobacillus parakefiri OX=152332 GN=queA PE=3 SV=1
MKTNYTLEDFDYDLPHELIAQTPIKDRDESRLLVLDKKTGEMQDRHFYNIIDYLNPGDALVMNDSKVMPARIYGVKEDTGGHMEVLLLHNIEGDRWETLMKPAKKAKVGTVINFGDGQLKAVVTKELDHGGREIEFKYDGIFIEILERLGETPLPPYIKEKLDDPNRYQTVYAREMGSAAAPTAGLHWTKDLLKKVEDKGVHLVYLTLHVGLGTFRPVDEENIEDHKMHSEFYRLSDEAADTLNAVRDNGGKIVATGTTSIRTLETVGTKFGGDIRPDSGWTDIFIKPGYQWQVVDSFITNFHLPKSTLVMLVASFTGRDNILNAYQHAIEEKYRFFSFGDAMYIH

SEQ ID NO: 67931 - protein, 360 aa, Lactobacillus paralimentarius
  REGION 1..360: note = tr|A0A0R1KN12|A0A0R1KN12_9LACO S-adenosylmethionine:tRNA ribosyltransferase-isomerase; OS = Lactobacillus paralimentarius DSM 19674 OX=1423788; GN = queA PE=3 SV=1
MYLKKNIIPRLKGDFTMTLTTEDFDYDLPEELIAQTPIKNRDQSRLLVLDHETGEYQDKHFYDILDYLNPGDALVMNNSRVLPARLYGTKEDTDGHEEVLLLNNIEGDKWEVLMKPARRAKVGTKVEFGDGQLEAEVLEDLEHGGKIIEFHYQGIFMEILEQLGEMPLPPYIKEKLDDPDRYQTVYAKENGSAAAPTAGLHWTKDLLKKVEDKGVKLVYITLHVGLGTFRPVTESDISKHVMHSEFYRLDEDSAKTLNEVKKNGGKIVATGTTSIRTLETIGTKFNGEIKADSGWTDIFIKPGYEWKVVDEFITNFHLPKSTLVMLVAAFTGRENILNAYQHAVEEKYRFFSFGDAMFIK

SEQ ID NO: 67932 - protein, 360 aa, Lactobacillus paralimentarius
  REGION 1..360: note = tr|A0A0R1I862|A0A0R1I862_9LACO S-adenosylmethionine:tRNA ribosyltransferase-isomerase; OS = Lactobacillus paralimentarius DSM 13961 = JCM 10707; OX = 1423765 GN=queA PE=3SV=1
MYLKKNIIPRLKGEFTMTLTTEDFDYDLPEELIAQTPIKNRDQSRLLVLDHETGEYQDKHFYDILDYLNPGDALVMNNSRVLPARLYGTKEDTDGHEEVLLLNNIEGDKWEVLMKPARRAKVGTKVEFGDGQLEAEVLEDLEHGGKIIEFHYQGIFMEILEQLGEMPLPPYIKEKLDDPDRYQTVYAKENGSAAAPTAGLHWTKDLLKKVEDKGVKLVYITLHVGLGTFRPVTESDISKHVMHSEFYRLDEDSAKTLNEVKKNGGKIVATGTTSIRTLETIGTKFNGEIKADSGWTDIFIKPGYEWKVVDEFITNFHLPKSTLVMLVAAFTGRENILNAYQHAVEEKYRFFSFGDAMFIK

SEQ ID NO: 67933 - protein, 344 aa, Lactobacillus paraplantarum
  REGION 1..344: note = tr|A0A098R2K6|A0A098R2K6_9LACO S-adenosylmethionine:tRNA ribosyltransferase-isomerase; OS = Lactobacillus paraplantarum OX=60520 GN=queA PE=3 SV=1
MSLTLEDFDYDLPHELIAQTPIKERDSSRLLELDRQTGEMQDKHFYDIIDQLNPGDAVVMNNSRVMPARLYGVKPETGGHAEVLLLHNTEGDEWETLMKPAKRAKVGTVISFGDGQLTATVTAEKEDGIRMIEFHYDGIFMEILERLGETPLPPYIKEKLDDPDRYQTVYAKENGSAAAPTAGLHWTKELLQKVQDKGIKLVYLTLHVGLGTFRPVEEDNIEDHKMHSEFYRLDEDAAKTLNEVRQSGGRIIATGTTSIRTLETIGSKFDGEIKPDSGWTDIFIKPGYQWKVVDAFITNFHLPKSTLVMLVAAFTGRDLILKAYQHAIDEKYRFFSFGDAMFIH

SEQ ID NO: 67934 - protein, 344 aa, Lactobacillus paraplantarum
  REGION 1..344: note = tr|A0A4Q9Y0H7|A0A4Q9Y0H7_9LACO S-adenosylmethionine:tRNA ribosyltransferase-isomerase; OS = Lactobacillus paraplantarum OX=60520 GN=queA PE=3 SV=1
MSLTLEDFDYDLPHELIAQTPIKERDSSRLLELDRQTGEMQDKHFYDIIDQLNPGDAVVMNNSRVMPARLYGVKPETGGHAEVLLLHNTEGDEWETLMKPAKRAKVGTVISFGDGQLTATVTAEKEDGIRMIEFHYDGIFMEILERLGETPLPPYIKEKLDDPDRYQTVYAKENGSAAAPTAGLHWTKELLQKVQDKGIKLVYLTLHVGLGTFRPVEEDNIEDHKMHSEFYRLDEEAAKTLNEVRQSGGRIIATGTTSIRTLETIGSKFDGEIKPDSGWTDIFIKPGYQWKVVDAFITNFHLPKSTLVMLVAAFTGRDLILKAYQHAIDEKYRFFSFGDAMFIH

SEQ ID NO: 67935 - protein, 344 aa, unidentified
  source 1..344: note = Lactobacillus pentosiphilus
  REGION 1..344: note = tr|A0A1Z5IUT1|A0A1Z5IUT1_9LACO S-adenosylmethionine:tRNA ribosyltransferase-isomerase; OS = Lactobacillus pentosiphilus OX=1714682 GN=queA PE=3 SV=1
MTLTTEDFDYDLPHELIAQTPIEKRDASRLLVLDHKTGALADKHFYDILDYLNPGDAVVMNNSRVMPARIYGIKPETGGHVETLLLHNTKGDEWETLMKPAKKMKVGATLSFGDGLLTATVTEELDHGGRMIEFHYDGIFMEILDKLGEMPLPPYIKEKLDDPERYQTVYAKTPGSAAAPTAGLHWTKELLQKVQDKGVKLVYLTLHVGLGTFRPVDEKNIEDHKMHSEFYQLSEASAQTLNEVRANGGRIIATGTTSIRTLETIGTKFNGEIKADSGWTDIFIKPGYQWQVVDAFITNFHLPKSTLVMLVAAFTGRDNILNAYQHAIDERYRFFSFGDAMFIK

SEQ ID NO: 67936 - protein, 344 aa, unidentified
  source 1..344: note = Lactobacillus pentosiphilus
  REGION 1..344: note = tr|A0A1Z5IQQ8|A0A1Z5IQQ8_9LACO S-adenosylmethionine:tRNA ribosyltransferase-isomerase; OS = Lactobacillus pentosiphilus OX=1714682 GN=queA PE=3 SV=1
MTLTTEDFDYDLPHELIAQTPIEKRDASRLLVLDHKTGALADKHFYDILDYLNPGDAVVMNNSRVMPARIYGIKPETGGHVETLLLHNTKGDEWETLMKPAKKMKVGATLSFGDGLLTATVTEELDHGGRMIEFHYDGIFMEILDKLGEMPLPPYIKEKLDDPERYQTVYAKTPGSAAAPTAGLHWTKELLQKVQDKGVKLVYLTLHVGLGTFRPVDEKNIEDHKMHSEFYQLSEASAQTLNEVRANGGRIIATGTTSIRTLETIGAKFNGEIKADSGWTDIFIKPGYQWQVVDAFITNFHLPKSTLVMLVAAFTGRDNILNAYQHAIDERYRFFSFGDAMFIK

SEQ ID NO: 67937 - protein, 344 aa, Lactobacillus pentosus
  REGION 1..344: note = tr|A0A241RSN8|A0A241RSN8_LACPE S-adenosylmethionine:tRNA ribosyltransferase-isomerase; OS = Lactobacillus pentosus OX=1589 GN=queA PE=3 SV=1
MSLTLEDFDYDLPHELIAQTPIKKRDSSRLLELDRKTGEMQDKHFYDIIDQLNPGDAVVMNNSRVMPARLYGVKPETGGHAEVLLLHNTEGDEWETLMKPAKRAKVGTVISFGDGKLTATVTAEKEDGIRMIEFHYDGIFMEILESLGETPLPPYIKEKLDDPDRYQTVYAKENGSAAAPTAGLHWTKELLQKVQDKGVKLVYLTLHVGLGTFRPVEEDNIDDHKMHSEFYRLDEDAAKTLNEVRQNGGRIIATGTTSIRTLETIGSKFDGEIKPDSGWTDIFIKPGYQWKVVDAFITNFHLPKSTLVMLVAAFTGRDMILKAYQHAIDEKYRFFSFGDAMFIH

SEQ ID NO: 67938 - protein, 344 aa, Lactobacillus pentosus; identical to SEQ ID NO: 67937
  REGION 1..344: note = tr|I9AKL5|I9AKL5_LACPE S-adenosylmethionine:tRNA ribosyltransferase-isomerase OS=Lactobacillus pentosus KCA1 OX=1136177 GN=queA PE=3 SV=1

SEQ ID NO: 67939 - protein, 357 aa, Lactobacillus perolens
  REGION 1..357: note = tr|A0A0R1N3F3|A0A0R1N3F3_9LACO S-adenosylmethionine:tRNA ribosyltransferase-isomerase; OS = Lactobacillus perolens DSM 12744 OX=1423792 GN=queA; PE = 3 SV=1
MLTTEDFDYDLPQELIAQTPLPERDASRMLVLDTATGKTTDKHFYDILDYLNPGDAVVLNDTRVMPARLYGVKPDTGGHVEVLLLNNTRGDDWEVLMKPAKRVHVGTEIDFGDGLLKATVIEERDEGIRMIRFTYQGIFMEILDKLGETPLPPYIKAKLDDPEMYQTVYAKEVGSAAAPTAGLHWTKELLKKAQDKGVKLVYLTLHIGLGTFRPVLEENVEDHKMHSEFYRLTPESAAALNAVRQNGGRIIATGTTVIRTLESIGTKFDGKIQADSGWTDIFLKPGYQWKIVDAFITNFHLPKSTLVMLVASFTGRHMILNAYQHAIEEKYRFFSFGDAMFIYNSENPHPQPMKEMD

SEQ ID NO: 67940 - protein, 344 aa, Lactobacillus plantarum
  REGION 1..344: note = sp|Q88V04|QUEA_LACPL S-adenosylmethionine:tRNA ribosyltransferase-isomerase OS=Lactobacillus plantarum (strain ATCC BAA-793 / NCIMB 8826 / WCFS1) OX=220668; GN = queA P E=3 SV=1
MSLTLEDFDYDLPHELIAQTPIKKRDSSRLLELDRQTGEMQDKHFYDIIDQLNPGDAVVMNNSRVMPARLYGVKPETGGHAEVLLLHNTEGDEWETLMKPAKRAKVGTVISFGDGKLTATVTAEKEDGIRMIEFHYDGIFMEILESLGETPLPPYIKEKLDDPDRYQTVYAKENGSAAAPTAGLHWTKELLQKVQDKGIKLVYLTLHVGLGTFRPVEEDNIDDHKMHSEFYRLDEDAAKTLNEVRQNGGRIIATGTTSIRTLETIGSKFDGEIKPDSGWTDIFIKPGYQWKVVDAFITNFHLPKSTLVMLVAAFTGRDMILKAYQHAIDEKYRFFSFGDAMFIH

SEQ ID NO: 67941 - protein, 344 aa, Lactobacillus plantarum; identical to SEQ ID NO: 67940
  REGION 1..344: note = tr|A0A0G9F941|A0A0G9F941_LACPN S-adenosylmethionine:tRNA ribosyltransferase-isomerase; OS = Lactobacillus plantarum OX=1590 GN=queA PE=3 SV=1

SEQ ID NO: 67942 - protein, 347 aa, Lactobacillus pobuzihii
  REGION 1..347: note = tr|A0A0R2L3M9|A0A0R2L3M9_9LACO S-adenosylmethionine:tRNA ribosyltransferase-isomerase; OS = Lactobacillus pobuzihii OX=449659 GN=queA PE=3 SV=1
MSEEHLTTEDFDYELPQELIAQTPLKKRDESRMLVLNHVSGEYEDDHFYNVIDRLNPGDALVMNDSRVMPARLYGNKPATGGHLEVLLLNNTEGDNWETLVKPAKRAKVGTEISFGNGELTATVTKELEHGGRMIEFHYNGIFMEVLERLGETPLPPYIKEKLDDPEMYQTVYSKEIGSAAAPTAGLHFTKELLQKIEDKGVKLVYLTLHVGLGTFRPVTEANIEDHKMHSEFYSLSEKSAQTLNKVRQNGGKIVATGTTTIRTLETIGTKFSGDIKADSGWTDIFLKPGYDWKVVQAFITNFHLPKSTLVMLVASFTGRDNILNAYKHAVEERYRFFSFGDCMFIY

SEQ ID NO: 67943 - protein, 346 aa, Lactobacillus rapi
  REGION 1..346: note = tr|A0A512PJU3|A0A512PJU3_9LACO S-adenosylmethionine:tRNA ribosyltransferase-isomerase; OS = Lactobacillus rapi OX=481723 GN=queA PE=3 SV=1
MKTNYTLEDFDYDLPHELIAQTPIKDRDESRLLVLNKDTGEMQDRHFYNIIDYLNPGDALVMNDSKVMPARIYGVKADTGANMEILLLHNIEADRWETLMKPAKRAKVGTVIDFGEGQLKAVVTKELDHGGREIEFKYEGIFIEILEKLGETPLPPYIKEKLDDPNRYQTVYAKEMGSAAAPTAGLHWTKELLQKVADKGVHLVYLTLHVGLGTFRPVDEENIEDHKMHSEFYRLSQEAADTLNDVRHNGGKIVATGTTSIRTLETVGTKFNGEIRPDSGWTDIFIKPGYQWQVVDSFITNFHLPKSTLVMLVASFTGRENILNAYEHAIQEKYRFFSFGDAMYIH

SEQ ID NO: 67944 - protein, 344 aa, Lactobacillus rennini
  REGION 1..344: note = tr|A0A1K2I807|A0A1K2I807_9LACO S-adenosylmethionine:tRNA ribosyltransferase-isomerase; OS = Lactobacillus rennini OX=238013 GN=queA PE=3 SV=1
MGLTLEDFDYDLPQELIAQTPLKERDASRLLVLDHQTGRLQDKHFYDILDQLHAGDAVVMNDTRVMPARLYGVKPATGGHEEVLLLNNTEGDQWETLMKPARRAKVGTELVFGDGQLKATVIKELDHGGRLIEFHYNGIFMEILEQLGETPLPPYIKAKLDNPEMYQTVYAKESGSAAAPTAGLHWTKALLDKVQAKGVKLVYLTLHVGLGTFRPVLEDNIDEHKMHSEFYRLTPEAAATLNQVRQNGGRIIATGTTSIRTLETIGTKFDGQIKPDSGWTDIFIKPGYQWRVVDAFITNFHLPKSTLVMLVAAFTGRDQILHAYQHAIKERYRFFSFGDAMFIK

SEQ ID NO: 67945 - protein, 344 aa, Lactobacillus rennini; identical to SEQ ID NO: 67944
  REGION 1..344: note = tr|A0A0R2D6W9|A0A0R2D6W9_9LACO S-adenosylmethionine:tRNA ribosyltransferase-isomerase; OS = Lactobacillus rennini DSM 20253 OX=1423796 GN=queA PE=3; SV = 1

SEQ ID NO: 67946 - protein, 167 aa, Lactobacillus rhamnosus
  REGION 1..167: note = tr|F3MYG3|F3MYG3_LACRH S-adenosylmethionine:tRNA ribosyltransferase-isomerase (Fragment) OS=Lactobacillus rhamnosus MTCC 5462 OX=947828 GN=AAULR_05528 PE=3 SV=1
AAPTAGLHWTKELLQKVQDKGVKLVYLTLHVGLGTFRPVVEENIEAHKMHSEFYRLTPEAAATLNEVRDNGGRIIATGTTSIRTLEAIGTKFDGAIKADSGWTDIFIKPGYQWKVVDAFITNFHLPKSTLVMLVAAFTGRDTILNAYKHAIEEKYRFFSFGDAMFIY

SEQ ID NO: 67947 - protein, 361 aa, Lactobacillus rhamnosus
  REGION 1..361: note = tr|K8QHH7|K8QHH7_LACRH S-adenosylmethionine:tRNA ribosyltransferase-isomerase OS=Lactobacillus rhamnosus LRHMDP2 OX=1203258 GN=queA PE=3 SV=1
MEANKLQDKKRYRRVENKDYQLSDFDYDLPHELIAQTPLKERDASRLLVLNADTGAMQDKHFYDILDYFKPGDALVMNDTRVMPARLYGVKPETGAHMEVLLLNNTSGDDWETLMKPARKAPVGTVIDFGDGLLKATVTKELEHGGRMIHFDYDGIFMEILDKLGETPLPPYIKEKLEDPEMYQTVYSKELGSAAAPTAGLHWTKELLQKVQDKGVKLVYLTLHVGLGTFRPVVEENIEAHKMHSEFYRLTPEAAATLNEVRDNGGRIIATGTTSIRTLEAIGTKFDGTIKADSGWTDIFIKPGYQWKVVDAFITNFHLPKSTLVMLVAAFTGRDTILNAYKHAIEEKYRFFSFGDAMFIY

SEQ ID NO: 67948 - protein, 350 aa, Lactobacillus ruminis
  REGION 1..350: note = tr|E7FTB9|E7FTB9_9LACO S-adenosylmethionine:tRNA ribosyltransferase-isomerase OS=Lactobacillus ruminis ATCC 25644 OX=525362 GN=queA PE=3 SV=1
MTILSEKHLTTEDFDYDLPQELIAQTPLKERDQSRLLVLDSKTGKYQDDYFYNVIDRLNPGDALVMNDSRVMPARLYGVKPETGGHVEVLLLNNTDGDNWETLVKPAKRAKVGTEISFGDGKLTATVTEELEHGGRMIEFHYDGIFMEILDQLGEMPLPPYIKEKLDDPEMYQTVYSREIGSAAAPTAGLHFTTELLKKIEDKGVKLVYLTLHVGLGTFRPVSEENIEDHKMHSEFYRLTEDAAKTLNEVKANGGRIVATGTTSIRTLETIGTKFNGEIRADSGWTDIFIKPGYKWQVVDAFITNFHLPKSTLVMLVASFTGRENILNAYRHAVSEKYRFFSFGDAMFIY

SEQ ID NO: 67949 - protein, 347 aa, Lactobacillus ruminis
  REGION 1..347: note = tr|R6TLS3|R6TLS3_9LACO S-adenosylmethionine:tRNA ribosyltransferase-isomerase OS=Lactobacillus ruminis CAG:367 OX=1263085 GN=queA PE=3 SV=1
MSEKHLTTEDFDYDLPQELIAQTPLKERDQSRLLVLDSKTGKYQDDYFYNVIDRLNPGDALVMNDSRVMPARLYGVKPETGGHVEVLLLNNTDGDNWETLVKPAKRAKVGTEISFGDGKLTATVTEELEHGGRMIEFHYDGIFMEILDQLGEMPLPPYIKEKLDDPEMYQTVYSREIGSAAAPTAGLHFTKELLKKIEDKGVKLVYLTLHVGLGTFRPVSEENIEDHKMHSEFYRLTEDAAKTLNEVKANGGRIVATGTTSIRTLETIGTKFNGEIRADSGWTDIFIKPGYKWQVVDAFITNFHLPKSTLVMLVASFTGRENILNAYRHAVSEKYRFFSFGDAMFIY

SEQ ID NO: 67950 - protein, 347 aa, Lactobacillus saerimneri
  REGION 1..347: note = tr|M5J6U6|M5J6U6_9LACO S-adenosylmethionine:tRNA ribosyltransferase-isomerase OS=Lactobacillus saerimneri 30a OX=1227363 GN=queA PE=3 SV=1
MSTPHYTTSDFDYDLPEELIAQTPLEKRDQSRMLVLDAQTGEYQDDYFYNVIDQLNPGDALVMNDSRVMPARIYGTKPETGGHLEVLLLNNTHGDEWETLVKPAKRAKVGTTISFGDGELTATVIKELEHGGRMIEFHYDGIFMEILDRLGEMPLPPYIKEKLDNPEMYQTVYSREVGSAAAPTAGLHFTKELLQKIADKGVKLVYLTLHVGLGTFRPVSTDNIEEHKMHSEFYRLTPEAAATLNEVRANGGKIVATGTTSIRTLETIGTKFNGEIKADSGWTDIFIKPGYEWKVVQAFITNFHLPKSTLVMLVASFTGRENILNAYKHAVQEKYRFFSFGDAMFIK

SEQ ID NO: 67951 - protein, 347 aa, Lactobacillus saerimneri
  REGION 1..347: note = tr|A0A0R1SYG0|A0A0R1SYG0_9LACO S-adenosylmethionine:tRNA ribosyltransferase-isomerase; OS = Lactobacillus saerimneri DSM 16049 OX=1122153 GN=queA; PE = 3 SV=1
MSTPHYTTSDFDYDLPEELIAQTPLEKRDQSRMLVLDAQTGEYQDDYFYNVIDQLNPGDALVMNDSRVMPARIYGTKPETGGHLEVLLLNNTHGDEWETLVKPAKRAKVGTTISFGDGELTATVTKELEHGGRMIEFHYDGIFMEILDRLGEMPLPPYIKEKLDNPEMYQTVYSREVGSAAAPTAGLHFTKELLQKIADKGVKLVYLTLHVGLGTFRPVSTDNIEEHKMHSEFYRLTPEAAATLNEVRANGGKIVATGTTSIRTLETIGTKFNGEIKADSGWTDIFIKPGYEWKVVQAFITNFHLPKSTLVMLVASFTGRENILNAYKHAVQEKYRFFSFGDAMFIK

SEQ ID NO: 67952 - protein, 343 aa, Lactobacillus sakei
  REGION 1..343: note = sp|Q38YQ8|QUEA_LACSS S-adenosylmethionine:tRNA ribosyltransferase-isomerase OS=Lactobacillus sakei subsp. sakei (strain 23K) OX=314315 GN=queA PE=3 SV=1
MVSTEDFDYNLPEELIAQTPMIERAASRLLVMDHETGALEDKVFYDIIDELNPGDAVVMNNTRVLPARLYGVKPDTGGHEEVLLLNNTHDDEWEVLMKPAKRAKVGTEVVFGDGQLRAIVTKELEHGGRMIEFKYDGIFMQILEALGEMPLPPYIKEKLDDPEMYQTVYAKEPGSAAAPTAGFHWTEELLQKVQDKGIKLVYLTLHVGLGTFRPVSEDNVEDHKMHSEFYRLTEEAAATLNEVKQNGGRIVATGTTSIRTLETIATKFDGEIKADSGWTEIFIKPGYQWKAVDAFITNFHLPKSTLVMLVASFTGRENILNAYQHAVDERYRFFSFGDAMFVK

SEQ ID NO: 67953 - protein, 343 aa, Lactobacillus sakei; identical to SEQ ID NO: 67952
  REGION 1..343: note = tr|A0A4R5MXX5|A0A4R5MXX5_LACSK S-adenosylmethionine:tRNA ribosyltransferase-isomerase; OS = Lactobacillus sakei subsp. sakei OX=214326 GN=queA PE=3; SV = 1

SEQ ID NO: 67954 - protein, 347 aa, Lactobacillus salivarius
  REGION 1..347: note = tr|F7QSK7|F7QSK7_9LACO S-adenosylmethionine:tRNA ribosyltransferase-isomerase OS=Lactobacillus salivarius GJ-24 OX=1041521 GN=queA PE=3 SV=1
MSEKHLTTEDFDYDLPESLIAQTPLEERDQSRMLILDSKTGEYQDDYFYNVIDQLNPGDALVMNDSRVMPARIYGVKPETGGHVEVLLLNNTHGDEWETLVKPARRAKVGTKISFGDGALKATVTKELEHGGRLIEFEYDGIFMEILDKLGEMPLPPYIKEKLENPEMYQTVYSREVGSAAAPTAGLHFTKELLHKIEEKGVKLVYLTLHVGLGTFRPVSEKNIEDHKMHSEFYRLTEEAAATLNEVRKNGGRIVATGTTSIRTLETIGTKYDGEIKADSGWTDIFIKPGYEWKVVQAFITNFHLPKSTLVMLVASFTGRENILNAYKHAVEEKYRFFSFGDAMFIK

SEQ ID NO: 67955 - protein, 347 aa, Lactobacillus salivarius
  REGION 1..347: note = tr|V6DIH8|V6DIH8_9LACO S-adenosylmethionine:tRNA ribosyltransferase-isomerase OS=Lactobacillus salivarius cp400 OX=1273133 GN=queA PE=3 SV=1
MSEKHLTTGDFDYDLPESLIAQTPLEERDQSRMLILDSKTGEYQDDYFYNVIDQLNPGDALVMNDSRVMPARIYGVKPETGGHVEVLLLNNTHGDEWETLVKPARRAKVGTKISFGDGALKATVTKELEHGGRLIEFEYDGIFMEILDKLGEMPLPPYIKEKLENPEMYQTVYSREVGSAAAPTAGLHFTKELLHKIEEKGVKLVYLTLHVGLGTFRPVSEKNIEDHKMHSEFYRLTEEAAATLNEVRKNGGRIVATGTTSIRTLETIGTKYNGEIKADSGWTDIFIKPGYEWKVVQAFITNFHLPKSTLVMLVASFTGRENILNAYKHAVEEKYRFFSFGDAMFIK

SEQ ID NO: 67956 - protein, 343 aa, Lactobacillus saniviri
  REGION 1..343: note = tr|A0A0R2N4K9|A0A0R2N4K9_9LACO S-adenosylmethionine:tRNA ribosyltransferase-isomerase; OS = Lactobacillus saniviri JCM 17471 = DSM 24301 OX=1293598; GN = queA PE=3 SV=1
MLTTEDFDYNLPEELIAQTPLKERDASRMLVLDHETGEMADKHFYDILDYLNPGDAVVMNDTRVMPARLYGVKEDTGAHMEVLLLNNIEGDKWETLVKHSRKAPVGTKITFGDGLLVATVTEELEHGGRIVEFSYDGIFMEVLEQLGETPLPPYIKEKLDDPEMYQTVYAKEIGSAAAPTAGLHWTKELLDQAQAKGVKLVYLTLHVGLGTFRPVSVDNIEDHKMHSEFYRLTQDAADTLNEVKQNGGRIIATGTTSIRTLETIGTKFDGEIKADSGWTDIFIKPGYQWRVVNAFITNFHLPKSTLVMLVAAFTGRDNILNAYQHAIDERYRFFSFGDAMFIK

SEQ ID NO: 67957 - protein, 344 aa, Lactobacillus satsumensis
  REGION 1..344: note = tr|A0A0R1UWA7|A0A0R1UWA7_9LACO S-adenosylmethionine:tRNA ribosyltransferase-isomerase; OS = Lactobacillus satsumensis DSM 16230 = JCM 12392; OX = 1423801 GN=queA PE=3 SV=1
MHLTTEDFDYDLPEELIAQTPLTERDHSRMLVLDSQTGKYRDDVFYHVIDQLNPGDALVMNDSRVMPARIYGIKPETGGHLEVLLLNNTDGDNWETLVKPARRAKVGTRIVFGDGQLSAVITKELEHGGRMIKFEYTGIFMEILDQLGEMPLPPYIKEKLDDPEMYQTVYSREIGSAAAPTAGLHFTKELLQKIADKGVHLVYLTLHVGLGTFRPVSVENIEDHKMHSEFYRLSREAAAVLNQVRAEGGKIVATGTTTIRTLETIGTKFNGEIQEDSGWTDIFIKPGYEWKVVQAFITNFHLPKSTLVMLVASFTGRENILNAYQHAVAEKYRFFSFGDAMFIK

SEQ ID NO: 67958 - protein, 344 aa, Lactobacillus selangorensis
  REGION 1..344: note = tr|A0A0R2FFU7|A0A0R2FFU7_9LACO S-adenosylmethionine:tRNA ribosyltransferase-isomerase; OS = Lactobacillus selangorensis OX=81857 GN=queA PE=3 SV=1
MSLTTEDFDYELPHELIAQTPLQERDASRMLVLNHKTDQMWDKHFYDILDYLNPGDAVVMNDTRVMPARLYGTKEGTGAHMEVLLLNNTQGDEWETLMKPARRAPVGTKIDFGDGLLSATVTKELEHGGRMIEFHYDGIFMEILEKLGETPLPPYIKEKLDDPEMYQTVYAKEMGSAAAPTAGLHWTKELLQKAQDKGVKLVYLTLHVGLGTFRPVSEANIEDHKMHSEFYRLTPEAAQELNEVKANGGRIIATGTTSIRTLETIGTKFDGEIKADSGWTDIFIKPGYQWKVVDAFITNFHLPKSTLVMLVASFTGRDTILNAYQHAVAEKYRFFSFGDAMFIY

SEQ ID NO: 67959 - protein, 346 aa, Lactobacillus senioris
  REGION 1..346: note = tr|A0A0R2CRR7|A0A0R2CRR7_9LACO S-adenosylmethionine:tRNA ribosyltransferase-isomerase; OS = Lactobacillus senioris DSM 24302 = JCM 17472 OX=1423802; GN = queA PE=3 SV=1
MTEKYTLADFDYDLPKELIAQTPIEKRDTSRLLVMNHETGELTDKHFYDIIDYLNPGDALVMNDSKVMPARIYGVKEDTGAHVEVLLLHNIEGDSWETLMKPARKLKVGAVVSFGDGQLKAVVTKELDHGGREIKFEYDGIFIEILERLGETPLPPYIKEKLDDPDRYQTVYAKEMGSAAAPTAGLHWTPELLDKVQAKGIKLVYLTLHVGLGTFRPVDEDNIEDHKMHSEFYRLSEDAAATLNEVRQNGGRIVATGTTSIRTLETIGSKFNGAIKADSGWTDIFIKPGYDWKVVNAFITNFHLPKSTLVMLVASFTGRDNILNAYQHAIEEKYRFFSFGDAMYIY

SEQ ID NO: 67960 - protein, 357 aa, unidentified
  source 1..357: note = Lactobacillus shenzhenensis
  REGION 1..357: note = tr|U4TMP3|U4TMP3_9LACO S-adenosylmethionine:tRNA ribosyltransferase-isomerase OS=Lactobacillus shenzhenensis LY-73 OX=1231336 GN=queA PE=3 SV=1
MLSTEDFDYDLPQELIAQTPLPERDASRMLVLDTATGETTDKHFYDILDYVHPGDAVVMNDTRVMPARLYGIKPETGGHVEVLLLNNPQGDDWEVLMKPAKRIHVGTEIDFGDGLLKATVTEERDEGVRMIRFSYDGIFMEILDKLGETPLPPYIKAKLDDPEMYQTVYAKEVGSAAAPTAGLHWTKELLQKVQDKGVKLVYLTLHIGLGTFRPVLEENVEDHKMHSEFYRLTPEAAATLNDVRAKGGRIIATGTTVIRTLESIGTKFDGAIKADSGWTDIFIKPGYQWKVVDAFITNFHLPKSTLVMLVASFTGRHMILNAYQHAVAEKYRFFSFGDAMFIYNSQNPHPLPLHEMD

SEQ ID NO: 67961 - protein, 344 aa, unidentified
  source 1..344: note = Lactobacillus silagei
  REGION 1..344: note = tr|A0A1Z5IK76|A0A1Z5IK76_9LACO S-adenosylmethionine:tRNA ribosyltransferase-isomerase; OS = Lactobacillus silagei JCM 19001 OX=1302250 GN=queA PE=3; SV = 1
MTLTTEDFDYDLPHELIAQTPIEKRDASRLLVLDHQTGELTDKHFYDILDYLNPGDAVVMNNSRVMPARIYGIKPDTGGHVEVLLLHNTQGDEWETLMKPAKRMRVGSTVSFGDGVLTATVTKELEHGGRMIEFHYDGIFMEILEKLGETPLPPYIKEKLDDPERYQTVYAKTVGSAAAPTAGLHWTKELLQKVQDKGVKLVYLTLHVGLGTFRPVDEKNIEDHKMHSEFYQLSEESAKTLNEVRANGGRIIATGTTSIRTLETIGTKFHGEIKADSGWTDIFIKPGYQWQVVNAFITNFHLPKSTLVMLVAAFTGRDNILNAYHHAIEERYRFFSFGDAMFIK

SEQ ID NO: 67962 - protein, 344 aa, unidentified
  source 1..344: note = Lactobacillus silagincola
  REGION 1..344: note = tr|A0A1Z5J3S6|A0A1Z5J3S6_9LACO S-adenosylmethionine:tRNA ribosyltransferase-isomerase; OS = Lactobacillus silagincola OX=1714681 GN=queA PE=3 SV=1
MTLTTEDFDYDLPHELIAQTPIEKRDASRLLVLDHETGEMADKHFYDIIDYLNPGDAVVMNNSRVMPARIYGVKPDTGGHAEVLLLHNTKGDEWETLMKPAKRIRVGSVISFGDGLLTATVTKELEHGGRMIEFHYDGIFMEILEKLGETPLPPYIKEKLDDPERYQTVYAKTPGSAAAPTAGLHWTKELLQKVQDKGIKLVYLTLHVGLGTFRPVDEKNIEDHKMHSEFYQLSEESAKTLNEVRENGGRIVATGTTSIRTLETIGTKFNGEIKADSGWTDIFIKPGYKWQVVDAFITNFHLPKSTLVMLVAAFTGRDNILNAYQHAIEERYRFFSFGDAMFIK

SEQ ID NO: 67963 - protein, 345 aa, Lactobacillus similis
  REGION 1..345: note = tr|A0A0R2ESM7|A0A0R2ESM7_9LACO S-adenosylmethionine:tRNA ribosyltransferase-isomerase; OS = Lactobacillus similis DSM 23365 = JCM 2765 OX=1423804; GN = queA PE=3 SV=1
MTLTTEDFDYDLPHELIAQTPIEKRDASRLLVMDHETGELEDEHFYNIIDHLNPGDAVVMNDSRVMPARIYGVKPETGGHVEVLLLHNTQGDEWETLMKPAKRIRVGQTVTFGDDGALTATVTKELEHGGRMIEFHYDGIFMEILEKLGETPLPPYIKEKLDDPERYQTVYAKQAGSAAAPTAGLHWTKELLKKVEDKGIKLVYLTLHVGLGTFRPVDEENIEDHKMHSEFYQLSEESAKTLNEVRANGGRIVATGTTSIRTLETIGTKFHGEIKADSGWTDIFIKPGYQWQVVDAFITNFHLPKSTLVMLVAAFTGRDNILNAYQHAIEERYRFFSFGDAMFIK

SEQ ID NO: 67964 - protein, 347 aa, Lactobacillus sp.
  REGION 1..347: note = tr|A0A3D3IH79|A0A3D3IH79_9LACO S-adenosylmethionine:tRNA ribosyltransferase-isomerase; OS = Lactobacillus sp. OX=1591 GN=queA PE=3 SV=1
MTEEHLTTEDFDYELPEELIAQTPLEHRDQSRMLVLDSKTGKYQDDYFYNVIDRLEPGDALVMNDSRVLPARIYGVKPDTGGHLEVLLLNNIKGDQWETLIKPAKRAKVGTKISFGNGELTAVVKEELEHGGRIVEFEYDGIFLEVLESLGEMPLPPYIKEKLDDPEMYQTVYSKEVGSAAAPTAGLHFTEELLAKIEAKGVKLVYLTLHVGLGTFRPVSVDNIEEHKMHSEFYRLSEEAAKTLNEVRQNGGRIVATGTTSIRTLETIGSKFNGEIKADSGWTDIFIKPGYEWKVVNAFITNFHLPKSTLVMLVSAFTGRENILNAYRHAVKEKYRFFSFGDAMFIY

SEQ ID NO: 67965 - protein, 347 aa, Lactobacillus sp.
  REGION 1..347: note = tr|A0A401ISV1|A0A401ISV1_9LACO S-adenosylmethionine:tRNA ribosyltransferase-isomerase; OS = Lactobacillus sp. YK43 OX=2163553 GN=queA PE=3 SV=1
MSEKHLTTEDFDYDLPHELIAQTPLKKRDESRMLLLDHVSGEYQDDHFYNVIDQLNPGDALVMNDSRVMPARLYGEKPATNGHLEVLLLNNTEGDQWETLVKPAKRAKVGTEIKFGDGELTATVTEELEHGGRMIEFHYDGIFMEILESLGETPLPPYIKGKLDDPEMYQTVYSKEIGSAAAPTAGLHFTKELLQKIEDKGVKLVYLTLHVGLGTFRPVSEENIEDHKMHSEFYRLSEESAQTLNEVRQNGGKIVATGTTTIRTLETIGTKFNGEIKADSGWTDIFLKPGYDWKVVQAFITNFHLPKSTLVMLVASFTGRENILNAYKHAVEERYRFFSFGDCMFIY

SEQ ID NO: 67966 - protein, 346 aa, unidentified
  source 1..346: note = Lactobacillus suantsaii
  REGION 1..346: note = tr|A0A4Q0VM89|A0A4Q0VM89_9LACO S-adenosylmethionine:tRNA ribosyltransferase-isomerase; OS = Lactobacillus suantsaii OX=2292255 GN=queA PE=3 SV=1
MLTMTTLADYDYELPPELIAQTPIEHRDASRLLVLDHRTGQLTDKHFYDILAEIHPGDAIVMNNSRVMPARLYGVKEDTGGHVEVLLLHNVAGDVWETLMKPAKRLRVGTTVSFGAGQLTATVTEEREDGIRLIEFHYQGIFMEILEQLGETPLPPYIKEKLADADRYQTVYAKENGSAAAPTAGLHWTQALLDQAVAKGAKLVYLTLHVGLGTFRPVEEENVDDHKMHSEFYRLDEKSAATLNQVRQNGGRIIATGTTSIRTLETIGTKFHGEIRADSGWTDIFIRPGYHWQVVDAFITNFHLPKSTLIMLVAAFTGREQILAAYQHAIAERYRFFSFGDAMFIK

SEQ ID NO: 67967 - protein, 350 aa, Lactobacillus sucicola
  REGION 1..350: note = tr|A0A0R2DPN5|A0A0R2DPN5_9LACO S-adenosylmethionine:tRNA ribosyltransferase-isomerase; OS = Lactobacillus sucicola DSM 21376 = JCM 15457 OX=1423806; GN = queA PE=3 SV=1
MTILSEEHLTTEDFDYDLPQELIAQTPLKKRDHSRMLILDSKTGTYKDDVFYNVIDQLHAGDALVMNDSRVMPARIYGIKPETGGHIEVLLLNNTQGDEWETLVKPAKRAKVGTRIVFGDGKLSAVITKELEHGGRMIRFEYQGIFMEILDELGEMPLPPYIKEKLDDPEMYQTVYSREIGSAAAPTAGLHFTKELLKKIENKGVHLVYLTLHVGLGTFRPVSVENIEDHKMHSEFYRLSEDSAKVLNEVRANGGKIVATGTTSIRTLETIGTKFNGEIHADSGWTDIFIKPGYEWKIVQAFITNFHLPKSTLVMLVSSFTGRKNILNAYKHAVDEKYRFFSFGDAMFIK

SEQ ID NO: 67968 - protein, 345 aa, Lactobacillus suebicus
  REGION 1..345: note = tr|A0A0R1WF05|A0A0R1WF05_9LACO S-adenosylmethionine:tRNA ribosyltransferase-isomerase; OS = Lactobacillus suebicus DSM 5007 = KCTC 3549 OX=1423807; GN = queA PE=3 SV=1
MTELTVDDFDYDLPHELIAQTPIKERDASRLLVLDHKTGEMEDKHFYNIIDQLHEGDAVVMNNSRVMPARLYGIKPDTGGHVEVLLLNNTEGDTWETLVKPAKRIRPGTVIKFGDGELTATVTEELEHGGRMIEFHYDGIFLEILEKLGETPLPPYIKEKLDDPERYQTVYAKENGSAAAPTAGLHWTKELLQKVEDKGIKLVYLTLHVGLGTFRPVDEEKIEDHKMHSEFYRLDEESAKVLNDVRKNGGRIVATGTTSIRTLETIGTKFNGEIKADSGWTDIFIKPGYDWKVVDAFITNFHLPKSTLVMLVASFTGRDTILNAYKHAIEEKYRFFSFGDAMFIK

SEQ ID NO: 67969 - protein, 346 aa, Lactobacillus sunkii
  REGION 1..346: note = tr|A0A1E7XDG8|A0A1E7XDG8_9LACO S-adenosylmethionine:tRNA ribosyltransferase-isomerase; OS = Lactobacillus sunkii OX=481719 GN=queA PE=3 SV=1
MKTNYTLEDFDYNLPHELIAQTPIKDRDESRLLVLNKDTGEMEDRRFYNIIDYLNPGDALVMNDSKVMPARIYGVKEDTGGHMEVLLLHNIEGDRWETLMKPAKKAKVGMVINFGDGQLKAVVTKELDHGGREIEFKYDGIFIEILERLGETPLPPYIKEKLDDPNRYQTVYAKEMGSAAAPTAGLHWTKELLKKVEDKGVHLVYLTLHVGLGTFRPVDEENIEDHKMHSEFYRLSEEAAETLNSVRQNGGKIVATGTTSIRTLETVGTKFDGEIRPDSGWTDIFIKPGYDWKVVDSFITNFHLPKSTLVMLVASFTGRDNILNAYQHAIDEKYRFFSFGDAMYIH

SEQ ID NO: 67970 - protein, 346 aa, Lactobacillus sunkii
  REGION 1..346: note = tr|A0A0R1KZL6|A0A0R1KZL6_9LACO S-adenosylmethionine:tRNA ribosyltransferase-isomerase; OS = Lactobacillus sunkii DSM 19904 OX=1423808 GN=queA PE=3; SV = 1
MKTNYTLEDFDYNLPHELIAQTPIKDRDESRLLVLNKDTGEMEDRRFYNIIDYLNPGDALVMNDSKVMPARIYGVKEDTGGHMEVLLLHNIEGDRWETLMKPAKKAKVGTVINFGDGQLKAVVTKELDHGGREIEFKYDGIFIEILERLGETPLPPYIKEKLDDPNRYQTVYAKKMGSAAAPTAGLHWTKELLKKVEDKGVHLVYLTLHVGLGTFRPVDEENIEDHKMHSEFYRLSEEAAETLNSVRQNGGKIVATGTTSIRTLETVGTKFDGEIRPDSGWTDIFIKPGYDWKVVDSFITNFHLPKSTLVMLVASFTGRDNILNAYQHAIDEKYRFFSFGDAMYIH

SEQ ID NO: 67971 - protein, 344 aa, Lactobacillus tucceti
  REGION 1..344: note = tr|A0A0R1IXQ4|A0A0R1IXQ4_9LACO S-adenosylmethionine:tRNA ribosyltransferase-isomerase; OS = Lactobacillus tucceti DSM 20183 OX=1423811 GN=queA PE=3; SV = 1
MTLTTEDFDYNLPEELIAQTPIKDRDHSRLLVLDHETGKYEDKHFYDILDYLNPGDALVMNNSRVLPARLYGTKEDTDGHEEVLLLNNIEGDKWEVLMKPARRAKVGTKVQFGDGQLEATVLEELEHGGKIIEFNYEGIFLEILEKLGEMPLPPYIKEKLDDPDRYQTVYAKENGSAAAPTAGLHWTKDLLEKVQEKGIKLVYLTLHVGLGTFRPVTESDISKHVMHSEFYRLDEDSANTLNEVRKNGGKIVATGTTSIRTLETIGTKFNGEIKPDSGWTDIFIKPGYEWKVVDEFITNFHLPKSTLVMLVAAFTGRENILNAYEHAIEEKYRFFSFGDAMFIK

SEQ ID NO: 67972 - protein, 350 aa, Lactobacillus uvarum
  REGION 1..350: note = tr|A0A0R1Q8K3|A0A0R1Q8K3_9LACO S-adenosylmethionine:tRNA ribosyltransferase-isomerase; OS = Lactobacillus uvarum DSM 19971 OX=1423812 GN=queA PE=3; SV = 1
MTILSEEHLTTEDFDYNLPQELIAQTPLKERDHSRMLILDSKTGTYKDDVFYNVIDQLNAGDALVMNDSRVMPARIYGIKPETGGHIEVLLLNNTQGDEWETLVKPAKRAKVGTRISFGDGKLSAVITKELEHGGRMIKFEYEGIFMEILDELGEMPLPPYIKEKLDDPEMYQTVYSREVGSAAAPTAGLHFTKELLHKIEDKGVHLVYLTLHVGLGTFRPVSVENIEDHKMHSEFYRLSEESAKILNDVRANGGRIVATGTTSIRTLETIGTKFKGEIHADSGWTDIFIKPGYDWKVVQAFITNFHLPKSTLVMLVSAFTGRKNILNAYKHAVEEKYRFFSFGDAMFIK

SEQ ID NO: 67973 - protein, 346 aa, Lactobacillus vaccinostercus
  REGION 1..346: note = tr|A0A0R2AAG4|A0A0R2AAG4_9LACO S-adenosylmethionine:tRNA ribosyltransferase-isomerase; OS = Lactobacillus vaccinostercus DSM 20634 OX=1423813; GN = queA PE=3 SV=1
MMTELTVDDFDYDLPHELIAQTPIKKRDASRLLVLDHKTGQMQDQHFYDILDQLHAGDAVVMNNSRVLPARLYGVKPDTGGHVEVLLLNNTEGDVWETLVKPAKRIKPGTEIKFGDGELTATVTEELEHGGRMIEFHYDGIFLEVLEKLGETPLPPYIKEKLDDPERYQTVYAKENGSAAAPTAGLHWTKELLQKVEEKGVKLVYLTLHVGLGTFRPVDEKNIEDHKMHSEFYRLDAQSAQTLNDVRANGGRIIATGTTSIRTLETIGSKFDGEIKPDSGWTDIFIKPGYDWKVVDAFITNFHLPKSTLVMLVASFTGRDTILNAYQHAIEEKYRFFSFGDAMFIK

SEQ ID NO: 67974 - protein, 344 aa, Lactobacillus versmoldensis
  REGION 1..344: note = tr|A0A0R1SIM3|A0A0R1SIM3_9LACO S-adenosylmethionine:tRNA ribosyltransferase-isomerase; OS = Lactobacillus versmoldensis DSM 14857 = KCTC 3814; OX = 1423815 GN=queA PE=3 SV =1
MTLTTEDFDYDLPEELIAQTPIKDRDHSRLLVLDHDTGAYEDKHFYDILDYLNPGDALVMNNSRVLPARLYGSKEDTDGHEEVLLLNNTEGDKWEVLMKPARRAHPGTVITFGDGQLKATVLEDLEHGGKIIEFHYDGIFLEILERLGEMPLPPYIKEKLDDPDRYQTVYAKENGSAAAPTAGLHWTKDLLEKVQEKGVKLVYLTLHVGLGTFRPVTESDISKHVMHSEFYRLDEDSAKTLNDVRKNGGKIVATGTTSIRTLETIGTKFNGEIKPDSGWTDIFIKPGYEWKVVDEFITNFHLPKSTLVMLVAAFTGRENILNAYQHAIEEKYRFFSFGDAMFIK

SEQ ID NO: 67975 - protein, 350 aa, Lactobacillus vini
  REGION 1..350: note = tr|A0A0R2CC21|A0A0R2CC21_9LACO S-adenosylmethionine:tRNA ribosyltransferase-isomerase; OS = Lactobacillus vini DSM 20605 OX=1133569 GN=queA PE=3; SV = 1
MEILTEEHLTTEDFDYELPKELIAQTPLKQRDHSRLLILDSQTGKYQDDIFYNVINQLNPGDALVMNDSRVMPARLYGEKPDTGGHLEVLLLNNTDGDNWETLIKPARRAKIGTKITFGNGELKAVVTKELEHGGRMIRFEYDGIFMEILDRLGEMPLPPYIKQKLEDPEMYQTVYSREIGSAAAPTAGLHFTKELLQKIAEKGVRLVYLTLHVGLGTFRPVSEKNIKDHQMHSEFYRLSEDAAQTLNEVRKNGGRIVATGTTVIRTLETIGTKFKGEIKADSGWTDIFIYPGYQWKVVQAFITNFHLPKSTLVMLVASFTGRENILNAYRHAVSQKYRFFSFGDAMFIK

SEQ ID NO: 67976 - protein, 345 aa, unidentified
  source 1..345: note = Lactobacillus wasatchensis
  REGION 1..345: note = tr|A0A0D1A6A2|A0A0D1A6A2_9LACO S-adenosylmethionine:tRNA ribosyltransferase-isomerase; OS = Lactobacillus wasatchensis OX=1335616 GN=queA PE=3 SV=1
MSELTVNDFDYDLPHELIAQTPIKERDASRLLVLDHQTGEMKDKHFYDILDQLNPGDAVVMNNSRVLPARLYGVKSETGGHVEVLLLNNTEGNTWETLVKPAKKLKTGTQITFGDGELTATIKEELEHGGRMIEFHYDGIFMEVLEKLGETPLPPYIKEKLDDPERYQTVYAKENGSAAAPTAGLHWTKGLLQKVQDKGIKLVYLTLHVGLGTFRPVDEEKIEDHKMHSEFYRLDEQSAQTLNEVRQKGGRIIATGTTSIRTLETIGSKFNGAIKADSGWTDIFIKPGYEWKVVDAFITNFHLPKSTLVMLVAAFTGRDKILTAYQHAIAEKYRFFSFGDAMFIK

SEQ ID NO: 67977 - protein, 344 aa, Lactobacillus xiangfangensis
  REGION 1..344: note = tr|A0A0R2M072|A0A0R2M072_9LACO S-adenosylmethionine:tRNA ribosyltransferase-isomerase; OS = Lactobacillus xiangfangensis OX=942150 GN=queA PE=3 SV=1
MSLTLEDFDYDLPHELIAQTPIKQRDTSRLLELDRKTGVMQDKHFYDIIDQLNPGDAVVMNNSRVMPARLYGVKPETGGHAEVLLLHNTEGDEWETLMKPAKRAHVGTVISFGDGKLTATVTAEKEDGIRMIEFHYDGIFMEILESLGETPLPPYIKEKLDDPDRYQTVYAKENGSAAAPTAGLHWTKDLLQKVQDKGVKLVYLTLHVGLGTFRPVEEDNIEDHKMHSEFYRLDEDAAKTLNEVRQNGGRIIATGTTSIRTLETVGTKFNGEIKPDSGWTDIFIKPGYQWKVVDAFITNFHLPKSTLVMLVAAFTGRDMILNAYQHAIDERYRFFSFGDAMFIH

SEQ ID NO: 67978 - protein, 361 aa, Lactobacillus zeae
  REGION 1..361: note = tr|A0A0R1EZ78|A0A0R1EZ78_LACZE S-adenosylmethionine:tRNA ribosyltransferase-isomerase; OS = Lactobacillus zeae DSM 20178 = KCTC 3804 OX=1423816; GN = queA PE=3 SV=1
MEANKVQDKKRYRQVENKNYQLSDFDYDLPHELIAQTPLKERDASRLLVLNADTGAMQDRHFYDILDYFKPGDALVMNDTRVMPARLYGVKPETGAHMEVLLLNNTSGDDWETLMKPARKAPVGTVIDFGDGLLKATVTKELDHGGRMIHFDYDGIFMEILDKLGETPLPPYIKEKLEDPEMYQTVYSKELGSAAAPTAGLHWTKELLKKVQDKGVKLVYLTLHVGLGTFRPVVEENIEAHKMHSEFYRLTPEAAATLNEVRDNGGRIIATGTTSIRTLEAIGTKFDGEIKPDSGWTDIFIKPGYQWKVVDAFITNFHLPKSTLVMLVAAFTGRDTILNAYKHAIEEKYRFFSFGDAMFIY

SEQ ID NO: 67979 - protein, 344 aa, Lactobacillus zymae
  REGION 1..344: note = tr|A0A1Y6JXG6|A0A1Y6JXG6_9LACO S-adenosylmethionine:tRNA ribosyltransferase-isomerase; OS = Lactobacillus zymae OX=267363 GN=queA PE=3 SV=1
MTETLADFDYDLPHELIAQTPIKQRDTSRLLVLNHQTGDLADKHFYDILAELRPGDAVVLNSSRVMPARLYGVKPETGGHVEVLLLHNVAGDVWETLMKPAKRLRVGTTVSFGDGQLTATITEEREDGIRLIEFHYDGIFMEILERLGETPLPPYIKAKLDDPDRYQTIYAKENGSAAAPTAGLHWTQELLDQVVAKGVKLVYLTLHVGLGTFRPVEERNIDDHKMHSEFYRLDEQAARTLNDVRAHGGRIVATGTTSIRTLETIGTKFHGQLRADSGWTDIFIKPGYQWQVVDAFITNFHLPKSTLVMLVAAFTGRERILNAYQHAIAEKYRFFSFGDATFIK

SEQ ID NO: 67980 - protein, 344 aa, Lactobacillus zymae
  REGION 1..344: note = tr|A0A0R1MRE4|A0A0R1MRE4_9LACO S-adenosylmethionine:tRNA ribosyltransferase-isomerase; OS = Lactobacillus zymae DSM 19395 OX=1423817 GN=queA PE=3; SV = 1
MTETLADFDYDLPHELIAQTPIKQRDTSRLLVLDHQTGDLADKHFYDILAELHPGDAVVLNNSRVMPARLYGVKPETGGHVEVLLLHNVAGDVWETLMKPAKRLRVGTTVSFGDGQLTATITEEREDGIRLIEFHYDGIFMEILERLGETPLPPYIKAKLDDPDRYQTIYAKENGSAAAPTAGLHWTQELLNQVVAKGVKLVYLTLHVGLGTFRPVEERNIDDHKMHSEFYRLDEQAARTLNDVRAHGGRIVATGTTSIRTLETIGTKFHGQLRADSGWTDIFIKPGYQWQVVDAFITNFHLPKSTLVMLVAAFTGRERILNAYQHAIAEKYRFFSFGDAMFIK

SEQ ID NO: 67981 - protein, 343 aa, Lactococcus chungangensis
  REGION 1..343: note = tr|A0A1K2H4D2|A0A1K2H4D2_9LACT S-adenosylmethionine:tRNA ribosyltransferase-isomerase; OS = Lactococcus chungangensis CAU 28 = DSM 22330 OX=1122154; GN = queA PE=3 SV=1
MNIEDFNFDLPEELIAQTPLEKRSESRLLVIDKTAQTMTDKHFYDIIDELETGDTLVLNNTRVLPARLHGQKADTGGHIELLLLKNTVADTWEVLAKPAKKLKNGTVISFGDGRLTATVIDDSLDHGGRIVTFNYDGIFLEVLESLGEMPLPPYIHEKLKDQGRYQTVYAKENGSAAAPTAGLHFTDDLLAQIKAKGVNIAWVTLHVGLGTFRPVSVDNIEEHDMHSEFYVLPEETADVINTTKAAGKRVIAVGTTSIRTLESVAQKFGGKVQDDSDWTNIFIKPGYKFQVVDAFSTNFHLPKSTLVMLVSAFAGREFVLDAYQHAIDEHYRFFSFGDAMFVK

SEQ ID NO: 67982 - protein, 345 aa, Lactococcus fujiensis
  REGION 1..345: note = tr|A0A2A5RQ73|A0A2A5RQ73_9LACT S-adenosylmethionine:tRNA ribosyltransferase-isomerase; OS = Lactococcus fujiensis JCM 16395 OX=1291764 GN=queA PE=3; SV = 1
MNINDFDFNLPEELIAQTPLKVRDSSRLLVLDPKTGQMEDKHFTDILDEFEAGDALVLNNTRVLPARLHGVKPDTQGHVELLLLKDKGNNEWETLAKPARRLHPGSEISFGDGRLKATVLEDLEHGGKIVKFAYDGIFLEVLESLGEMPLPPYIHEQLEDQERYQTVYAKENGSAAAPTAGLHYTPELLEAIKAKGVHIVELTLHVGLGTFRPVSVENVDEHIMHSEFYRLTEDAAAELRAVKSSGHKIVASGTTSIRTLETIGTKFNGDIQADSGWTDIFIKPGYDWKVVDAFNTNFHLPKSTLVMLVASFAGREFVLEAYKHAVDERYRFFSFGDAMFVKPKN

SEQ ID NO: 67983 - protein, 342 aa, Lactococcus garvieae
  REGION 1..342: note = tr|F9VEH5|F9VEH5_LACGL S-adenosylmethionine:tRNA ribosyltransferase-isomerase OS=Lactococcus garvieae (strain Lg2) OX=420890 GN=queA PE=3 SV=1
MNINDFDFNLPEELIAQTPLEKRSESKLLVLDKESHSMEDKHFYDIVDELNPGDALVLNNTRVLPARLYGVKPETQGHVELLLLKNTEGDQWETLAKPAKRMRIGQELSFGDGRLKATVVEELEHGGRIVEFSYDGIFLEVLESLGEMPLPPYIHEKLEDQERYQTVFAKENGSAAAPTAGLHYTPELLDKIRAKGVHVVELTLHVGLGTFRPVSVDNIEEHHMHSEFYQLSEEAAATLRAVKASGHRVIACGTTSIRTLETIGTKFDGDIQADSGWTDIFIKPGYQWKVVDAFNTNFHLPKSTLVMLVAAFAGQEFILEAYQHAIDEHYRFFSFGDAMFVK

SEQ ID NO: 67984 - protein, 342 aa, Lactococcus garvieae; identical to SEQ ID NO: 67983
  REGION 1..342: note = tr|V8APP1|V8APP1_9LACT S-adenosylmethionine:tRNA ribosyltransferase-isomerase OS=Lactococcus garvieae TRF1; OX = 1380772 GN=queA PE=3 SV=1

SEQ ID NO: 67985 - protein, 345 aa, Lactococcus lactis
  REGION 1..345: note = sp|Q9CFA6|QUEA_LACLA S-adenosylmethionine:tRNA ribosyltransferase-isomerase OS=Lactococcus lactis subsp. lactis (strain IL1403) OX=272623 GN=queA PE=3 SV=1
MNINDFDFDLPEELIAQTPLEKRSESRLLILDPKTEELEDRHFYNIIDELEAGDALVLNNTRVLPARLHGERAETGGHIELLLLKDMGQNRWETLAKPARKMKVGEEVVFGDGRLKAVVVEVLDHGGRIVEFKYDGIFLEILESLGEMPLPPYIHEQLQDQERYQTVFAKENGSAAAPTAGLHYTPELLEKIADKGVKIVELTLHVGLGTFRPVSVDNVDEHQMHSEFYRLTEEAAAQLRAVKASGHKIVASGTTSIRTLETIGSKFDGDIQADSGWTDIFIKPGYEWKVVDAFNTNFHLPKSTLVMLVAAFAGRDFVLDAYQHAIDEKYRFFSFGDAMFVRPKK

SEQ ID NO: 67986 - protein, 346 aa, Lactococcus lactis
  REGION 1..346: note = sp|A2RJR5|QUEA_LACLM S-adenosylmethionine:tRNA ribosyltransferase-isomerase OS=Lactococcus lactis subsp. cremoris (strain MG1363) OX=416870 GN=queA PE=3 SV=1
MNINDFDFDLPEELIAQTPLEKRSESRLLILDPKTEELEDRHFYDIIDELEAGDALVLNNTRVLPARLHGERAETGGHIELLLLKDMGENRWETLAKPARKMKVGEEVVFGDGRLKAVVVEILEHGGRIVEFKYDGIFLEILESLGEMPLPPYIHEQLEDQERYQTVFAKENGSAAAPTAGLHYTPELLEKIADKGVKIVELTLHVGLGTFRPVSVDNVDEHHMHSEFYRLTEEAAAQLRAVKASGHKIFASGTTSIRTLETIGSKFDGDIQADSGWTDIFIKPGYEWKVVDAFNTNFHLPKSTLVMLVAAFAGRDFVLEAYQHAIDEKYRFFSFGDAMFVRSKNK

SEQ ID NO: 67987 - protein, 342 aa, unidentified
  source 1..342: note = Lactococcus petauri
  REGION 1..342: note = tr|A0A252CCK9|A0A252CCK9_9LACT S-adenosylmethionine:tRNA ribosyltransferase-isomerase; OS = Lactococcus petauri OX=1940789 GN=queA PE=3 SV=1
MNINDFDFNLPEELIAQTPLEKRSESKLLVLDKESHSMEDKHFYDIVDELNPGDALVLNNTRVLPARLYGVKPETQGHVELLLLKNTEGDQWETLAKPAKRMRIGQELSFGDGRLKATVVEELEHGGRIVEFSYDGIFLEVLESLGEMPLPPYIHEKLEDQERYQTVFAKENGSAAAPTAGLHYTPELLDKIRAKGVHVVELTLHVGLGTFRPVSVDNIEEHHMHSEFYQLSEEAAATLRAVKASGHRVIACGTTSIRTLETIGTKFDGDIQADSGWTDIFIKPGYQWKVVDAFNTNFHLPKSTLVMLVAAFAGQDFILEAYQHAIDEHYRFFSFGDAMFVK

SEQ ID NO: 67988 - protein, 343 aa, Lactococcus piscium
  REGION 1..343: note = tr|A0A1C3SXE1|A0A1C3SXE1_9LACT S-adenosylmethionine:tRNA ribosyltransferase-isomerase; OS = Lactococcus piscium OX=1364 GN=queA PE=3 SV=1
MNIEDFNFDLPETLIAQTPLEHRSESRLLVIDKTKQTMTDKHFFDIIDELNSGDTLVLNNTRVLPARLHGQKADTGGHIELLLLKNTVDDTWEVLAKPAKKLKNGTMITFGDGRLTATVVDDSLDHGGRIVTFTYDGIFLEVLESLGEMPLPPYIHEKLADQGRYQTVYAKENGSAAAPTAGLHFTDDLLAQIKAKGVNIAWVTLHVGLGTFRPVSVDNIEEHDMHSEFYILPQETADIINETKAAGKRVIAVGTTSIRTLESVAKKFDGQVQADSDWTNIFIKPGYQFQVVDAFSTNFHLPKSTLVMLVSAFAGREFVLSAYQHAIDEHYRFFSFGDAMFVK

SEQ ID NO: 67989 - protein, 343 aa, Lactococcus piscium
  REGION 1..343: note = tr|A0A0D6DXP3|A0A0D6DXP3_9LACT S-adenosylmethionine:tRNA ribosyltransferase-isomerase; OS = Lactococcus piscium MKFS47 OX=297352 GN=queA PE=3 SV=1
MNIEDFNFDLPETLIAQTPLEHRSESRLLVIDKTKQTMTDKHFFDIIDELNSGDTLVLNNTRVLPARLHGQKADTGGHIELLLLKNTVDDTWEVLAKPAKKLKNGTKITFGDGRLTATVVDDSLDHGGRIVTFNYDGIFLEVLESLGEMPLPPYIHEKLADQGRYQTVYAKENGSAAAPTAGLHFTDDLLAQIKAEGVNIAWVTLHVGLGTFRPVSVDNIEEHDMHSEFYILPQETADIINETKAAGKRVIAVGTTSIRTLESVAKKFDGQVQADSDWTNIFIKPGYQFQVVDAFSTNFHLPKSTLVMLVSAFAGREFVLSAYQHAIDEHYRFFSFGDAMFVK

SEQ ID NO: 67990 - protein, 343 aa, Lactococcus plantarum
  REGION 1..343: note = tr|A0A2A5S1W0|A0A2A5S1W0_9LACT S-adenosylmethionine:tRNA ribosyltransferase-isomerase; OS = Lactococcus plantarum OX=1365 GN=queA PE=3 SV=1
MNIEAFDFDLPEALIAQTPLEHRSESRLLVIDKATHTMADKHFFDIVDELHTGDTLVLNNTRVLPARLHGEKADTGGHIELLLLKNKVDDTWEVLAKPAKKLKNGTVIKFGDGRLTATVIDDSLDHGGRIVTFNYDGIFLEVLESLGEMPLPPYIHEKLADQGRYQTVYAKENGSAAAPTAGLHFTDDLLDKIKAKGVNIAWVTLHVGLGTFRPVSVDNIEEHDMHSEFYILPQETADVINATKKAGKRVIAVGTTSIRTLESVAQKFDGQVKADSDWTKIFIKPGYTFQVVDAFSTNFHLPKSTLVMLVSAFAGREFVLDAYQHAIDEHYRFFSFGDAMFVK

SEQ ID NO: 67991 - protein, 343 aa, Lactococcus raffinolactis
  REGION 1..343: note = tr|A0A2A5SDG5|A0A2A5SDG5_9LACT S-adenosylmethionine:tRNA ribosyltransferase-isomerase; OS = Lactococcus raffinolactis OX=1366 GN=queA PE=3 SV=1
MNIEDFNFDLPEALIAQTPLEKRSESRLLIIDKATQTMTDQHFYNIIDELETGDTLVLNNTRVLPARLHGQKADTGGHIELLLLKNTVDDTWEVLAKPAKKLKNGTVISFGDGRLTATVVDDTLDHGGRIVTFNYDGIFLEVLESLGEMPLPPYIHEKLKDQGRYQTVYAKENGSAAAPTAGLHFTDDLLAQIKAKGVNIAWVTLHVGLGTFRPVSVDNIEEHDMHSEFYILPEETAAIINATKTAGKRVIAVGTTSIRTLESVAQKFGGKVQADSDWTNIFIKPGYKFQVVDAFSTNFHLPKSTLVMLVSAFAGREFVLEAYQHAIDEHYRFFSFGDAMFVK

SEQ ID NO: 67992 - protein, 343 aa, Lactococcus raffinolactis
  REGION 1..343: note = tr|I7L626|I7L626_9LACT S-adenosylmethionine:tRNA ribosyltransferase-isomerase OS=Lactococcus raffinolactis 4877 OX=1215915 GN=queA PE=3 SV=1
MNIEDFNFDLPEELIAQTPLEKRSESRLLVIDKATQTMADKHFYDIIDELETGDTLVLNNTRVLPARLHGQKADTGGHIELLLLKNTVADTWEVLAKPAKKLKNGTVISFGDGRLTATVIDDTLDHGGRIVTFNYDGIFLEVLESLGEMPLPPYIHEKLKDQGRYQTVYAKENGSAAAPTAGLHFTDELLAQIKTKGVNIAWVTLHVGLGTFRPVSVDNIEEHDMHSEFYILPEETADVINATKAAGKRVIAVGTTSIRTLESVAQKFGGKVQADSDWTNIFIKPGYKFQVVDAFSTNFHLPKSTLVMLVSAFAGREFVLDAYQHAIDEHYRFFSFGDAMFVK

SEQ ID NO: 67993 - protein, 343 aa, unidentified
  source 1..343: note = Lactococcus reticulitermitis
  REGION 1..343: note = tr|A0A224WW02|A0A224WW02_9LACT S-adenosylmethionine:tRNA ribosyltransferase-isomerase; OS = Lactococcus reticulitermitis OX=2025039 GN=queA PE=3; SV = 1
MNIEDFNFDLPEALIAQTPLEKRSESRLLVIDKATQTMTDQHFYDIIDELEAGDTLVLNNTRVLPARLHGQKADTGGHIELLLLKNTVDDTWEVLAKPAKKLKNGTVISFGDGRLTARVVDDSLDHGGRIVTFNYEGIFLEVLESLGEMPLPPYIHEKLKDQGRYQTVYAKENGSAAAPTAGLHFTDDLLAQIKAKGVNIAWVTLHVGLGTFRPVSVDNIEEHEMHSEFYILPEETADVITATKAAGKRVIAVGTTSIRTLESVAQKFGGKVQADSDWTTIFIKPGYKFQVVDAFSTNFHLPKSTLVMLVSAFAGRDFVLAAYQHAIDEHYRFFSFGDAMFVK

SEQ ID NO: 67994 - protein, 345 aa, Lactococcus sp.
  REGION 1..345: note = tr|A0A387B9W7|A0A387B9W7_9LACT S-adenosylmethionine:tRNA ribosyltransferase-isomerase; OS = Lactococcus sp. 1JSPR-7 OX=2419773 GN=queA PE=3 SV=1
MNINDFDFDLPEELIAQTPLEKRSESRLLVLDPKTHQMQDKHFYNIIDELESGDALVLNNTRVLPARLHGVRSETKGHIELLLLKDLGENRWETLAKPARKMKVGEQVIFGDGRLSAVVIEILEHGGRIVEFHYDGIFLEILESLGEMPLPPYIHEQLEDQERYQTVFAKENGSAAAPTAGLHYTPELLQAIEDKGVKIVELTLHVGLGTFRPVSVDNVDEHHMHSEFYQLSEEAAKTLREVKTSGHKVVACGTTSIRTLETIGSKFKGDIQADSGWTDIFIKPGYEWKVVDAFNTNFHLPKSTLVMLVAAFAGRDFVLEAYQHAVDEKYRFFSFGDAMFVRTKS

SEQ ID NO: 67995 - protein, 345 aa, Lactococcus sp.
  REGION 1..345: note = tr|A0A5C8KA29|A0A5C8KA29_9LACT S-adenosylmethionine:tRNA ribosyltransferase-isomerase; OS = Lactococcus sp. dk310 OX=2603289 GN=queA PE=3 SV=1
MNINDFDFELPEELIAQTPLKIRDSSRLLVLDPKAHEMKDQHFTDILDQFEAGDALVLNNTRVLPARLHGVKPDTQGHVELLLLKDKGDNQWETLAKPARRLHPGSEIIFGDGRLKATIIEDLEHGGKIVKFSYEGIFLEVLESLGEMPLPPYIHEQLEDQERYQTVYAKENGSAAAPTAGLHYTPELLAAIKAKGVHIVELTLHVGLGTFRPVSVENVDEHIMHSEFYRLTEEAAAELRAVKAAGHKIVASGTTSIRTLETIGTKFNGDIQADSGWTDIFIKPGYEWKVVDAFNTNFHLPKSTLVMLVASFAGRDFVLDAYKHAVDERYRFFSFGDAMFVKPKK

SEQ ID NO: 67996 - protein, 343 aa, unidentified
  source 1..343: note = Lactococcus termiticola
  REGION 1..343: note = tr|A0A2R5HDZ2|A0A2R5HDZ2_9LACT S-adenosylmethionine:tRNA ribosyltransferase-isomerase; OS = Lactococcus termiticola OX=2169526 GN=queA PE=3 SV=1
MLDINDFDFELPEELIAQTPLEQRSNSRLLVLDKDAKSMEDKHFFDIVDEMNEGDALVLNNTRVLPARLYGERAETHGHVELLLLKDLGGNRWETLAKPARKMTVGQKVIFGDGRLSATIVEELEHGGRIVEFSYEGIFLEVLESLGEMPLPPYIHEKLEDQERYQTVYAKVNGSAAAPTAGLHYTPELLDAIRAKGVKIVELTLHVGLGTFRPVSVDNIEDHHMHSEFYQLSEEAAATLREVKASGHRIIASGTTSIRTLETIGTKFDGDIQADSGWTDIFIKPGYDWKVVDAFNTNFHLPKSTLVMLVSAFAGRDFVLDAYQHAIDEHYRFFSFGDAMFIK

SEQ ID NO: 67997 - protein, 341 aa, Lactonifactor longoviformis
  REGION 1..341: note = tr|A0A1M4WYX8|A0A1M4WYX8_9CLOT S-adenosylmethionine:tRNA ribosyltransferase-isomerase; OS = Lactonifactor longoviformis DSM 17459 OX=1122155; GN = queA PE=3 SV=1
MKTSDFYYDLPQELIAQDPLEDRSASRLLHLDPLTGEIEHRIFKDVVQYLNPGDCLVVNDTRVIPARLYGTKEGTEAGIEILLLKRKPDDVWETLVKPGKKAKIGTKISFGDGILRGEVIDIVEEGNRLIRFTYDGIFEEILDRLGEMPLPPYITHKLQDKERYQTVYAKHEGSAAAPTAGLHFTEPLLEEIKKKGVHIAHVTLHVGLGTFRPVKVEDVTQHHMHSEYYVVEEEQAKLINDAKKRGNKVISVGTTSCRTLESAAGEDGMVRAQSGWTDIFIYPGYQFKVIDGLITNFHLPESTLLMLVSALAGKQHIMAAYEEAVRERYRFFSFGDAMLIL

SEQ ID NO: 67998 - protein, 400 aa, unidentified
  source 1..400: note = Lacunisphaera limnophila
  REGION 1..400: note = tr|A0A1D8AQZ0|A0A1D8AQZ0_9BACT S-adenosylmethionine:tRNA ribosyltransferase-isomerase; OS = Lacunisphaera limnophila OX=1838286 GN=queA PE=3 SV=1
MSPLSTDLFDYPLPERLIAQSPAQQRDASRLLVVDRSTRTLAHRHFRDLPDYLRAGDTLFRNNAAVIPARLHATRPTGGQVECLLLRPAVDTAGLPAVLSAIGPATAEATQSPSRMESPPSPSLRRTASALTSLGEGWWCLLRPGKKLPVGATFGLAGAFTATVLEKTDDGLARVAFTTTGGDLLAVANRIGDMPLPPYISGHENAADRTTDRERYQTVYADRGHQVAAAAPTAGLHFTPELLTRIAGQGVTFADLTLHVGLGTFRPIMTDTIQDHAIHREVYEIPVATQQALFAGQGRRIAVGTTSVRSIEDYLSRTTSAMPQDWMAEAGIFIYPPRPFRGVDALITNFHQPRSTLLCLVSAFLTPGSTEGIAWLKDIYAEAVAEEYRFFSYGDAMLIL

SEQ ID NO: 67999 - protein, 387 aa, unidentified
  source 1..387: note = Lacunisphaera sp.
  REGION 1..387: note = tr|A0A4Q1C371|A0A4Q1C371_9BACT S-adenosylmethionine:tRNA ribosyltransferase-isomerase; OS = Lacunisphaera sp. TWA-58 OX=2508720 GN=queA PE=3 SV=1
MNADLFDYSLPERLIAQQPAQRRDESRLLVVDRKNRSLAHRQFRDLPEYLRAGDTLFRNNAAVIPARLHAVRPTGGAVECLLLRPAVAPVQVSGFSASVSQSENRGQTPGGQQSATAKSQVSQEWWCLIRPGKKLPVGASFGLEHQFTGTVLEKTEDGLARVSFTTTDGDILAVANRIGEMPLPPYITGHESAEAHRLDRERYQTVYADRGHQVAAAAPTAGLHFTPELLAKVSALGVSCADLTLHVGLGTFRPITAERIEDHAIHREVYEMPVVTQRALFETKGRRIAVGTTSVRSIEDYLSRTNAPSTDAWMAEASIFIYPPRSFRGVDALITNFHQPRSTLLCLVSSFLTPGSMDGINWLKEIYAEAIAREYRFFSYGDAMLIL

SEQ ID NO: 68000 - protein, 373 aa, unidentified
  source 1..373: note = Lampropedia cohaerens
  REGION 1..373: note = tr|A0A0U1PYS7|A0A0U1PYS7_9BURK S-adenosylmethionine:tRNA ribosyltransferase-isomerase; OS = Lampropedia cohaerens OX=1610491 GN=queA PE=3 SV=1
MVGFACLAMSERRYTLADFDYPLPEELIAHHPAPVRSASRLLDGRQWPAQDRVFHDLPALLAPGDLLIFNDTKVVKARIFGEKASGGKLEILIERVLEDDQVAVHLRVSKKPAVGATLHFAGGLAHGGFDATLLGRYPGADGPLFCLQLQLPPGETAWSVMERFGHLPLPPYIERHQADGDDADAAEDAERYQTVFARKPGAVAAPTAALHFDAATLQALQDKGIERAGITLHVGAGTFQPVKTEDIGQHRMHSEYYEIPAATLAAIDACRARGGRVVAVGTTSVRTLESWAQTGQTRGDTQIFITPGFRFRVVDLLVTNFHLPKSTLMMLVSAFAGYDHIRRLYAHAIAGRYRFFSYGDSMLLQRTESPQAS

SEQ ID NO: 68001 - protein, 368 aa, Lampropedia hyalina
  REGION 1..368: note = tr|A0A1M4YRJ7|A0A1M4YRJ7_9BURK S-adenosylmethionine:tRNA ribosyltransferase-isomerase; OS = Lampropedia hyalina DSM 16112 OX=1122156 GN=queA PE=3; SV = 1
MTTPQTQPHTLSDFDYVLPPELIAQHPTAQRSASRLLDGRHLPPADRHFHDLPQLLQAGDLLVFNDTRVVRARIFGEKASGGKLEILIERVLGGDEVAVHLKVSKKPAIGGLLHLAGGLHDGGFDAVLLGRYPHADGPLFRLRLIGPPDATPWSLMEQHGHLPLPPYIARQQAADFDPDEAEDNERYQTVFAREPGAVAAPTAALHFDAAVLEQLAQRGVQRANLTLHVGAGTFQPVKTENIAEHRMHSEWYHIPASTVQAIADCKARGGRVVAVGTTSVRTLESWARSGQTEGDTQIFITPGFDFQVVDVLITNFHLPKSTLMMLVSAFAGYTHIRQLYEHAVAQQYRFFSYGDSMLLERQPLSASR

SEQ ID NO: 68002 - protein, 361 aa, unidentified
  source 1..361: note = Lampropedia puyangensis
  REGION 1..361: note = tr|A0A4S8FCI1|A0A4S8FCI1_9BURK S-adenosylmethionine:tRNA ribosyltransferase-isomerase; OS = Lampropedia puyangensis OX=1330072 GN=queA PE=3 SV=1
MSLPVYSLADFDYDLPEALIAHHPAQERSASRLLDGRSWPPVDRIFRDLPGLLRKGDLLVFNDTQVVKARIFGEKASGGKLEILIERVLDERHIAVHLRVSKKPLPGSLMHFAGGLRQGGFDAVMQGRYPDADGPLFLLQVNAPEGQTPWTLMERFGHLPLPPYIERHQQGNDPDAKEDAERYQTVFAREPGAVAAPTAALHFDEPTLQALQAQGVERANITLHVGAGTFQPVKTEDLSQHRMHSEYYHIPQSTVDAINACKARGGRVIAVGTTSVRTLESWAKTGQTQGDTQIFITPGFRFEVVDVLVTNFHLPKSTLMMLVSAFAGYEHIRQIYQHAIAQQYRFFSYGDSMLLSRLQPA

SEQ ID NO: 68003 - protein, 364 aa, Lampropedia sp.
  REGION 1..364: note = tr|A0A4S5BJC0|A0A4S5BJC0_9BURK S-adenosylmethionine:tRNA ribosyltransferase-isomerase; OS = Lampropedia sp. YIM MLB12 OX=2562762 GN=queA PE=3 SV=1
MPPVSYTLADFDYDLPEALIAHHPAEQRSASRLLDARSAQLQDRIFRDLPGLLQAGDLLVFNDTQVVKARIFGEKASGGKLEILIERVLDEQHVAVHLRVSKKPLPGSTMHFAGGLQQGGFDAVMQGRYPDADGPLFLFKIQAPEGQTPWSLMERFGHLPLPPYIERHQQENDLDAEEDAERYQTVFAREPGAVAAPTAALHFDQMTLDALQANGIERANITLHVGAGTFQPVKTEDLSQHRMHSEYYHIPDSTLAAIAACKARGGRVVAVGTTSVRTLESWAKTGKTQGDTQIFITPGFAFQVVDVLITNFHLPKSTLMMLVSAFAGYEHIRHVYQHAIAQQYRFFSYGDSMLLSRVAPATAV

SEQ ID NO: 68004 - protein, 380 aa, Laribacter hongkongensis
  REGION 1..380: note = tr|A0A248LF17|A0A248LF17_9NEIS S-adenosylmethionine:tRNA ribosyltransferase-isomerase; OS = Laribacter hongkongensis OX=168471 GN=queA PE=3 SV=1
MQNFPSPPASMENPPHACATPCRRVTYNRPVFPSADAMQLSDFDYHLPEHLIAQFPPAERGNSRLLHVSPAGLADLQFADLPGLLSPDDLLVVNDTRVIKARLFGRKASGGAVEALVERVLDERTALAHVRASKSPKPGSRLVFADRWEAEMVERQGELFLLRFPGDTSVLDILDAAGHLPLPPYITRSAGDNDDERYQTIYAREQGAVAAPTAGLHFTDGLMAAIRTRGIDVARVTLHVGAGTFQPVRVDNIAEHKMHSERFVIPQATVDAIASCRARGGRVVAVGTTSMRALEAGAQSGELRAGPSETDIFITPGYRFRVVDRLVTNFHLPKSTLMMLVSAFAGTETIRVAYRHAIERQYRFFSYGDAMLLERQDAQP

SEQ ID NO: 68005 - protein, 380 aa, Laribacter hongkongensis
  REGION 1..380: note = tr|C1DCV5|C1DCV5_LARHH S-adenosylmethionine:tRNA ribosyltransferase-isomerase OS=Laribacter hongkongensis (strain HLHK9) OX=557598 GN=queA PE=3 SV=1
MQNFPSPPASMENPPHACATPCRRVTYNRPVFPSADAMQLSDFDYHLPEHLIAQFPPAERGNSRLLHVSPAGLADLQFADLPGLLSPDDLLVVNDTRVIKARLFGRKASGGAVEALVERVLDERTALAHVRASKSPKPGSRLVFADRWEAEMVERQGELFLLRFPGDTSVLDILDAAGHLPLPPYITRSAGDNDDERYQTIYAREQGAVAAPTAGLHFTDGLMAAIRARGIDVARVTLHVGAGTFQPVRVDNIAEHKMHSERFVIPQATVDAIAACRARGGRVVAVGTTSMRALEAGAQSGELRAGPSETDIFITPGYRFRVVDRLVTNFHLPKSTLMMLVSAFAGTETIRAAYRHAIERQYRFFSYGDAMLLERQDAQP

SEQ ID NO: 68006 - protein, 347 aa, Larkinella arboricola
  REGION 1..347: note = tr|A0A327WQ89|A0A327WQ89_9BACT S-adenosylmethionine:tRNA ribosyltransferase-isomerase; OS = Larkinella arboricola OX=643671 GN=queA PE=3 SV=1
MKLSEFRFDLPQSLVALYPPERGEARLMVVDRKNKTIEHKQFSDIISYFGDGDVMVINDTKVFPARLYGNKEKTGAKIEVFLLRELNREMRLWDVLVDPARKIRVGNKLYFGDSDLVAEVIDNTTSRGRTIRFLFEGSHEEFMKAIDELGETPLPREIKRKTEDADRDRYQTIFAQHVGAVAAPTAGLHFTKTIMKRMEIKGIHFAPITLHVGLGTFRTVDVEDLTKHKTDSENYSITETAADVVNQALDNGKRVCAIGTTSLKAIESSVSANGRLKPVDGWTDRFIFPPYDFKIANALLTNFHLPESILIMMTSAFGGYDLIKQAYEVAIQEKYKFFSYGDAMLIL

SEQ ID NO: 68007 - protein, 405 aa, Larkinella arboricola
  REGION 1..405: note = tr|A0A327XBN5|A0A327XBN5_9BACT S-adenosylmethionine:tRNA ribosyltransferase-isomerase; OS = Larkinella arboricola OX=643671 GN=queA PE=3 SV=1
MQKTRMEELQLNDFQYHLADERIARFPLAQRDQSKLLEYRRGVIEHRSFFELPDRLPADSLLIFNNTKVIPARLHFQRATGAVIELFLLNPLPADRLVTEAMQDHQQSIWQCMIGNRKRWKPDETLSKEIRIGEQTVLLRAYWHDADRSSIRFEWTGNEAFASILHEAGKIPLPPYLNRDVTDADQENYQTVYSRIEGAVAAPTAGLHFTPAVLARLEEKGIRTDYLTLHVGAGTFQPIKATDVRQHMMHTEQVVYSRQNLENLVDHRGPVIAVGTTSMRSLESLYWFGVRLLKDEPEPFLLDQHYAYSLQEADLPDRKDAIRAVLNYLQETGQPQVVAHTGIYCMPGYRFRITNGLVTNFHQPGSTLILLVAAFVGEQWRTIYNEALQNGYRFLSYGDSSLLLP

SEQ ID NO: 68008 - protein, 347 aa, unidentified
  source 1..347: note = Larkinella knui
  REGION 1..347: note = tr|A0A3P1CLR1|A0A3P1CLR1_9BACT S-adenosylmethionine:tRNA ribosyltransferase-isomerase; OS = Larkinella knui OX=2025310 GN=queA PE=3 SV=1
MKLSEFRFDLPQSLVALYPPERGEARLMVVDRKTKTIEHKQFSDILSYFDDGDVMVINNTKVFPARLYGNKEKTGAKIEVFLLRELNREMRLWDVLVDPARKIRVGNKLYFGDSDLVAEVIDNTTSRGRTIRFLFEGSHEEFMKAIDELGETPLPREIKRKTEDSDRDRYQTIFAQHVGAVAAPTAGMHFTKTIMKRMEIKGIHFAPITLHVGLGTFRTVDVEDLTKHKTDSENYSITDSAANIVNQALDKNKRVCAVGTTSLKAIESSVSANGRLKSVEGWTDRFIFPPYDFKIANALLTNFHLPESILIMMTSAFGGYDLIKQAYDIAIQEKYKFFSYGDAMLIL

SEQ ID NO: 68009 - protein, 402 aa, unidentified
  source 1..402: note = Larkinella knui
  REGION 1..402: note = tr|A0A3P1CN53|A0A3P1CN53_9BACT S-adenosylmethionine:tRNA ribosyltransferase-isomerase; OS = Larkinella knui OX=2025310 GN=queA PE=3 SV=1
MMKELQLNDFQYDLPDERIARFPLAQRDQSKLLEYRQGIIAHRSFRELPERLPATSLLIFNNTKVIPARLHFQRSTGAVIELFLLNPVPADRLVSEAMQDKNRSVWQCMIGNRKRWKPDEILTKEIRFGEHTLVVRAQWHDMEQSQVRFEWTPGDETFAAILHETGKIPLPPYLNRDATEADKETYQTVYSRIEGAVAAPTAGLHFTPDVLSRLAQHGIQTDYLTLHVGAGTFQPIKSADVRQHAMHTEQVVYARQNLEKLLTHPGPVIAVGTTSMRSLESLYWFGVRLLNNERDPFTLDQHYAYLFPEDQLPEKREALAAVLTYLTQTDQTHVIGHTGIYCVPGYRFRVVNGLVTNFHQPGSTLILLVAAFIGENWRTIYKEALQNDYRFLSYGDSSLLLP

SEQ ID NO: 68010 - protein, 347 aa, unidentified
  source 1..347: note = Larkinella rosea
  REGION 1..347: note = tr|A0A3P1BJ20|A0A3P1BJ20_9BACT S-adenosylmethionine:tRNA ribosyltransferase-isomerase; OS = Larkinella rosea OX=2025312 GN=queA PE=3 SV=1
MKLSEFRFDLPQSLVALYPPERGEARLMVVDRKTKTIEHKQFSDILNYFGDGDVMVINNTKVFPARLYGNKEKTGAKIEVFLLRELNREMRLWDVLVDPARKIRVGNKLYFGDSDLVAEVIDNTTSRGRTIRFLFEGSHEEFMKAIDELGETPLPREIKRKTEDSDRDRYQTIFAQHVGAVAAPTAGMHFTKTIMKRMEIKGIHFAPITLHVGLGTFRTVDVEDLTKHKTDSENYSIQDSAAAIVNEALDNNKRVCAVGTTSLKAIESSVSANGRLKSVDGWTDRFIFPPYDFKIANSLLTNFHLPESILIMMTSAFGGYDLVKQAYDIAIQEKYKFFSYGDAMLIL

SEQ ID NO: 68011 - protein, 411 aa, unidentified
  source 1..411: note = Larkinella rosea
  REGION 1..411: note = tr|A0A3P1B9I4|A0A3P1B9I4_9BACT S-adenosylmethionine:tRNA ribosyltransferase-isomerase; OS = Larkinella rosea OX=2025312 GN=queA PE=3 SV=1
MEELQLNDFQYNLPDERIARFPLPQRDRSKLLEYRQGKIDHRSFRDLPDQLPSGSLLVFNDTKVIPARLHFRRSTGATIELFLLNPVPADRLVSEAMQDHHQSIWQCMIGNRKRWKPDEVLEQEVRIHDHTVLVKAHWHDAHQSQVRFEWTPGNEMPGDEMPGDESFAAILHEAGKIPLPPYLNRDVTEADKETYQTVYSRIEGAVAAPTAGLHFTPEVLAQLAQKGIKTDYLTLHVGAGTFQPIKTSDVRQHAMHSEQVVYSRQNLQHLLTHTGPVIAVGTTSMRSLESLYWFGVRLLKQEPDPWHLDQKYAYSVSENDLPEKPEAVRAVLNYLEKTGQEAVIGHTGIYCMPGYRFRITNGLVTNFHQPGSTLILLIAAFVGENWRTIYKEALQNGYRFLSYGDSSLLLP

SEQ ID NO: 68012 - protein, 347 aa, Larkinella sp.
  REGION 1..347: note = tr|A0A4V3GGN9|A0A4V3GGN9_9BACT S-adenosylmethionine:tRNA ribosyltransferase-isomerase; OS = Larkinella sp. BK230 OX=2512173 GN=queA PE=3 SV=1
MKLSEFRFDLPQSLVALYPSERGESRLMVVDRKTKTIEHKQFSDILSYFGDGDVMVINDTKVFPARLYGNKEKTGAKIEVFLLRELNREMRLWDVLVDPARKIRVGNKLYFGDSDLVAEVIDNTTSRGRTIRFLFEGSHEEFMKAIDELGETPLPREIKRKTEDADRDRYQTIFAQHVGAVAAPTAGLHFTKTIMKRMEIKGIHFAPITLHVGLGTFRTVDVEDLTKHKTDSENYSITEPAVDIVNEALDNGKRVCAVGTTSLKAIESSVSANGRLKAVDGWTDRFIFPPYDFKIANALLTNFHLPESILIMMTSAFGGYDLIKQAYEVAIQEKYKFFSYGDAMLIL

SEQ ID NO: 68013 - protein, 347 aa, Larkinella sp.
  REGION 1..347: note = tr|A0A368JCY6|A0A368JCY6_9BACT S-adenosylmethionine:tRNA ribosyltransferase-isomerase; OS = Larkinella sp. ZZJ9 OX=2315727 GN=queA PE=3 SV=1
MKLSEFRFDLPQSLVALYPPERGEARLMVVDRKTKTIEHKQFSDILSYFGDGDVMVINNTKVFPARLYGNKEKTGAKIEVFLLRELNREMRLWDVLVDPARKIRVGNKLYFGDSDLVAEVIDNTTSRGRTIRFLFEGSHEEFMKAIDELGETPLPREIKRKTEDSDRDRYQTIFAQHVGAVAAPTAGLHFTKTIMKRMEIKGIHFAPITLHVGLGTFRTVDVEDLTKHKTDSENYAITDSAAGIVNTALDNNRRVCAVGTTSLKAIESSVSANGRLKSVEGWTDRFIFPPYDFKIANSLLTNFHLPESILIMMTSAFGGYDLIKQAYDVAIQEKYKFFSYGDAMLIL

SEQ ID NO: 68014 - protein, 350 aa, unidentified
  source 1..350: note = Latescibacteria bacterium
  REGION 1..350: note = tr|A0A0S7XC60|A0A0S7XC60_9BACT S-adenosylmethionine:tRNA ribosyltransferase-isomerase; OS = Latescibacteria bacterium DG_63 OX=1703781 GN=queA PE=3; SV = 1
MARDEDELELFRYELPEDLIARRPVSSRSSARLMVLDRGAKSIEHASFESLSSYFDEGDCLVLNETRVIPCRLDGTRTETGGKLELLFVRKRERSLWEALVRPARRLRDGTDVSVSGGATMKIIERVSGARFLVEVPENFESYLEQWGKMPIPPYLKRAPDSQDKKDYQTVYARVLGSSAAPTAGLHFSRETMRKLEAKGVSVTKLVLHVGPGTFKPLVPGPLSSQKLDPEYYEITSETCHVVNRTRGRGGRVFAVGTSTARALETVTALANNGRDSSLVPSHGWTEKFIYPPYEFRAIDALVTNFHLPASSVLLLVCAFAGTEFTLSAYEEAKERQYRFYSYGDAMLII

SEQ ID NO: 68015 - protein, 351 aa, Lautropia mirabilis
  REGION 1..351: note = tr|E7RY55|E7RY55_9BURK S-adenosylmethionine:tRNA ribosyltransferase-isomerase OS=Lautropia mirabilis ATCC 51599 OX=887898 GN=queA PE=3 SV=1
MKLSDFDYHLPEELIAQYPPEQRAGGRLLDVTTLMQQPEASAADRLLADLPELIAPGSLLVFNDTRVIHARLAGRKESGGRIEVMVERIDGEHEVLAMVRASHPPKAGSRLHFGPENATECATVVSAREPGSMMLRIRFDAPAAGVLERLGELPLPPYIQHQPDQADEARYQTVFAREPGAVAAPTAGLHFDEALLAALRARGIDSAHLTLHVGAGTFLPVRTEDLSQHHMHSERYTLSAETAQAIARAKAEGRPVVAIGTTALRALEASGGVAGSGETDLFITPGYRFRVVDRLFTNFHLPKSTLLILVSAFAGRETIRRAYAHAIAQRYRFFSYGDAMLLDRAPVEGDA

SEQ ID NO: 68016 - protein, 388 aa, Lautropia sp.
  REGION 1..388: note = tr|A0A3R8NBL4|A0A3R8NBL4_9BURK S-adenosylmethionine:tRNA ribosyltransferase-isomerase; OS = Lautropia sp. KCOM 2505 OX=2490857 GN=queA PE=3 SV=1
MKLSDFDYHLPDELIAQYPPEHRAGGRLLDVSALGAAAGSGTGHLATEHSVADRLLTDLPSLLAPGSLVVFNDTKVIHARLFGHKESGGRIEVMVERIDGEFEVLAMVRASHPPKEGSRLYFGDAGAGSGSGSGSGSGSRAGSGASSHGDGPPASHAAATATVVSAREPGSMLLRLRFDAPAAEVLERLGELPLPPYIQHTPDGADESRYQTVFAREPGAVAAPTAGLHFDEALLAALRARGVEMTHLTLHVGAGTFLPVRTEDLSQHQMHAERYAISPETAQAIARAKAGGRPVVAIGTTAMRALEASSGQAGVGETNLFITPGYRFRVVDRLFTNFHLPKSTLLILVSAFAGRETIRRAYAHAIAQRYRFFSYGDAMLLDRDDHAT

SEQ ID NO: 68017 - protein, 372 aa, Lautropia sp.
  REGION 1..372: note = tr|A0A1D2TIN7|A0A1D2TIN7_9BURK S-adenosylmethionine:tRNA ribosyltransferase-isomerase; OS = Lautropia sp. SCN 70-15 OX=1660105 GN=queA PE=3 SV=1
MRLSDFDFELPAELIAQHPPAERGASRLLVVRAGGAGDDAAGAGGAEAPPEDRPQARLEDRVFADLPSLLAPGDLLVLNDTRVIRARLFGVKDSGGRVEALVERVTGTHEAIAMLRASKPPKPGSRIAWRSGGAEVLERADEFWRLRFDDPVMEVLEREGRLPLPPYITHAPGAEDERRYQTVYAREAGSVAAPTAGLHFDESMLARLREAGIGLAWVTLHVGAGTFQPVRVEDLSRHRMHAERYEVPEATARAIAGTRAAGGRIVAVGTTSLRTLEGVAAAHEGAVVAGAGETRLFVTPGFRFRVVDRLITNFHLPKSTLLMLVSAFAGVETIRRAYAHAIAQRYRFFSYGDAMLLERSPDAAGHAPADPL

SEQ ID NO: 68018 - protein, 366 aa, Lawsonia intracellularis
  REGION 1..366: note = tr|Q1MQ84|Q1MQ84_LAWIP S-adenosylmethionine:tRNA ribosyltransferase-isomerase OS=Lawsonia intracellularis (strain PHE/MN1-00) OX=363253 GN=queA PE=3 SV=1
MSSITESDFLLSSYMFSLPKTQIAQYPYERGKSRLLVLTKKNSTIIHTDFSKIEHYLPNNSLLIANNSRVFPARIFCSYDKRNIEVFLLTPISFLEIQAKSSDEHYGAWSTAIGECLIRPAKRVNIGSKLYLQQELEIEVLKKEDFGRHIVKLCWKGSLSNIFFSYGDIPHPPYIHQSNKVQDKERYQTVYSRLDKLGSVAAPTAGLHFSETIRNKLQKNGISWAEITLHVGYGTFSPVRCNDIRKHIMHSEFVEVPETTVQAIKKARFEGRPIFAIGTTVVRALEGVSTICGSLQPYTGFINIFISPGYKFSYVDGLVTNFHLPGSTLLMLVSAFTKRSIMINTYNKAIELGYRFFSYGDAMLII

SEQ ID NO: 68019 - protein, 350 aa, unidentified
  source 1..350: note = Lawsonibacter asaccharolyticus
  REGION 1..350: note = tr|A0A2P2FB91|A0A2P2FB91_9FIRM S-adenosylmethionine:tRNA ribosyltransferase-isomerase; OS = Lawsonibacter asaccharolyticus OX=2108523 GN=queA PE=3; SV = 1
MKTSDFDFELPEELIAQTPLERRDASRLLTLDKYTGETGHHHFYELPRFLRPGDCLVLNDSRVLPARLIGRRSTGGACEVLLLIDRGEGLWECLVRPGRKMKPGAQLSFGEGKLTAAVEAELPGGNRLVRFHYQGIFLEILEELGRMPLPPYIKAELQDNERYQTVYSKVLGSAAAPTAGLHFTPELLRQVEEMGVRLCYVTLHVGLGTFRPVKEEEITDHEMHSEYCMVPGETARIINETRKNGGRVICVGTTSCRTVESFAAEDGTMEESAGWTNIFIYPGYRFKVLDGLITNFHLPESTLIMLVSALAGREHVLAAYREAVRERYRFFSFGDAMLIADFKEQEREKG

SEQ ID NO: 68020 - protein, 350 aa, Leadbetterella byssophila
  REGION 1..350: note = tr|E4RWQ7|E4RWQ7_LEAB4 S-adenosylmethionine:tRNA ribosyltransferase-isomerase OS=Leadbetterella byssophila (strain DSM 17132 / KACC 11308 / 4M15) OX=649349 GN=queA P; E = 3 SV=1
MKLSSFKFDLPDSLIAQHPYEDRDGARMMVLHRKTGKIEHKQFRDIIEYFGDGDVMVANDTKVFPARLYGSKEKTGAKIEVFLLRELNREMRLWDVLVDPARKIRVGNKLYFGDSDLVAEVIDNTTSRGRTIRFLFDGNHEEMMQAIYELGETPIPKDILQREVADYDEERFQTIFAKNEGAVAAPIAGIHFTKNIVRRMEINGVDFAPLTLHIGIGTFRQVEVEDLTKHKTDSENFFIPEATCNIVNRALDENKRVCAIGSTSLRAMESSVSANNRLKPLDNAWTDKFIFPPFDFKIANALLTNFHLPESILLMTTCAFGGYDTVMEAYQVAIKEKYKFFTYGDAMLII

SEQ ID NO: 68021 - protein, 394 aa, Leadbetterella byssophila
  REGION 1..394: note = tr|E4RZT0|E4RZT0_LEAB4 S-adenosylmethionine:tRNA ribosyltransferase-isomerase OS=Leadbetterella byssophila (strain DSM 17132 / KACC 11308 / 4M15) OX=649349 GN=queA P; E = 3 SV=1
MKIDIKEYTYPLIEEQIARFPHSPRDESKLLVYKDGQISHQIFKQIGDFLPDGAHLVLNDTKVIPARLYFTRQTGALIEIFLLNPLQPSTVLPIVMDETREVVWHCVIGNKKKWKADEVLEGKFTLEGRSYKLWAKQGEDNAVALTWEGDWAFSKVVEAYGNIPLPPYLKRESQESDLTDYQTVYSEHEGAVAAPTAGLHFTDAVFQDLEGRGVKKSFVTLHVGAGTFMPVKEENALNHPMHSEQIIVSRQFLNEILAQEDFIIPVGTTSMRSLESMYWWGVKLIKGEDQPFSIEKLYPYQDHPPITARESFEALLKEMGDEGQLVGNTEIMIFPSYTFRVCKGLITNFHQPTSTLLLLVAALVGEETWRKIYAEAGQQGYRFLSFGDSSLLLP

SEQ ID NO: 68022 - protein, 339 aa, unidentified
  source 1..339: note = Lebetimonas natsushimae
  REGION 1..339: note = tr|A0A292Y941|A0A292Y941_9PROT S-adenosylmethionine:tRNA ribosyltransferase-isomerase; OS = Lebetimonas natsushimae OX=1936991 GN=queA PE=3 SV=1
MNDFLVSAYDYNLPEGLIAKYPAKPRDLAKLLVYDRKSDKIIHTVFKNILDFVPHSAFIFNNTKVIKARIFGVKETGGKVELLLNRPYKNAYLVYIRGKVKVGSKLFFDKGLVAEVKELLEDGSRVVDFKLKMDNGEWKILDFLDLVNILEKIGHVPLPPYIKRNDEKIDETEYQTVFAKKEGAVAAPTASLHFTDELLNKIKEKYFLTLHVGAGTFKPVEVEDIREHKMHSEFYEIPENTAKILDSKKEIVAVGTTVTRTIEYYARTKKLSGECDLFLHPKNPPIRVNHLLTNFHLPKSTLIMLVAAFIGRKKTLEIYKEAIEKKYRFYSYGDAMLII

SEQ ID NO: 68023 - protein, 356 aa, Leclercia adecarboxylata
  REGION 1..356: note = tr|A0A5B7XPC1|A0A5B7XPC1_9ENTR S-adenosylmethionine:tRNA ribosyltransferase-isomerase; OS = Leclercia adecarboxylata OX=83655 GN=queA PE=3 SV=1
MRVADFSFDLPESLIAHYPMPERSSCRLLSLDGPTGALTHGTFTDLLDKLNPGDLLVFNNTRVIPARLFGRKASGGKIEVLVERMLDDKRILAHIRASKAPKPGAELLLGDDESIKATMTARHDALFEVEFNDERTVLDILNAIGHMPLPPYIERPDEEADRELYQTVYSQKPGAVAAPTAGLHFDEPLLEKLRAKGIEMAFVTLHVGAGTFQPVRVDSIEDHIMHSEYAEVPQGVVDAVMAAKARGNRVIAVGTTSVRSLESAAQAAKNDLIEPFFGDTQIFIYPGYQYQVIDALVTNFHLPESTLIMLVSAFAGYQNTMNAYKAAVEQKYRFFSYGDAMFITYNPQALNERVGE

SEQ ID NO: 68024 - protein, 356 aa, Leclercia adecarboxylata
  REGION 1..356: note = tr|A0A3E1ZZH2|A0A3E1ZZH2_9ENTR S-adenosylmethionine:tRNA ribosyltransferase-isomerase; OS = Leclercia adecarboxylata OX=83655 GN=queA PE=3 SV=1
MRVADFSFELPESLIAHYPMPERSSCRLLSLDGPTGALTHGTFTDLLDKLNPGDLLVFNNTRVIPARLFGRKASGGKIEVLVERMLDDKRILAHIRASKAPKPGAELLLGDDESINATMVARHDALFEVQFNDERPVLDILNSIGHMPLPPYIDRPDEDADRELYQTVYSQKPGAVAAPTAGLHFDDPLLAKLREKGVELAFVTLHVGAGTFQPVRVDSIEDHIMHSEYAEVPQDVVDAVLAAKARGNRVIAVGTTSVRSLESAAQAAKNDLIEPFFGDTQIFIYPGYQYQVIDALVTNFHLPESTLIMLVSAFAGYQNTMNAYKAAVEQKYRFFSYGDAMFITYNPQALNERVGE

SEQ ID NO: 68025 - protein, 356 aa, Leclercia sp.; identical to SEQ ID NO: 68024
  REGION 1..356: note = tr|A0A2S4X1Q0|A0A2S4X1Q0_9ENTR S-adenosylmethionine:tRNA ribosyltransferase-isomerase; OS = Leclercia sp. LSNIH4 OX=1920117 GN=queA PE=3 SV=1

SEQ ID NO: 68026 - protein, 356 aa, Leclercia sp.
  REGION 1..356: note = tr|A0A0J6Q5L8|A0A0J6Q5L8_9ENTR S-adenosylmethionine:tRNA ribosyltransferase-isomerase; OS = Leclercia sp. LK8 OX=1628210 GN=queA PE=3 SV=1
MRVADFSFELPESLIAHYPMPERSSCRLLSLDGPTGELTHGTFTDLLDKLNPGDLLVFNNTRVIPARLFGRKASGGKIEVLVERMLDDKRILAHIRASKAPKPGAELLLGDDESIKATMTARHDALFEVEFNDERTVLDILNAIGHMPLPPYIERPDEEADRELYQTVYSQKPGAVAAPTAGLHFDEPLLEKLRAKGIEMAFVTLHVGAGTFQPVRVDSIEDHIMHSEYAEVPQDVVDAVLAAKARGSRVVAVGTTSVRSLESAAQAAKNDLIEPFFGDTQIFIYPGYQYKVIDALVTNFHLPESTLIMLVSAFAGYQHTMNAYKSAVEQKYRFFSYGDAMFITYNPQALNERVGE

SEQ ID NO: 68027 - protein, 351 aa, Leeuwenhoekiella aequorea
  REGION 1..351: note = tr|A0A4Q0PD43|A0A4Q0PD43_9FLAO S-adenosylmethionine:tRNA ribosyltransferase-isomerase; OS = Leeuwenhoekiella aequorea OX=283736 GN=queA PE=3 SV=1
MGMKLSHFNFDLPNELLAEYPAENRDEARLMVLNRKTKTIEHKLFKDIIDYFEPNDIMVLNNTKVFPARLYGNKEKTGARIEVFLLRELNSETRLWDVLVDPARKIRIGNKLYFGDDESLVAEVIDNTTSRGRTLRFLYDGSYQEFRNKLTELGETPLPKYIKREVEPEDAERYQTIFAKEEGAVAAPTAGLHFSKHLLKRLEIKGLDFAEVTLHVGLGTFSAVEVEDLSKHKMDSEEAYIKPEAVSIINKAISEKRKICAVGTTVMRTLESAVSSNHTLNEFGGWTNKFIFPPYDFSIANCMVTNFHTPKSTLMMMVSAFAGHDFMKQAYEEAVKEKYKFYTYGDAMLII

SEQ ID NO: 68028 - protein, 351 aa, Leeuwenhoekiella blandensis
  REGION 1..351: note = tr|A3XI59|A3XI59_LEEBM S-adenosylmethionine:tRNA ribosyltransferase-isomerase OS=Leeuwenhoekiella blandensis (strain CECT 7118 / CCUG 51940 / MED217); OX = 398720 GN=qu eA PE=3 SV=1
MGMKLSHFNFDLPKELLAEYPAENRDEARLMVLNRKTQTIEHKLFKDLIDYFEPNDVMVLNNTKVFPARLYGNKEKTGARIEVFLLRELNSETRLWDVLVDPARKIRIGNKLYFGDDESLVAEVIDNTTSRGRTLRFLYDGSYQEFRNKLTELGETPLPKYIKRDVEPEDAERYQTIFAKNEGAVAAPTAGLHFSKHLLKRLEIKGLNFAEVTLHVGLGTFSPVEVEDLSKHKMDSEEAYIDRTATSTINKAIGENRKVCAVGTTVMRALESSVSSNRTLNEFSGWTNKFIFPPYDFSIANCMITNFHTPKSTLMMMVSAFAGHDFMKEAYEQAVKEKYKFYSYGDAMLII

SEQ ID NO: 68029 - protein, 351 aa, Leeuwenhoekiella marinoflava
  REGION 1..351: note = tr|A0A4Q0PMW6|A0A4Q0PMW6_9FLAO S-adenosylmethionine:tRNA ribosyltransferase-isomerase; OS = Leeuwenhoekiella marinoflava OX=988 GN=queA PE=3 SV=1
MGMKLSHFNFDLPKELLAEYPAENRDEARLMVLNRKTQTIEHKLFKDIIDYFDADDVMVLNNTKVFPARLYGNKEKTGARIEVFLLRELNSETRLWDVLVDPARKIRIGNKLYFGDDESLVAEVIDNTTSRGRTLRFLYDGSYEEFRNKLTELGETPLPKYIKREVEPEDAERYQTIFAKEEGAVAAPTAGLHFSKHLLKRLEIKGLNFAEVTLHVGLGTFSPVEVEDLSKHKMDSEEAYIHAPATATINNAISENRRICAVGTTVMRALESSVSSNHTLNEFSGWTNKFIFPPYDFSIANCMITNFHTPKSTLMMMVSAFAGHEFMKEAYEEAVKEKYKFYSYGDAMLII

SEQ ID NO: 68030 - protein, 349 aa, unidentified
  source 1..349: note = Leeuwenhoekiella nanhaiensis
  REGION 1..349: note = tr|A0A2G1VX46|A0A2G1VX46_9FLAO S-adenosylmethionine:tRNA ribosyltransferase-isomerase; OS = Leeuwenhoekiella nanhaiensis OX=1655491 GN=queA PE=3; SV = 1
MKLSNFNFDLPKELLAEYPAENRDEARLMVLNRKTKTIEHKLFKDLIDYFEPEDVMVLNNTKVFPARLYGNKEKTGARIEVFLLRELNSETRLWDVLVDPARKIRIGNKLYFGDDESLVAEVIDNTTSRGRTLRFLYDGSYQEFRNKLTELGETPLPKYIKREVEPEDAERYQTIFAKEEGAVAAPTAGLHFSKHLLKRLEIKGINFAEVTLHVGLGTFSPVEVEDLSKHKMDSEEAFIQKPATEVINKAINENRKVCAVGTTVMRALESAVSSNHTLNEFSGWTNKFIFPPYDFSIANCMITNFHTPKSTLMMMVSAFAGHEFMKEAYELAVKEKYKFYSYGDAMLII

SEQ ID NO: 68031 - protein, 351 aa, Leeuwenhoekiella palythoae
  REGION 1..351: note = tr|A0A1M5YUS3|A0A1M5YUS3_9FLAO S-adenosylmethionine:tRNA ribosyltransferase-isomerase; OS = Leeuwenhoekiella palythoae OX=573501 GN=queA PE=3 SV=1
MGMKLSHFNFDLPKELLAEYPAENRDEARLMVLNRKTQTIEHKLFKDLIDYFEPNDVMVLNNTKVFPARLYGNKEKTGARIEVFLLRELNSETRLWDVLVDPARKIRIGNKLYFGDDESLVAEVIDNTTSRGRTLRFLYDGSYQEFRNKLTELGETPLPKYIKRDVEPEDAERYQTIFAKNEGAVAAPTAGLHFSKHLLKRLEIKGLNFAEVTLHVGLGTFSPVEVEDLSKHKMDSEEAYIDSSATTTINKAIGENRKVCAVGTTVMRALESSVSSNKTLNEFSGWTNKFIFPPYDFSIANCMITNFHTPKSTLMMMVSAFAGHDFMKEAYEQAVKEKYKFYSYGDAMLII

SEQ ID NO: 68032 - protein, 351 aa, unidentified
  source 1..351: note = Leeuwenhoekiella polynyae
  REGION 1..351: note = tr|A0A4Q0PFQ8|A0A4Q0PFQ8_9FLAO S-adenosylmethionine:tRNA ribosyltransferase-isomerase; OS = Leeuwenhoekiella polynyae OX=1550906 GN=queA PE=3 SV=1
MGMKLSQFNFDLPKELLAEYPAENRDEARLMVLNRKTQTIEHKLFKDLIDYFDADDVMVLNNTKVFPARLYGNKEKTGARIEVFLLRELNSETRLWDVLVDPARKIRIGNKLYFGDDESLVAEVIDNTTSRGRTLRFLYDGSYQEFRNKLTELGETPLPKYIKREVEPEDAERYQTIFAKEEGAVAAPTAGLHFSKHLLKRLEIKGLNFAEVTLHVGLGTFSPVEVEDLSKHKMDSEEAYIHAPATATINNAIKENRRICAVGTTVMRALESSVSSNHTLNEFSGWTNKFIFPPYDFSIANCMITNFHTPKSTLMMMVSAFAGHDFMKEAYEEAVKEKYKFYSYGDAMLII

SEQ ID NO: 68033 - protein, 349 aa, Leeuwenhoekiella sp.
  REGION 1..349: note = tr|A0A2D9E0L8|A0A2D9E0L8_9FLAO S-adenosylmethionine:tRNA ribosyltransferase-isomerase; OS = Leeuwenhoekiella sp. OX=1977054 GN=queA PE=3 SV=1
MKLSHFNFDLPKELLAEYPAENRDEARLMVLNRKTQTIEHKLFKDLIDYFEPNDVMVLNNTKVFPARLYGNKEKTGARIEVFLLRELNSETRLWDVLVDPARKIRIGNKLYFGDDESLVAEVIDNTTSRGRTLRFLYDGSYQEFRNKLTELGETPLPKYIKRDVEPEDAERYQTIFAKNEGAVAAPTAGLHFSKHLLKRLEIKGLNFAEVTLHVGLGTFSPVEVEDLSKHKMDSEEAYIDRTATSTINKAIGENRKVCAVGTTVMRALESSVSSNRTLNEFSGWTNKFIFPPYDFSIANCMITNFHTPKSTLMMMVSAFAGHDFMKEAYEQAVKEKYKFYSYGDAMLII

SEQ ID NO: 68034 - protein, 351 aa, Leeuwenhoekiella sp.
  REGION 1..351: note = tr|A0A4Q0NSB7|A0A4Q0NSB7_9FLAO S-adenosylmethionine:tRNA ribosyltransferase-isomerase; OS = Leeuwenhoekiella sp. R-50232 OX=2249425 GN=queA PE=3; SV = 1
MGMKLSHFNFDLPKELLAEYPAENRDEARLMVLNRKTQTIEHKLFKDLIDYFDADDVMVLNNTKVFPARLYGNKEKTGARIEVFLLRELNSETRLWDVLVDPARKIRIGNKLYFGDDESLVAEVIDNTTSRGRTLRFLYDGSYQEFRNKLTELGETPLPKYIKREVEPEDAERYQTIFAKEEGAVAAPTAGLHFSKHLLKRLEIKGLNFAEVTLHVGLGTFSPVEVEDLSKHKMDSEEAYIHAPATATINNAIKENRRICAVGTTVMRALESSVSSNHTLNEFSGWTNKFIFPPYDFSIANCMITNFHTPKSTLMMMVSAFAGHDFMKEAYEEAVKEKYKFYSYGDAMLII

SEQ ID NO: 68035 - protein, 338 aa, Legionella adelaidensis
  REGION 1..338: note = tr|A0A0W0R1P3|A0A0W0R1P3_9GAMM S-adenosylmethionine:tRNA ribosyltransferase-isomerase; OS = Legionella adelaidensis OX=45056 GN=queA PE=3 SV=1
MKKQDFYFELPSELIAQYPLENRSDSRLLVYNRKTETYEHKQFKSIIQYLEEGDLLVLNNTKVIPARLYGYKLTGGKVELLIERKLSEYSFLAHIKASKAPKIGNKICLKEGWFFEITNRHDDLFECKINERLETVLNEIGHIPLPPYITREDKKTDFDRYQTVYACHEGSVAAPTAGLHFDEELLKELRQKGVNIAYVTLHVGAGTFRPVRCENVQDHKMHSEFFSITPSLCDLIHQTKVKSKRVVAVGTTALRSLESAATASGTIEPYSGETDIFIYPGYQFKICDALITNFHLPESTLLMLVSAFIGYPQAMDLYRVAIENKYRFFSYGDASLLL

SEQ ID NO: 68036 - protein, 337 aa, Legionella anisa
  REGION 1..337: note = tr|A0A2Z3KR26|A0A2Z3KR26_9GAMM S-adenosylmethionine:tRNA ribosyltransferase-isomerase; OS = Legionella anisa OX=28082 GN=queA PE=3 SV=1
MNKQDFYFDLPPELIAQYPLENRSDSRLLTYNRQKGEYGHYQFREIADFLNPGDLLVMNDSKVIPARLYGHKTTGGKVELLVERITGEFTFLAHIKASKALKPGSIIKLEQNKEIEILDRKDDLFICKAAMDVLQLLNGIGHIPLPPYIERNDEILDQDRYQTVYAKYEGSVAAPTAGLHFDESVLSSLHSRGVAVAYLTLHVGAGTFRPVRCEHIKDHKMHSEQFTISPELCAAVHATKAAGNRVIAVGTTALRSLESAAQNGVLTACSRDTDIFIYPGYEFKICDGLMTNFHLPESTLLMLVSAFIGHKQAMMLYQEAIEKRYRFFSYGDTSLLL

SEQ ID NO: 68037 - protein, 337 aa, Legionella beliardensis
  REGION 1..337: note = tr|A0A378I2Y9|A0A378I2Y9_9GAMM S-adenosylmethionine:tRNA ribosyltransferase-isomerase; OS = Legionella beliardensis OX=91822 GN=queA PE=3 SV=1
MNKQDFYFELPPELIAQYPLAKRRDSRLLNYNRHTQTQAHYQFSQLSELLEPGDLLVMNDTKVIPARFFGLKETGGRVEFLVERVQDDHHFLAHIKASKAPRAGMTIFLDAKWQVKVMAKIDDLYQCFVSGDIETMLEEIGHIPLPPYITRTDETLDKERYQTIYAKHKGSVAAPTAGLHFDDYVLAQLQEKGIQLGYCTLHVGAGTFRPVRCENINDHKMHKEHYVITEELSELVKQTQSHGGRIIAVGTTAMRSLESATQDGYLKPGKHETDIFIYPGYTFKLCNGLITNFHLPESTLLMLVSAFIGYQQTMALYKEAIAKRYRFFSYGDACLLL

SEQ ID NO: 68038 - protein, 337 aa, Legionella birminghamensis
  REGION 1..337: note = tr|A0A378I844|A0A378I844_9GAMM S-adenosylmethionine:tRNA ribosyltransferase-isomerase; OS = Legionella birminghamensis OX=28083 GN=queA PE=3 SV=1
MKKQDFYFELPEELIAQYPLPNRSDSRLLFYSRKQEAYQHLQFKNLSELLEPNDLLVLNNTKVIPARFFGTKSTGGKVEFLVERRIGNNQFIAHIKASKTPKNGSLIQLEKNWQVEVLEKQDDLYLCRSLGELDRLLQDIGHIPLPLYIEREDEKADEERYQTVYAQHEGSVAAPTAGLHFDDFVISQLLEKGIRLAHVTLHVGAGTFRPVRCDDIRDHKMHSEQFELSEAVCEAVSETRRRGGRVIAVGTTAMRTLESAASKGSLKACQGETDIFIYPGYEFKVCDGLITNFHLPESTLLMLVSAFLGREQTMALYEEAIAKRYRFYSYGDATLLL

SEQ ID NO: 68039 - protein, 337 aa, Legionella brunensis
  REGION 1..337: note = tr|A0A0W0SEH2|A0A0W0SEH2_9GAMM S-adenosylmethionine:tRNA ribosyltransferase-isomerase; OS = Legionella brunensis OX=29422 GN=queA PE=3 SV=1
MKKQDFYFDLPQELIAQYPLPNRRDSRLLVYNRQTGTRAHHQFAGISQFLEAGDLLVMNNSKVIPARLFGHKASGGKVELLVERLLDEHTFLAHVKASKSPKAGTVIYLDKEWSLEVIAKLDDLYHCQISGNVEVMLQEIGHIPLPLYITRSDESLDSERYQTVYALHKGSVAAPTAGLHFDETLLQEIRTKGVNLAYSTLHVGAGTFRPVRCDDITEHKMHSEQFLISEELAQAVNATRAAGKRVIAVGTTALRSLESAAQEGVLQACHRDTDIFIYPGYRFQICDGLLTNFHLPESTLLMLVSAFIGHKQAMALYQEAIAEKYRFFSYGDASLLL

SEQ ID NO: 68040 - protein, 337 aa, Legionella busanensis
  REGION 1..337: note = tr|A0A378JKN4|A0A378JKN4_9GAMM S-adenosylmethionine:tRNA ribosyltransferase-isomerase; OS = Legionella busanensis OX=190655 GN=queA PE=3 SV=1
MKRQDFYFDLPEELIAQYPLENRRDSRLLFYNREEQIYNHHQFDHLPKLLKPGDLLVMNNTKVIPARFFGVKETGGRVEFLIERIQDDHHFLTHIKASKALRAGMTVFLSSNWQVQIIEKVNDLYRCQVEGDIDVMLEEIGHIPLPPYITRPDELKDKERYQTIYAEHKGSVAAPTAGLHFDEDILTELKNQGVNIGYCTLHVGAGTFRPVRCDHITDHKMHKEQYVISETLCELVNKTKSQGKRVIAVGSTSLRSLESAAQKGYLESGQGETDIFIYPGYKFKICDGLITNFHLPESTLLMLVAAFIGYEQMMALYKEAIAKKYRFFSYGDACLLL

SEQ ID NO: 68041 - protein, 337 aa, Legionella cherrii
  REGION 1..337: note = tr|A0A0W0S7F3|A0A0W0S7F3_9GAMM S-adenosylmethionine:tRNA ribosyltransferase-isomerase; OS = Legionella cherrii OX=28084 GN=queA PE=3 SV=1
MNKQDFYFDLPPELIAQYPLPNRSDSRLLIYDRQKGDYGHYQFREIADFLNPGDLLVMNDSKVIPARLHGQKTTGGKVELLVERITGEFTFLAHIKASKSLKSGSIIKLEQNKEIEVLDRQDDLFTCKADMDVLTLLNGIGHIPLPPYITRNDEHLDQDRYQTVYAKHEGSVAAPTAGLHFDESVLSSLHSRGVAVAYLTLHVGAGTFRPVRCDNIKDHKMHSERFTISPELCAAVHATKAAGNRVIAVGTTAMRSLESAVQNGTLTPCSRDTDIFIYPGYEFKICDGLMTNFHLPESTLLMLVSAFIGHKQAMMLYQEAIEKKYRFFSYGDTSLLL

SEQ ID NO: 68042 - protein, 337 aa, Legionella cincinnatiensis
  REGION 1..337: note = tr|A0A378ILT0|A0A378ILT0_9GAMM S-adenosylmethionine:tRNA ribosyltransferase-isomerase; OS = Legionella cincinnatiensis OX=28085 GN=queA PE=3 SV=1
MNKEDFYFDLPPELIAQYPLANRSDSRLLVYDRKIGEYGHHQFQKIADFLKPGDLLVMNNSKVIPARLYGHKTTGGKVELLVERITGELTFLAHIKASKALKAGSIIQLEQNKHLEILDRQDDLFVCKADMDVLELLNGVGHIPLPPYIARNDETLDKDRYQTIYAKYEGSVAAPTAGLHFDEAVLSNIRSRGISVAYLTLHVGAGTFRPVRCDNIKDHKMHHEHFTISAELCAAIHATKAAGNRVIAVGTTALRSLESAAQNGVLTPCSRDTDIFIYPGYEFKICDGLMTNFHLPESTLLMLVSAFIGHKQAMKLYQEAIEKRYRFFSYGDTSLLL

SEQ ID NO: 68043 - protein, 338 aa, unidentified
  source 1..338: note = Legionella clemsonensis
  REGION 1..338: note = tr|A0A222P410|A0A222P410_9GAMM S-adenosylmethionine:tRNA ribosyltransferase-isomerase; OS = Legionella clemsonensis OX=1867846 GN=queA PE=3 SV=1
MKKQDFYFDLPEELIAQYPLPNRSDSRLLVYNRQTERSSHHQFKEITEFLEEGDLLVMNNSKVIPARLYGKKVSGGKVELLVERLLEGESFLAHIKASKAPKAGSSIHLDKDWIIEVIAKLDDLYHCRVVVGDVERMLQEIGHIPLPLYINRPDEPLDLQRYQTVYALHNGSVAAPTAGLHFDERLLKEIKNKGVTLGYSTLHVGAGTFRPVRCDNIKEHKMHSEQFTISRELAEQVNATRASGRRVIAVGTTALRSLESAAHEGKLQACQRDTDIFIYPGYQFQICDGLLTNFHLPESTLLMLVSAFIGHAQAMALYKEAIAEKYRFFSYGDASLLL

SEQ ID NO: 68044 - protein, 337 aa, unidentified
  source 1..337: note = Legionella donaldsonii
  REGION 1..337: note = tr|A0A378J390|A0A378J390_9GAMM S-adenosylmethionine:tRNA ribosyltransferase-isomerase; OS = Legionella donaldsonii OX=45060 GN=queA PE=3 SV=1
MNKQDFYFDLPEELIAQYPLAKRSDSRLLIYNRKTGCSAHHQFKDIVQFFQPGDLLVMNNSKVIPARLYGRKESGGKIELLIERLQGNNSFLAHIKASKSPKAGTLIYLDNDWRVEVVSKQDDLYHCQVLGDVEMMLEQIGHMPLPPYITRADDTMDSERYQTVYAKYKGSVAAPTAGLHFDEELLQQLQGKGINIAYSTLHVGAGTFRPVRCDSISEHKMHSEQFTVTEALCQAVNETRAAGKRVIAVGTTALRSLESAAEGGRLKPCSRDTDIFIYPGYQFQICDGLITNFHLPESTLLMLVSAFIGHAQAMALYQEAIAQNYRFFSYGDASLLL

SEQ ID NO: 68045 - protein, 338 aa, Legionella drancourtii
  REGION 1..338: note = tr|G9EMD0|G9EMD0_9GAMM S-adenosylmethionine:tRNA ribosyltransferase-isomerase OS=Legionella drancourtii LLAP12 OX=658187 GN=queA PE=3 SV=1
MNKQDFYFDLPSELIAQYPLANRSDSRLLTYNRHIGEYGHHQFRDIADFLKPGDLLVMNDSKVIPARLYGHKATGGKVELLVERITGEFTFLAHIKASKALKAGALIYLEQDRQLEVLERHDDLFVCKSNIDVLQLLHGVGHMPLPPYITRSDEVMDEDRYQTVYAKYEGSVAAPTAGLHFDEAVLASLHARGVDIAHVTLHVGAGTFRPVRCENIKEHKMHSEHFTLNPELCSAVHATKAAGNRVIAVGTTALRSLESAAQEGGVLTPCSRDTNIFIYPGYKFKICDGLMTNFHLPESTLLMLVSAFIGYKEAMMLYQEAIAKGYRFFSYGDTSLLL

SEQ ID NO: 68046 - protein, 337 aa, Legionella drozanskii
  REGION 1..337: note = tr|A0A0W0SWX0|A0A0W0SWX0_9GAMM S-adenosylmethionine:tRNA ribosyltransferase-isomerase; OS = Legionella drozanskii LLAP-1 OX=1212489 GN=queA PE=3; SV = 1
MNKQDFYFDLPEELIAQYPLPNRSDSRLFVFNRQTAQYNHQQFKDITDYFQPGDLLVMNNSKVIPARLYGQKASGGKVELLVERLYGDDSFLAHIKASKAPKAGSLIRLANDWQIEVLQKLDDLYHCKVLGDVDVMLNEIGHIPLPLYINRPDESLDMDRYQTVYAMHKGSVAAPTAGLHFDEALIQQLKEKGVNIAYSTLHVGAGTFRPVRSDSIHEHKMHSEHFTVSEELCQAVNSTRAAGKRVIAVGTTSMRSLESAAENGVLKPCSRDTNIFIYPGYQFQICNGLITNFHLPESTLLMLVSAFIGHAQAMALYKEAIALGYRFFSYGDASLLL

SEQ ID NO: 68047 - protein, 337 aa, Legionella erythra
  REGION 1..337: note = tr|A0A0W0TUV6|A0A0W0TUV6_LEGER S-adenosylmethionine:tRNA ribosyltransferase-isomerase; OS = Legionella erythra OX=448 GN=queA PE=3 SV=1
MYKHDFYFDLPEELIAQYPLPGRSDSRLLVYHRGDEQYHHQQFKQLPDFLNEGDLLVMNNSKVIPARFFGRKPSGGQVEFLIERLKPDNQFLAHIKASKTPKAEMIIDLANGWQVQILAKLDDLYHCQALGDLETMLADIGHIPLPPYIARHDEKADFERYQTVYALHKGSVAAPTAGLHFDEPLMATLQQKGVRIAYSTLHVGAGTFRPVRCDVIEDHKMHSEQLTISEELAAAVNSTRAAGKRVIAVGTTALRSLESAMVDGLLQPCVKETDIFIYPGYEFKVCDGLITNFHLPESTLLMLVSAFIGHGRAMDLYQEAIARRYRFFSYGDATLLL

SEQ ID NO: 68048 - protein, 349 aa, Legionella fallonii
  REGION 1..349: note = tr|A0A098G6I2|A0A098G6I2_9GAMM S-adenosylmethionine:tRNA ribosyltransferase-isomerase; OS = Legionella fallonii LLAP-10 OX=1212491 GN=queA PE=3 SV=1
MYNAINLFSGCIMNKQDFYFDLPPELIAQYPLDSRSDSRLLCYNRQKKEHGHYQFKDIVNFLEPGDLLVMNDTRVIPARLYGQKLTGGKVELLVERITGEFTFLAHIKASKALRPGGIIQLEQGNQLEVIDRRDDLFVCKTSISVLELLNRLGHIPLPPYIARQDESLDADRYQTVYAKYAGSVAAPTAGLHFDEAVLSSLNAKGINIAYVTLHVGAGTFRPVRCDNIKEHKMHSEHFIISPELVNAVKATKAAGKRVIAVGTTALRSLESAVNAGELTACSRDTDIFIYPGYQFKICDGLMTNFHLPESTLLMLVSAFIGHQEAMDLYQEAIDKKYRFFSYGDTSLLL

SEQ ID NO: 68049 - protein, 337 aa, Legionella feeleii
  REGION 1..337: note = tr|A0A378IX52|A0A378IX52_9GAMM S-adenosylmethionine:tRNA ribosyltransferase-isomerase; OS = Legionella feeleii OX=453 GN=queA PE=3 SV=1
MNKQDFYFDLPQELIAQHPLAKRSDSRLLIYNRETGSSAHHQFKDIVQFLQPGDLLVMNNSKVIPARLYGRKESGGKIELLIERLQGDNSFLAHIKASKSPKAGTLIYLDNDWRIEVLSKQDDLYHCQVLGDVEMMLEQIGHMPLPPYITRADDTMDSERYQTVYAKYKGSVAAPTAGLHFDEELLQQLQGKGINIAYSTLHVGAGTFRPVRCEAISEHKMHSEQFTVTEALCQAVNETREAGKRVIAVGTTALRSLESAAEGGRLKPCSRDTDIFIYPGYQFQICDGLITNFHLPESTLLMLVSAFIGHAQAMALYQEAIAQNYRFFSYGDASLLL

SEQ ID NO: 68050 - protein, 337 aa, Legionella feeleii
  REGION 1..337: note = tr|A0A0W0TUX9|A0A0W0TUX9_9GAMM S-adenosylmethionine:tRNA ribosyltransferase-isomerase; OS = Legionella feeleii OX=453 GN=queA PE=3 SV=1
MNKQDFYFDLPQELIAQHPLAKRSDSRLLIYNRETGSSAHHQFKDIVQFLQPGDLLVMNNSKVIPARLYGRKESGGKIELLIERLQGDNSFLAHIKASKSPKAGTLIYLDNDWRIEVLSKQDDLYHCQVLGDVEMMLEQIGHMPLPPYITRADDTMDSERYQTVYAKYKGSVAAPTAGLHFDEELLQQLQGKGINIAYSTLHVGAGTFRPVRCEAISEHKMHSEQFTVTEALCQAVNGTREAGKRVIAVGTTALRSLESAAEGGRLKPCSRDTDIFIYPGYQFQICDGLITNFHLPESTLLMLVSAFIGHAQAMALYQEAIAQNYRFFSYGDASLLL

SEQ ID NO: 68051 - protein, 337 aa, Legionella geestiana
  REGION 1..337: note = tr|A0A0W0TWX2|A0A0W0TWX2_9GAMM S-adenosylmethionine:tRNA ribosyltransferase-isomerase; OS = Legionella geestiana OX=45065 GN=queA PE=3 SV=1
MQTRDFHFELPEELIAQYPLPNRTDSRLLCYERATGTTTHTMFSNLLERLVPGDVLVLNDSRVIPARMFGQKASGGRVEILLERITGEDCFLAHIRGGKSLSQGARLTLEKGSVLEVTGREGELFCCRCTMDVMELLHLEGHIPLPPYIHRPDESGDFSRYQTVYARVNGSVAAPTAGLHFDEALLASLRAGGVEIGHVTLHVGAGTFQPVRSENIHEHVMHREQFEVSEALCDTILRAKAEGRRVIAVGTTAMRSLESAARDGVLKPMRGDTDIFIFPGFQFNVCDGLLTNFHLPQSTLLMLVSAFIGHREALALYEEAVRERYRFFSYGDTSLLL

SEQ ID NO: 68052 - protein, 338 aa, Legionella gratiana
  REGION 1..338: note = tr|A0A378JEL0|A0A378JEL0_9GAMM S-adenosylmethionine:tRNA ribosyltransferase-isomerase; OS = Legionella gratiana OX=45066 GN=queA PE=3 SV=1
MNKEDFYFDLPTELIAQYPLVNRSDSRLLVYDRNIGEYGHYQFREIADFLKPGDLLVMNDSKVIPARLYGHKPTGGKVELLVERITGELTFLAHIKASKALRAGSIIHLAQNKEIEILDRQDDLFVCKADTEVLELLNGVGHIPLPPYIARNDETLDKDRYQTIYAKYDGSVAAPTAGLHFDEAVLSSIRSRGISVAYVTLHVGAGTFRPVRCDNIKDHKMHSEHFTLSAELCAAVQATKAAGNRVIAIGTTALRSLESAAQQNGVLTPCSRDTDIFIYPGYEFKICDGLMTNFHLPESTLLMLVSAFIGHKQAMKLYEEAIEKGYRFFSYGDTSLLL

SEQ ID NO: 68053 - protein, 337 aa, Legionella hackeliae
  REGION 1..337: note = tr|A0A0A8URD7|A0A0A8URD7_LEGHA S-adenosylmethionine:tRNA ribosyltransferase-isomerase; OS = Legionella hackeliae OX=449 GN=queA PE=3 SV=1
MKKQDFYFDLPEELIAQYPLPNRSDSRLLVHHRQTQSNSHHQFKGISQFLEAGDLLVMNNSKVIPARFYGQKASGGKVELLVERLQGDQSFLAHIKASKAPKAGSIIYLDKGWSIEVIAKHDELYQCQVLGDMDAMLQEIGHIPLPLYITRPDERLDLDRYQTVYALHKGSVAAPTAGLHFDEAILEELKEKGVNIGFSTLHVGAGTFRPVRCDDIKEHKMHSEQFTITKELSEMVNATRAAGKRVIAVGTTALRSLESAACDGLLHPCQRDTNIFIYPGYQFQICDGLLTNFHLPESTLLMLVSAFIGHSQAMALYQEAIAEKYRFFSYGDASLLL

SEQ ID NO: 68054 - protein, 338 aa, Legionella israelensis
  REGION 1..338: note = tr|A0A516N059|A0A516N059_9GAMM S-adenosylmethionine:tRNA ribosyltransferase-isomerase; OS = Legionella israelensis OX=454 GN=queA PE=3 SV=1
MKKQDFYFDLPPELIAQYPLSNRSDSRLLTYSRATGEYGHHIFKDLPDFLRTGDVLIMNDSKVIPARLYGHKTTGGKIELLVERIVDERTFLAHIKTSKAPKPGSQIRLDHDFIIEIAGRQDDLFVCVSEKEVFDVLYQVGHIPLPPYITRREELLDEQRYQTIYARKEGSVAAPTAGLHFDESIISRLIAKGIHIGYLTLHVGAGTFRPVRCENIKEHKMHSEHYSIDAELCSLVNQTRARGGRIIAVGTTAMRTLESAADDNGLLHPRYGETDIFIYPGYKFKICNGLITNFHLPESTLLMLVSAFIGHKTAMALYKEAIEKQYRFFSYGDTSLLL

SEQ ID NO: 68055 - protein, 338 aa, Legionella israelensis
  REGION 1..338: note = tr|A0A0W0VY26|A0A0W0VY26_9GAMM S-adenosylmethionine:tRNA ribosyltransferase-isomerase; OS = Legionella israelensis OX=454 GN=queA PE=3 SV=1
MKKQDFYFDLPPELIAQYPLSNRSDSRLLTYSRATGEYGHHIFKDLPDFLRTGDVLIMNDSKVIPARLYGHKTTGGKIELLVERIVDERTFLAHIKTSKAPKPGSQIRLDHDFIIEIAGRQDDLFVCVSEKEVFEVLYQVGHIPLPPYITRREELLDEQRYQTIYARKEGSVAAPTAGLHFDESIISRLIAKGIHIGYLTLHVGAGTFRPVRCENIKEHKMHSEHYSIDAELCSLVNQTRARGGRIIAVGTTAMRTLESAADDNGLLHPRYGETDIFIYPGYKFKICNGLITNFHLPESTLLMLVSAFIGHKTAMALYKEAIEKQYRFFSYGDTSLLL

SEQ ID NO: 68056 - protein, 337 aa, Legionella jamestowniensis
  REGION 1..337: note = tr|A0A0W0UHG8|A0A0W0UHG8_9GAMM S-adenosylmethionine:tRNA ribosyltransferase-isomerase; OS = Legionella jamestowniensis OX=455 GN=queA PE=3 SV=1
MKKQDFYFDLPEELIAQYPLPNRSDSRLLVYNRQTGCRSHHHFKGIAEFLEAGDLLVMNNSKVIPARLFGKKASGGKVELLVERLQGEETFLAHIKASKAPKAGSLIHLDKGWIVEVIAKLDDLYHCRAVGEVETMLQEIGHIPLPLYINRPDERLDLQRYQTVYALHNGSVAAPTAGLHFDEVLLKGIKEKGVNLGYSTLHVGAGTFRPVRCDNIQEHKMHSEQFTISKELAEQVNATRASGKRVIAVGTTALRSLESAAYEGKLQACQGDTSIFIYPGYRFQICDGLLTNFHLPESTLLMLVAAFIGHAQAMALYKEAIAEKYRFFSYGDASLLL

SEQ ID NO: 68057 - protein, 337 aa, Legionella jordanis
  REGION 1..337: note = tr|A0A0W0VE84|A0A0W0VE84_9GAMM S-adenosylmethionine:tRNA ribosyltransferase-isomerase; OS = Legionella jordanis OX=456 GN=queA PE=3 SV=1
MKKQDFYFDLPEELIAQYPLANRTDSRLLAYNRQTGEYSHQQFKDLGQFLRPGDLLVMNNTKVIPARLYGHKGSGGKIELLIERFLENNSFLAHIKASKAPKAGSILYLDKGWQIEVLAKEEDLYRCRTLGDTDSMLQDIGHIPLPLYITRPDESLDQDRYQTVYALHQGSVAAPTAGLHFDEVLLKKLNEQGINLAYSTLHVGAGTFRPVRCDNIKEHKMHQEQFSISDELALAVNEAKAAGHRVIAVGTTALRSLESAAEGNKLIPCEGDTDIFIYPGYEFKICDGLITNFHLPESTLVMLVSAFIGHAETMALYQEAIARRYRFFSYGDATLLL

SEQ ID NO: 68058 - protein, 337 aa, Legionella lansingensis
  REGION 1..337: note = tr|A0A0W0VTS9|A0A0W0VTS9_9GAMM S-adenosylmethionine:tRNA ribosyltransferase-isomerase; OS = Legionella lansingensis OX=45067 GN=queA PE=3 SV=1
MKKQDFYFDLPQELIAQYPLANRSDSRLLVYDRRTGERNHHQFREITQFFRAGDLLVMNNTKVIPARLYGQKASGGKVELLIERFQGDNLLLAHMKASKSPQPGTLIFLDKGWKIEVISKNDDLYSCRVLGDAETMLQEIGHVPLPPYICRADESLDLDRYQTVYAMHDGSVAAPTAGLHFDEFLLQQLQEQGIHLAYLTLHVGAGTFRPVRCDNIKEHKMHHERFSISEELAEAVNSTRAKGHRVIAVGTTTLRSLESAAQGGILKAYQGDTDIFIYPGYQFQICDGLLTNFHLPESTLLMLVSAFIGHPEAMALYQEAIAQRYRFFSYGDASLLL

SEQ ID NO: 68059 - protein, 337 aa, Legionella londiniensis
  REGION 1..337: note = tr|A0A0W0VNU3|A0A0W0VNU3_9GAMM S-adenosylmethionine:tRNA ribosyltransferase-isomerase; OS = Legionella londiniensis OX=45068 GN=queA PE=3 SV=1
MKRQDFYFELPEELIAQYPLPNRSDSRLLAYERQKGTIAHLGFSAITDLLEPGDLLVMNNSMVIPARLYGQKVSGGKVELLVERLIGEDCFLAHIKASKPPKAGSIVTLQDKWQLEVLSRDDDLFHCKVNGKAEEMLEQIGHIPLPPYISRQDEMLDKSRYQTVYAQHKGSVAAPTAGLHFDDQLLGVLKNKGIKIGFSTLHVGAGTFRPVRSIEIKDHKMHREYFSVAPELCDLVNQTKAKKKRVIAVGTTALRSLESAAENGILYPASRDTDIFIYPGYQFQICDGLITNFHLPESTLLMLVSAFIGYKETMNLYRIAVEERYRFFSYGDACLLL

SEQ ID NO: 68060 - protein, 337 aa, Legionella longbeachae
  REGION 1..337: note = tr|A0A378KZD7|A0A378KZD7_LEGLO S-adenosylmethionine:tRNA ribosyltransferase-isomerase; OS = Legionella longbeachae OX=450 GN=queA PE=3 SV=1
MKRQDFNFELPPELIAQYPLSNRSDSRLLTYSRQSECHEHHQFKSLADFLEPGDLLVMNDSKVIPARLYGHKSSGGKVECLIERLTNDDCFWAHIKASKAPKPGSRIFLDQGWSIEIIGRDDDLFQCKASGNVAVMLEEIGHIPLPPYIQRSDESLDASRYQTVYARYKGSVAAPTAGLHFDESLLAAIQQKGINIAYSTLHVGAGTFRPLRCEDIKDHKMHSEFFTVSEPLCAAVNATHAAGNRVIAVGTTALRSLESAAQQGKLEPCSRDTNIFIYPGYQFQICDGLITNFHLPESTLLMLVAAFIGYEQAMKLYQIAIAHRYRFFSYGDASLLL

SEQ ID NO: 68061 - protein, 337 aa, Legionella longbeachae
  REGION 1..337: note = tr|D3HQU0|D3HQU0_LEGLN S-adenosylmethionine:tRNA ribosyltransferase-isomerase OS=Legionella longbeachae serogroup 1 (strain NSW150) OX=661367 GN=queA PE=3 SV=1
MNKEDFYFDLPHELIAQYPLANRSDSRLLVYDRKIGEYGHHQFREIADFLKSGDLLVMNDSKVIPARLYGHKTTGGKVELLVERITGEFTFLAHIKASKALKAGSIIQLEQNKHIEILDRQDDLFVCKANIEVLELLNGVGHIPLPPYIARNDETLDIDRYQTIYAKHAGSVAAPTAGLHFDEAVLANIRSRGISVGYVTLHVGAGTFRPVRCDNIEDHKMHREHFTISAELCAAIHATKAAGNRVIAVGTTALRSLESAVQNGALTPCSRDTDIFIYPGYEFKICDGLMTNFHLPESTLLMLVSAFIGHKQAMKLYHEAIEKRYRFFSYGDTSLLL

SEQ ID NO: 68062 - protein, 337 aa, unidentified
  source 1..337: note = Legionella maceachernii
  REGION 1..337: note = tr|A0A0W0W8L5|A0A0W0W8L5_9GAMM S-adenosylmethionine:tRNA ribosyltransferase-isomerase; OS = Legionella maceachernii OX=466 GN=queA PE=3 SV=1
MNKQDFYFDLPEELIAQYPLPNRSDSRLLAFDRQTGLCTHRQFKDIIDFLQPGDLLVMNNSKVIPARLHGHKASGGKVELLVERLLAEDSFLAHIKASKAPKADTIIHLNKDWQLKVICKVDDLYHCRVLGNAEQMLEEIGHIPLPLYINRPDESVDAERYQTVYALHKGSVAAPTAGLHFDQALLQRLKNKGVNIAYSTLHVGAGTFRPVRTDAIKDHKMHSEQFTVSEALCQIVNETRAAGKRVIAVGTTSMRSLESAAENGMLKPCSRDTDIFIYPGYQFQICDGLITNFHLPESTLLMLVAAFIGHAQTMMLYQEAIAQKYRFFSYGDASLLL

SEQ ID NO: 68063 - protein, 337 aa, unidentified
  source 1..337: note = Legionella massiliensis
  REGION 1..337: note = tr|A0A078KZ95|A0A078KZ95_9GAMM S-adenosylmethionine:tRNA ribosyltransferase-isomerase; OS = Legionella massiliensis OX=1034943 GN=queA PE=3 SV=1
MNKQDFYFDLPEELIAQYPLAKRSDSRLLVYSRQAETTNHHQFKDITDFLEAGDLLVLNDSKVIPARLYGFKASGGKIELLVERLYGDNSFLGHIKASKAPKAGAILQLNDGWQVKVLQKVDDLYHCQVLGDAEQMLEQIGHIPLPLYITRPDEKTDLERYQTVYAKHKGSVAAPTAGLHFEQELLEKIRAKGVRIAYSTLHVGAGTFRPVRCDAIKDHKMHSERFSVSDELCEAVNNTRAAGKRVIAVGTTALRCLESAAAEGILKPCNRDTDIFIYPGYQFQICDGLITNFHLPESTLLMLVSAFVGHKQAMTLYQEAITQRYRFYSYGDASLLI

SEQ ID NO: 68064 - protein, 337 aa, Legionella moravica
  REGION 1..337: note = tr|A0A378JYV7|A0A378JYV7_9GAMM S-adenosylmethionine:tRNA ribosyltransferase-isomerase; OS = Legionella moravica OX=39962 GN=queA PE=3 SV=1
MNKHDFYFDLPEELIAQYPLPQRSDSRLLTYSRETGEYGHYQFRDIADFLNPGDLLVMNNSKVIPARLYGHKLTGGKVELLVERITGPNTFLAHIKTSKALKAGGIIQLEQGNQLEILDRNDDLFICKSNCETLELLNTQGHIPLPPYISRNDESLDEERYQTIYAKYEGSVAAPTAGLHFDDAVISSLQSRGVNIAYVTLHVGAGTFRPVRCDNIKEHKMHSEQYTLTPELCDAVKATKAAGNRVIAVGTTTLRSLESAAREGELTPCTRDTDIFIYPGYEFKICDGLMTNFHLPESTLLMLVSAFIGHQQAMDLYQEAINKRYRFFSYGDTSLLV

SEQ ID NO: 68065 - protein, 337 aa, Legionella nautarum
  REGION 1..337: note = tr|A0A0W0WU20|A0A0W0WU20_9GAMM S-adenosylmethionine:tRNA ribosyltransferase-isomerase; OS = Legionella nautarum OX=45070 GN=queA PE=3 SV=1
MNKQDFYFDLPEKLIAQYPLPNRSDSRLFVFNRQTGQYNHHQFKEISEFFQPGDLLVMNNSKVIPARLYGQKQSGGKVELLVERLNGDDSFLAHIKASKAPKAGSLILLAKDWQIEVLQKLDDLYHCKVLGDVDLMLNEIGHIPLPLYITRPDESLDTDRYQTVYARHKGSVAAPTAGLHFDEALIKQLKEKGVNIAYSTLHVGAGTFRPVRSDSIHEHKMHSEQFIVSEELCQAVNSTRAAGKRVIAVGTTSMRSLESAAENGLLKPCNRDTNIFIYPGYQFQICDGLITNFHLPESTLLMLVSAFIGHAQAMALYQEAIALGYRFFSYGDASLLL

SEQ ID NO: 68066 - protein, 337 aa, unidentified
  source 1..337: note = Legionella norrlandica
  REGION 1..337: note = tr|A0A0A2SQI3|A0A0A2SQI3_9GAMM S-adenosylmethionine:tRNA ribosyltransferase-isomerase; OS = Legionella norrlandica OX=1498499 GN=queA PE=3 SV=1
MNKQDFYFDLPTELVAQYPLANRSDSRLLIYRRETEEYGHHQFKEIADFLQPGDLLVMNDSKVMPARLYGHKSTGGKVELLVERVTGDFTFLAHIKASKSLKAGSRIYLDTEKQLEVLERQDDLFLCKASEHVLELLNRLGHIPLPPYITREDELLDKDRYQTVYAKYAGSVAAPTAGLHFDEAVLSSVRARGVNIAYVTLHVGAGTFRPVRCERIQDHKMHSEHFTVSPELCDAVHATKSTGNRVIAVGTTALRSLESAVIDGVLTPCSRNTDIFIYPGYQFKICDGLMTNFHLPESSLMMLVSALIGHKQTMALYQEAINKKYRFFSYGDASLLL

SEQ ID NO: 68067 - protein, 337 aa, Legionella oakridgensis; identical to SEQ ID NO: 68060
  REGION 1..337: note = tr|A0A0W0WZN3|A0A0W0WZN3_9GAMM S-adenosylmethionine:tRNA ribosyltransferase-isomerase; OS = Legionella oakridgensis OX=29423 GN=queA PE=3 SV=1

SEQ ID NO: 68068 - protein, 337 aa, Legionella oakridgensis; identical to SEQ ID NO: 68060
  REGION 1..337: note = tr|W0B7U6|W0B7U6_9GAMM S-adenosylmethionine:tRNA ribosyltransferase-isomerase OS=Legionella oakridgensis ATCC 33761 = DSM 21215 OX=1268635 GN=queA PE=3 SV=1
